(19) United States
(12) Patent Application Publication
(10) Pub. No.: US 2025/0092160 A1
(43) Pub. Date: Mar. 20, 2025

(54) T CELL ENGAGERS

(71) Applicant: Biomolecular Holdings LLC, Burlingame, CA (US)

(72) Inventor: Daniel J. Capon, Hillsborough, CA (US)

(73) Assignee: Biomolecular Holdings LLC, Burlingame, CA (US)

(21) Appl. No.: 18/949,972

(22) Filed: Nov. 15, 2024

Related U.S. Application Data
(63) Continuation-in-part of application No. 18/188,412, filed on Mar. 22, 2023.
Application No. 18/188,412 is a continuation-in-part of application No. 18/153,840, filed on Jan. 12, 2023.
(60) Provisional application No. 63/322,594, filed on Mar. 22, 2022.
(60) Provisional application No. 63/434,866, filed on Dec. 22, 2022.
(60) Provisional application No. 63/298,999, filed on Jan. 12, 2022.

(51) Int. Cl. C07K 16/46; A61K 39/00

(52) U.S. Cl. CPC C07K 16/468; A61K 2039/505; C07K 2317/31; C07K 2317/35; C07K 2317/52; C07K 2317/55; C07K 2317/732; C07K 2317/76; C07K 2317/92; C07K 2317/94

(57) ABSTRACT

This invention provides a tetrahedral antibody comprising a first, second, third, fourth, fifth, and sixth domain, wherein each of the first and second domains are an Fc domain of an IgG antibody, and either (i) the third and fourth domains comprise the V region of a Fab domain of SP34 or a variant thereof with at least 95% identity to said V region and the fifth and sixth domains comprise the V region of a Fab domain of FMC59 or tafasitamab or a variant thereof with at least 95% identity to said V region; or (ii) the third and fourth domains comprise the V region of a Fab domain of FMC59 or tafasitamab or a variant thereof with at least 95% identity to said V region and the fifth and sixth domains comprise the V region of a Fab domain of SP34 or a variant thereof with at least 95% identity to said V region.

[0001] This application is a continuation-in-part of U.S. patent application Ser. No. 18/188,412, filed Mar. 22, 2023, which (a) is a continuation-in-part of U.S. patent application Ser. No. 18/153,840, filed Jan. 12, 2023, which claims benefit of U.S. Provisional Application No. 63/298,999, filed Jan. 12, 2022, and (b) claims benefit of (i) U.S. Provisional Application No. 63/322,594 filed Mar. 22, 2022, and (ii) U.S. Provisional Application No. 63/434,866, filed Dec. 22, 2022, the contents of each of which are hereby incorporated by reference.

[0002] Throughout this application, various publications are referenced, including referenced in parenthesis. The disclosures of all publications mentioned in this application in their entireties are hereby incorporated by reference into this application in order to provide additional description of the art to which this invention pertains and of the features in the art which can be employed with this invention.

### REFERENCE TO SEQUENCE LISTING

[0003] This application incorporates-by-reference nucleotide sequences which are present in the file named “241115_91300-I_SequenceListing.xml”, which is 11,598,101 bytes in size, and which was created on Nov. 15, 2024 in the IBM-PC machine format, having an operating system compatibility with MS-Windows, which is contained in the xml file filed Nov. 15, 2024 as part of this application.

### BACKGROUND OF THE INVENTION

[0004] Antibodies are a diverse family of vertebrate proteins comprising a Y-shaped structure consisting of two antigen binding (Fab) domains and one effector cell binding (Fc) domain. The arrangement of these three domains around a central hinge region bears a striking resemblance to trigonal molecular geometries in which a central atom is bonded to three peripheral atoms arranged at the corners of a triangle. Such a planar configuration of binding domains is sufficient for antibodies to carry out their normal functions. As such, efforts to-date to engineer antibodies and antibody-like molecules have also generally adopted the natural planar configuration of antibody binding domains. However, when the binding domains of an engineered antibody and antibody-like molecule are intended to engage multiple targets, a planar configuration of binding domains is not ideally suited to permit the simultaneous engaging of multiple targets by the binding domains.

### SUMMARY OF THE INVENTION

[0005] A tetrahedral antibody comprising a first, second, third, fourth, fifth, sixth domain, wherein:
[0006] a) each of the first and second domains are an Fc domain of an IgG antibody and comprise:
   [0007] i) a first polypeptide chain comprising a first N-terminus and a first C-terminus of the domain,
   [0008] ii) a second polypeptide chain comprising a second N-terminus and a second C-terminus of the domain, and
   [0009] iii) either:
      [0010] (1) L234A, L235A, and G236R mutations; or
      [0011] (2) L234S, L235T, and G236R mutations;
[0012] b) the first domain and the second domain are joined to each other by a non-covalent linkage between a first collectrin-like domain polypeptide attached by a peptide bond or via a peptide linker to the first N-terminus of the first domain, and a second collectrin-like domain polypeptide attached by a peptide bond or via a peptide linker to the first N-terminus of the second domain;
[0013] c) the third domain is a Fab domain which is attached at its C-terminus by a peptide bond or via a peptide linker to the N-terminus of the first collectrin-like domain polypeptide;
[0014] d) the fourth domain is a Fab domain which is attached at its C-terminus by a peptide bond or via a peptide linker to the N-terminus of the second collectrin-like domain polypeptide;
[0015] e) the fifth domain is a Fab domain which is attached at its C-terminus by a peptide bond or via a peptide linker to the second N-terminus of the first domain;
[0016] f) the sixth domain is a Fab domain which is attached at its C-terminus by a peptide bond or via a peptide linker to the second N-terminus of the second domain; and
[0017] g) either:
   [0018] i) the third and fourth domains comprise the V region of a Fab domain of SP34 or a variant thereof with at least 95% identity to said V region and the fifth and sixth domains comprise the V region of a Fab domain of FMC59 or tafasitamab or a variant thereof with at least 95% identity to said V region; or
   [0019] ii) the third and fourth domains comprise the V region of a Fab domain of FMC59 or tafasitamab or a variant thereof with at least 95% identity to said V region and the fifth and sixth domains comprise the V region of a Fab domain of SP34 or a variant thereof with at least 95% identity to said V region.

### BRIEF DESCRIPTION OF THE DRAWINGS

[0020] FIG. 1: General schematic structure of tetrahedral antibodies showing the positions of domains D1, D2, D3, D4 (A-D), and D5 and D6 (D), and the positions of the covalent linkage (A) and non-covalent linkage (B-D).

[0021] FIG. 2: Schematic structure of tetrahedral antibodies with covalent linkages shown in FIG. 1, Panel A, wherein (A) D1, D2, D3 and D4 are all different; (B) D1 and D2 are different; D3 and D4 are the same; (C) D1 and D2 are the same; D3 and D4 are different; (D) D1 and D2 are the same; D3 and D4 are the same.

[0022] FIG. 3: Schematic structure of tetrahedral antibodies with non-covalent linkages shown in FIG. 1, Panel B, wherein (A) D1, D2, D3 and D4 are all different; (B) D1 and D2 are different; D3 and D4 are the same; (C) D1 and D2 are the same; D3 and D4 are different; (D) D1 and D2 are the same; D3 and D4 are the same. A single pair of dimerizing polypeptides form a heterodimeric pair in (A-C), and a homodimeric pair in (D).

[0023] FIG. 4: Schematic structure of tetrahedral antibodies with non-covalent linkages shown in FIG. 1, Panel C, wherein (A) D1, D2, D3 and D4 are all different; (B) D1 and D2 are different; D3 and D4 are the same; (C) D1 and D2 are the same; D3 and D4 are different; (D) D1 and D2 are the same; D3 and D4 are the same. A single pair of dimerizing polypeptides form a heterodimeric pair in (A-C), and a homodimeric pair in (D).

[0024] FIG. 5: Schematic structure of tetrahedral antibodies with non-covalent linkages shown in FIG. 1, Panel D, wherein D1 and D2 are different, and wherein among the D3-D6 domains (A) D3-D6 are all different; (B) D4 and D5 are the same and D3 and D6 are different; (C) D4 and D6 are the same and D3 and D5 are different; (D) D3 and D4 are the same and D5 and D6 are different. A single pair of dimerizing polypeptides form a heterodimeric pair in (A-D).

[0025] FIG. 6: Schematic structure of tetrahedral antibodies with non-covalent linkages shown in FIG. 1, Panel D, wherein D1 and D2 are different, and wherein among the D3-D6 domains (A) D3 and D6 are the same, and D4 and D6 are the same; (B) D3 and D5 are the same, and D4 and D5 are the same; (C) D3 and D4 are the same, and D5 and D6 are the same; (D) D3-D6 are the same. A single pair of dimerizing polypeptides form a heterodimeric pair in (A-D).

[0026] FIG. 7: Schematic structure of tetrahedral antibodies with non-covalent linkages shown in FIG. 1, Panel D, wherein D1 and D2 are different, there is no D6 domain, and wherein among the D3-D5 domains (A) D3-D5 are all different; (B) D4 and D5 are the same, and D3 is different; (C) D3 and D5 are the same, and D4 is different; (D) D3-D5 are all the same. A single pair of dimerizing polypeptides form a heterodimeric pair in (A-D).

[0027] FIG. 8A: Schematic structure of tetrahedral antibodies with non-covalent linkages shown in FIG. 1, Panel D, wherein D1 and D2 are the same, and wherein among the D3-D6 domains (A) D3-D6 are all the same of a first type; (B) D3-D6 are all the same of a second type; (C) D3 and D4 are of the first type and D5 and D6 are of the second type, (D) D3 and D5 are of the first type and D4 and D6 are of the second type. A single pair of dimerizing polypeptides form a homodimeric pair in (A-D).

[0028] FIG. 8B: Schematic structure of tetrahedral antibodies with non-covalent linkages shown in FIG. 1, Panel D, wherein D1 and D2 are the same, and wherein among the D3-D6 domains (A) D3-D6 are all the same of a first type; (B) D3-D6 are all the same of a second type; (C) D3 and D4 are of the first type and D5 and D6 are of the second type, (D) D3 and D4 are of the second type and D5 and D6 are of the first type. A single pair of dimerizing polypeptides form a homodimeric pair in (A-D).

[0029] FIG. 9: Schematic structure of tetrahedral antibodies with non-covalent linkages shown in FIG. 1, Panel D, wherein D1 and D2 are the same, and wherein among the D3-D5 domains (A) D3-D6 are all the same of a first type, and (B) D3-D6 are all the same of a second type; (C) D4 and D5 are of the first type and D3 and D6 are of the second type, (D) D3 and D6 are of the first type and D4 and D5 are of the second type. Each of two pairs of dimerizing polypeptides form a heterodimeric pair in (A-D).

[0030] FIG. 10: Schematic structure of tetrahedral antibodies with non-covalent linkages shown in FIG. 1, Panel D, (A-B) wherein D1 and D2 are the same, and wherein among the D3-D5 domains (A) D3-D6 are all the same of a first type, and (B) D3-D6 are all the same of a second type; (C-D) wherein D1 and D2 are different, and wherein among the D3-D5 domains (C) D3 and D4 are of the first type and D5 and D6 are of the second type, (D) D3 and D5 are of the first type and D4 and D6 are of the second type. Each of two pairs of dimerizing polypeptides form a homodimeric pair in (A-B). Each of two distinct pairs of dimerizing polypeptides form separate homodimeric pairs in (C-D).

[0031] FIG. 11: Schematic structures of tetrahedral antibodies (A) Rc6-P4-Rc6, (B) Rc66SIDE-P4-Rc66SIDE, (C) Rc66SIDE-P16-Rc66SIDE, (D) Rc66SIDE-P28-Rc66SIDE, (E) B19c66-P4-Rc6m (F) Soc66-P28-6Ec66, (G) HA9c66AAC9-P4-HA9c66AAC9, and (H) HA9c66AAC9-P4-IL15c6AAC9.

[0032] FIG. 12: Preparation of tetrahedral antibody Rc6-P4-Rc6.

[0033] FIG. 13: Preparation of tetrahedral antibodies with non-covalent linkages as shown in Panel B of FIG. 1.

[0034] FIG. 14: Preparation of tetrahedral antibody ACE2RQ740c60PG-ACE2RQ740c60PG.

[0035] FIG. 15: Analysis of tetrahedral antibody ACE2RQ740c60PG-ACE2RQ740c60PG by SE-HPLC.

[0036] FIG. 16: Analysis of tetrahedral antibodies by SE-HPLC with different peptide linkers (L-1) ACE2RQ740c60PGRF-ACE2RQ740c60PGRF, (L-185) ACE2RQ740c60PGRF185-ACE2RQ740c60PGRF185, (L-198) ACE2RQ740c60PGRF198-ACE2RQ740c60PGRF198, (L-208) ACE2RQ740c60PGRF208-ACE2RQ740c60PGRF208, (L-212) ACE2RQ740c60PGRF235-ACE2RQ740c60PGRF235, (L-235) ACE2RQ740c60PGRF235-ACE2RQ740c60PGRF235, (L-240) ACE2RQ740c60PGRF240-ACE2RQ740c60PGRF240.

[0037] FIG. 17: Analysis of tetrahedral antibody ACE2RQ740c60PG-ACE2RQ740c60PG by SE-HPLC/MALS.

[0038] FIG. 18: Stoichiometric binding analysis of a mixture of tetrahedral antibody ACE2RQ740c60PG-ACE2RQ740c60PG and ACE monomer ACE2RQ615c60PG.

[0039] FIG. 19: Preparation of tetrahedral antibody ACE2740FcG9-ACE2740FcG9.

[0040] FIG. 20: Analysis of tetrahedral antibody ACE2740FcG9-ACE2740FcG9 by SE-HPLC.

[0041] FIG. 21: Analysis of tetrahedral antibody ACE2740FcG9-ACE2740FcG9 by SE-HPLC/MALS.

[0042] FIG. 22: Analysis of tetrahedral antibody ACE2RQ740FcPG-ACE2RQ740FcPG by SE-HPLC/MALS.

[0043] FIG. 23: Stoichiometric binding analysis of an impure preparation of tetrahedral antibody ACE2740FcG9-ACE2740FcG9 and ACE2 dimer ACE2740FcG9.

[0044] FIG. 24: Stoichiometric binding analysis of a mixture of tetrahedral antibody ACE2740FcG9-ACE2740FcG9 and ACE2 dimer ACE2-740Fc-G9.

[0045] FIG. 25: Stoichiometric binding analysis of a mixture of tetrahedral antibody ACE2RQ740FcPG-ACE2RQ740FcPG and ACE2 dimer ACE2-740Fc-G9.

[0046] FIG. 26: Stoichiometric binding analysis of a mixture of tetrahedral antibody ACE2740FcG9-ACE2740FcG9 and ACE2 dimer ACE2-615Fc-G9.

[0047] FIG. 27: Inhibition of SARS-CoV-2-VSV pseudotype virus infection by ACE2 tetrahedral antibodies ACE2740FcG9-ACE2740FcG9 and ACE2RQ740FcPG-ACE2RQ740FcPG, and by ACE2 dimers ACE2-615Fc-G9 and ACE2RQ615FcPG.

[0048] FIG. 28: Inhibition of SARS-CoV-2-VSV pseudotype virus infection by ACE2 tetrahedral antibodies ACE2740FcG9-ACE2740FcG9 and ACE2RQ740FcPG-ACE2RQ740FcPG, and by ACE2 dimers ACE2-740Fc-G9 and ACE2RQ740FcPG.

[0049] FIG. 29A: Tetrahedral antibody comprising a first and second dimerizing polypeptide that form a homodimeric non-covalent linkage, wherein each of D1 and D2 is a heterodimeric Fc domain, and each of D3 and D4 is a Fab domain that specifically binds to a first target.

[0050] FIG. 29B: Tetrahedral antibody comprising a first and second dimerizing polypeptide that form a homodimeric non-covalent linkage, wherein each of D1 and D2 is a heterodimeric Fc domain, each of D3 and D4 is a Fab domain that specifically binds to a first target, and each of D5 and D6 is a variable region exchanged Fab domain that specifically binds to a second target.

[0051] FIG. 29C: Tetrahedral antibody comprising a first and second dimerizing polypeptide that form a homodimeric non-covalent linkage, wherein each of D1 and D2 is a heterodimeric Fc domain, each of D3 and D4 is a Fab domain that specifically binds to a first target, and each of D7 and D8 is a domain that specifically binds to a second target. D7 and D8 are each depicted as a single-chain TNFSF fusion polypeptide but may be any domain.

[0052] FIG. 29D: Tetrahedral antibody comprising a first and second dimerizing polypeptide that form a homodimeric non-covalent linkage, wherein each of D1 and D2 is a heterodimeric Fc domain, each of D3 and D4 is a Fab domain that specifically binds to a first target, each of D5 and D6 is a variable region exchanged Fab domain that specifically binds to a second target, and each of D7 and D8 is a domain that specifically binds to a third target. D7 and D8 are depicted as a single-chain TNFSF fusion polypeptide but may be any domain.

[0053] FIG. 30A: Octahedral antibody comprising a first, second and third trimerizing polypeptide that form a homotrimeric non-covalent linkage, wherein each of D1, D2 and D3 is a heterodimeric Fc domain, and each of D4, D5 and D5 is a Fab domain that specifically binds to a first target.

[0054] FIG. 30B: Octahedral antibody comprising a first, second and third trimerizing polypeptide that form a homotrimeric non-covalent linkage, wherein each of D1, D2 and D3 is a heterodimeric Fc domain, each of D4, D5 and D6 is a Fab domain that specifically binds to a first target, and each of D7, D8 and D9 is a variable region exchanged Fab domain that specifically binds to a second target.

[0055] FIG. 30C: Octahedral antibody comprising a first, second and third trimerizing polypeptide that form a homotrimeric non-covalent linkage, wherein each of D1, D2 and D3 is a heterodimeric Fc domain, each of D4, D5 and D6 is a Fab domain that specifically binds to a first target, and each of D10, D11 and D12 specifically binds to a second target. D10, D11 and D12 each are depicted as a single-chain TNFSF fusion polypeptide but may be any domain.

[0056] FIG. 30D: Octahedral antibody comprising a first, second and third trimerizing polypeptide that form a homotrimeric non-covalent linkage, wherein each of D1, D2 and D3 is a heterodimeric Fc domain, each of D4, D5 and D6 is a Fab domain that specifically binds to a first target, each of D7, D8 and D9 is a variable region exchanged Fab domain that specifically binds to a second target and each of D10, D11 and D12 specifically binds to a third target. D10, D11 and D12 are each depicted as a single-chain TNFSF fusion polypeptide but may be any domain.

[0057] FIG. 31: Tetrahedral antibody comprising a first and second dimerizing polypeptide that form a homodimeric non-covalent linkage, wherein each of D1 and D2 is a heterodimeric Fc domain, and wherein (A) D3, D4, D5 and D6 specifically bind to a first target (tetravalent, monospecific), (B) D3 and D4 specifically bind to a first target, and D5 and D6 are Fab domains that specifically bind to a second target (tetravalent, 2+2 bispecific), (C) D3 and D4 are Fab domains that specifically bind to a first target, and D5 and D6 specifically bind to a second target (tetravalent, 2+2 bispecific), and (D) D3, D4, D5 and D6 are Fab domains that specifically bind to a first target (tetravalent, monospecific). The tetrahedral antibodies of A-D comprise (A) four chains: a first H1 chain [D1/D3], a second H1 chain [D2/D4], a first H2 chain [D1/D5], and second H2 chain [D2/D6], (B) six chains: a first H1 chain [D1/D3], a second H1 chain [D2/D4], a first H2 chain [D1/D5], a second H2 chain [D2/D6], a first L2 chain [D5], and a second L2 chain [D6], (C) six chains: a first H1 chain [D1/D3], a second H1 chain [D2/D4], a first H2 chain [D1/D5], a second H2 chain [D2/D6], a first L1 chain [D3], and a second L1 chain [D4], and (D) eight chains: a first H1 chain [D1/D3], a second H1 chain [D2/D4], a first H2 chain [D1/D5], a second H2 chain [D2/D6], a first L1 chain [D3], a second L1 chain [D4], a first L2 chain [D5], and a second L2 chain [D6].

[0058] FIG. 32: Tetrahedral antibody comprising a first and second dimerizing polypeptide that form a homodimeric non-covalent linkage, wherein each of D1 and D2 is a heterodimeric Fc domain, and wherein (A) D3 and D4 specifically bind to a first target, and D5 and D6 specifically bind to a second target (tetravalent, 2+2 bispecific), (B) D5 and D6 specifically bind to a first target, and D3 and D4 specifically bind to a second target (tetravalent, 2+2 bispecific), (C) D3 and D4 are Fab domains that specifically bind to a first target, and D5 and D6 are variable region exchanged Fab domains that specifically bind to a second target (tetravalent, 2+2 bispecific), and (D) D5 and D6 are Fab domains that specifically bind to a first target, and D3 and D4 are variable region exchanged Fab domains that specifically bind to a second target (tetravalent, 2+2 bispecific). The tetrahedral antibodies of A-D comprise (A) four chains: a first H1 chain [D1/D3], a second H1 chain [D2/D4], a first H2 chain [D1/D5], and a second H2 chain [D2/D6], (B) four chains: a first H1 chain [D1/D3], a second H1 chain [D2/D4], a first H2 chain [D1/D5], and a second H2 chain [D2/D6], (C) eight chains: a first H1 chain [D1/D3], a second H1 chain [D2/D4], a first H2 chain [D1/D5], a second H2 chain [D2/D6], a first L1 chain [D3], a second L1 chain [D4], a first L2 chain [D5], and a second L2 chain [D6], and (D) eight chains: a first H1 chain [D1/D3], a second H1 chain [D2/D4], a first H2 chain [D1/D5], a second H2 chain [D2/D6], a first L1 chain [D3], a second L1 chain [D4], a first L2 chain [D5], and a second L2 chain [D6].

[0059] FIG. 33: Tetrahedral antibody comprising a first and second dimerizing polypeptide that form a homodimeric non-covalent linkage, wherein each of D1 and D2 is a heterodimeric Fc domain, and wherein (A) D3, D4 and D5 specifically bind to a first target, and D6 specifically binds to a second target (tetravalent, 3+1 bispecific), (B) D3, D4 and D5 specifically bind to a first target, and D6 is a Fab domain that specifically binds to a second target (tetravalent, 3+1 bispecific), (C) D3, D4 and D5 are Fab domains that specifically bind to a first target, and D6 specifically binds to a second target (tetravalent, 3+1 bispecific), and (D) D3, D4 and D5 are Fab domains that specifically bind to a first target, and D6 is a variable region exchanged Fab domain that specifically binds to a second target (tetravalent, 3+1 bispecific). The tetrahedral antibodies of A-D comprise (A) four chains: a first H1 chain [D1/D3], a second H1 chain [D2/D4], a first H2 chain [D1/D5], and a first H3 chain [D2/D6], (B) five chains: a first H1 chain [D1/D3], a second H1 chain [D2/D4], a first H2 chain [D1/D5], a first H3 chain [D2/D6], and a first L3 chain [D6], (C) seven chains: a first H1 chain [D1/D3], a second H1 chain [D2/D4], a first H2 chain [D1/D5], a first H3 chain [D2/D6], a first L1/L2 chain [D3], a second L1/L2 chain [D4], and a third L1/L2 chain [D5], and (D) eight chains: a first H1 chain [D1/D3], a second H1 chain [D2/D4], a first H2 chain [D1/D5], a first H3 chain [D2/D6], a first L1/L2 chain [D3], a second L1/L2 chain [D4], a third L1/L2 chain [D5], and a first L3 chain [D6].

[0060] FIG. 34: Tetrahedral antibody comprising a first and second dimerizing polypeptide that form a homodimeric non-covalent linkage, wherein each of D1 and D2 is a heterodimeric Fc domain, and wherein (A) D3 and D4 specifically bind to a first target, and D6 specifically binds to a second target (trivalent, 2+1 bispecific), (B) D3 and D4 specifically bind to a first target, and D6 is a Fab domain that specifically binds to a second target (trivalent, 2+1 bispecific), (C) D3 and D4 are Fab domains that specifically bind to a first target, and D6 specifically binds to a second target (trivalent, 2+1 bispecific), and (D) D3 and D4 are Fab domains that specifically bind to a first target, and D6 is a variable region exchanged Fab domain that specifically binds to a second target (trivalent, 2+1 bispecific). The tetrahedral antibodies of A-D comprise (A) four chains: a first H1 chain [D1/D3], a second H1 chain [D2/D4], a first H2 chain [D2/D6], and a first Fc chain [D1], (B) five chains: a first H1 chain [D1/D3], a second H1 chain [D2/D4], a first H2 chain [D2/D6], a first Fc chain [D1], and a first L2 chain [D6], (C) six chains: a first H1 chain [D1/D3], a second H1 chain [D2/D4], a first H2 chain [D2/D6], a first Fc chain [D1], a first L1 chain [D3], and a second L1 chain [D4], and (D) seven chains: a first H1 chain [D1/D3], a second H1 chain [D2/D4], a first H2 chain [D2/D6], a first Fc chain [D1], a first L1 chain [D3], a second L1 chain [D4], and a first L2 chain [D6].

[0061] FIG. 35: Tetrahedral antibody comprising a first and second dimerizing polypeptide that form a homodimeric non-covalent linkage, wherein each of D1 and D2 is a heterodimeric Fc domain, and wherein (A) D3 and D4 specifically bind to a first target, D5 specifically binds to a second target, and D6 specifically binds to a third target (tetravalent, 2+1+1 trispecific), (B) D3 and D4 specifically bind to a first target, D5 specifically binds to a second target, and D6 is a Fab domain that specifically binds to a third target (tetravalent, 2+1+1 trispecific), (C) D3 and D4 are Fab domains that specifically bind to a first target, D5 specifically binds to a second target, and D6 specifically binds to a third target (tetravalent, 2+1+1 trispecific), and (D) D3 and D4 are Fab domains that specifically bind to a first target, D5 specifically binds to a second target, and D6 is a variable region exchanged Fab domain that specifically binds to a third target (tetravalent, 2+1+1 trispecific). The tetrahedral antibodies of A-D comprise (A) four chains: a first H1 chain [D1/D3], a second H1 chain [D2/D4], a first H2 chain [D1/D5], and a first H3 chain [D2/D6], (B) five chains: a first H1 chain [D1/D3], a second H1 chain [D2/D4], a first H2 chain [D1/D5], a first H3 chain [D2/D6], and a first L3 chain [D6], (C) six chains: a first H1 chain [D1/D3], a second H1 chain [D2/D4], a first H2 chain [D1/D5], a first H3 chain [D2/D6], a first L1 chain [D3], and a second L1 chain [D4], and (D) seven chains: a first H1 chain [D1/D3], a second H1 chain [D2/D4], a first H2 chain [D1/D5], a first H3 chain [D2/D6], a first L1 chain [D3], a second L1 chain [D4], and a first L3 chain [D6].

[0062] FIG. 36: Tetrahedral antibody comprising a first and second dimerizing polypeptide that form a homodimeric non-covalent linkage, wherein D1 is a heterodimeric Fc domain and D2 is a Fab domain, and wherein (A) D2 is a Fab that binds to a first target, and D3, D4 and D5 specifically bind to a second target (tetravalent, 3+1 bispecific), (B) D2 is a Fab that binds to a first target, D3 and D4 specifically bind to a second target, and D5 is a variable region exchanged Fab that specifically bind to a third target (tetravalent, 2+1+1 trispecific), (C) D2 is a Fab that binds to a first target, D3 and D4 are variable region exchanged Fab domains that specifically bind to a second target, and D5 specifically binds to a third target (tetravalent, 2+1+1 trispecific), and (D) D2 is a Fab that binds to a first target, D3, D4 and D5 are variable region exchanged Fab domains that specifically bind to a second target (tetravalent, 4+1 bispecific). The tetrahedral antibodies of A-D comprise (A) four chains: a first H1 chain [D1/D3], a first H1Fab chain [D2/D4], a first H2 chain [D1/D5], and a first Fab chain [D2], (B) five chains: a first H1 chain [D1/D3], a first H1Fab chain [D2/D4], a first H2 chain [D1/D5], a first Fab chain [D2], and a first L2 chain [D5], (C) six chains: a first H1 chain [D1/D3], a first H1Fab chain [D2/D4], a first H2 chain [D1/D5], a first Fab chain [D2], a first L1 chain [D3], and a second L1 chain [D4], (D) seven chains: a first H1 chain [D1/D3], a first H1Fab chain [D2/D4], a first H2 chain [D1/D5], a first Fab chain [D2], a first L1/L2 chain [D3], a second L1/L2 chain [D4], and a third L1/L2 chain [D5].

[0063] FIG. 37: Tetrahedral antibody comprising a first and second dimerizing polypeptide that form a homodimeric non-covalent linkage, wherein D1 is a heterodimeric Fc domain and D2 is a Fab domain, and wherein (A) D2 is a variable region exchanged Fab that binds to a first target, and D3, D4 and D5 specifically bind to a second target (tetravalent, 3+1 bispecific), (B) D2 is a variable region exchanged Fab that binds to a first target, D3 and D4 specifically bind to a second target, and D5 is a Fab that specifically bind to a third target (tetravalent, 2+1+1 trispecific), (C) D2 is a variable region exchanged Fab that binds to a first target, D3 and D4 are Fab domains that specifically bind to a second target, and D5 specifically binds to a third target (tetravalent, 2+1+1 trispecific), and (D) D2 is a variable region exchanged Fab that binds to a first target, D3, D4, and D5 are Fab domains that specifically bind to a second target (tetravalent, 3+1 bispecific). The tetrahedral antibodies of A-D comprise (A) four chains: a first H1 chain [D1/D3], a first H1Fab chain [D2/D4], a first H2 chain [D1/D5], and a first Fab chain [D2], (B) five chains: a first H1 chain [D1/D3], a first H1Fab chain [D2/D4], a first H2 chain [D1/D5], a first Fab chain [D2], and a first L2 chain [D5], (C) six chains: a first H1 chain [D1/D3], a first H1Fab chain [D2/D4], a first H2 chain [D1/D5], a first Fab chain [D2], a first L1 chain [D3], and a second L1 chain [D4], and (D) seven chains: a first H1 chain [D1/D3], a first H1Fab chain [D2/D4], a first H2 chain [D1/D5], a first Fab chain [D2], a first L1/L2 chain [D3], a second L1/L2 chain [D4], and a third L1/L2 chain [D5].

[0064] FIG. 38: Tetrahedral antibody comprising a first and second dimerizing polypeptide that form a homodimeric non-covalent linkage, wherein D1 is a heterodimeric Fc domain and D2 is a Fab domain, and wherein (A) D2 is a Fab that binds to a first target, and D3 and D4 specifically bind to a second target (trivalent, 2+1 bispecific), (B) D2 is a variable region exchanged Fab that binds to a first target, and D3 and D4 specifically bind to a second target, (C) D2 is a Fab that binds to a first target, and D3 and D4 are variable region exchanged Fab domains that specifically bind to a second target (trivalent, 2+1 bispecific), and (D) D2 is a variable region exchanged Fab that binds to a first target, D3 and D4 are Fab domains that specifically bind to a second target (trivalent, 2+1 bispecific). The tetrahedral antibodies of A-D comprise (A) four chains: a first H1 chain [D1/D3], a first H1Fab chain [D2/D4], a first Fc chain [D1], and a first Fab chain [D2], (B) four chains: a first H1 chain [D1/D3], a first H1Fab chain [D2/D4], a first Fc chain [D1], and a first Fab chain [D2], (C) six chains: a first H1 chain [D1/D3], a first H1Fab chain [D2/D4], a first Fc chain [D1], a first Fab chain [D2], a first L1 chain [D3], and a second L1 chain [D4], and (D) six chains: a first H1 chain [D1/D3], a first H1Fab chain [D2/D4], a first Fc chain [D1], a first Fab chain [D2], a first L1 chain [D3], and a second L1 chain [D4].

[0065] FIG. 39: Tetrahedral antibody comprising a first and second dimerizing polypeptide that form a homodimeric non-covalent linkage, wherein each of D1 and D2 is a heterodimeric Fc domain, and wherein (A) D3, D4, D5 and D6 specifically bind to a first target, and D7 and D8 specifically bind to a second target (hexavalent, 4+2 bispecific), (B) D3 and D4 specifically bind to a first target, D5 and D6 are Fab domains that specifically bind to a second target, and D7 and D8 specifically bind to a third target (hexavalent, 2+2+2 trispecific), (C) D3 and D4 are Fab domains that specifically bind to a first target, D5 and D6 specifically bind to a second target, and D7 and D8 specifically bind to a third target (hexavalent, 2+2+2 trispecific), and (D) D3, D4, D5 and D6 are Fab domains that specifically bind to a first target, and D7 and D8 specifically bind to a second target (hexavalent, 4+2 bispecific). The tetrahedral antibodies of A-D comprise (A) four chains: a first H1 chain [D1/D3/D7], a second H1 chain [D2/D4/D8], a first H2 chain [D1/D5], and second H2 chain [D2/D6], (B) six chains: a first H1 chain [D1/D3/D7], a second H1 chain [D2/D4/D8], a first H2 chain [D1/D5], a second H2 chain [D2/D6], a first L2 chain [D5], and a second L2 chain [D6], (C) six chains: a first H1 chain [D1/D3/D7], a second H1 chain [D2/D4/D8], a first H2 chain [D1/D5], a second H2 chain [D2/D6], a first L1 chain [D3], and a second L1 chain [D4], and [D] eight chains: a first H1 chain [D1/D3/D7], a second H1 chain [D2/D4/D8], a first H2 chain [D1/D5], a second H2 chain [D2/D6], a first L1 chain [D3], a second L1 chain [D4], a first L2 chain [D5], and a second L2 chain [D6]. D7 and D8 may be attached at the C-termini of the first and second H1 chains (as shown), or the C-termini of the first and second H2 chains. D7 and D8 are depicted as a single-chain TNFSF ligand fusion polypeptides but may be any domain.

[0066] FIG. 40: Tetrahedral antibody comprising a first and second dimerizing polypeptide that form a homodimeric non-covalent linkage, wherein each of D1 and D2 is a heterodimeric Fc domain, and wherein (A) D3 and D4 specifically bind to a first target, D5 and D6 specifically bind to a second target, and D7 and D8 specifically bind to a third target (hexavalent, 2+2+2 trispecific), (B) D5 and D6 specifically bind to a first target, D3 and D4 specifically bind to a second target, and D7 and D8 specifically bind to a third target (hexavalent, 2+2+2 trispecific), (C) D3 and D4 are Fab domains that specifically bind to a first target, D5 and D6 are variable region exchanged Fab domains that specifically bind to a second target, and D7 and D8 specifically bind to a third target (hexavalent, 2+2+2 trispecific), and (D) D5 and D6 are Fab domains that specifically bind to a first target, D3 and D4 are variable region exchanged Fab domains that specifically bind to a second target, and D7 and D8 specifically bind to a third target (hexavalent, 2+2+2 trispecific). The tetrahedral antibodies of A-D comprise (A) four chains: a first H1 chain [D1/D3/D7], a second H1 chain [D2/D4/D8], a first H2 chain [D1/D5], and a second H2 chain [D2/D6], (B) four chains: a first H1 chain [D1/D3/D7], a second H1 chain [D2/D4/D8], a first H2 chain [D1/D5], and a second H2 chain [D2/D6], (C) eight chains: a first H1 chain [D1/D3/D7], a second H1 chain [D2/D4/D8], a first H2 chain [D1/D5], a second H2 chain [D2/D6], a first L1 chain [D3], a second L1 chain [D4], a first L2 chain [D5], and a second L2 chain [D6], and (D) eight chains: a first H1 chain [D1/D3/D7], a second H1 chain [D2/D4/D8], a first H2 chain [D1/D5], a second H2 chain [D2/D6], a first L1 chain [D3], a second L1 chain [D4], a first L2 chain [D5], and a second L2 chain [D6]. D7 and D8 may be attached at the C-termini of the first and second H1 chains (as shown), or the C-termini of the first and second H2 chains. D7 and D8 are depicted as a single-chain TNFSF ligand fusion polypeptides but may be any domain.

[0067] FIG. 41: Tetrahedral antibody comprising a first and second dimerizing polypeptide that form a homodimeric non-covalent linkage, wherein each of D1 and D2 is a heterodimeric Fc domain, and wherein (A) D3 and D4 specifically bind to a first target, D6 specifically binds to a second target, and D7 and D8 specifically bind to a third target (pentavalent, 2+2+1 trispecific), (B) D3 and D4 specifically bind to a first target, D6 is a Fab domain that specifically binds to a second target, and D7 and D8 specifically bind to a third target (pentavalent, 2+2+1 trispecific), (C) D3 and D4 are Fab domains that specifically bind to a first target, D6 specifically binds to a second target, and D7 and D8 specifically bind to a third target (pentavalent, 2+2+1 trispecific), and (D) D3 and D4 are Fab domains that specifically bind to a first target, D6 is a variable region exchanged Fab domain that specifically binds to a second target, and D7 and D8 specifically bind to a third target (pentavalent, 2+2+1 trispecific). The tetrahedral antibodies of A-D comprise (A) four chains: a first H1 chain [D1/D3/D7], a second H1 chain [D2/D4/D8], a first H2 chain [D2/D6], and a first Fc chain [D1], (B) five chains: a first H1 chain [D1/D3/D7], a second H1 chain [D2/D4/D8], a first H2 chain [D2/D6], an Fc chain [D1] and an L2 chain [D6], (C) six chains: a first H1 chain [D1/D3/D7], a second H1 chain [D2/D4/D8], a first H2 chain [D2/D6], a first Fc chain [D1], a first L1 chain [D3], and a second L1 chain [D4], and (D) seven chains: a first H1 chain [D1/D3/D7], a second H1 chain [D2/D4/D8], a first H2 chain [D2/D6], a first Fc chain [D1], a first L1 chain [D3], a second L1 chain [D4], and a first L2 chain [D6]. D7 and D8 may be attached at the C-termini of the first and second H1 chains (as shown), or the C-termini of the first and second H2 chains. D7 and D8 are depicted as a single-chain TNFSF ligand fusion polypeptides but may be any domain.

[0068] FIG. 42: Tetrahedral antibody comprising a first and second dimerizing polypeptide that form a homodimeric non-covalent linkage, wherein D1 is a heterodimeric Fc domain and D2 is a Fab domain, and wherein (A) D2 is a Fab domain that specifically binds to a first target, D3 and D4 specifically bind to a second target, and D7 and D8 specifically bind to a third target (pentavalent, 2+2+1 trispecific), (B) D2 is a variable region exchanged Fab domain that specifically binds to a first target, D3 and D4 specifically bind to a second target, and D7 and D8 specifically bind to a third target (pentavalent, 2+2+1 trispecific), (C) D2 is a Fab domain that specifically binds to a first target, D3 and D4 are variable region exchanged Fab domains that specifically bind to a second target, and D7 and D8 specifically bind to a third target (pentavalent, 2+2+1 trispecific), and (D) D2 is a variable region exchanged Fab domain that specifically binds to a first target, D3 and D4 are Fab domains that specifically bind to a second target, and D7 and D8 specifically bind to a third target (pentavalent, 2+2+1 trispecific). The tetrahedral antibodies of A-D comprise (A) four chains: a first H1 chain [D1/D3/D7], a second H1 chain [D2/D4/D8], a first Fc chain [D1], and a first Fab chain [D2]. (B) four chains: a first H1 chain [D1/D3/D7], a second H1 chain [D2/D4/D8], a first Fc chain [D1], and a first Fab chain [D2]. (C) six chains: a first H1 chain [D1/D3/D7], a second H1 chain [D2/D4/D8], a first Fc chain [D1], a first Fab chain [D2], a first L1 chain [D3], and a second L1 chain [D4], and (D) six chains: a first H1 chain [D1/D3/D7], a second H1 chain [D2/D4/D8], a first H2 chain [D2/D6], a first Fc chain [D1], a first Fab chain [D2], a first L1 chain [D3], and a second L1 chain [D4]. D7 and D8 may be attached at the C-termini of the first and second H1 chains (as shown), or the C-termini of the first and second H2 chains. D7 and D8 are depicted as a single-chain TNFSF ligand fusion polypeptides but may be any domain.

[0069] FIG. 43: ACE2 tetrahedral antibodies. Four forms of ACE2 tetrahedral antibodies are shown in panels c, d, e and f. Each comprises domains 1-4 and a dimerizing polypeptide. The structures in panels a and b are standard Fc dimers.

[0070] FIG. 44: Relative neutralization activity of ACE2 tetrahedral antibody on live virus. Upper panel: demonstrates neutralization of live SARS-CoV-2 virus. Lower panel: demonstrates neutralization of NL63 (alpha coronavirus). ACE2 superdimer (6-05 SD) neutralizes viruses approximately 3 orders of magnitude better than standard Fc fusion protein (ACE2Fc615). Also show are purified dimer (6-05 D) and an impure mixture of dimer and superdimer (6-05 Impure).

[0071] FIG. 45: Pharmacokinetic curves for constructs 13-21 and 13-22. 13-21 corresponds to wt ACE2-B13 superheterodimer tetrahedral antibody. 13-22 corresponds to a mutant ACE2-B13 superheterodimer tetrahedral antibody which has the H378A mutation.

[0072] FIG. 46: Pharmacokinetic curves for constructs 10-05 and 13-21. 10-05 corresponds to the ACE2-ACE2 superheterodimer tetrahedral antibody. 13-21 corresponds to wt ACE2-B13 superheterodimer tetrahedral antibody.

[0073] FIG. 47: Relative neutralization activity of ACE2 core dimer (10-59), B-13 (12-09), and ACE2-B-13 superdimer (15-16).

[0074] FIG. 48A-FIG. 48P: Relative neutralization activity of various antibodies against 12 different variant viruses is compared to the ACE2-B13 silent version and ACE2-B13 active version (denoted by diamonds and circles).

[0075] FIG. 49: Body weight change of Hamsters infected with South African SARS-CoV-2 virus treated with PBS control (PBS), 25 mg/kg of REGN10933, and REG-CoV-2 cocktail (25 mg/kg each of Regeneron antibody REGN10933 and REG108987), and 25 mg/kg Fc silent ACE2-B13 (HB1516; protein 15-16).

[0076] FIG. 50A-FIG. 50C: Relative of quantitation of correct pairing and mispairing in bispecific antibodies. Main peak represents correctly paired molecules. Arrows point to positions at which one would expect mispaired products. The main peak consists of two peaks owing to residual O-glycan remaining after de-glycosylation procedure.

[0077] FIG. 51A-FIG. 51C: Relative neutralization activity of various antibodies against N439K and South African variants. ACE2 superheterodimers (squares) are described in Tables 36, 37, and 38.

[0078] FIG. 52: General structures of the topologically distinct molecules described in Example 32. Panels A to C depict ACE2-Fc dimers in which dimerization is driven (A) solely by the Fc domain, (B) solely by the collectrin-like domain, or (C) by both the Fc domain and collectrin-like domain. In panel D, the ACE2-740 superhomodimer is produced by cross-dimerization of the Fc and collectrin-like domains. Panels E to H depict various GEM-DIMERs (superheterodimers) featuring (E) four ACE2 domains, (F) two ACE2 domains and two Fab domains, (G) four Fab domains of a single type, and (H) four Fab domains of two distinct types. The collectrin-like domain is represented by white circles, the ACE2 peptidase domain by checkerboard ovals, distinct types of Fab domains by dotted and vertically lined ovals, Fc homodimers by gray ovals, and Fc heterodimers by light gray/dark gray ovals. Various strategies may be used to ensure Fc heterodimer formation and proper pairing of immunoglobulin heavy and light chains, including steric complementarity, domain crossovers, and electrostatic steering effects.

[0079] FIG. 53: ACE2 superdimers demonstrate an extraordinary ability to bind individual spike trimers and neutralize live SARS-CoV-2 compared to ACE2 dimers. Panels A to C depict size-exclusion HPLC (SE-HPLC) analysis showing that (A) ACE2-740 superhomodimer and ACE2-740 homodimer are co-secreted as a mixture of two species; (B) ACE2-740/615 superheterodimer and (C) ACE2-740/B13A superheterodimer are each secreted as a single species. Panels D to F depict stoichiometric binding analysis showing that superdimer-spike complexes form at the expense of dimer-spike complexes. Titrations with aggregate-free, individual spike trimer were carried out with superdimer/dimer mixtures: panel D depicts the mixture of ACE2-740 superhomodimer and ACE2-740 homodimer that is naturally co-secreted by cells, panel E depicts an equimolar mixture of pure ACE2-740/615 superheterodimer and pure ACE2-740 homodimer, panel F depicts an equimolar mixture of pure ACE2-740/B13A superheterodimer and pure ACE2-740 homodimer.

[0080] FIG. 54: ACE2 superdimers demonstrate an extraordinary ability to bind individual spike trimers and neutralize live SARS-CoV-2 compared to ACE2 dimers. Panels G to I depict neutralization of live SARS-CoV-2 virus by: (G) ACE2-740 superhomodimer, ACE2-740 homodimer, ACE2-615 homodimer; (H) ACE2-740/615 superheterodimer, ACE2-740 homodimer, ACE2-615 homodimer; (I) ACE2-740/B13A superheterodimer, B13A antibody, ACE2-740 heterodimer. Panels J to K depict neutralization of aggregate-free, individual spike trimer binding to cell surface ACE2 by: (J) ACE2-740/615 superheterodimer, ACE2-740 superhomodimer, ACE2-740 homodimer; (K) ACE2-740/B13A superheterodimer, ACE2-740 homodimer, B13A antibody. Panel L depicts efficacy of ACE2-740/B13A superheterodimer in an in vivo prophylactic model of SARS-CoV-2 infection. Golden hamsters were treated by intraperitoneal injection on day-1, challenged intranasally with 1.09×10⁵ PFU of the Beta B.1.351 variant on day 0, and evaluated for weight loss/gain. ACE2-740/B13A superheterodimer vs. placebo (p<0.0001); ACE2-740/B13A superheterodimer vs. REGN10987+REGN10933 (p=NS); REGN10933 alone vs. placebo (P=0.0775).

[0081] FIG. 55: ACE2-740/615 superheterodimer (HB1507; Protein ID 15-07) and ACE2-740/B13A superheterodimer (HB1516; Protein ID 15-16) demonstrate extraordinary activity against twelve major SARS-CoV-2 variants. Pseudovirus neutralization activity of HB 1507 (panel E of FIG. 52) and HB1516 (panel F of FIG. 52) compared with eight clinically authorized antibodies (REGN10987, REGN10933, LY-CoV555, LY-CoV016, AZD1061, AZD8895, VIR-7831, CT-P59) against the Alpha B.1.1.7, Beta B.1.351, Gamma P.1, Delta B.1.617.2, Epsilon B.1.427/B.1.429, Zeta P.2, Eta B.1.525, Iota B.1.526, Kappa B.1.617.1, Lambda C.37, Mu B.1.621, and Omicron B.1.1.529 variants.

[0082] FIG. 56: Anti-viral, anti-cancer, and anti-inflammatory bispecific GEM-DIMERs (Fab1/Fab2 superheterodimers) are more potent than two-antibody cocktails. Panels A to C depict pseudovirus neutralization activity of bispecific anti-spike GEM-DIMER RG1-RG2 (HB1701; Protein ID 17-01) compared to its parent antibodies REGN10987 (RG1) and REGN10933 (RG2) used individually or as a two-antibody cocktail (REGN-COV2) against the (A) N439K variant, (B) B.1.351 variant, and (C) N439K/B.1.351 double variant. Panels D to E depicts kinetic activation of caspase-3/7 via ADCC in co-cultures of Toledo cells and human NK cells that have been treated with (D) bispecific anti-CD20× anti-CD19 GEM-DIMERs (HB1905, Protein ID 19-05, HB1906, Protein ID 19-06) compared to the Rituxan and FMC63 parent antibodies; and (E) a two-antibody cocktail of Rituxan and FMC63 compared to the Rituxan and FMC63 parent antibodies. Panels F to G depict neutralization of TNF-α/IL-17A induction of IL-6 secretion by normal human dermal fibroblasts (NHDF) by (F) the Ad×Se GEM-DIMER (HB2309; Protein ID 23-09), compared to the secukinumab and adalimumab parent antibodies; and (G), the HB2309 Ad×Se GEM-DIMER compared to adalimumab and several two-antibody cocktails consisting of the secukinumab and adalimumab parent antibodies at ratios of 1:1, 2:1, 5:1, and 10:1. In Panel (G) the x-axis reflects the concentration of the anti-TNF-α Fab portion that is present in the HB2309 Ad×Se GEM-DIMER, the adalimumab control, and in each of the two-antibody cocktails. The inset shows an expanded view of the dose response plotted in log-log scale.

[0083] FIG. 57: Strategy for the confirmation of the structures of the topologically distinct molecules described in Example 32 using specific cleavage with IdeZ and TCEP reduction. Molecules were digested with IdeZ protease followed by incubation with protein A beads to remove Fc fragments and incompletely digested molecules. The untreated, IdeZ-treated, and IdeZ-treated/TCEP-reduced molecules were analyzed by SEC/MALS (FIG. 58, FIG. 84). Predicted fragments are depicted for (A) ACE2-615 homodimer (Panel A of FIG. 52), (B) ACE2-740 heterodimer (Panel B of FIG. 52) and its Fab-substituted counterpart, (C) ACE2-740 homodimer (Panel C of FIG. 52), (D) ACE2-740 superhomodimer (Panel D of FIG. 52), (E) ACE2-740/615 superheterodimer (Panel E of FIG. 52), (F) ACE2-740/B13A superheterodimer (Panel F of FIG. 52), (G) Fab/Fab superheterodimer (Panel G of FIG. 52), and (H) Fab1/Fab2 superheterodimer (Panel H of FIG. 52).

[0084] FIG. 58. SE-HPLC analysis of the topologically distinct molecules described in Example 32 following IdeZ cleavage and TCEP reduction. SE-HPLC elution profiles of untreated, IdeZ-treated, and IdeZ-treated/TCEP-reduced molecules are shown by black, red, and blue curves, respectively. Arrow 1 points to the intact molecule, arrow 2 points to the IdeZ cleavage product, and arrows 3 and 4 point to the TCEP-reduced IdeZ cleavage product(s). As expected, IdeZ cleavage products that are dimerized solely by the Fc domain were dissociated upon TCEP reduction of the hinge region interchain disulfides, while IdeZ cleavage products dimerized by the collectrin-like domain did not dissociate upon TCEP reduction. To further confirm each structure, the molar mass of each of the observed peaks was determined by SEC-MALS as described in table S1. The following molecules were analyzed: (A) ACE2-615 homodimer (Panel A of FIG. 52), (B) Fab heterodimer (Panel B of FIG. 57), (C) ACE2-740 homodimer (Panel C of FIG. 52), (D) ACE2-740 superhomodimer (Panel D of FIG. 52), (E) ACE2-740/615 superheterodimer (Panel E of FIG. 52), (F) ACE2-740/B13A superheterodimer (Panel F of FIG. 52), (G) Fab/Fab superheterodimer (Panel G of FIG. 52), and (H) Fab1/Fab2 superheterodimer (Panel H of FIG. 52).

[0085] FIG. 59: SEC-MALS demonstrates that the molar mass of ACE2-740 superhomodimer is approximately twice that of ACE2-740 homodimer. Purified preparations of ACE2-740 superhomodimer (Panel D of FIG. 52) and ACE2-740 homodimer (Panel C of FIG. 52) were analyzed individually by SEC-MALS. The profiles are overlaid for comparison. Molar masses are summarized in FIG. 84. Abbreviations: LS, light scattering; dRI, differential refractive index; MM, molar mass.

[0086] FIG. 60: Order-of-binding analysis demonstrates that ACE2 superdimer-spike complexes form at the expense of ACE2 dimer-spike complexes. Titrations with aggregate-free spike trimer were carried out using mixtures of purified ACE2-740 superhomodimer (Panel D of FIG. 52) with purified preparations of the following ACE2 dimers: (A) ACE2-615 homodimer (Panel A of FIG. 52), (B) ACE2-740 heterodimer (Panel B of FIG. 52), and (C) ACE2-740 homodimer (Panel C of FIG. 52).

[0087] FIG. 61: Neutralization of live NL63 alphacoronavirus by ACE2 superdimers compared to ACE2 dimers. Neutralization of live NL63 virus infection by: (A) ACE2-740 superhomodimer (squares), ACE2-740 homodimer (circles), ACE2-615 homodimer (triangles), and (B) ACE2-740/615 superheterodimer (squares), ACE2-740 homodimer (circles) ACE2-615 homodimer (triangles).

[0088] FIG. 62: Stoichiometric competition binding analysis of Fab/Fab superheterodimers compared to their parent antibodies. Titrations with aggregate-free, individual spike trimer were carried out with the following mixtures of antibody Fab/Fab superheterodimers (Panel G of FIG. 52) and their parent antibodies: (A) RG1-RG1 and REGN10987, (B) RG2-RG2 and REGN10933, (C) LY1-LY1 and LY-CoV555, (D) LY2-LY2 and LY-CoV016, (E) VR1-VR1 and VIR-7831, (F) CT1-CT1 and CT-P59, (G) AZ1-AZ1 and AZD1061.

[0089] FIG. 63: Stoichiometric competition binding analysis of bispecific Fab1/Fab2 superheterodimers and ACE2-740/Fab superheterodimers compared to their parent antibodies. Titrations with aggregate-free, individual spike trimer were carried out with the following mixtures of bispecific Fab1/Fab2 superheterodimers (Panel H of FIG. 52) or ACE2-740/Fab superheterodimers (Panel F of FIG. 52) and their parent antibodies: (A) AZ1-AZ2 and AZD1061, (B) AZ2-AZ1 and AZD1061, (C) AZ1-AZ2 and AZD8895, (D) AZ2-AZ1 and AZD8895, (E) VR1-ACE2 WT and VIR-7831, (F) VR1-ACE2 HA and VIR-7831, (G) B13A-ACE2 WT and B13A, and (H) B13A-ACE2 WT and B13A. Abbreviations: ACE2 WT, ACE2 with wild-type angiotensin-converting activity; ACE2 HA, ACE2 with H378A mutation which abrogates angiotensin-converting activity.

[0090] FIG. 64: Pseudovirus neutralizing activity of ACE2-740/Fab superheterodimers and antibody Fab/Fab superheterodimers compared with their parent antibodies. Neutralization activity against SARS-CoV-2 Wuhan D614G and B.1.351 variants by ACE2-740/Fab superheterodimers (Panel F of FIG. 52), Fab/Fab superheterodimers (Panel G of FIG. 52), and their parent antibodies as follows: (A) RG1 (REGN10987), RG1-ACE2 WT, RG1-ACE2 HA, RG1-RG1, (B) RG2 (REGN10933), RG2-ACE2 WT, RG2-ACE2 HA, RG2-RG2, (C) LY1 (LY-CoV555), LY1-ACE2 WT, LY1-ACE2 HA, LY1-LY1, (D) LY2 (LY-CoV016), LY2-ACE2 WT, LY2-ACE2 HA, LY2-LY2, (E) VR1 (VIR-7831), VR1-ACE2 WT, VR1-ACE2 HA, VR1-VR1, (F) CT1 (CT-P59), CT1-ACE2 WT, CT1-ACE2 HA, CT1-CT1. Abbreviations: ACE2 WT, ACE2 with wild-type angiotensin-converting activity; ACE2 HA, ACE2 with H378A mutation which abrogates angiotensin-converting activity.

[0091] FIG. 65: Pharmacokinetics of ACE2-740/B13A superheterodimers in Tg32 mice. Time course of plasma concentration following a single intravenous administration in Tg32 mice (10 mg/kg) is shown for (A) ACE2-740/B13 superheterodimer (ACE2 WT), and (B) ACE2-740/B13 HA superheterodimer (ACE2 HA). Plasma concentration was determined by capture with SARS-CoV-2 spike protein and detection with anti-Fab antibody. Comparable results were obtained using anti-ACE2 antibody for detection. Profiles are shown for individual mice. Abbreviations: ACE2 WT, ACE2 with wild-type angiotensin-converting activity; ACE2 HA, ACE2 with H378A mutation which abrogates angiotensin-converting activity.

[0092] FIG. 66: Pharmacokinetics of GEM-DIMERs (Fab/Fab superheterodimers) in Tg32 mice compared to their parent antibodies. Time course of plasma concentration following a single intravenous administration in Tg32 mice (10 mg/kg) is shown for (A) RG2-RG2 superheterodimer, (B) REGN10933 (RG2) antibody, (C) VR1-VR1 superheterodimer, (D) VIR-7831 (VR1) antibody. Plasma concentration was determined by capture with SARS-Cov-2 spike protein and detection with anti-Fab antibody. Profiles are shown for individual mice.

[0093] FIG. 67: Enzymatic activity of ACE2-740/B13A superheterodimers with wild-type and H378A mutant peptidase domains. Time course of phenylalanine release by wild-type ACE2-740/B13A superheterodimer (circles), H378A mutant ACE2-740/B13A superheterodimer (squares), and recombinant human ACE2 (triangles) are shown with the following substrates: (A) angiotensin II, (B) bradykinin, and (C) apelin-13.

[0094] FIG. 68: Pseudovirus neutralizing activity of ACE2-740/615 superheterodimers (HB1507, HB1553) and ACE2-740/B13A superheterodimers (HB1515, HB1516) compared with eight clinically authorized antibodies against twelve major SARS-CoV-2 variants. Neutralization activity of the HB1515 (diamonds) and HB1516 (circles) ACE2-740/B13A superheterodimers (Panel F of FIG. 52) is compared with REGN10987 anti-spike antibody (squares). Results for twelve major SARS-CoV-2 variants are shown: Alpha B.1.1.7, Beta B.1.351, Gamma P.1, Delta B.1.617.2, Epsilon B.1.427/B.1.429, Zeta P.2, Eta B.1.525, Iota B.1.526, Kappa B.1.617.1, Lambda C.37, Mu B.1.621, and Omicron B.1.1.529. Results are also shown for SARS-CoV-2 variants Wuhan D614G, N439K, and Alpha B.1.1.7 E484K, and the SARS-CoV-1 Urbani variant. The HB1515, HB1516, HB1507, and HB1553 ACE2-740/B13A superheterodimers have the ACE2 H378A mutation which abrogates angiotensin-converting activity. HB1515 and HB1553 have wild-type Fc receptor binding activity; HB1516 and HB1507 have the L234A, L235A mutations which abrogate Fc receptor binding activity.

[0095] FIG. 69: Pseudovirus neutralizing activity of ACE2-740/615 superheterodimers (HB1507, HB1553) and ACE2-740/B13A superheterodimers (HB1515, HB1516) compared with eight clinically authorized antibodies against twelve major SARS-CoV-2 variants. Neutralization activity of the HB1515 (diamonds) and HB1516 (circles) ACE2-740/B13A superheterodimers (Panel F of FIG. 52) is compared with REGN10933 anti-spike antibody (squares). Results for twelve major SARS-CoV-2 variants are shown: Alpha B.1.1.7, Beta B.1.351, Gamma P.1, Delta B.1.617.2, Epsilon B.1.427/B.1.429, Zeta P.2, Eta B.1.525, Iota B.1.526, Kappa B.1.617.1, Lambda C.37, Mu B.1.621, and Omicron B.1.1.529. Results are also shown for SARS-CoV-2 variants Wuhan D614G, N439K, and Alpha B.1.1.7 E484K, and the SARS-CoV-1 Urbani variant. The HB1515, HB1516, HB1507, and HB1553 ACE2-740/B13A superheterodimers have the ACE2 H378A mutation which abrogates angiotensin-converting activity. HB1515 and HB1553 have wild-type Fc receptor binding activity; HB1516 and HB1507 have the L234A, L235A mutations which abrogate Fc receptor binding activity.

[0096] FIG. 70: Pseudovirus neutralizing activity of ACE2-740/615 superheterodimers (HB1507, HB1553) and ACE2-740/B13A superheterodimers (HB1515, HB1516) compared with eight clinically authorized antibodies against twelve major SARS-CoV-2 variants. Neutralization activity of the HB1515 (diamonds) and HB1516 (circles) ACE2-740/B13A superheterodimers (Panel F of FIG. 52) is compared with LY-CoV555 anti-spike antibody (squares). Results for twelve major SARS-CoV-2 variants are shown: Alpha B.1.1.7, Beta B.1.351, Gamma P.1, Delta B.1.617.2, Epsilon B.1.427/B.1.429, Zeta P.2, Eta B.1.525, Iota B.1.526, Kappa B.1.617.1, Lambda C.37, Mu B.1.621, and Omicron B.1.1.529. Results are also shown for SARS-CoV-2 variants Wuhan D614G, N439K, and Alpha B.1.1.7 E484K, and the SARS-CoV-1 Urbani variant. The HB1515, HB1516, HB1507, and HB1553 ACE2-740/B13A superheterodimers have the ACE2 H378A mutation which abrogates angiotensin-converting activity. HB1515 and HB1553 have wild-type Fc receptor binding activity; HB1516 and HB1507 have the L234A, L235A mutations which abrogate Fc receptor binding activity.

[0097] FIG. 71: Pseudovirus neutralizing activity of ACE2-740/615 superheterodimers (HB1507, HB1553) and ACE2-740/B13A superheterodimers (HB1515, HB 1516) compared with eight clinically authorized antibodies against twelve major SARS-CoV-2 variants. Neutralization activity of the HB1515 (diamonds) and HB1516 (circles) ACE2-740/B13A superheterodimers (Panel F of FIG. 52) is compared with LY-CoV016 anti-spike antibody (squares). Results for twelve major SARS-CoV-2 variants are shown: Alpha B.1.1.7, Beta B.1.351, Gamma P.1, Delta B.1.617.2, Epsilon B.1.427/B.1.429, Zeta P.2, Eta B.1.525, Iota B.1.526, Kappa B.1.617.1, Lambda C.37, Mu B.1.621, and Omicron B.1.1.529. Results are also shown for SARS-CoV-2 variants Wuhan D614G, N439K, and Alpha B.1.1.7 E484K, and the SARS-CoV-1 Urbani variant. The HB1515, HB1516, HB1507, and HB1553 ACE2-740/B13A superheterodimers have the ACE2 H378A mutation which abrogates angiotensin-converting activity. HB1515 and HB1553 have wild-type Fc receptor binding activity; HB1516 and HB1507 have the L234A, L235A mutations which abrogate Fc receptor binding activity.

[0098] FIG. 72: Pseudovirus neutralizing activity of ACE2-740/615 superheterodimers (HB1507, HB1553) and ACE2-740/B13A superheterodimers (HB1515, HB1516) compared with eight clinically authorized antibodies against twelve major SARS-CoV-2 variants. Neutralization activity of the HB1515 (diamonds) and HB1516 (circles) ACE2-740/B13A superheterodimers (Panel F of FIG. 52) is compared with AZD1061 anti-spike antibody (squares). The neutralizing activity of ACE2-740/615 superheterodimers (Panel E of FIG. 52) is shown in (J) HB1507 (squares), and (K) HB1553 (squares). Results for twelve major SARS-CoV-2 variants are shown: Alpha B.1.1.7, Beta B.1.351, Gamma P.1, Delta B.1.617.2, Epsilon B.1.427/B.1.429, Zeta P.2, Eta B.1.525, Iota B.1.526, Kappa B.1.617.1, Lambda C.37, Mu B.1.621, and Omicron B.1.1.529. Results are also shown for SARS-CoV-2 variants Wuhan D614G, N439K, and Alpha B.1.1.7 E484K, and the SARS-CoV-1 Urbani variant. The HB1515, HB1516, HB1507, and HB1553 ACE2-740/B13A superheterodimers have the ACE2 H378A mutation which abrogates angiotensin-converting activity. HB 1515 and HB1553 have wild-type Fc receptor binding activity; HB1516 and HB1507 have the L234A, L235A mutations which abrogate Fc receptor binding activity.

[0099] FIG. 73: Pseudovirus neutralizing activity of ACE2-740/615 superheterodimers (HB1507, HB1553) and ACE2-740/B13A superheterodimers (HB1515, HB1516) compared with eight clinically authorized antibodies against twelve major SARS-CoV-2 variants. Neutralization activity of the HB1515 (diamonds) and HB1516 (circles) ACE2-740/B13A superheterodimers (Panel F of FIG. 52) is compared with AZD8895 anti-spike antibody (squares). Results for twelve major SARS-CoV-2 variants are shown: Alpha B.1.1.7, Beta B.1.351, Gamma P.1, Delta B.1.617.2, Epsilon B.1.427/B.1.429, Zeta P.2, Eta B.1.525, Iota B.1.526, Kappa B.1.617.1, Lambda C.37, Mu B.1.621, and Omicron B.1.1.529. Results are also shown for SARS-CoV-2 variants Wuhan D614G, N439K, and Alpha B.1.1.7 E484K, and the SARS-CoV-1 Urbani variant. The HB1515, HB1516, HB1507, and HB1553 ACE2-740/B13A superheterodimers have the ACE2 H378A mutation which abrogates angiotensin-converting activity. HB1515 and HB1553 have wild-type Fc receptor binding activity; HB1516 and HB1507 have the L234A, L235A mutations which abrogate Fc receptor binding activity.

[0100] FIG. 74: Pseudovirus neutralizing activity of ACE2-740/615 superheterodimers (HB1507, HB1553) and ACE2-740/B13A superheterodimers (HB1515, HB1516) compared with eight clinically authorized antibodies against twelve major SARS-CoV-2 variants. Neutralization activity of the HB1515 (diamonds) and HB1516 (circles) ACE2-740/B13A superheterodimers (Panel F of FIG. 52) is compared with VIR-7831 anti-spike antibody (squares). Results for twelve major SARS-CoV-2 variants are shown: Alpha B.1.1.7, Beta B.1.351, Gamma P.1, Delta B.1.617.2, Epsilon B.1.427/B.1.429, Zeta P.2, Eta B.1.525, Iota B.1.526, Kappa B.1.617.1, Lambda C.37, Mu B.1.621, and Omicron B.1.1.529. Results are also shown for SARS-CoV-2 variants Wuhan D614G, N439K, and Alpha B.1.1.7 E484K, and the SARS-CoV-1 Urbani variant. The HB1515, HB1516, HB1507, and HB1553 ACE2-740/B13A superheterodimers have the ACE2 H378A mutation which abrogates angiotensin-converting activity. HB1515 and HB1553 have wild-type Fc receptor binding activity; HB1516 and HB1507 have the L234A, L235A mutations which abrogate Fc receptor binding activity.

[0101] FIG. 75: Pseudovirus neutralizing activity of ACE2-740/615 superheterodimers (HB1507, HB1553) and ACE2-740/B13A superheterodimers (HB1515, HB1516) compared with eight clinically authorized antibodies against twelve major SARS-CoV-2 variants. Neutralization activity of the HB1515 (diamonds) and HB1516 (circles) ACE2-740/B13A superheterodimers (Panel F of FIG. 52) is compared with CT-P59 anti-spike antibody (squares). Results for twelve major SARS-CoV-2 variants are shown: Alpha B.1.1.7, Beta B.1.351, Gamma P.1, Delta B.1.617.2, Epsilon B.1.427/B.1.429, Zeta P.2, Eta B.1.525, Iota B.1.526, Kappa B.1.617.1, Lambda C.37, Mu B.1.621, and Omicron B.1.1.529. Results are also shown for SARS-CoV-2 variants Wuhan D614G, N439K, and Alpha B.1.1.7 E484K, and the SARS-CoV-1 Urbani variant. The HB1515, HB1516, HB1507, and HB1553 ACE2-740/B13A superheterodimers have the ACE2 H378A mutation which abrogates angiotensin-converting activity. HB1515 and HB1553 have wild-type Fc receptor binding activity; HB1516 and HB1507 have the L234A, L235A mutations which abrogate Fc receptor binding activity.

[0102] FIG. 76: Pseudovirus neutralizing activity of ACE2-740/615 superheterodimers (HB1507, HB1553) and ACE2-740/B13A superheterodimers (HB1515, HB1516) compared with eight clinically authorized antibodies against twelve major SARS-CoV-2 variants. Neutralization activity of the HB1515 (diamonds) and HB1516 (circles) ACE2-740/B13A superheterodimers (Panel F of FIG. 52) is compared with B13A anti-spike antibody (squares). Results for twelve major SARS-CoV-2 variants are shown: Alpha B.1.1.7, Beta B.1.351, Gamma P.1, Delta B.1.617.2, Epsilon B.1.427/B.1.429, Zeta P.2, Eta B.1.525, Iota B.1.526, Kappa B.1.617.1, Lambda C.37, Mu B.1.621, and Omicron B.1.1.529. Results are also shown for SARS-CoV-2 variants Wuhan D614G, N439K, and Alpha B.1.1.7 E484K, and the SARS-CoV-1 Urbani variant. The HB1515, HB1516, HB1507, and HB1553 ACE2-740/B13A superheterodimers have the ACE2 H378A mutation which abrogates angiotensin-converting activity. HB1515 and HB1553 have wild-type Fc receptor binding activity; HB1516 and HB1507 have the L234A, L235A mutations which abrogate Fc receptor binding activity.

[0103] FIG. 77: Pseudovirus neutralizing activity of ACE2-740/615 superheterodimers (HB1507, HB1553) and ACE2-740/B13A superheterodimers (HB1515, HB1516) compared with eight clinically authorized antibodies against twelve major SARS-CoV-2 variants. Neutralization activity of the HB1515 (diamonds) and HB1516 (circles) ACE2-740/B13A superheterodimers (Panel F of FIG. 52) is compared with HB1507 ACE2-740/615 superheterodimer (squares) (Panel F of FIG. 52). Results for twelve major SARS-CoV-2 variants are shown: Alpha B.1.1.7, Beta B.1.351, Gamma P.1, Delta B.1.617.2, Epsilon B.1.427/B.1.429, Zeta P.2, Eta B.1.525, Iota B.1.526, Kappa B.1.617.1, Lambda C.37, Mu B.1.621, and Omicron B.1.1.529. Results are also shown for SARS-CoV-2 variants Wuhan D614G, N439K, and Alpha B.1.1.7 E484K, and the SARS-CoV-1 Urbani variant. The HB1515, HB1516, HB1507, and HB1553 ACE2-740/B13A superheterodimers have the ACE2 H378A mutation which abrogates angiotensin-converting activity. HB1515 and HB1553 have wild-type Fc receptor binding activity; HB1516 and HB 1507 have the L234A, L235A mutations which abrogate Fc receptor binding activity.

[0104] FIG. 78: Pseudovirus neutralizing activity of ACE2-740/615 superheterodimers (HB1507, HB1553) and ACE2-740/B13A superheterodimers (HB1515, HB1516) compared with eight clinically authorized antibodies against twelve major SARS-CoV-2 variants. Neutralization activity of the HB1515 (diamonds) and HB1516 (circles) ACE2-740/B13A superheterodimers (Panel F of FIG. 52) is compared with HB1553 ACE2-740/615 superheterodimer (squares) (Panel E of FIG. 52). Results for twelve major SARS-CoV-2 variants are shown: Alpha B.1.1.7, Beta B.1.351, Gamma P.1, Delta B.1.617.2, Epsilon B.1.427/B.1.429, Zeta P.2, Eta B.1.525, Iota B.1.526, Kappa B.1.617.1, Lambda C.37, Mu B.1.621, and Omicron B.1.1.529. Results are also shown for SARS-CoV-2 variants Wuhan D614G, N439K, and Alpha B.1.1.7 E484K, and the SARS-CoV-1 Urbani variant. The HB1515, HB1516, HB1507, and HB1553 ACE2-740/B13A superheterodimers have the ACE2 H378A mutation which abrogates angiotensin-converting activity. HB1515 and HB1553 have wild-type Fc receptor binding activity; HB1516 and HB1507 have the L234A, L235A mutations which abrogate Fc receptor binding activity.

[0105] FIG. 79: Pseudovirus neutralizing activity of bispecific GEM-DIMERs (Fab1/Fab2 superheterodimers) compared with two-antibody cocktails of their parent antibodies. Pseudovirus neutralization activity of: (Panels A to C) HB1722 RG2-RG1 superheterodimer, (Panels D to F) ACE2-740/615 superheterodimer (HB1507, HB1553), and (Panels G to I) ACE2-740/B13A superheterodimers (HB1515, HB1516) compared with the REGN10987 (RG1) and REGN10933 (RG2) antibodies used as single agents or as a two-antibody cocktail (REGN-COV2) against the (Panels A, D, and G) N439K variant, (Panels B, E, and H) B.1.351 variant, and (Panels C, F, and I) N439K/B.1.351 variant. HB1722 (squares), REGN10987 (circles), REGN10933 (triangles), REGN-COV2 (inverted triangles), HB1507 (squares), HB1515 (diamonds), HB1515 (squares), HB1516 (diamonds).

[0106] FIG. 80: Competition binding analysis of anti-CD20/anti-CD19 bispecific GEM-DIMERs (Fab1/Fab2 superheterodimers) for binding of cell surface CD20 and CD19 compared against their parent antibodies (Rituxan, FMC63). Flow cytometry analysis of CD20/CD19-positive Toledo cells labelled by incubation with AF488-labeled Rituxan and AF647-labeled FMC63 following pre-incubation of cells with (A) no antibody, (B) unlabeled Rituxan, (C) unlabeled FMC63, (D) GEM-DIMER HB1905, or (E) GEM-DIMER HB1906. (F) unlabeled Toledo cells.

[0107] FIG. 81: Surface plasmon resonance (SPR) binding analysis of anti-CD20/anti-CD19 bispecific GEM-DIMERs (Fab1/Fab2 superheterodimers) to CD20, CD19, Fc gamma receptors, and complement C1q. SPR binding by HB1905 and HB1906 anti-CD20/CD19 bispecific superheterodimers (FIG. 1H) and Rituxan and FMC63 parent antibodies is shown for the following monovalent molecular targets: (A) CD20, (B) CD19, (C), Fc gamma RIIIa (CD16a) (Va1176), (D) Fc gamma RIIa (CD32) (Arg167), (E) Fc gamma RI (CD64), and (F) complement component C1q.

[0108] FIG. 82: Neutralizing activity of anti-TNF-α/anti-IL-17A bispecific GEMDIMERs (Fab1/Fab2 superheterodimers) compared against their parent antibodies adalimumab and secukinumab. Panel A depicts neutralization of TNF-α induced cytotoxicity in WEHI-164 cells by GEM-DIMERs HB2309 and HB2310 (Ad×Se configuration), and HB2313 and HB2314 (Se×Ad configuration) compared with the adalimumab and secukinumab parent antibodies, and panel B depicts neutralization of IL-17A activity in an IL-17A reporter assay by HB2309 and HB2310 (Ad×Se) and HB2313 and HB2314 (Se×Ad) compared with the adalimumab and secukinumab parent antibodies.

[0109] FIG. 83. Synergistic induction of IL-6 by TNF-α and IL-17A in normal human dermal fibroblasts (NHDF). Induction of IL-6 is shown for increasing amounts of human TNF-α and IL-17A alone or in combination. IL-6 was measured following a 24-hour cytokine incubation period.

[0110] FIG. 84: Molar masses determined for the topologically distinct molecules described in Example 32 and their IdeZ cleavage products confirms their structures. The molar mass of each of the observed peaks in FIG. 58 was determined by SEC-MALS. The theoretical molar mass of each of the observed peaks in FIG. 58 was calculated using the known amino acid sequence of each of the predicted structures depicted in FIG. 57, together with the known N-glycan and O-glycan modifications of each of the predicted structures (ref. 26).

[0111] FIG. 85: Quantitative solution binding analysis of spike trimer binding to ACE superdimers and dimers. K_{D} values were determined by kinetic exclusion analysis (KinExA) n-curve analysis. Binding reactions were carried out in solution using SARS-CoV-2 spike trimer as the titrant and each of the following ACE2 superdimer or dimer molecules as the constant binding partner: ACE-615 homodimer, ACE2-740 heterodimer, ACE2-740 homodimer, ACE2-740 superhomodimer, ACE2-740/615 superheterodimer, ACE2-740/B13A superheterodimer. Valency refers to the number of monovalent spike protein sites (i.e., ACE peptidase domains). \

[0112] FIG. 86: Live virus neutralizing activity of ACE2 superdimers and dimers against SARS-CoV-2 and NL63. Neutralization activity (IC₅₀) against SARS-CoV-2 and NL63 is shown for the following molecules: (Panel D of FIG. 53) ACE-615 homodimer, ACE2-740 homodimer, ACE2-740 superhomodimer; (Panel E of FIG. 53) ACE-615 homodimer, ACE2-740 homodimer, ACE2-740/615 superhomodimer; (Panel F of FIG. 53) ACE-615 heterodimer, B13A antibody, ACE2-740/B13A superheterodimer.

[0113] FIG. 87: Neutralization of SARS-CoV-2 spike trimer binding to cell surface ACE2 receptors. Neutralization activity (IC₅₀) against binding of aggregate-free spike trimer to ACE2 receptors expressed on the surface of 293 embryonic kidney cells is shown for the following molecules: (Panel G of FIG. 54) ACE-740 homodimer, ACE2-740 superhomodimer, ACE2-740/615 superheterodimer; (Panel H of FIG. 54) ACE-740 homodimer, B13A antibody, ACE2-740/B13A superheterodimer.

[0114] FIG. 88: Pseudovirus neutralizing activity of ACE2-740/Fab superheterodimers and antibody Fab/Fab superheterodimers compared with their parent antibodies. Neutralization activity (IC₅₀) against Wuhan D614G and B.1.351 variants by ACE2-740/Fab superheterodimers, Fab/Fab superheterodimers, and their parent antibodies. Parent antibodies: RG1 (REGN10987), RG2 (REGN10933), LY1 (LY-CoV555), LY2 (LY-CoV016), VR1 (VIR-7831), and CT1 (CT-P59); ACE2-740/Fab superheterodimers (ACE2 WT): RG1-ACE2 WT, RG2-ACE2 WT, LY1-ACE2 WT, LY2-ACE2 WT, VR1-ACE2 WT, CT1-ACE2 WT; ACE2-740/Fab superheterodimers (ACE2 HA): RG1-ACE2 HA, RG2-ACE2 HA, LY1-ACE2 HA, LY2-ACE2 HA, VR1-ACE2 HA, CT1-ACE2 HA; Fab/Fab superheterodimers: RG1-RG1, RG2-RG2, LY1-LY1, LY2-LY2, VR1-VR1, CT1-CT1. Abbreviations: ACE2 WT, ACE2 with wild-type angiotensin-converting activity; ACE2 HA, ACE2 with the H378A mutation which abrogates angiotensin-converting activity.

[0115] FIG. 89: Stoichiometry of spike trimer binding the topologically distinct molecules described in Example 32. SEC-MALS was used to determine the molar mass of each spike-binding protein and the molar mass of each binding complex that formed when an excess of each spike-binding protein was incubated with aggregate-free, individual spike trimers (Mr=587.7 kDa). The following equation was used to determine the molar ratio of spike binding protein to individual spike trimer for each complex:

Spike Binding Protein/Spike Trimer=Molar Mass of Complex−Molar Mass of Spike Trimer/Molar Mass of Spike Binding Protein

[0116] FIG. 90: Pharmacokinetic parameters for ACE2-740/B13A superheterodimers, antibody Fab/Fab superheterodimers, and parent antibodies in Tg32 mice. Pharmacokinetic parameters for ACE2-740/B13A superheterodimer (ACE2 WT), ACE2-740/B13A superheterodimer (ACE2 HA), RG2-RG2 superheterodimer, RG2 (REGN10933) (parent antibody), VR1-VR1 superheterodimer, VR1 (VIR-7831). Abbreviations: ACE2 WT, ACE2 with wild-type angiotensin-converting activity; ACE2 HA, ACE2 with the H378A mutation which abrogates angiotensin-converting activity. Abbreviations: C0, concentration at time=0 calculated by back-extrapolation through the first two time points; Cmax, maximum observed plasma concentration; AUCall, area under the plasma concentration vs. time curve from time=0 through the last measurable time point; AUCinf, AUC extrapolated to infinity using the terminal slope calculated from the last 3 or more time points; CL, plasma clearance calculated from the Dose/AUCinf; T1/2, terminal half-life calculated from the terminal slope; Rsq adjusted, correlation associated with the estimation of the terminal slope, adjusted for sample size.

[0117] FIG. 91: Specific activity of ACE2-740/B13A superheterodimers with wild-type and H378A mutant peptidase domains. Specific activity of ACE2-740/B13A superheterodimer (ACE2 WT), ACE2-740/B13A superheterodimer (ACE2 HA), and recombinant human ACE2 as measured by phenylalanine release with the following substrates: (A) angiotensin II, (B) bradykinin, and (C) apelin-13. Abbreviations: ACE2 WT, ACE2 with wild-type angiotensin-converting activity; ACE2 HA, ACE2 with the H378A mutation which abrogates angiotensin-converting activity.

[0118] FIG. 92: Pseudovirus neutralizing activity of ACE2-740/615 superheterodimers (HB1507, HB1553) and ACE2-740/B13A superheterodimers (HB1515, HB1516) compared with eight clinically authorized antibodies. Neutralization activity (IC₅₀) of HB1507 and HB1553 (Panel F of FIG. 52), and HB1515 and HB1516 (Panel G of FIG. 52), compared with eight clinically authorized antibodies (REGN10987, REGN10933, LY-CoV555, LY-CoV016, AZD1061, AZD8895, VIR-7831, CT-P59) and the preclinical antibody B13A. Results for twelve major SARS-CoV-2 variants are shown: Alpha B.1.1.7, Beta B.1.351, Gamma P.1, Delta B.1.617.2, Epsilon B.1.427/B.1.429, Zeta P.2, Eta B.1.525, Iota B.1.526, Kappa B.1.617.1, Lambda C.37, Mu B.1.621, and Omicron B.1.1.529. Results are also shown for SARS-CoV-2 variants Wuhan D614G, N439K, and Alpha B.1.1.7 E484K, and the SARS-CoV-1 Urbani variant. The HB1515, HB1516, HB1507, and HB1553 ACE2-740/B13A superheterodimers have the ACE2 H378A mutation which abrogates angiotensin-converting activity. HB1515 and HB1553 have wild-type Fc receptor binding activity; HB1516 and HB1507 have the L234A, L235A mutations which abrogate Fc receptor binding activity.

[0119] FIG. 93: Pseudovirus neutralizing activity of bispecific GEN-DIMERs (Fab1/Fab2 superheterodimers) compared with two-antibody cocktails of their parent antibodies. Pseudovirus neutralization activity (IC₅₀) against the N439K, B.1.351, and N439K/B.1.351 variants is shown for: bispecific RG1-RG2 superheterodimers (HB1701, HB1722) and RG2-RG1 superheterodimers (HB1705, HB1722), and the REGN10987 (RG1) and REGN10933 (RG2) parent antibodies used as single agents or as a two-antibody cocktail (REGN-COV2). Neutralization activity is also shown for ACE2-740/615 superheterodimers (HB1507, HB1553), and ACE2-740/B13A superheterodimers (HB1515, HB1516).

[0120] FIG. 94: ADCC activity of anti-CD20/anti-CD19 bispecific GEM DIMERs (Fab1/Fab2 superheterodimers) HB1905 and HB1906 compared with their parent antibodies. ADCC activity (EC₅₀) against CD20/CD19-positive Toledo cells is shown for HB1905 and HB1906 and their parent antibodies Rituxan (anti-CD20) and FMC63 (anti-CD19) used as single agents or as a two-antibody cocktail.

[0121] FIG. 95: Neutralizing activity of anti-TNF-α/anti-IL-17A bispecific GEMDIMERs (Fab1/Fab2 superheterodimers) compared against their parent antibodies adalimumab and secukinumab. Neutralizing activity against TNF-α and IL-17A is shown for bispecific GEM-DIMERs HB2309 and HB2310 (Ad×Se configuration), and HB2313 and HB2314 Se×Ad configuration) compared against their parent antibodies. Neutralization activity (IC50) was determined for TNF-α-induced cytotoxicity in WEHI-164 cells, and for IL-17A activity in an IL-17A reporter assay.

[0122] FIG. 96: Schematic representation of tetravalent anti-CD19× anti-CD3 T cell engager construct (HB3501) and anti-CD19× anti-CD3 2+1 construct used as control (HB3506).

[0123] FIG. 97: Schematic representation of the structure of different anti-CD19× anti-CD3 T cell engager constructs (middle, right) compared to the structure of anti-CD19 and anti-CD3 antibodies.

[0124] FIG. 98: Comparison of cytotoxicity (Panel A), T Cell Activation (Panels B and C), and Target Dependent Activation (Panels D and E) of constructs HB3501 and HB3506. Toledo target cells were incubated with test articles and primary human T cells (10:1 E:T ratio) for 24 h at 37° C. Percentage of dead target cells was determined using LDH release assay. B) Percent of T cells expressing CD69 and CD25 was analyzed by flow cytometry. The Y axis of Panels B, D and E is % CD25+ of T cells, while the Y axis of Panel Cis % CD69 of T cells.

### DETAILED DESCRIPTION OF THE INVENTION

### T Cell Engagers

[0125] Aspect 1: A tetrahedral antibody comprising a first, second, third, fourth, fifth, sixth domain, wherein:
[0126] a) each of the first and second domains are an Fc domain of an IgG antibody and comprise:
   [0127] i) a first polypeptide chain comprising a first N-terminus and a first C-terminus of the domain,
   [0128] ii) a second polypeptide chain comprising a second N-terminus and a second C-terminus of the domain, and either: iii)
      [0129] (1) L234A, L235A, and G236R mutations; or
      [0130] (2) L234S, L235T, and G236R mutations;
[0131] b) the first domain and the second domain are joined to each other by a non-covalent linkage between a first collectrin-like domain polypeptide attached by a peptide bond or via a peptide linker to the first N-terminus of the first domain, and a second collectrin-like domain polypeptide attached by a peptide bond or via a peptide linker to the first N-terminus of the second domain;
[0132] c) the third domain is a Fab domain which is attached at its C-terminus by a peptide bond or via a peptide linker to the N-terminus of the first collectrin-like domain polypeptide;
[0133] d) the fourth domain is a Fab domain which is attached at its C-terminus by a peptide bond or via a peptide linker to the N-terminus of the second collectrin-like domain polypeptide;
[0134] e) the fifth domain is a Fab domain which is attached at its C-terminus by a peptide bond or via a peptide linker to the second N-terminus of the first domain;
[0135] f) the sixth domain is a Fab domain which is attached at its C-terminus by a peptide bond or via a peptide linker to the second N-terminus of the second domain; and
[0136] g) either:
   [0137] i) the third and fourth domains comprise the V region of a Fab domain of SP34 or a variant thereof with at least 95% identity to said V region and the fifth and sixth domains comprise the V region of a Fab domain of FMC59 or tafasitamab or a variant thereof with at least 95% identity to said V region; or
   [0138] ii) the third and fourth domains comprise the V region of a Fab domain of FMC59 or tafasitamab or a variant thereof with at least 95% identity to said V region and the fifth and sixth domains comprise the V region of a Fab domain of SP34 or a variant thereof with at least 95% identity to said V region.

[0139] Aspect 2: The tetrahedral antibody of Aspect 1, further comprising a ninth and tenth domain, wherein:
[0140] a) the ninth domain is a Fab domain attached at its C-terminus by a peptide bond or via a peptide linker to an N-terminus of the third domain;
[0141] b) the tenth domain is a Fab domain which Fab domain is attached at its C-terminus by a peptide bond or via a peptide linker to an N-terminus of the fourth domain;
[0142] c) the ninth and tenth domains comprise either:
   [0143] i) the V region of a Fab domain of FMC59 or tafasitamab or a variant thereof with at least 95% identity to said V region, or
   [0144] ii) the V region of a Fab domain of SP34 or a variant thereof with at least 95% identity to said V region.

[0145] Aspect 3: The tetrahedral antibody of Aspect 1, further comprising an eleventh and twelfth domain, wherein:
[0146] a) the eleventh domain is attached at its C-terminus by a peptide bond or via a peptide linker to an N-terminus of the fifth domain;
[0147] b) the twelfth domain is attached at its C-terminus by a peptide bond or via a peptide linker to an N-terminus of the sixth domain;
[0148] c) the eleventh and twelfth domains comprise either:
   [0149] i) the V region of a Fab domain of FMC59 or tafasitamab or a variant thereof with at least 95% identity to said V region, or
   [0150] ii) the V region of a Fab domain of SP34 or a variant thereof with at least 95% identity to said V region.

[0151] Aspect 4: The tetrahedral antibody of any one of Aspects 2-3, wherein, of the Fab domains of the tetrahedral antibody, a total of 4 Fab domains comprise the V region of a Fab domain of FMC59 or tafasitamab or a variant thereof with at least 95% identity to said V region, and a total of 2 Fab domains comprise the V region of a Fab domain of SP34 or a variant thereof with at least 95% identity to said V region.

[0152] Aspect 5: The tetrahedral antibody of any one of Aspects 1-4, wherein the V region of a Fab domain of FMC59 comprises amino acids 1-120 of the amino acid sequence set forth in SEQ ID NO: 4777 in a first polypeptide chain and amino acids 1-107 of the amino acid sequence set forth in SEQ ID NO:4821 in a second polypeptide chain, preferably wherein each V region of the Fab domains of FMC59 each comprise complementarity determining region (CDR) sequences set forth in amino acids 26-35, 50-65, and 98-109 of SEQ ID NO: 4777 in a first polypeptide chain of the domain and complementarity determining region (CDR) sequences set forth in amino acids 24-34, 50-56, and 89-97 of SEQ ID NO:4821 in a second polypeptide chain of the domain.

[0153] Aspect 6: The tetrahedral antibody of Aspect, which is formed by four different types of polypeptide chains denoted L1, H1, L2, and H2, wherein:
[0154] a) the C-terminal portion of the H1 and H2 chains pair with one another to form each of the first and second domains,
[0155] b) the N-terminal portion of the H1 chain pairs with the one of the L1 or L2 chains to form each of the third and fourth domains,
[0156] c) the N-terminal portion of the H2 chain pairs with the other of the L1 or L2 chains to form each of the fifth and sixth domains,
[0157] d) the H1 chain contains the collectrin-like domain polypeptide between the portion of the H1 chain that pairs with the H2 chain and the portion that pairs with the L1 or L2 chain; and
[0158] e) preferably one of the H1 or H2 chains comprises a H435R/Y436F substitution and is designed to specifically pair with a lambda light chain and the other of the H1 or H2 chains comprises a H435/Y436 wild-type sequence and is designed to specifically pair with a kappa light chain.

[0159] Aspect 7: The tetrahedral antibody of Aspect 6, wherein:
[0160] a) the L1 chain comprises the amino acid sequence set forth in SEQ ID NO: 4819, the H1 chain comprises the amino acid sequence set forth in SEQ ID NO: 7852, the L2 chain comprises the amino acid sequence set forth in SEQ ID NO: 699, and the H2 chain comprises the amino acid sequence set forth in SEQ ID NO: 7849; or
[0161] b) the L1 chain comprises the amino acid sequence set forth in SEQ ID NO: 7868, the H1 chain comprises the amino acid sequence set forth in SEQ ID NO: 7852, the L2 chain comprises the amino acid sequence set forth in SEQ ID NO: 699, and the H2 chain comprises the amino acid sequence set forth in SEQ ID NO: 7855.

[0162] Aspect 8: The tetrahedral antibody of Aspect 2, which is formed by four different types of polypeptide chains denoted L1, H1, L2, and H2, wherein:
[0163] a) the C-terminal portion of the H1 and H2 chains pair with one another to form each of the first and second domains;
[0164] b) the N-terminal portion of the H1 chain pairs with the L1 or L2 chains to form each of the ninth, and tenth domains,
[0165] c) the portion of the H1 chain between (i) the N-terminal portion of the H1 chain that pairs with the L1 or L2 chains to form each of the ninth, and tenth domains, and (ii) the portion of the H1 chain containing the collectrin-like domain, pairs with the other of the L1 or L2 chains to form each of the third and fourth domains;
[0166] d) the N-terminal portion of the H2 chain pairs with the L2 chains to form each of the fifth and sixth domains;
[0167] e) the H1 chain contains the collectrin-like domain polypeptide between the portion of the H1 chain that pairs with the H2 chain and the portion that pairs with the L1 or L2 chains; and
[0168] f) preferably one of the H1 or H2 chains comprises a H435R/Y436F substitution and is designed to specifically pair with a lambda light chain and the other of the H1 or H2 chains comprises a H435/Y436 wild-type sequence and is designed to specifically pair with a kappa light chain.

[0169] Aspect 9: The tetrahedral antibody of Aspect 8, wherein:
[0170] a) the L1 chain comprises the amino acid sequence set forth in SEQ ID NO: 4819, the H1 chain comprises the amino acid sequence set forth in SEQ ID NO: 7848, the L2 chain comprises the amino acid sequence set forth in SEQ ID NO: 699, and the H2 chain comprises the amino acid sequence set forth in SEQ ID NO: 7849;
[0171] b) the L1 chain comprises the amino acid sequence set forth in SEQ ID NO: 4819, the H1 chain comprises the amino acid sequence set forth in SEQ ID NO: 7850, the L2 chain comprises the amino acid sequence set forth in SEQ ID NO: 699, and the H2 chain comprises the amino acid sequence set forth in SEQ ID NO: 7849;
[0172] c) the L1 chain comprises the amino acid sequence set forth in SEQ ID NO: 7868, the H1 chain comprises the amino acid sequence set forth in SEQ ID NO: 7854, the L2 chain comprises the amino acid sequence set forth in SEQ ID NO: 699, and the H2 chain comprises the amino acid sequence set forth in SEQ ID NO: 7855;
[0173] d) the L1 chain comprises the amino acid sequence set forth in SEQ ID NO: 7868, the H1 chain comprises the amino acid sequence set forth in SEQ ID NO: 7856, the L2 chain comprises the amino acid sequence set forth in SEQ ID NO: 699, and the H2 chain comprises the amino acid sequence set forth in SEQ ID NO: 7855;
[0174] e) the L1 chain comprises the amino acid sequence set forth in SEQ ID NO: 4819, the H1 chain comprises the amino acid sequence set forth in SEQ ID NO: 7858, the L2 chain comprises the amino acid sequence set forth in SEQ ID NO: 699, and the H2 chain comprises the amino acid sequence set forth in SEQ ID NO: 7859;
[0175] f) the L1 chain comprises the amino acid sequence set forth in SEQ ID NO: 4819, the H1 chain comprises the amino acid sequence set forth in SEQ ID NO: 7860, the L2 chain comprises the amino acid sequence set forth in SEQ ID NO: 699, and the H2 chain comprises the amino acid sequence set forth in SEQ ID NO: 7859;
[0176] g) the L1 chain comprises the amino acid sequence set forth in SEQ ID NO: 7868, the H1 chain comprises the amino acid sequence set forth in SEQ ID NO: 7861, the L2 chain comprises the amino acid sequence set forth in SEQ ID NO: 699, and the H2 chain comprises the amino acid sequence set forth in SEQ ID NO: 7862;
[0177] h) the L1 chain comprises the amino acid sequence set forth in SEQ ID NO: 7868, the H1 chain comprises the amino acid sequence set forth in SEQ ID NO: 7863, the L2 chain comprises the amino acid sequence set forth in SEQ ID NO: 699, and the H2 chain comprises the amino acid sequence set forth in SEQ ID NO: 7862;
[0178] i) the L1 chain comprises the amino acid sequence set forth in SEQ ID NO: 4819, the H1 chain comprises the amino acid sequence set forth in SEQ ID NO: 7858, the L2 chain comprises the amino acid sequence set forth in SEQ ID NO: 7869, and the H2 chain comprises the amino acid sequence set forth in SEQ ID NO: 7859;
[0179] j) the L1 chain comprises the amino acid sequence set forth in SEQ ID NO: 7868, the H1 chain comprises the amino acid sequence set forth in SEQ ID NO: 7861, the L2 chain comprises the amino acid sequence set forth in SEQ ID NO: 7869, and the H2 chain comprises the amino acid sequence set forth in SEQ ID NO: 7862;
[0180] k) the L1 chain comprises the amino acid sequence set forth in SEQ ID NO: 4819, the H1 chain comprises the amino acid sequence set forth in SEQ ID NO: 7858, the L2 chain comprises the amino acid sequence set forth in SEQ ID NO: 7870, and the H2 chain comprises the amino acid sequence set forth in SEQ ID NO: 7859; or
[0181] l) the L1 chain comprises the amino acid sequence set forth in SEQ ID NO: 7868, the H1 chain comprises the amino acid sequence set forth in SEQ ID NO: 7861, the L2 chain comprises the amino acid sequence set forth in SEQ ID NO: 7870, and the H2 chain comprises the amino acid sequence set forth in SEQ ID NO: 7862.

[0182] Aspect 10: The tetrahedral antibody of Aspect 3, which is formed by four different types of polypeptide chains denoted L1, H1, L2, and H2, wherein:
[0183] a) the C-terminal portion of the H1 and H2 chains pair with one another to form each of the first and second domains;
[0184] b) the N-terminal portion of the H1 chain pairs with the L1 or L2 chains to form each of the third and fourth domains;
[0185] c) the N-terminal portion of the H2 chain pairs with the L1 or L2 chains to form each of the eleventh and twelfth domains;
[0186] d) the portion of the H2 chain between (i) the N-terminal portion of the H2 chain that pairs with the L1 or L2 chain to form each of the eleventh and twelfth domains, and (ii) the portion of the H2 chain that pairs with the H1 chain to form the first and second domains, pairs with the other of the L1 or L2 chains to form each of the fifth and sixth domains;
[0187] e) the H1 chain contains the collectrin-like domain polypeptide between the portion of the H1 chain that pairs with the H2 chain and the portion that pairs with the L1 or L2 chains; and
[0188] f) preferably one of the H1 or H2 chains comprises a H435R/Y436F substitution and is designed to specifically pair with a lambda light chain and the other of the H1 or H2 chains comprises a H435/Y436 wild-type sequence and is designed to specifically pair with a kappa light chain.

[0189] Aspect 11: The tetrahedral antibody of Aspect 10, wherein:
[0190] a) the L1 chain comprises the amino acid sequence set forth in SEQ ID NO: 4819, the H1 chain comprises the amino acid sequence set forth in SEQ ID NO: 7864, the L2 chain comprises the amino acid sequence set forth in SEQ ID NO: 7869, and the H2 chain comprises the amino acid sequence set forth in SEQ ID NO: 7865;
[0191] b) the L1 chain comprises the amino acid sequence set forth in SEQ ID NO: 7868, the H1 chain comprises the amino acid sequence set forth in SEQ ID NO: 7866, the L2 chain comprises the amino acid sequence set forth in SEQ ID NO: 7869, and the H2 chain comprises the amino acid sequence set forth in SEQ ID NO: 7867;
[0192] c) the L1 chain comprises the amino acid sequence set forth in SEQ ID NO: 4819, the H1 chain comprises the amino acid sequence set forth in SEQ ID NO: 7864, the L2 chain comprises the amino acid sequence set forth in SEQ ID NO: 7870, and the H2 chain comprises the amino acid sequence set forth in SEQ ID NO: 7865; or
[0193] d) the L1 chain comprises the amino acid sequence set forth in SEQ ID NO: 7868, the H1 chain comprises the amino acid sequence set forth in SEQ ID NO: 7866, the L2 chain comprises the amino acid sequence set forth in SEQ ID NO: 7870, and the H2 chain comprises the amino acid sequence set forth in SEQ ID NO: 7867.

[0194] Aspect 12: A tetrahedral antibody comprising a first, second, third, fourth, ninth, and tenth domain, wherein:
[0195] a) each of the first and second domains are an Fc domain of an IgG antibody and comprise:
   [0196] i) a first polypeptide chain comprising a first N-terminus and a first C-terminus of the domain,
   [0197] ii) a second polypeptide chain comprising a second N-terminus and a second C-terminus of the domain, and
   [0198] iii) either:
      [0199] (1) L234A, L235A, and G236R mutations; or
      [0200] (2) L234S, L235T, and G236R mutations;
[0201] b) the first domain and the second domain are joined to each other by a non-covalent linkage between a first collectrin-like domain polypeptide attached by a peptide bond or via a peptide linker to the first N-terminus of the first domain, and a second collectrin-like domain polypeptide attached by a peptide bond or via a peptide linker to the first N-terminus of the second domain;
[0202] c) the third domain is a Fab domain which is attached at its C-terminus by a peptide bond or via a peptide linker to the N-terminus of the first collectrin-like domain polypeptide;
[0203] d) the fourth domain is a Fab domain which is attached at its C-terminus by a peptide bond or via a peptide linker to the N-terminus of the second collectrin-like domain polypeptide;
[0204] e) the ninth domain is a Fab domain attached at its C-terminus by a peptide bond or via a peptide linker to an N-terminus of the third domain;
[0205] f) the tenth domain is a Fab domain which Fab domain is attached at its C-terminus by a peptide bond or via a peptide linker to an N-terminus of the fourth domain;
[0206] g) either:
   [0207] i) the third and fourth domains comprise the V region of a Fab domain of SP34 or a variant thereof with at least 95% identity to said V region and the ninth and tenth domains comprise the V region of a Fab domain of FMC59 or tafasitamab or a variant thereof with at least 95% identity to said V region; or
   [0208] ii) the third and fourth domains comprise the V region of a Fab domain of FMC59 or tafasitamab or a variant thereof with at least 95% identity to said V region and the ninth and tenth domains comprise the V region of a Fab domain of SP34 or a variant thereof with at least 95% identity to said V region.

[0209] Aspect 13: The tetrahedral antibody of Aspect 12, wherein the V region of a Fab domain of FMC59 comprises amino acids 1-120 of the amino acid sequence set forth in SEQ ID NO:4777 in a first polypeptide chain and amino acids 1-107 of the amino acid sequence set forth in SEQ ID NO:4821 in a second polypeptide chain.

[0210] Aspect 14: The tetrahedral antibody of Aspect 13, wherein each V region of the Fab domains of FMC59 each comprise complementarity determining region (CDR) sequences set forth in amino acids 26-35, 50-65, and 98-109 of SEQ ID NO: 4777 in a first polypeptide chain of the domain and complementarity determining region (CDR) sequences set forth in amino acids 24-34, 50-56, and 89-97 of SEQ ID NO:4821 in a second polypeptide chain of the domain.

[0211] Aspect 15: The tetrahedral antibody of Aspect 12, which is formed by four different types of polypeptide chains denoted L1, H1, L2, and H2, wherein:
[0212] a) the C-terminal portion of the H1 and H2 chains pair with one another to form each of the first and second domains;
[0213] b) the N-terminal portion of the H1 chain pairs with the L1 or L2 chains to form each of the ninth, and tenth domains,
[0214] c) the portion of the H1 chain between (i) the N-terminal portion of the H1 chain that pairs with the L1 or L2 chains to form each of the ninth, and tenth domains, and (ii) the portion of the H1 chain containing the collectrin-like domain, pairs with the other of the L1 or L2 chains to form each of the third and fourth domains; and
[0215] d) the H1 chain contains the collectrin-like domain polypeptide between the portion of the H1 chain that pairs with the H2 chain and the portion that pairs with the L1 or L2 chains.

[0216] Aspect 16: The tetrahedral antibody of Aspect 15, wherein:
[0217] a) the L1 chain comprises the amino acid sequence set forth in SEQ ID NO: 4819, the H1 chain comprises the amino acid sequence set forth in SEQ ID NO: 7848, the L2 chain comprises the amino acid sequence set forth in SEQ ID NO: 699, and the H2 chain comprises the amino acid sequence set forth in SEQ ID NO: 7851;
[0218] b) the L1 chain comprises the amino acid sequence set forth in SEQ ID NO: 4819, the H1 chain comprises the amino acid sequence set forth in SEQ ID NO: 7850, the L2 chain comprises the amino acid sequence set forth in SEQ ID NO: 699, and the H2 chain comprises the amino acid sequence set forth in SEQ ID NO: 7851;
[0219] c) the L1 chain comprises the amino acid sequence set forth in SEQ ID NO: 7868, the H1 chain comprises the amino acid sequence set forth in SEQ ID NO: 7864, the L2 chain comprises the amino acid sequence set forth in SEQ ID NO: 7870, and the H2 chain comprises the amino acid sequence set forth in SEQ ID NO: 7851; or
[0220] d) the L1 chain comprises the amino acid sequence set forth in SEQ ID NO: 7868, the H1 chain comprises the amino acid sequence set forth in SEQ ID NO: 7866, the L2 chain comprises the amino acid sequence set forth in SEQ ID NO: 7870, and the H2 chain comprises the amino acid sequence set forth in SEQ ID NO: 7851.

[0221] Aspect 17: One or more vectors comprising polynucleotides which encode polypeptides comprising the four different types of polypeptide chains of any one of Aspects 7, 9, 11, or 16, wherein each polynucleotide is operably linked to a promoter which directs expression of the polynucleotide in a host cell.

[0222] Aspect 18: A host cell comprising the one or more vectors of Aspect 17.

[0223] Aspect 19: A method of producing a tetrahedral antibody, the method comprising recombinantly expressing the four different types of polypeptide chains of Aspects 7, 9, 11, or 16 in a host cell.

[0224] Aspect 20: A pharmaceutical composition comprising the tetrahedral antibody of any one of Aspects 1-16 and one or more pharmaceutically acceptable excipients.

[0225] Aspect 21: A method of treating cancer, inflammatory disease, or autoimmune disease in a subject, the method comprising administering to the subject a therapeutically effective amount of the pharmaceutical composition of Aspect 20.

[0226] Aspect 22: A method of treating B cell disease, the method comprising administering to the subject a therapeutically effective amount of the pharmaceutical composition of Aspect 20.

### Topologically Engineered Superdimeric Antibodies

[0227] This invention also provides a tetrahedral antibody comprising a first, second, third, fourth, fifth, and sixth domain, wherein:
[0228] a) each of the first and second domains are an Fc domain and comprise:
   [0229] i) a first polypeptide chain comprising a first N-terminus and a first C-terminus of the domain, and
   [0230] ii) a second polypeptide chain comprising a second N-terminus and a second C-terminus of the domain,
[0231] b) the third, fourth, fifth, and sixth domains are Fab domains,
[0232] c) the first domain and the second domain are joined to each other by a non-covalent linkage between a first collectrin-like domain polypeptide attached by a peptide bond or via a peptide linker to the first N-terminus of the first domain, and a second collectrin-like domain polypeptide attached by a peptide bond or via a peptide linker to the first N-terminus of the second domain;
[0233] d) the third domain is attached at its C-terminus by a peptide bond or via a peptide linker to the N-terminus of the first collectrin-like domain polypeptide,
[0234] e) the fourth domain is attached at its C-terminus by a peptide bond or via a peptide linker to the N-terminus of the second collectrin-like domain polypeptide,
[0235] f) the fifth domain is attached at its C-terminus by a peptide bond or via a peptide linker to the second N-terminus of the first domain,
[0236] g) the sixth domain is attached at its C-terminus by a peptide bond or via a peptide linker to the second N-terminus of the second domain.

[0237] In embodiments of the invention, the first and second domains are each an Fc domain of an IgG antibody.

[0238] In embodiments of the invention, the first and second domains each comprise one or more mutations that enhance Fc gamma receptor binding activity.

[0239] In embodiments of the invention, the one or more mutations that enhance Fc gamma receptor binding activity are selected from:
[0240] a) S239D; and
[0241] b) I332E.

[0242] In embodiments of the invention, the first and second domains each comprise:
[0243] a) S239D on the first polypeptide chain of the domain and I332E on the second polypeptide chain of the domain;
[0244] b) I332E on the first polypeptide chain of the domain and S239D on the second polypeptide chain of the domain; or
[0245] c) S239D and I332E on both the first polypeptide chain and second polypeptide chain of the domain.

[0246] In embodiments of the invention, the first and second domains each comprise one or more mutations that reduce Fc gamma receptor binding activity.

[0247] In embodiments of the invention, the one or more mutations that reduce Fc gamma receptor binding activity are selected from:
[0248] a) P329G/L234A/L235A (PGLALA),
[0249] b) L234A/L235A (LALA),
[0250] c) P331S/L234A/L235A,
[0251] d) L234F/L235E/P331S,
[0252] e) L234F/L235E/P329G,
[0253] f) L234S/L235T/G236R, and
[0254] g) L234A/L235A/G236R.

[0255] In embodiments of the invention, the third and fourth domains each comprise:
[0256] a) the V region of a Fab domain of rituximab or a variant thereof with at least 90%, preferably at least 95% identity to said V region;
[0257] b) the V region of a Fab domain of FMC63 or a variant thereof with at least 90%, preferably at least 95% identity to said V region;
[0258] c) the V region of a Fab domain of FMC60 or a variant thereof with at least 90%, preferably at least 95% identity to said V region;
[0259] d) the V region of a Fab domain of FMC59 or a variant thereof with at least 90%, preferably at least 95% identity to said V region;
[0260] e) the V region of a Fab domain of Adalimumab or a variant thereof with at least 90%, preferably at least 95% identity to said V region;
[0261] f) the V region of a Fab domain of Ustekinumab or a variant thereof with at least 90%, preferably at least 95% identity to said V region;
[0262] g) the V region of a Fab domain of Secukinumab or a variant thereof with at least 90%, preferably at least 95% identity to said V region; or
[0263] h) the V region of a Fab domain of Vedolizumab or a variant thereof with at least 90%, preferably at least 95% identity to said V region.

[0264] In embodiments of the invention, the fifth and sixth domains each comprise:
[0265] a) the V region of a Fab domain of rituximab or a variant thereof with at least 90%, preferably at least 95% identity to said V region;
[0266] b) the V region of a Fab domain of FMC63 or a variant thereof with at least 90%, preferably at least 95% identity to said V region;
[0267] c) the V region of a Fab domain of FMC60 or a variant thereof with at least 90%, preferably at least 95% identity to said V region;
[0268] d) the V region of a Fab domain of FMC59 or a variant thereof with at least 90%, preferably at least 95% identity to said V region;
[0269] e) the V region of a Fab domain of Adalimumab or a variant thereof with at least 90%, preferably at least 95% identity to said V region;
[0270] f) the V region of a Fab domain of Ustekinumab or a variant thereof with at least 90%, preferably at least 95% identity to said V region;
[0271] g) the V region of a Fab domain of Secukinumab or a variant thereof with at least 90%, preferably at least 95% identity to said V region; or
[0272] h) the V region of a Fab domain of Vedolizumab or a variant thereof with at least 90%, preferably at least 95% identity to said V region.

[0273] In embodiments of the invention:
[0274] a) the third and fourth domains each comprise the V region of a Fab domain of rituximab or a variant thereof with at least 90%, preferably at least 95% identity to said V region, and the fifth and sixth domains each comprise the V region of a Fab domain of FMC63 or a variant thereof with at least 90%, preferably at least 95% identity to said V region;
[0275] b) the third and fourth domains each comprise the V region of a Fab domain of FMC63 or a variant thereof with at least 90%, preferably at least 95% identity to said V region, and the fifth and sixth domains each comprise the V region of a Fab domain of rituximab or a variant thereof with at least 90%, preferably at least 95% identity to said V region,
[0276] c) the third, fourth, fifth and sixth domains each comprise the V region of a Fab domain of rituximab or a variant thereof with at least 90%, preferably at least 95% identity to said V region;
[0277] d) the third, fourth, fifth and sixth domains each comprise the V region of a Fab domain of FMC63 or a variant thereof with at least 90%, preferably at least 95% identity to said V region;
[0278] e) the third and fourth domains each comprise the V region of a Fab domain of rituximab or a variant thereof with at least 90%, preferably at least 95% identity to said V region, and the fifth and sixth domains each comprise the V region of a Fab domain of FMC60 or a variant thereof with at least 90%, preferably at least 95% identity to said V region;
[0279] f) the third and fourth domains each comprise the V region of a Fab domain of FMC60 or a variant thereof with at least 90%, preferably at least 95% identity to said V region, and the fifth and sixth domains each comprise the V region of a Fab domain of rituximab or a variant thereof with at least 90%, preferably at least 95% identity to said V region;
[0280] g) the third, fourth, fifth and sixth domains each comprise the V region of a Fab domain of FMC60 or a variant thereof with at least 90%, preferably at least 95% identity to said V region;
[0281] h) the third and fourth domains each comprise the V region of a Fab domain of rituximab or a variant thereof with at least 90%, preferably at least 95% identity to said V region, and the fifth and sixth domains each comprise the V region of a Fab domain of FMC59 or a variant thereof with at least 90%, preferably at least 95% identity to said V region;
[0282] i) the third and fourth domains each comprise the V region of a Fab domain of FMC59 or a variant thereof with at least 90%, preferably at least 95% identity to said V region, and the fifth and sixth domains each comprise the V region of a Fab domain of rituximab or a variant thereof with at least 90%, preferably at least 95% identity to said V region; or
[0283] j) the third, fourth, fifth and sixth domains each comprise the V region of a Fab domain of FMC59 or a variant thereof with at least 90%, preferably at least 95% identity to said V region.

[0284] In embodiments of the immediately preceding embodiment of the invention, the first and second domains are each an Fc domain of an IgG antibody. In embodiments, the first and second domains each comprise one or more mutations that enhance Fc gamma receptor activity. In embodiments, the one or more mutations that enhance Fc gamma receptor activity are selected from:
[0285] a) S239D; and
[0286] b) I332E.

[0287] In embodiments of the immediately preceding embodiment of the invention, the first and second domains each comprise:
[0288] a) S239D on the first polypeptide chain of the domain and I332E on the second polypeptide chain of the domain;
[0289] b) I332E on the first polypeptide chain of the domain and S239D on the second polypeptide chain of the domain; or
[0290] c) S239D and I332E on both the first polypeptide chain and second polypeptide chain of the domain.

[0291] In embodiments of the invention:
[0292] a) the first and second domains are each a wild-type Fc domain, the third and fourth domains each comprise the V region of a Fab domain of rituximab or a variant thereof with at least 90%, preferably at least 95% identity to said V region, and the fifth and sixth domains each comprise the V region of a Fab domain of FMC63 or a variant thereof with at least 90%, preferably at least 95% identity to said V region;
[0293] b) the first and second domains each comprise S239D and I332E mutations, the third and fourth domains each comprise the V region of a Fab domain of rituximab or a variant thereof with at least 90%, preferably at least 95% identity to said V region, and the fifth and sixth domains each comprise the V region of a Fab domain of FMC63 or a variant thereof with at least 90%, preferably at least 95% identity to said V region;
[0294] c) the first and second domains are each a wild-type Fc domain, the third and fourth domains each comprise the V region of a Fab domain of FMC63 or a variant thereof with at least 90%, preferably at least 95% identity to said V region, and the fifth and sixth domains each comprise the V region of a Fab domain of rituximab or a variant thereof with at least 90%, preferably at least 95% identity to said V region;
[0295] d) the first and second domains each comprise S239D and I332E mutations, the third and fourth domains each comprise the V region of a Fab domain of FMC63 or a variant thereof with at least 90%, preferably at least 95% identity to said V region, and the fifth and sixth domains each comprise the V region of a Fab domain of rituximab or a variant thereof with at least 90%, preferably at least 95% identity to said V region;
[0296] e) the first and second domains are each a wild-type Fc domain, the third, fourth, fifth and sixth domains each comprise the V region of a Fab domain of rituximab or a variant thereof with at least 90%, preferably at least 95% identity to said V region;
[0297] f) the first and second domains each comprise S239D and I332E mutations, the third, fourth, fifth and sixth domains each comprise the V region of a Fab domain of rituximab or a variant thereof with at least 90%, preferably at least 95% identity to said V region;
[0298] g) the first and second domains are each a wild-type Fc domain, the third, fourth, fifth and sixth domains each comprise the V region of a Fab domain of FMC63 or a variant thereof with at least 90%, preferably at least 95% identity to said V region;
[0299] h) the first and second domains each comprise S239D and I332E mutations, the third, fourth, fifth and sixth domains each comprise the V region of a Fab domain of FMC63 or a variant thereof with at least 90%, preferably at least 95% identity to said V region;
[0300] i) the first and second domains are each a wild-type Fc domain, the third and fourth domains each comprise the V region of a Fab domain of rituximab or a variant thereof with at least 90%, preferably at least 95% identity to said V region, and the fifth and sixth domains each comprise the V region of a Fab domain of FMC60 or a variant thereof with at least 90%, preferably at least 95% identity to said V region;
[0301] j) the first and second domains each comprise S239D and I332E mutations, the third and fourth domains each comprise the V region of a Fab domain of rituximab or a variant thereof with at least 90%, preferably at least 95% identity to said V region, and the fifth and sixth domains each comprise the V region of a Fab domain of FMC60 or a variant thereof with at least 90%, preferably at least 95% identity to said V region;
[0302] k) the first and second domains are each a wild-type Fc domain, the third and fourth domains each comprise the V region of a Fab domain of FMC60 or a variant thereof with at least 90%, preferably at least 95% identity to said V region, and the fifth and sixth domains each comprise the V region of a Fab domain of rituximab or a variant thereof with at least 90%, preferably at least 95% identity to said V region;
[0303] l) the first and second domains each comprise S239D and I332E mutations, the third and fourth domains each comprise the V region of a Fab domain of FMC60 or a variant thereof with at least 90%, preferably at least 95% identity to said V region, and the fifth and sixth domains each comprise the V region of a Fab domain of rituximab or a variant thereof with at least 90%, preferably at least 95% identity to said V region;
[0304] m) the first and second domains are each a wild-type Fc domain, the third, fourth, fifth and sixth domains each comprise the V region of a Fab domain of FMC60 or a variant thereof with at least 90%, preferably at least 95% identity to said V region;
[0305] n) the first and second domains each comprise S239D and I332E mutations, the third, fourth, fifth and sixth domains each comprise the V region of a Fab domain of FMC60 or a variant thereof with at least 90%, preferably at least 95% identity to said V region;
[0306] o) the first and second domains are each a wild-type Fc domain, the third and fourth domains each comprise the V region of a Fab domain of rituximab or a variant thereof with at least 90%, preferably at least 95% identity to said V region, and the fifth and sixth domains each comprise the V region of a Fab domain of FMC59 or a variant thereof with at least 90%, preferably at least 95% identity to said V region;
[0307] p) the first and second domains each comprise S239D and I332E mutations, the third and fourth domains each comprise the V region of a Fab domain of rituximab or a variant thereof with at least 90%, preferably at least 95% identity to said V region, and the fifth and sixth domains each comprise the V region of a Fab domain of FMC59 or a variant thereof with at least 90%, preferably at least 95% identity to said V region;
[0308] q) the first and second domains are each a wild-type Fc domain, the third and fourth domains each comprise the V region of a Fab domain of FMC59 or a variant thereof with at least 90%, preferably at least 95% identity to said V region, and the fifth and sixth domains each comprise the V region of a Fab domain of rituximab or a variant thereof with at least 90%, preferably at least 95% identity to said V region;
[0309] r) the first and second domains each comprise S239D and I332E mutations, the third and fourth domains each comprise the V region of a Fab domain of FMC59 or a variant thereof with at least 90%, preferably at least 95% identity to said V region, and the fifth and sixth domains each comprise the V region of a Fab domain of rituximab;
[0310] s) the first and second domains are each a wild-type Fc domain, the third, fourth, fifth and sixth domains each comprise the V region of a Fab domain of FMC59 or a variant thereof with at least 90%, preferably at least 95% identity to said V region; or
[0311] t) the first and second domains each comprise S239D and I332E mutations, the third, fourth, fifth and sixth domains each comprise the V region of a Fab domain of FMC59 or a variant thereof with at least 90%, preferably at least 95% identity to said V region.

[0312] In embodiments of the immediately preceding embodiment of the invention, the first and second domains each comprise S239D and I332E on both the first polypeptide chain and second polypeptide chain of the domain.

[0313] In embodiments of the invention:
[0314] a) the V region of a Fab domain of rituximab comprises the amino acid sequence set forth in SEQ ID NO: 7169 in a first polypeptide chain and the amino acid sequence set forth in SEQ ID NO: 7173 in a second polypeptide chain;
[0315] b) the V region of a Fab domain of FMC63 comprises amino acids 1-120 of the amino acid sequence set forth in SEQ ID NO:4741 in a first polypeptide chain and amino acids 1-107 of the amino acid sequence set forth in SEQ ID NO:4812 in a second polypeptide chain;
[0316] c) the V region of a Fab domain of FMC60 comprises amino acids 1-120 of the amino acid sequence set forth in SEQ ID NO:4777 in a first polypeptide chain and amino acids 1-107 of the amino acid sequence set forth in SEQ ID NO:4818 in a second polypeptide chain; and
[0317] d) the V region of a Fab domain of FMC59 comprises amino acids 1-120 of the amino acid sequence set forth in SEQ ID NO:4777 in a first polypeptide chain and amino acids 1-107 of the amino acid sequence set forth in SEQ ID NO:4821 in a second polypeptide chain.

[0318] In embodiments of the immediately preceding embodiment of the invention:
[0319] a) if the third, fourth, fifth or sixth domain comprises the V region of a Fab domain of rituximab or a variant thereof with at least 90% or at least 95% identity to said V region, said domain comprises complementarity determining region (CDR) sequences set forth in SEQ ID NOs: 7170-7172 in a first polypeptide chain of the domain and complementarity determining region (CDR) sequences set forth in SEQ ID NOs: 7174-7176 in a second polypeptide chain of the domain;
[0320] b) if the third, fourth, fifth or sixth domain comprises the V region of a Fab domain of FMC63 or a variant thereof with at least 90% or at least 95% identity to said V region, said domain comprises complementarity determining region (CDR) sequences set forth in amino acids 26-35, 50-65, and 98-109 of SEQ ID NO: 4741 in a first polypeptide chain of the domain and complementarity determining region (CDR) sequences set forth in amino acids 24-34, 50-56, and 89-97 of SEQ ID NO:4812 in a second polypeptide chain of the domain;
[0321] c) if the third, fourth, fifth or sixth domain comprises the V region of a Fab domain of FMC60 or a variant thereof with at least 90% or at least 95% identity to said V region, said domain comprises complementarity determining region (CDR) sequences set forth in amino acids 26-35, 50-65, and 98-109 of SEQ ID NO: 4777 in a first polypeptide chain of the domain and complementarity determining region (CDR) sequences set forth in amino acids 24-34, 50-56, and 89-97 of SEQ ID NO: 4818 in a second polypeptide chain of the domain; and d) if the third, fourth, fifth or sixth domain comprises the V region of a Fab domain of FMC59 or a variant thereof with at least 90% or at least 95% identity to said V region, said domain comprises complementarity determining region (CDR) sequences set forth in amino acids 26-35, 50-65, and 98-109 of SEQ ID NO: 4777 in a first polypeptide chain of the domain and complementarity determining region (CDR) sequences set forth in amino acids 24-34, 50-56, and 89-97 of SEQ ID NO:4821 in a second polypeptide chain of the domain.

[0322] In embodiments of the invention:
[0323] a) if the third, fourth, fifth or sixth domain comprises the V region of a Fab domain of rituximab or a variant thereof with at least 90% or at least 95% identity to said V region, said domain comprises complementarity determining region (CDR) sequences set forth in SEQ ID NOs: 7170-7172 in a first polypeptide chain of the domain and complementarity determining region (CDR) sequences set forth in SEQ ID NOs: 7174-7176 in a second polypeptide chain of the domain;
[0324] b) if the third, fourth, fifth or sixth domain comprises the V region of a Fab domain of FMC63 or a variant thereof with at least 90% or at least 95% identity to said V region, said domain comprises complementarity determining region (CDR) sequences set forth in amino acids 26-35, 50-65, and 98-109 of SEQ ID NO: 4741 in a first polypeptide chain of the domain and complementarity determining region (CDR) sequences set forth in amino acids 24-34, 50-56, and 89-97 of SEQ ID NO:4812 in a second polypeptide chain of the domain;
[0325] c) if the third, fourth, fifth or sixth domain comprises the V region of a Fab domain of FMC60 or a variant thereof with at least 90% or at least 95% identity to said V region, said domain comprises complementarity determining region (CDR) sequences set forth in amino acids 26-35, 50-65, and 98-109 of SEQ ID NO: 4777 in a first polypeptide chain of the domain and complementarity determining region (CDR) sequences set forth in amino acids 24-34, 50-56, and 89-97 of SEQ ID NO: 4818 in a second polypeptide chain of the domain; and
[0326] d) if the third, fourth, fifth or sixth domain comprises the V region of a Fab domain of FMC59 or a variant thereof with at least 90% or at least 95% identity to said V region, said domain comprises complementarity determining region (CDR) sequences set forth in amino acids 26-35, 50-65, and 98-109 of SEQ ID NO: 4777 in a first polypeptide chain of the domain and complementarity determining region (CDR) sequences set forth in amino acids 24-34, 50-56, and 89-97 of SEQ ID NO:4821 in a second polypeptide chain of the domain.

[0327] In embodiments of the invention, the tetrahedral antibody is formed by four different types of polypeptide chains denoted L1, H1, L2, and H2, wherein:
[0328] a) the C-terminal portion of the H1 and H2 chains pair with one another to form each of the first and second domains,
[0329] b) the N-terminal portion of the H1 chain pairs with the L1 chains to form each of the third and fourth domains,
[0330] c) the N-terminal portion of the H2 chain pairs with the L2 chains to form each of the fifth and sixth domains, and
[0331] d) the H1 chain contains the collectrin-like domain polypeptide between the portion of the H1 chain that pairs with the H2 chain and the portion that pairs with the L1 chain.

[0332] In embodiments of the invention:
[0333] a) the L1 chain comprises the amino acid sequence set forth in SEQ ID NO: 733, the H1 chain comprises the amino acid sequence set forth in SEQ ID NO: 707, the L2 chain comprises the amino acid sequence set forth in SEQ ID NO: 734, and the H2 chain comprises the amino acid sequence set forth in SEQ ID NO: 708;
[0334] b) the L1 chain comprises the amino acid sequence set forth in SEQ ID NO: 735, the H1 chain comprises the amino acid sequence set forth in SEQ ID NO: 709, the L2 chain comprises the amino acid sequence set forth in SEQ ID NO: 736, and the H2 chain comprises the amino acid sequence set forth in SEQ ID NO: 710;
[0335] c) the L1 chain comprises the amino acid sequence set forth in SEQ ID NO: 735, the H1 chain comprises the amino acid sequence set forth in SEQ ID NO: 709, the L2 chain comprises the amino acid sequence set forth in SEQ ID NO: 737, and the H2 chain comprises the amino acid sequence set forth in SEQ ID NO: 711;
[0336] d) the L1 chain comprises the amino acid sequence set forth in SEQ ID NO: 738, the H1 chain comprises the amino acid sequence set forth in SEQ ID NO: 712, the L2 chain comprises the amino acid sequence set forth in SEQ ID NO: 739, and the H2 chain comprises the amino acid sequence set forth in SEQ ID NO: 713;
[0337] e) the L1 chain comprises the amino acid sequence set forth in SEQ ID NO: 740, the H1 chain comprises the amino acid sequence set forth in SEQ ID NO: 714, the L2 chain comprises the amino acid sequence set forth in SEQ ID NO: 741, and the H2 chain comprises the amino acid sequence set forth in SEQ ID NO: 715;
[0338] f) the L1 chain comprises the amino acid sequence set forth in SEQ ID NO: 740, the H1 chain comprises the amino acid sequence set forth in SEQ ID NO: 714, the L2 chain comprises the amino acid sequence set forth in SEQ ID NO: 742, and the H2 chain comprises the amino acid sequence set forth in SEQ ID NO: 716;
[0339] g) the H1 chain comprises the amino acid sequence set forth in SEQ ID NO: 4701, the H2 chain comprises the amino acid sequence set forth in SEQ ID NO: 4702, the L1 chain comprises the amino acid sequence set forth in SEQ ID NO: 4801, and the L2 chain comprises the amino acid sequence set forth in SEQ ID NO: 4802;
[0340] h) the H1 chain comprises the amino acid sequence set forth in SEQ ID NO: 4703, the H2 chain comprises the amino acid sequence set forth in SEQ ID NO: 4704, the L1 chain comprises the amino acid sequence set forth in SEQ ID NO: 4803, and the L2 chain comprises the amino acid sequence set forth in SEQ ID NO: 4804;
[0341] i) the H1 chain comprises the amino acid sequence set forth in SEQ ID NO: 4703, the H2 chain comprises the amino acid sequence set forth in SEQ ID NO: 4705, the L1 chain comprises the amino acid sequence set forth in SEQ ID NO: 4803, and the L2 chain comprises the amino acid sequence set forth in SEQ ID NO: 4805;
[0342] j) the H1 chain comprises the amino acid sequence set forth in SEQ ID NO: 4706, the H2 chain comprises the amino acid sequence set forth in SEQ ID NO: 4707, the L1 chain comprises the amino acid sequence set forth in SEQ ID NO: 4806, and the L2 chain comprises the amino acid sequence set forth in SEQ ID NO: 4807;
[0343] k) the H1 chain comprises the amino acid sequence set forth in SEQ ID NO: 4708, the H2 chain comprises the amino acid sequence set forth in SEQ ID NO: 4709, the L1 chain comprises the amino acid sequence set forth in SEQ ID NO: 4808, and the L2 chain comprises the amino acid sequence set forth in SEQ ID NO: 4809;
[0344] l) the H1 chain comprises the amino acid sequence set forth in SEQ ID NO: 4708, the H2 chain comprises the amino acid sequence set forth in SEQ ID NO: 4710, the L1 chain comprises the amino acid sequence set forth in SEQ ID NO: 4808, and the L2 chain comprises the amino acid sequence set forth in SEQ ID NO: 4810;
[0345] m) the H1 chain comprises the amino acid sequence set forth in SEQ ID NO: 4711, the H2 chain comprises the amino acid sequence set forth in SEQ ID NO: 4712, the L1 chain comprises the amino acid sequence set forth in SEQ ID NO: 4801, and the L2 chain comprises the amino acid sequence set forth in SEQ ID NO: 4802;
[0346] n) the H1 chain comprises the amino acid sequence set forth in SEQ ID NO: 4713, the H2 chain comprises the amino acid sequence set forth in SEQ ID NO: 4714, the L1 chain comprises the amino acid sequence set forth in SEQ ID NO: 4803, and the L2 chain comprises the amino acid sequence set forth in SEQ ID NO: 4804;
[0347] o) the H1 chain comprises the amino acid sequence set forth in SEQ ID NO: 4713, the H2 chain comprises the amino acid sequence set forth in SEQ ID NO: 4715, the L1 chain comprises the amino acid sequence set forth in SEQ ID NO: 4803, and the L2 chain comprises the amino acid sequence set forth in SEQ ID NO: 4805;
[0348] p) the H1 chain comprises the amino acid sequence set forth in SEQ ID NO: 4716, the H2 chain comprises the amino acid sequence set forth in SEQ ID NO: 4717, the L1 chain comprises the amino acid sequence set forth in SEQ ID NO: 4806, and the L2 chain comprises the amino acid sequence set forth in SEQ ID NO: 4807;
[0349] q) the H1 chain comprises the amino acid sequence set forth in SEQ ID NO: 4718, the H2 chain comprises the amino acid sequence set forth in SEQ ID NO: 4719, the L1 chain comprises the amino acid sequence set forth in SEQ ID NO: 4808, and the L2 chain comprises the amino acid sequence set forth in SEQ ID NO: 4809;
[0350] r) the H1 chain comprises the amino acid sequence set forth in SEQ ID NO: 4718, the H2 chain comprises the amino acid sequence set forth in SEQ ID NO: 4720, the L1 chain comprises the amino acid sequence set forth in SEQ ID NO: 4808, and the L2 chain comprises the amino acid sequence set forth in SEQ ID NO: 4810;
[0351] s) the H1 chain comprises the amino acid sequence set forth in SEQ ID NO: 4721, the H2 chain comprises the amino acid sequence set forth in SEQ ID NO: 4722, the L1 chain comprises the amino acid sequence set forth in SEQ ID NO: 4801, and the L2 chain comprises the amino acid sequence set forth in SEQ ID NO: 4802;
[0352] t) the H1 chain comprises the amino acid sequence set forth in SEQ ID NO: 4723, the H2 chain comprises the amino acid sequence set forth in SEQ ID NO: 4724, the L1 chain comprises the amino acid sequence set forth in SEQ ID NO: 4803, and the L2 chain comprises the amino acid sequence set forth in SEQ ID NO: 4804;
[0353] u) the H1 chain comprises the amino acid sequence set forth in SEQ ID NO: 4723, the H2 chain comprises the amino acid sequence set forth in SEQ ID NO: 4725, the L1 chain comprises the amino acid sequence set forth in SEQ ID NO: 4803, and the L2 chain comprises the amino acid sequence set forth in SEQ ID NO: 4805;
[0354] v) the H1 chain comprises the amino acid sequence set forth in SEQ ID NO: 4726, the H2 chain comprises the amino acid sequence set forth in SEQ ID NO: 4727, the L1 chain comprises the amino acid sequence set forth in SEQ ID NO: 4806, and the L2 chain comprises the amino acid sequence set forth in SEQ ID NO: 4807;
[0355] w) the H1 chain comprises the amino acid sequence set forth in SEQ ID NO: 4728, the H2 chain comprises the amino acid sequence set forth in SEQ ID NO: 4729, the L1 chain comprises the amino acid sequence set forth in SEQ ID NO: 4808, and the L2 chain comprises the amino acid sequence set forth in SEQ ID NO: 4809;
[0356] x) the H1 chain comprises the amino acid sequence set forth in SEQ ID NO: 4728, the H2 chain comprises the amino acid sequence set forth in SEQ ID NO: 4730, the L1 chain comprises the amino acid sequence set forth in SEQ ID NO: 4808, and the L2 chain comprises the amino acid sequence set forth in SEQ ID NO: 4810;
[0357] y) the H1 chain comprises the amino acid sequence set forth in SEQ ID NO: 4733, the H2 chain comprises the amino acid sequence set forth in SEQ ID NO: 4734, the L1 chain comprises the amino acid sequence set forth in SEQ ID NO: 4811, and the L2 chain comprises the amino acid sequence set forth in SEQ ID NO: 4811;
[0358] z) the H1 chain comprises the amino acid sequence set forth in SEQ ID NO: 4735, the H2 chain comprises the amino acid sequence set forth in SEQ ID NO: 4736, the L1 chain comprises the amino acid sequence set forth in SEQ ID NO: 4811, and the L2 chain comprises the amino acid sequence set forth in SEQ ID NO: 4811;
[0359] aa) the H1 chain comprises the amino acid sequence set forth in SEQ ID NO: 4737, the H2 chain comprises the amino acid sequence set forth in SEQ ID NO: 4738, the L1 chain comprises the amino acid sequence set forth in SEQ ID NO: 4811, and the L2 chain comprises the amino acid sequence set forth in SEQ ID NO: 4811;
[0360] bb) the H1 chain comprises the amino acid sequence set forth in SEQ ID NO: 4739, the H2 chain comprises the amino acid sequence set forth in SEQ ID NO: 4740, the L1 chain comprises the amino acid sequence set forth in SEQ ID NO: 4811, and the L2 chain comprises the amino acid sequence set forth in SEQ ID NO: 4811;
[0361] cc) the H1 chain comprises the amino acid sequence set forth in SEQ ID NO: 4743, the H2 chain comprises the amino acid sequence set forth in SEQ ID NO: 4744, the L1 chain comprises the amino acid sequence set forth in SEQ ID NO: 4812, and the L2 chain comprises the amino acid sequence set forth in SEQ ID NO: 4812;
[0362] dd) the H1 chain comprises the amino acid sequence set forth in SEQ ID NO: 4745, the H2 chain comprises the amino acid sequence set forth in SEQ ID NO: 4746, the L1 chain comprises the amino acid sequence set forth in SEQ ID NO: 4812, and the L2 chain comprises the amino acid sequence set forth in SEQ ID NO: 4812;
[0363] ee) the H1 chain comprises the amino acid sequence set forth in SEQ ID NO: 4747, the H2 chain comprises the amino acid sequence set forth in SEQ ID NO: 4748, the L1 chain comprises the amino acid sequence set forth in SEQ ID NO: 4812, and the L2 chain comprises the amino acid sequence set forth in SEQ ID NO: 4812;
[0364] ff) the H1 chain comprises the amino acid sequence set forth in SEQ ID NO: 4749, the H2 chain comprises the amino acid sequence set forth in SEQ ID NO: 4750, the L1 chain comprises the amino acid sequence set forth in SEQ ID NO: 4812, and the L2 chain comprises the amino acid sequence set forth in SEQ ID NO: 4812;
[0365] gg) the H1 chain comprises the amino acid sequence set forth in SEQ ID NO: 4695, the H2 chain comprises the amino acid sequence set forth in SEQ ID NO: 4751, the L1 chain comprises the amino acid sequence set forth in SEQ ID NO: 4803, and the L2 chain comprises the amino acid sequence set forth in SEQ ID NO: 4813;
[0366] hh) the H1 chain comprises the amino acid sequence set forth in SEQ ID NO: 4695, the H2 chain comprises the amino acid sequence set forth in SEQ ID NO: 4752, the L1 chain comprises the amino acid sequence set forth in SEQ ID NO: 4803, and the L2 chain comprises the amino acid sequence set forth in SEQ ID NO: 4814;
[0367] ii) the H1 chain comprises the amino acid sequence set forth in SEQ ID NO: 4753, the H2 chain comprises the amino acid sequence set forth in SEQ ID NO: 4751, the L1 chain comprises the amino acid sequence set forth in SEQ ID NO: 4815, and the L2 chain comprises the amino acid sequence set forth in SEQ ID NO: 4813;
[0368] jj) the H1 chain comprises the amino acid sequence set forth in SEQ ID NO: 4753, the H2 chain comprises the amino acid sequence set forth in SEQ ID NO: 4752, the L1 chain comprises the amino acid sequence set forth in SEQ ID NO: 4815, and the L2 chain comprises the amino acid sequence set forth in SEQ ID NO: 4814;
[0369] kk) the H1 chain comprises the amino acid sequence set forth in SEQ ID NO: 4754, the H2 chain comprises the amino acid sequence set forth in SEQ ID NO: 4699, the L1 chain comprises the amino acid sequence set forth in SEQ ID NO: 4816, and the L2 chain comprises the amino acid sequence set forth in SEQ ID NO: 4809;
[0370] ll) the H1 chain comprises the amino acid sequence set forth in SEQ ID NO: 4754, the H2 chain comprises the amino acid sequence set forth in SEQ ID NO: 4700, the L1 chain comprises the amino acid sequence set forth in SEQ ID NO: 4816, and the L2 chain comprises the amino acid sequence set forth in SEQ ID NO: 4810;
[0371] mm) the H1 chain comprises the amino acid sequence set forth in SEQ ID NO: 4755, the H2 chain comprises the amino acid sequence set forth in SEQ ID NO: 4699, the L1 chain comprises the amino acid sequence set forth in SEQ ID NO: 4817, and the L2 chain comprises the amino acid sequence set forth in SEQ ID NO: 4809;
[0372] nn) the H1 chain comprises the amino acid sequence set forth in SEQ ID NO: 4755, the H2 chain comprises the amino acid sequence set forth in SEQ ID NO: 4700, the L1 chain comprises the amino acid sequence set forth in SEQ ID NO: 4817, and the L2 chain comprises the amino acid sequence set forth in SEQ ID NO: 4810;
[0373] oo) the H1 chain comprises the amino acid sequence set forth in SEQ ID NO: 4756, the H2 chain comprises the amino acid sequence set forth in SEQ ID NO: 4757, the L1 chain comprises the amino acid sequence set forth in SEQ ID NO: 4803, and the L2 chain comprises the amino acid sequence set forth in SEQ ID NO: 4813;
[0374] pp) the H1 chain comprises the amino acid sequence set forth in SEQ ID NO: 4756, the H2 chain comprises the amino acid sequence set forth in SEQ ID NO: 4758, the L1 chain comprises the amino acid sequence set forth in SEQ ID NO: 4803, and the L2 chain comprises the amino acid sequence set forth in SEQ ID NO: 4814;
[0375] qq) the H1 chain comprises the amino acid sequence set forth in SEQ ID NO: 4759, the H2 chain comprises the amino acid sequence set forth in SEQ ID NO: 4757, the L1 chain comprises the amino acid sequence set forth in SEQ ID NO: 4815, and the L2 chain comprises the amino acid sequence set forth in SEQ ID NO: 4813;
[0376] rr) the H1 chain comprises the amino acid sequence set forth in SEQ ID NO: 4759, the H2 chain comprises the amino acid sequence set forth in SEQ ID NO: 4758, the L1 chain comprises the amino acid sequence set forth in SEQ ID NO: 4815, and the L2 chain comprises the amino acid sequence set forth in SEQ ID NO: 4814;
[0377] ss) the H1 chain comprises the amino acid sequence set forth in SEQ ID NO: 4760, the H2 chain comprises the amino acid sequence set forth in SEQ ID NO: 4761, the L1 chain comprises the amino acid sequence set forth in SEQ ID NO: 4816, and the L2 chain comprises the amino acid sequence set forth in SEQ ID NO: 4809;
[0378] tt) the H1 chain comprises the amino acid sequence set forth in SEQ ID NO: 4760, the H2 chain comprises the amino acid sequence set forth in SEQ ID NO: 4762, the L1 chain comprises the amino acid sequence set forth in SEQ ID NO: 4816, and the L2 chain comprises the amino acid sequence set forth in SEQ ID NO: 4810;
[0379] uu) the H1 chain comprises the amino acid sequence set forth in SEQ ID NO: 4763, the H2 chain comprises the amino acid sequence set forth in SEQ ID NO: 4761, the L1 chain comprises the amino acid sequence set forth in SEQ ID NO: 4817, and the L2 chain comprises the amino acid sequence set forth in SEQ ID NO: 4809;
[0380] vv) the H1 chain comprises the amino acid sequence set forth in SEQ ID NO: 4763, the H2 chain comprises the amino acid sequence set forth in SEQ ID NO: 4762, the L1 chain comprises the amino acid sequence set forth in SEQ ID NO: 4817, and the L2 chain comprises the amino acid sequence set forth in SEQ ID NO: 4810;
[0381] ww) the H1 chain comprises the amino acid sequence set forth in SEQ ID NO: 4764, the H2 chain comprises the amino acid sequence set forth in SEQ ID NO: 4765, the L1 chain comprises the amino acid sequence set forth in SEQ ID NO: 4803, and the L2 chain comprises the amino acid sequence set forth in SEQ ID NO: 4813;
[0382] xx) the H1 chain comprises the amino acid sequence set forth in SEQ ID NO: 4764, the H2 chain comprises the amino acid sequence set forth in SEQ ID NO: 4766, the L1 chain comprises the amino acid sequence set forth in SEQ ID NO: 4803, and the L2 chain comprises the amino acid sequence set forth in SEQ ID NO: 4814;
[0383] yy) the H1 chain comprises the amino acid sequence set forth in SEQ ID NO: 4767, the H2 chain comprises the amino acid sequence set forth in SEQ ID NO: 4765, the L1 chain comprises the amino acid sequence set forth in SEQ ID NO: 4815, and the L2 chain comprises the amino acid sequence set forth in SEQ ID NO: 4813;
[0384] zz) the H1 chain comprises the amino acid sequence set forth in SEQ ID NO: 4767, the H2 chain comprises the amino acid sequence set forth in SEQ ID NO: 4766, the L1 chain comprises the amino acid sequence set forth in SEQ ID NO: 4815, and the L2 chain comprises the amino acid sequence set forth in SEQ ID NO: 4814;
[0385] aaa) the H1 chain comprises the amino acid sequence set forth in SEQ ID NO: 4768, the H2 chain comprises the amino acid sequence set forth in SEQ ID NO: 4769, the L1 chain comprises the amino acid sequence set forth in SEQ ID NO: 4816, and the L2 chain comprises the amino acid sequence set forth in SEQ ID NO: 4809;
[0386] bbb) the H1 chain comprises the amino acid sequence set forth in SEQ ID NO: 4768, the H2 chain comprises the amino acid sequence set forth in SEQ ID NO: 4770, the L1 chain comprises the amino acid sequence set forth in SEQ ID NO: 4816, and the L2 chain comprises the amino acid sequence set forth in SEQ ID NO: 4810;
[0387] ccc) the H1 chain comprises the amino acid sequence set forth in SEQ ID NO: 4771, the H2 chain comprises the amino acid sequence set forth in SEQ ID NO: 4769, the L1 chain comprises the amino acid sequence set forth in SEQ ID NO: 4817, and the L2 chain comprises the amino acid sequence set forth in SEQ ID NO: 4809;
[0388] ddd) the H1 chain comprises the amino acid sequence set forth in SEQ ID NO: 4771, the H2 chain comprises the amino acid sequence set forth in SEQ ID NO: 4770, the L1 chain comprises the amino acid sequence set forth in SEQ ID NO: 4817, and the L2 chain comprises the amino acid sequence set forth in SEQ ID NO: 4810;
[0389] eee) the H1 chain comprises the amino acid sequence set forth in SEQ ID NO: 4723, the H2 chain comprises the amino acid sequence set forth in SEQ ID NO: 4772, the L1 chain comprises the amino acid sequence set forth in SEQ ID NO: 4803, and the L2 chain comprises the amino acid sequence set forth in SEQ ID NO: 4813;
[0390] fff) the H1 chain comprises the amino acid sequence set forth in SEQ ID NO: 4723, the H2 chain comprises the amino acid sequence set forth in SEQ ID NO: 4773, the L1 chain comprises the amino acid sequence set forth in SEQ ID NO: 4803, and the L2 chain comprises the amino acid sequence set forth in SEQ ID NO: 4814;
[0391] ggg) the H1 chain comprises the amino acid sequence set forth in SEQ ID NO: 4774, the H2 chain comprises the amino acid sequence set forth in SEQ ID NO: 4772, the L1 chain comprises the amino acid sequence set forth in SEQ ID NO: 4815, and the L2 chain comprises the amino acid sequence set forth in SEQ ID NO: 4813;
[0392] hhh) the H1 chain comprises the amino acid sequence set forth in SEQ ID NO: 4774, the H2 chain comprises the amino acid sequence set forth in SEQ ID NO: 4773, the L1 chain comprises the amino acid sequence set forth in SEQ ID NO: 4815, and the L2 chain comprises the amino acid sequence set forth in SEQ ID NO: 4814;
[0393] iii) the H1 chain comprises the amino acid sequence set forth in SEQ ID NO: 4775, the H2 chain comprises the amino acid sequence set forth in SEQ ID NO: 4729, the L1 chain comprises the amino acid sequence set forth in SEQ ID NO: 4816, and the L2 chain comprises the amino acid sequence set forth in SEQ ID NO: 4809;
[0394] jjj) the H1 chain comprises the amino acid sequence set forth in SEQ ID NO: 4775, the H2 chain comprises the amino acid sequence set forth in SEQ ID NO: 4730, the L1 chain comprises the amino acid sequence set forth in SEQ ID NO: 4816, and the L2 chain comprises the amino acid sequence set forth in SEQ ID NO: 4810;
[0395] kkk) the H1 chain comprises the amino acid sequence set forth in SEQ ID NO: 4776, the H2 chain comprises the amino acid sequence set forth in SEQ ID NO: 4729, the L1 chain comprises the amino acid sequence set forth in SEQ ID NO: 4817, and the L2 chain comprises the amino acid sequence set forth in SEQ ID NO: 4809;
[0396] lll) the H1 chain comprises the amino acid sequence set forth in SEQ ID NO: 4776, the H2 chain comprises the amino acid sequence set forth in SEQ ID NO: 4730, the L1 chain comprises the amino acid sequence set forth in SEQ ID NO: 4817, and the L2 chain comprises the amino acid sequence set forth in SEQ ID NO: 4810;
[0397] mmm) the H1 chain comprises the amino acid sequence set forth in SEQ ID NO: 4779, the H2 chain comprises the amino acid sequence set forth in SEQ ID NO: 4780, the L1 chain comprises the amino acid sequence set forth in SEQ ID NO: 4818, and the L2 chain comprises the amino acid sequence set forth in SEQ ID NO: 4818;
[0398] nnn) the H1 chain comprises the amino acid sequence set forth in SEQ ID NO: 4781, the H2 chain comprises the amino acid sequence set forth in SEQ ID NO: 4782, the L1 chain comprises the amino acid sequence set forth in SEQ ID NO: 4818, and the L2 chain comprises the amino acid sequence set forth in SEQ ID NO: 4818;
[0399] ooo) the H1 chain comprises the amino acid sequence set forth in SEQ ID NO: 4783, the H2 chain comprises the amino acid sequence set forth in SEQ ID NO: 4784, the L1 chain comprises the amino acid sequence set forth in SEQ ID NO: 4818, and the L2 chain comprises the amino acid sequence set forth in SEQ ID NO: 4818;
[0400] ppp) the H1 chain comprises the amino acid sequence set forth in SEQ ID NO: 4785, the H2 chain comprises the amino acid sequence set forth in SEQ ID NO: 4786, the L1 chain comprises the amino acid sequence set forth in SEQ ID NO: 4818, and the L2 chain comprises the amino acid sequence set forth in SEQ ID NO: 4818;
[0401] qqq) the H1 chain comprises the amino acid sequence set forth in SEQ ID NO: 4695, the H2 chain comprises the amino acid sequence set forth in SEQ ID NO: 4787, the L1 chain comprises the amino acid sequence set forth in SEQ ID NO: 4803, and the L2 chain comprises the amino acid sequence set forth in SEQ ID NO: 4813;
[0402] rrr) the H1 chain comprises the amino acid sequence set forth in SEQ ID NO: 4695, the H2 chain comprises the amino acid sequence set forth in SEQ ID NO: 4788, the L1 chain comprises the amino acid sequence set forth in SEQ ID NO: 4803, and the L2 chain comprises the amino acid sequence set forth in SEQ ID NO: 4814;
[0403] sss) the H1 chain comprises the amino acid sequence set forth in SEQ ID NO: 4753, the H2 chain comprises the amino acid sequence set forth in SEQ ID NO: 4787, the L1 chain comprises the amino acid sequence set forth in SEQ ID NO: 4815, and the L2 chain comprises the amino acid sequence set forth in SEQ ID NO: 4813;
[0404] ttt) the H1 chain comprises the amino acid sequence set forth in SEQ ID NO: 4753, the H2 chain comprises the amino acid sequence set forth in SEQ ID NO: 4788, the L1 chain comprises the amino acid sequence set forth in SEQ ID NO: 4815, and the L2 chain comprises the amino acid sequence set forth in SEQ ID NO: 4814;
[0405] uuu) the H1 chain comprises the amino acid sequence set forth in SEQ ID NO: 4754, the H2 chain comprises the amino acid sequence set forth in SEQ ID NO: 4699, the L1 chain comprises the amino acid sequence set forth in SEQ ID NO: 4819, and the L2 chain comprises the amino acid sequence set forth in SEQ ID NO: 4809;
[0406] vvv) the H1 chain comprises the amino acid sequence set forth in SEQ ID NO: 4754, the H2 chain comprises the amino acid sequence set forth in SEQ ID NO: 4700, the L1 chain comprises the amino acid sequence set forth in SEQ ID NO: 4819, and the L2 chain comprises the amino acid sequence set forth in SEQ ID NO: 4810;
[0407] www) the H1 chain comprises the amino acid sequence set forth in SEQ ID NO: 4755, the H2 chain comprises the amino acid sequence set forth in SEQ ID NO: 4699, the L1 chain comprises the amino acid sequence set forth in SEQ ID NO: 4820, and the L2 chain comprises the amino acid sequence set forth in SEQ ID NO: 4809;
[0408] xxx) the H1 chain comprises the amino acid sequence set forth in SEQ ID NO: 4755, the H2 chain comprises the amino acid sequence set forth in SEQ ID NO: 4700, the L1 chain comprises the amino acid sequence set forth in SEQ ID NO: 4820, and the L2 chain comprises the amino acid sequence set forth in SEQ ID NO: 4810;
[0409] yyy) the H1 chain comprises the amino acid sequence set forth in SEQ ID NO: 4756, the H2 chain comprises the amino acid sequence set forth in SEQ ID NO: 4789, the L1 chain comprises the amino acid sequence set forth in SEQ ID NO: 4803, and the L2 chain comprises the amino acid sequence set forth in SEQ ID NO: 4813;
[0410] zzz) the H1 chain comprises the amino acid sequence set forth in SEQ ID NO: 4756, the H2 chain comprises the amino acid sequence set forth in SEQ ID NO: 4790, the L1 chain comprises the amino acid sequence set forth in SEQ ID NO: 4803, and the L2 chain comprises the amino acid sequence set forth in SEQ ID NO: 4814;
[0411] aaaa) the H1 chain comprises the amino acid sequence set forth in SEQ ID NO: 4759, the H2 chain comprises the amino acid sequence set forth in SEQ ID NO: 4789, the L1 chain comprises the amino acid sequence set forth in SEQ ID NO: 4815, and the L2 chain comprises the amino acid sequence set forth in SEQ ID NO: 4813;
[0412] bbbb) the H1 chain comprises the amino acid sequence set forth in SEQ ID NO: 4759, the H2 chain comprises the amino acid sequence set forth in SEQ ID NO: 4790, the L1 chain comprises the amino acid sequence set forth in SEQ ID NO: 4815, and the L2 chain comprises the amino acid sequence set forth in SEQ ID NO: 4814;
[0413] cccc) the H1 chain comprises the amino acid sequence set forth in SEQ ID NO: 4760, the H2 chain comprises the amino acid sequence set forth in SEQ ID NO: 4761, the L1 chain comprises the amino acid sequence set forth in SEQ ID NO: 4819, and the L2 chain comprises the amino acid sequence set forth in SEQ ID NO: 4809;
[0414] dddd) the H1 chain comprises the amino acid sequence set forth in SEQ ID NO: 4760, the H2 chain comprises the amino acid sequence set forth in SEQ ID NO: 4762, the L1 chain comprises the amino acid sequence set forth in SEQ ID NO: 4819, and the L2 chain comprises the amino acid sequence set forth in SEQ ID NO: 4810;
[0415] eeee) the H1 chain comprises the amino acid sequence set forth in SEQ ID NO: 4763, the H2 chain comprises the amino acid sequence set forth in SEQ ID NO: 4761, the L1 chain comprises the amino acid sequence set forth in SEQ ID NO: 4820, and the L2 chain comprises the amino acid sequence set forth in SEQ ID NO: 4809;
[0416] ffff) the H1 chain comprises the amino acid sequence set forth in SEQ ID NO: 4763, the H2 chain comprises the amino acid sequence set forth in SEQ ID NO: 4762, the L1 chain comprises the amino acid sequence set forth in SEQ ID NO: 4820, and the L2 chain comprises the amino acid sequence set forth in SEQ ID NO: 4810;
[0417] gggg) the H1 chain comprises the amino acid sequence set forth in SEQ ID NO: 4764, the H2 chain comprises the amino acid sequence set forth in SEQ ID NO: 4791, the L1 chain comprises the amino acid sequence set forth in SEQ ID NO: 4803, and the L2 chain comprises the amino acid sequence set forth in SEQ ID NO: 4813;
[0418] hhhh) the H1 chain comprises the amino acid sequence set forth in SEQ ID NO: 4764, the H2 chain comprises the amino acid sequence set forth in SEQ ID NO: 4792, the L1 chain comprises the amino acid sequence set forth in SEQ ID NO: 4803, and the L2 chain comprises the amino acid sequence set forth in SEQ ID NO: 4814;
[0419] iiii) the H1 chain comprises the amino acid sequence set forth in SEQ ID NO: 4767, the H2 chain comprises the amino acid sequence set forth in SEQ ID NO: 4791, the L1 chain comprises the amino acid sequence set forth in SEQ ID NO: 4815, and the L2 chain comprises the amino acid sequence set forth in SEQ ID NO: 4813;
[0420] jjjj) the H1 chain comprises the amino acid sequence set forth in SEQ ID NO: 4767, the H2 chain comprises the amino acid sequence set forth in SEQ ID NO: 4792, the L1 chain comprises the amino acid sequence set forth in SEQ ID NO: 4815, and the L2 chain comprises the amino acid sequence set forth in SEQ ID NO: 4814;
[0421] kkkk) the H1 chain comprises the amino acid sequence set forth in SEQ ID NO: 4768, the H2 chain comprises the amino acid sequence set forth in SEQ ID NO: 4769, the L1 chain comprises the amino acid sequence set forth in SEQ ID NO: 4819, and the L2 chain comprises the amino acid sequence set forth in SEQ ID NO: 4809;
[0422] llll) the H1 chain comprises the amino acid sequence set forth in SEQ ID NO: 4768, the H2 chain comprises the amino acid sequence set forth in SEQ ID NO: 4770, the L1 chain comprises the amino acid sequence set forth in SEQ ID NO: 4819, and the L2 chain comprises the amino acid sequence set forth in SEQ ID NO: 4810;
[0423] mmmm) the H1 chain comprises the amino acid sequence set forth in SEQ ID NO: 4771, the H2 chain comprises the amino acid sequence set forth in SEQ ID NO: 4769, the L1 chain comprises the amino acid sequence set forth in SEQ ID NO: 4820, and the L2 chain comprises the amino acid sequence set forth in SEQ ID NO: 4809;
[0424] nnnn) the H1 chain comprises the amino acid sequence set forth in SEQ ID NO: 4771, the H2 chain comprises the amino acid sequence set forth in SEQ ID NO: 4770, the L1 chain comprises the amino acid sequence set forth in SEQ ID NO: 4820, and the L2 chain comprises the amino acid sequence set forth in SEQ ID NO: 4810;
[0425] oooo) the H1 chain comprises the amino acid sequence set forth in SEQ ID NO: 4723, the H2 chain comprises the amino acid sequence set forth in SEQ ID NO: 4793, the L1 chain comprises the amino acid sequence set forth in SEQ ID NO: 4803, and the L2 chain comprises the amino acid sequence set forth in SEQ ID NO: 4813;
[0426] pppp) the H1 chain comprises the amino acid sequence set forth in SEQ ID NO: 4723, the H2 chain comprises the amino acid sequence set forth in SEQ ID NO: 4794, the L1 chain comprises the amino acid sequence set forth in SEQ ID NO: 4803, and the L2 chain comprises the amino acid sequence set forth in SEQ ID NO: 4814;
[0427] qqqq) the H1 chain comprises the amino acid sequence set forth in SEQ ID NO: 4774, the H2 chain comprises the amino acid sequence set forth in SEQ ID NO: 4793, the L1 chain comprises the amino acid sequence set forth in SEQ ID NO: 4815, and the L2 chain comprises the amino acid sequence set forth in SEQ ID NO: 4813;
[0428] rrrr) the H1 chain comprises the amino acid sequence set forth in SEQ ID NO: 4774, the H2 chain comprises the amino acid sequence set forth in SEQ ID NO: 4794, the L1 chain comprises the amino acid sequence set forth in SEQ ID NO: 4815, and the L2 chain comprises the amino acid sequence set forth in SEQ ID NO: 4814;
[0429] ssss) the H1 chain comprises the amino acid sequence set forth in SEQ ID NO: 4775, the H2 chain comprises the amino acid sequence set forth in SEQ ID NO: 4729, the L1 chain comprises the amino acid sequence set forth in SEQ ID NO: 4819, and the L2 chain comprises the amino acid sequence set forth in SEQ ID NO: 4809;
[0430] tttt) the H1 chain comprises the amino acid sequence set forth in SEQ ID NO: 4775, the H2 chain comprises the amino acid sequence set forth in SEQ ID NO: 4730, the L1 chain comprises the amino acid sequence set forth in SEQ ID NO: 4819, and the L2 chain comprises the amino acid sequence set forth in SEQ ID NO: 4810;
[0431] uuuu) the H1 chain comprises the amino acid sequence set forth in SEQ ID NO: 4776, the H2 chain comprises the amino acid sequence set forth in SEQ ID NO: 4729, the L1 chain comprises the amino acid sequence set forth in SEQ ID NO: 4820, and the L2 chain comprises the amino acid sequence set forth in SEQ ID NO: 4809;
[0432] vvvv) the H1 chain comprises the amino acid sequence set forth in SEQ ID NO: 4776, the H2 chain comprises the amino acid sequence set forth in SEQ ID NO: 4730, the L1 chain comprises the amino acid sequence set forth in SEQ ID NO: 4820, and the L2 chain comprises the amino acid sequence set forth in SEQ ID NO: 4810;
[0433] wwww) the H1 chain comprises the amino acid sequence set forth in SEQ ID NO: 4779, the H2 chain comprises the amino acid sequence set forth in SEQ ID NO: 4780, the L1 chain comprises the amino acid sequence set forth in SEQ ID NO: 4821, and the L2 chain comprises the amino acid sequence set forth in SEQ ID NO: 4821;
[0434] xxxx) the H1 chain comprises the amino acid sequence set forth in SEQ ID NO: 4781, the H2 chain comprises the amino acid sequence set forth in SEQ ID NO: 4782, the L1 chain comprises the amino acid sequence set forth in SEQ ID NO: 4821, and the L2 chain comprises the amino acid sequence set forth in SEQ ID NO: 4821;
[0435] yyyy) the H1 chain comprises the amino acid sequence set forth in SEQ ID NO: 4783, the H2 chain comprises the amino acid sequence set forth in SEQ ID NO: 4784, the L1 chain comprises the amino acid sequence set forth in SEQ ID NO: 4821, and the L2 chain comprises the amino acid sequence set forth in SEQ ID NO: 4821; or
[0436] zzzz) the H1 chain comprises the amino acid sequence set forth in SEQ ID NO: 4785, the H2 chain comprises the amino acid sequence set forth in SEQ ID NO: 4786, the L1 chain comprises the amino acid sequence set forth in SEQ ID NO: 4821, and the L2 chain comprises the amino acid sequence set forth in SEQ ID NO: 4821; or
[0437] aaaaa) the L1, H1, L2, and H2 chains are variants with at least 90%, preferably at least 95%, more preferably at least 98% identity to said sequences.

[0438] In embodiments of the invention, the tetrahedral antibody further comprises a seventh domain and eighth domain, wherein:
[0439] a) the seventh domain and eighth domain are each single chain 4-1BB ligand trimers;
[0440] b) the seventh domain is attached at its N-terminus by a peptide bond or via a peptide linker to the first C-terminus of the first domain, and
[0441] c) the eighth domain is attached at its N-terminus by a peptide bond or via a peptide linker to the first C-terminus of the second domain.

[0442] In embodiments of the immediately preceding embodiment of the invention, the tetrahedral antibody is formed by four different types of polypeptide chains denoted L1, H1, L2, and H2, wherein:
[0443] a) the H1 chain contains, from C-terminus to N-terminus:
   [0444] i) the seventh or eighth domain;
   [0445] ii) a portion which pairs with the C-terminal portion of the H2 chains to form each of the first and second domains;
   [0446] iii) the collectrin-like domain polypeptide;
   [0447] iv) a portion which pairs with the L1 chains to form each of the third and fourth domains;
[0448] b) the H2 chain contains, from C-terminus to N-terminus:
   [0449] i) a portion which pairs with the H1 chains to form each of the first and second domains; and
   [0450] ii) a portion which pairs with the L2 chains to form each of the fifth and sixth domains.

[0451] In embodiments of the immediately preceding embodiment of the invention:
[0452] a) the L1 chain comprises the amino acid sequence set forth in SEQ ID NO: 733, the H1 chain comprises the amino acid sequence set forth in SEQ ID NO: 707, the L2 chain comprises the amino acid sequence set forth in SEQ ID NO: 734, and the H2 chain comprises the amino acid sequence set forth in SEQ ID NO: 717;
[0453] b) the L1 chain comprises the amino acid sequence set forth in SEQ ID NO: 735, the H1 chain comprises the amino acid sequence set forth in SEQ ID NO: 709, the L2 chain comprises the amino acid sequence set forth in SEQ ID NO: 736, and the H2 chain comprises the amino acid sequence set forth in SEQ ID NO: 718;
[0454] c) the L1 chain comprises the amino acid sequence set forth in SEQ ID NO: 735, the H1 chain comprises the amino acid sequence set forth in SEQ ID NO: 709, the L2 chain comprises the amino acid sequence set forth in SEQ ID NO: 737, and the H2 chain comprises the amino acid sequence set forth in SEQ ID NO: 719;
[0455] d) the L1 chain comprises the amino acid sequence set forth in SEQ ID NO: 738, the H1 chain comprises the amino acid sequence set forth in SEQ ID NO: 712, the L2 chain comprises the amino acid sequence set forth in SEQ ID NO: 739, and the H2 chain comprises the amino acid sequence set forth in SEQ ID NO: 720;
[0456] e) the L1 chain comprises the amino acid sequence set forth in SEQ ID NO: 740, the H1 chain comprises the amino acid sequence set forth in SEQ ID NO: 714, the L2 chain comprises the amino acid sequence set forth in SEQ ID NO: 741, and the H2 chain comprises the amino acid sequence set forth in SEQ ID NO: 721; or
[0457] f) the L1 chain comprises the amino acid sequence set forth in SEQ ID NO: 740, the H1 chain comprises the amino acid sequence set forth in SEQ ID NO: 714, the L2 chain comprises the amino acid sequence set forth in SEQ ID NO: 742, and the H2 chain comprises the amino acid sequence set forth in SEQ ID NO: 722; or
[0458] g) the L1, H1, L2, and H2 chains are variants with at least 90%, preferably at least 95%, more preferably at least 98% identity to said sequences.

[0459] In embodiments of the invention:
[0460] a) the third and fourth domains each comprise the V region of a Fab domain of Adalimumab or a variant thereof with at least 90%, preferably at least 95% identity to said V region, and the fifth and sixth domains each comprise the V region of a Fab domain of Ustekinumab or a variant thereof with at least 90%, preferably at least 95% identity to said V region;
[0461] b) the third and fourth domains each comprise the V region of a Fab domain of Ustekinumab or a variant thereof with at least 90%, preferably at least 95% identity to said V region, and the fifth and sixth domains each comprise the V region of a Fab domain of Adalimumab or a variant thereof with at least 90%, preferably at least 95% identity to said V region;
[0462] c) the third and fourth domains each comprise the V region of a Fab domain of Adalimumab or a variant thereof with at least 90%, preferably at least 95% identity to said V region, and the fifth and sixth domains each comprise the V region of a Fab domain of Secukinumab or a variant thereof with at least 90%, preferably at least 95% identity to said V region;
[0463] d) the third and fourth domains each comprise the V region of a Fab domain of Secukinumab or a variant thereof with at least 90%, preferably at least 95% identity to said V region, and the fifth and sixth domains each comprise the V region of a Fab domain of Adalimumab or a variant thereof with at least 90%, preferably at least 95% identity to said V region;
[0464] e) the third and fourth domains each comprise the V region of a Fab domain of Ustekinumab or a variant thereof with at least 90%, preferably at least 95% identity to said V region, and the fifth and sixth domains each comprise the V region of a Fab domain of Secukinumab or a variant thereof with at least 90%, preferably at least 95% identity to said V region;
[0465] f) the third and fourth domains each comprise the V region of a Fab domain of Secukinumab or a variant thereof with at least 90%, preferably at least 95% identity to said V region, and the fifth and sixth domains each comprise the V region of a Fab domain of Ustekinumab or a variant thereof with at least 90%, preferably at least 95% identity to said V region;
[0466] g) the third and fourth domains each comprise the V region of a Fab domain of Adalimumab or a variant thereof with at least 90%, preferably at least 95% identity to said V region, and the fifth and sixth domains each comprise the V region of a Fab domain of Vedolizumab or a variant thereof with at least 90%, preferably at least 95% identity to said V region; or
[0467] h) the third and fourth domains each comprise the V region of a Fab domain of Vedolizumab or a variant thereof with at least 90%, preferably at least 95% identity to said V region, and the fifth and sixth domains each comprise the V region of a Fab domain of Adalimumab or a variant thereof with at least 90%, preferably at least 95% identity to said V region.

[0468] In embodiments of the immediately preceding embodiment of the invention, the first and second domains are each an Fc domain of an IgG antibody.

[0469] In embodiments of the immediately preceding embodiment of the invention, the first and second domains each comprise one or more mutations that reduce Fc gamma receptor binding activity.

[0470] In embodiments of the immediately preceding embodiment of the invention, the one or more mutations that reduce Fc gamma receptor binding activity are selected from:
[0471] a) P329G/L234A/L235A (PGLALA),
[0472] b) L234A/L235A (LALA),
[0473] c) P331S/L234A/L235A,
[0474] d) L234F/L235E/P331S,
[0475] e) L234F/L235E/P329G,
[0476] f) L234S/L235T/G236R, and
[0477] g) L234A/L235A/G236R.

[0478] In embodiments of the invention:
[0479] a) the first and second domains are each a wild-type Fc domain, the third and fourth domains each comprise the V region of a Fab domain of Adalimumab or a variant thereof with at least 90%, preferably at least 95% identity to said V region, and the fifth and sixth domains each comprise the V region of a Fab domain of Ustekinumab or a variant thereof with at least 90%, preferably at least 95% identity to said V region;
[0480] b) the first and second domains each comprise L234A and L235A mutations, the third and fourth domains each comprise the V region of a Fab domain of Adalimumab or a variant thereof with at least 90%, preferably at least 95% identity to said V region, and the fifth and sixth domains each comprise the V region of a Fab domain of Ustekinumab or a variant thereof with at least 90%, preferably at least 95% identity to said V region;
[0481] c) the first and second domains are each a wild-type Fc domain, the third and fourth domains each comprise the V region of a Fab domain of Ustekinumab or a variant thereof with at least 90%, preferably at least 95% identity to said V region, and the fifth and sixth domains each comprise the V region of a Fab domain of Adalimumab or a variant thereof with at least 90%, preferably at least 95% identity to said V region;
[0482] d) the first and second domains each comprise L234A and L235A mutations, the third and fourth domains each comprise the V region of a Fab domain of Ustekinumab or a variant thereof with at least 90%, preferably at least 95% identity to said V region, and the fifth and sixth domains each comprise the V region of a Fab domain of Adalimumab or a variant thereof with at least 90%, preferably at least 95% identity to said V region;
[0483] e) the first and second domains are each a wild-type Fc domain, the third and fourth domains each comprise the V region of a Fab domain of Adalimumab or a variant thereof with at least 90%, preferably at least 95% identity to said V region, and the fifth and sixth domains each comprise the V region of a Fab domain of Secukinumab or a variant thereof with at least 90%, preferably at least 95% identity to said V region;
[0484] f) the first and second domains each comprise L234A and L235A mutations, the third and fourth domains each comprise the V region of a Fab domain of Adalimumab or a variant thereof with at least 90%, preferably at least 95% identity to said V region, and the fifth and sixth domains each comprise the V region of a Fab domain of Secukinumab or a variant thereof with at least 90%, preferably at least 95% identity to said V region;
[0485] g) the first and second domains are each a wild-type Fc domain, the third and fourth domains each comprise the V region of a Fab domain of Secukinumab or a variant thereof with at least 90%, preferably at least 95% identity to said V region, and the fifth and sixth domains each comprise the V region of a Fab domain of Adalimumab or a variant thereof with at least 90%, preferably at least 95% identity to said V region;
[0486] h) the first and second domains each comprise L234A and L235A mutations, the third and fourth domains each comprise the V region of a Fab domain of Secukinumab or a variant thereof with at least 90%, preferably at least 95% identity to said V region, and the fifth and sixth domains each comprise the V region of a Fab domain of Adalimumab or a variant thereof with at least 90%, preferably at least 95% identity to said V region;
[0487] i) the first and second domains are each a wild-type Fc domain, the third and fourth domains each comprise the V region of a Fab domain of Ustekinumab or a variant thereof with at least 90%, preferably at least 95% identity to said V region, and the fifth and sixth domains each comprise the V region of a Fab domain of Secukinumab or a variant thereof with at least 90%, preferably at least 95% identity to said V region;
[0488] j) the first and second domains each comprise L234A and L235A mutations, the third and fourth domains each comprise the V region of a Fab domain of Ustekinumab or a variant thereof with at least 90%, preferably at least 95% identity to said V region, and the fifth and sixth domains each comprise the V region of a Fab domain of Secukinumab or a variant thereof with at least 90%, preferably at least 95% identity to said V region;
[0489] k) the first and second domains are each a wild-type Fc domain, the third and fourth domains each comprise the V region of a Fab domain of Secukinumab or a variant thereof with at least 90%, preferably at least 95% identity to said V region, and the fifth and sixth domains each comprise the V region of a Fab domain of Ustekinumab or a variant thereof with at least 90%, preferably at least 95% identity to said V region;
[0490] l) the first and second domains each comprise L234A and L235A mutations, the third and fourth domains each comprise the V region of a Fab domain of Secukinumab or a variant thereof with at least 90%, preferably at least 95% identity to said V region, and the fifth and sixth domains each comprise the V region of a Fab domain of Ustekinumab or a variant thereof with at least 90%, preferably at least 95% identity to said V region;
[0491] m) the first and second domains are each a wild-type Fc domain, the third and fourth domains each comprise the V region of a Fab domain of Adalimumab or a variant thereof with at least 90%, preferably at least 95% identity to said V region, and the fifth and sixth domains each comprise the V region of a Fab domain of Vedolizumab or a variant thereof with at least 90%, preferably at least 95% identity to said V region;
[0492] n) the first and second domains each comprise L234A and L235A mutations, the third and fourth domains each comprise the V region of a Fab domain of Adalimumab or a variant thereof with at least 90%, preferably at least 95% identity to said V region, and the fifth and sixth domains each comprise the V region of a Fab domain of Vedolizumab or a variant thereof with at least 90%, preferably at least 95% identity to said V region;
[0493] o) the first and second domains are each a wild-type Fc domain, the third and fourth domains each comprise the V region of a Fab domain of Vedolizumab or a variant thereof with at least 90%, preferably at least 95% identity to said V region, and the fifth and sixth domains each comprise the V region of a Fab domain of Adalimumab or a variant thereof with at least 90%, preferably at least 95% identity to said V region; or
[0494] p) the first and second domains each comprise L234A and L235A mutations, the third and fourth domains each comprise the V region of a Fab domain of Vedolizumab or a variant thereof with at least 90%, preferably at least 95% identity to said V region, and the fifth and sixth domains each comprise the V region of a Fab domain of Adalimumab or a variant thereof with at least 90%, preferably at least 95% identity to said V region.

[0495] In embodiments of the invention:
[0496] a) the V region of a Fab domain of Adalimumab comprises the amino acid sequence set forth in SEQ ID NO:5169 in a first polypeptide chain and the amino acid sequence set forth in SEQ ID NO:5173 in a second polypeptide chain;
[0497] b) the V region of a Fab domain of Secukinumab comprises the amino acid sequence set forth in SEQ ID NO: 7157 in a first polypeptide chain and the amino acid sequence set forth in SEQ ID NO: 7261 in a second polypeptide chain;
[0498] c) the V region of a Fab domain of Ustekinumab comprises the amino acid sequence set forth in SEQ ID NO:7645 in a first polypeptide chain and the amino acid sequence set forth in SEQ ID NO:7649 in a second polypeptide chain; and
[0499] d) the V region of a Fab domain of Vedolizumab comprises the amino acid sequence set forth in SEQ ID NO:7685 in a first polypeptide chain and the amino acid sequence set forth in SEQ ID NO: 7689 in a second polypeptide chain.

[0500] In embodiments of the immediately preceding embodiment of the invention:
[0501] a) if the third, fourth, fifth or sixth domain comprises the V region of a Fab domain of Adalimumab or a variant thereof with at least 90% or at least 95% identity to said V region, said domain comprises complementarity determining region (CDR) sequences set forth in SEQ ID NOs: 5170-5172 in a first polypeptide chain of the domain and complementarity determining region (CDR) sequences set forth in SEQ ID NOs: 5174-5176 in a second polypeptide chain of the domain;
[0502] b) if the third, fourth, fifth or sixth domain comprises the V region of a Fab domain of Secukinumab or a variant thereof with at least 90% or at least 95% identity to said V region, said domain comprises complementarity determining region (CDR) sequences set forth in SEQ ID NOs: 7258-7260 in a first polypeptide chain of the domain and complementarity determining region (CDR) sequences set forth in SEQ ID NOs: 7262-7264 in a second polypeptide chain of the domain;
[0503] c) if the third, fourth, fifth or sixth domain comprises the V region of a Fab domain of Ustekinumab or a variant thereof with at least 90% or at least 95% identity to said V region, said domain comprises complementarity determining region (CDR) sequences set forth in SEQ ID NOs: 7646-7648 in a first polypeptide chain of the domain and complementarity determining region (CDR) sequences set forth in SEQ ID NOs: 7650-7652 in a second polypeptide chain of the domain; and
[0504] d) if the third, fourth, fifth or sixth domain comprises the V region of a Fab domain of Vedolizumab or a variant thereof with at least 90% or at least 95% identity to said V region, said domain comprises complementarity determining region (CDR) sequences set forth in SEQ ID NOs: 7686-7688 in a first polypeptide chain of the domain and complementarity determining region (CDR) sequences set forth in SEQ ID NOs: 7690-7692 in a second polypeptide chain of the domain.

[0505] In embodiments of the invention:
[0506] a) if the third, fourth, fifth or sixth domain comprises the V region of a Fab domain of Adalimumab or a variant thereof with at least 90% or at least 95% identity to said V region, said domain comprises complementarity determining region (CDR) sequences set forth in SEQ ID NOs: 5170-5172 in a first polypeptide chain of the domain and complementarity determining region (CDR) sequences set forth in SEQ ID NOs: 5174-5176 in a second polypeptide chain of the domain;
[0507] b) if the third, fourth, fifth or sixth domain comprises the V region of a Fab domain of Secukinumab or a variant thereof with at least 90% or at least 95% identity to said V region, said domain comprises complementarity determining region (CDR) sequences set forth in SEQ ID NOs: 7258-7260 in a first polypeptide chain of the domain and complementarity determining region (CDR) sequences set forth in SEQ ID NOs: 7262-7264 in a second polypeptide chain of the domain;
[0508] c) if the third, fourth, fifth or sixth domain comprises the V region of a Fab domain of Ustekinumab or a variant thereof with at least 90% or at least 95% identity to said V region, said domain comprises complementarity determining region (CDR) sequences set forth in SEQ ID NOs: 7646-7648 in a first polypeptide chain of the domain and complementarity determining region (CDR) sequences set forth in SEQ ID NOs: 7650-7652 in a second polypeptide chain of the domain; and
[0509] d) if the third, fourth, fifth or sixth domain comprises the V region of a Fab domain of Vedolizumab or a variant thereof with at least 90% or at least 95% identity to said V region, said domain comprises complementarity determining region (CDR) sequences set forth in SEQ ID NOs: 7686-7688 in a first polypeptide chain of the domain and complementarity determining region (CDR) sequences set forth in SEQ ID NOs: 7690-7692 in a second polypeptide chain of the domain.

[0510] In embodiments of the invention, the tetrahedral antibody is formed by four different types of polypeptide chains denoted L1, H1, L2, and H2, wherein:
[0511] a) the C-terminal portion of the H1 and H2 chains pair with one another to form each of the first and second domains,
[0512] b) the N-terminal portion of the H1 chain pairs with the L1 chains to form each of the third and fourth domains,
[0513] c) the N-terminal portion of the H2 chain pairs with the L2 chains to form each of the fifth and sixth domains, and
[0514] d) the H1 chain contains the collectrin-like domain polypeptide between the portion of the H1 chain that pairs with the H2 chain and the portion that pairs with the L1 chain.

[0515] In embodiments of the immediately preceding embodiment of the invention:
[0516] a) the H1 chain comprises the amino acid sequence set forth in SEQ ID NO: 4866, the H2 chain comprises the amino acid sequence set forth in SEQ ID NO: 4867, the L1 chain comprises the amino acid sequence set forth in SEQ ID NO: 4894, and the L2 chain comprises the amino acid sequence set forth in SEQ ID NO: 4895;
[0517] b) the H1 chain comprises the amino acid sequence set forth in SEQ ID NO: 4866, the H2 chain comprises the amino acid sequence set forth in SEQ ID NO: 4868, the L1 chain comprises the amino acid sequence set forth in SEQ ID NO: 4894, and the L2 chain comprises the amino acid sequence set forth in SEQ ID NO: 4896;
[0518] c) the H1 chain comprises the amino acid sequence set forth in SEQ ID NO: 4869, the H2 chain comprises the amino acid sequence set forth in SEQ ID NO: 4867, the L1 chain comprises the amino acid sequence set forth in SEQ ID NO: 4897, and the L2 chain comprises the amino acid sequence set forth in SEQ ID NO: 4895;
[0519] d) the H1 chain comprises the amino acid sequence set forth in SEQ ID NO: 4869, the H2 chain comprises the amino acid sequence set forth in SEQ ID NO: 4868, the L1 chain comprises the amino acid sequence set forth in SEQ ID NO: 4897, and the L2 chain comprises the amino acid sequence set forth in SEQ ID NO: 4896;
[0520] e) the H1 chain comprises the amino acid sequence set forth in SEQ ID NO: 4870, the H2 chain comprises the amino acid sequence set forth in SEQ ID NO: 4871, the L1 chain comprises the amino acid sequence set forth in SEQ ID NO: 4898, and the L2 chain comprises the amino acid sequence set forth in SEQ ID NO: 4899;
[0521] f) the H1 chain comprises the amino acid sequence set forth in SEQ ID NO: 4870, the H2 chain comprises the amino acid sequence set forth in SEQ ID NO: 4872, the L1 chain comprises the amino acid sequence set forth in SEQ ID NO: 4898, and the L2 chain comprises the amino acid sequence set forth in SEQ ID NO: 4900;
[0522] g) the H1 chain comprises the amino acid sequence set forth in SEQ ID NO: 4873, the H2 chain comprises the amino acid sequence set forth in SEQ ID NO: 4871, the L1 chain comprises the amino acid sequence set forth in SEQ ID NO: 4901, and the L2 chain comprises the amino acid sequence set forth in SEQ ID NO: 4899;
[0523] h) the H1 chain comprises the amino acid sequence set forth in SEQ ID NO: 4873, the H2 chain comprises the amino acid sequence set forth in SEQ ID NO: 4872, the L1 chain comprises the amino acid sequence set forth in SEQ ID NO: 4901, and the L2 chain comprises the amino acid sequence set forth in SEQ ID NO: 4900;
[0524] i) the H1 chain comprises the amino acid sequence set forth in SEQ ID NO: 4866, the H2 chain comprises the amino acid sequence set forth in SEQ ID NO: 4874, the L1 chain comprises the amino acid sequence set forth in SEQ ID NO: 4894, and the L2 chain comprises the amino acid sequence set forth in SEQ ID NO: 4902;
[0525] j) the H1 chain comprises the amino acid sequence set forth in SEQ ID NO: 4866, the H2 chain comprises the amino acid sequence set forth in SEQ ID NO: 4875, the L1 chain comprises the amino acid sequence set forth in SEQ ID NO: 4894, and the L2 chain comprises the amino acid sequence set forth in SEQ ID NO: 4903;
[0526] k) the H1 chain comprises the amino acid sequence set forth in SEQ ID NO: 4869, the H2 chain comprises the amino acid sequence set forth in SEQ ID NO: 4874, the L1 chain comprises the amino acid sequence set forth in SEQ ID NO: 4897, and the L2 chain comprises the amino acid sequence set forth in SEQ ID NO: 4902;
[0527] l) the H1 chain comprises the amino acid sequence set forth in SEQ ID NO: 4869, the H2 chain comprises the amino acid sequence set forth in SEQ ID NO: 4875, the L1 chain comprises the amino acid sequence set forth in SEQ ID NO: 4897, and the L2 chain comprises the amino acid sequence set forth in SEQ ID NO: 4903;
[0528] m) the H1 chain comprises the amino acid sequence set forth in SEQ ID NO: 4876, the H2 chain comprises the amino acid sequence set forth in SEQ ID NO: 4871, the L1 chain comprises the amino acid sequence set forth in SEQ ID NO: 4904, and the L2 chain comprises the amino acid sequence set forth in SEQ ID NO: 4899;
[0529] n) the H1 chain comprises the amino acid sequence set forth in SEQ ID NO: 4876, the H2 chain comprises the amino acid sequence set forth in SEQ ID NO: 4872, the L1 chain comprises the amino acid sequence set forth in SEQ ID NO: 4904, and the L2 chain comprises the amino acid sequence set forth in SEQ ID NO: 4900;
[0530] o) the H1 chain comprises the amino acid sequence set forth in SEQ ID NO: 4877, the H2 chain comprises the amino acid sequence set forth in SEQ ID NO: 4871, the L1 chain comprises the amino acid sequence set forth in SEQ ID NO: 4905, and the L2 chain comprises the amino acid sequence set forth in SEQ ID NO: 4899;
[0531] p) the H1 chain comprises the amino acid sequence set forth in SEQ ID NO: 4877, the H2 chain comprises the amino acid sequence set forth in SEQ ID NO: 4872, the L1 chain comprises the amino acid sequence set forth in SEQ ID NO: 4905, and the L2 chain comprises the amino acid sequence set forth in SEQ ID NO: 4900;
[0532] q) the H1 chain comprises the amino acid sequence set forth in SEQ ID NO: 4870, the H2 chain comprises the amino acid sequence set forth in SEQ ID NO: 4874, the L1 chain comprises the amino acid sequence set forth in SEQ ID NO: 4898, and the L2 chain comprises the amino acid sequence set forth in SEQ ID NO: 4902;
[0533] r) the H1 chain comprises the amino acid sequence set forth in SEQ ID NO: 4870, the H2 chain comprises the amino acid sequence set forth in SEQ ID NO: 4875, the L1 chain comprises the amino acid sequence set forth in SEQ ID NO: 4898, and the L2 chain comprises the amino acid sequence set forth in SEQ ID NO: 4903;
[0534] s) the H1 chain comprises the amino acid sequence set forth in SEQ ID NO: 4873, the H2 chain comprises the amino acid sequence set forth in SEQ ID NO: 4874, the L1 chain comprises the amino acid sequence set forth in SEQ ID NO: 4901, and the L2 chain comprises the amino acid sequence set forth in SEQ ID NO: 4902;
[0535] t) the H1 chain comprises the amino acid sequence set forth in SEQ ID NO: 4873, the H2 chain comprises the amino acid sequence set forth in SEQ ID NO: 4875, the L1 chain comprises the amino acid sequence set forth in SEQ ID NO: 4901, and the L2 chain comprises the amino acid sequence set forth in SEQ ID NO: 4903;
[0536] u) the H1 chain comprises the amino acid sequence set forth in SEQ ID NO: 4876, the H2 chain comprises the amino acid sequence set forth in SEQ ID NO: 4867, the L1 chain comprises the amino acid sequence set forth in SEQ ID NO: 4904, and the L2 chain comprises the amino acid sequence set forth in SEQ ID NO: 4895;
[0537] v) the H1 chain comprises the amino acid sequence set forth in SEQ ID NO: 4876, the H2 chain comprises the amino acid sequence set forth in SEQ ID NO: 4868, the L1 chain comprises the amino acid sequence set forth in SEQ ID NO: 4904, and the L2 chain comprises the amino acid sequence set forth in SEQ ID NO: 4896;
[0538] w) the H1 chain comprises the amino acid sequence set forth in SEQ ID NO: 4877, the H2 chain comprises the amino acid sequence set forth in SEQ ID NO: 4867, the L1 chain comprises the amino acid sequence set forth in SEQ ID NO: 4905, and the L2 chain comprises the amino acid sequence set forth in SEQ ID NO: 4895;
[0539] x) the H1 chain comprises the amino acid sequence set forth in SEQ ID NO: 4877, the H2 chain comprises the amino acid sequence set forth in SEQ ID NO: 4868, the L1 chain comprises the amino acid sequence set forth in SEQ ID NO: 4905, and the L2 chain comprises the amino acid sequence set forth in SEQ ID NO: 4896;
[0540] y) the H1 chain comprises the amino acid sequence set forth in SEQ ID NO: 4878, the H2 chain comprises the amino acid sequence set forth in SEQ ID NO: 4879, the L1 chain comprises the amino acid sequence set forth in SEQ ID NO: 4894, and the L2 chain comprises the amino acid sequence set forth in SEQ ID NO: 4906;
[0541] z) the H1 chain comprises the amino acid sequence set forth in SEQ ID NO: 4878, the H2 chain comprises the amino acid sequence set forth in SEQ ID NO: 4880, the L1 chain comprises the amino acid sequence set forth in SEQ ID NO: 4894, and the L2 chain comprises the amino acid sequence set forth in SEQ ID NO: 4907;
[0542] aa) the H1 chain comprises the amino acid sequence set forth in SEQ ID NO: 4881, the H2 chain comprises the amino acid sequence set forth in SEQ ID NO: 4879, the L1 chain comprises the amino acid sequence set forth in SEQ ID NO: 4897, and the L2 chain comprises the amino acid sequence set forth in SEQ ID NO: 4906;
[0543] bb) the H1 chain comprises the amino acid sequence set forth in SEQ ID NO: 4881, the H2 chain comprises the amino acid sequence set forth in SEQ ID NO: 4880, the L1 chain comprises the amino acid sequence set forth in SEQ ID NO: 4897, and the L2 chain comprises the amino acid sequence set forth in SEQ ID NO: 4907;
[0544] cc) the H1 chain comprises the amino acid sequence set forth in SEQ ID NO: 4882, the H2 chain comprises the amino acid sequence set forth in SEQ ID NO: 4883, the L1 chain comprises the amino acid sequence set forth in SEQ ID NO: 4908, and the L2 chain comprises the amino acid sequence set forth in SEQ ID NO: 4899;
[0545] dd) the H1 chain comprises the amino acid sequence set forth in SEQ ID NO: 4882, the H2 chain comprises the amino acid sequence set forth in SEQ ID NO: 4884, the L1 chain comprises the amino acid sequence set forth in SEQ ID NO: 4908, and the L2 chain comprises the amino acid sequence set forth in SEQ ID NO: 4900;
[0546] ee) the H1 chain comprises the amino acid sequence set forth in SEQ ID NO: 4885, the H2 chain comprises the amino acid sequence set forth in SEQ ID NO: 4883, the L1 chain comprises the amino acid sequence set forth in SEQ ID NO: 4909, and the L2 chain comprises the amino acid sequence set forth in SEQ ID NO: 4899; or
[0547] ff) the H1 chain comprises the amino acid sequence set forth in SEQ ID NO: 4885, the H2 chain comprises the amino acid sequence set forth in SEQ ID NO: 4884, the L1 chain comprises the amino acid sequence set forth in SEQ ID NO: 4909, and the L2 chain comprises the amino acid sequence set forth in SEQ ID NO: 4900; or
[0548] gg) the L1, H1, L2, and H2 chains are variants with at least 90%, preferably at least 95%, more preferably at least 98% identity to said sequences.

[0549] This invention also provides a tetrahedral antibody comprising a first, second, third, and fourth, fifth, and sixth domain, wherein:
[0550] a) each of the first and second domains are an Fc domain and comprise:
   [0551] i) a first polypeptide chain comprising a first N-terminus and a first C-terminus of the domain, and
   [0552] ii) a second polypeptide chain comprising a second N-terminus and a second C-terminus of the domain,
[0553] b) either:
   [0554] i) the third and fourth domains are Fab domains, and the fifth, and sixth domains are the extracellular domain of a transmembrane protein, or
   [0555] ii) the third and fourth domains are the extracellular domain of a transmembrane protein, and the fifth, and sixth domains are Fab domains,
[0556] c) the first domain and the second domain are joined to each other by a non-covalent linkage between a first collectrin-like domain polypeptide attached by a peptide bond or via a peptide linker to the first N-terminus of the first domain, and a second collectrin-like domain polypeptide attached by a peptide bond or via a peptide linker to the first N-terminus of the second domain;
[0557] d) the third domain is attached at its C-terminus by a peptide bond or via a peptide linker to the N-terminus of the first collectrin-like domain polypeptide,
[0558] e) the fourth domain is attached at its C-terminus by a peptide bond or via a peptide linker to the N-terminus of the second collectrin-like domain polypeptide,
[0559] f) the fifth domain is attached at its C-terminus by a peptide bond or via a peptide linker to the second N-terminus of the first domain,
[0560] g) the sixth domain is attached at its C-terminus by a peptide bond or via a peptide linker to the second N-terminus of the second domain.

[0561] In embodiments of the immediately preceding embodiment of the invention, the first and second domains are each an Fc domain of an IgG antibody.

[0562] In embodiments of the immediately preceding embodiment of the invention, the first and second domains each comprise one or more mutations that reduce Fc gamma receptor binding activity.

[0563] In embodiments of the immediately preceding embodiment of the invention, the one or more mutations that reduce Fc gamma receptor binding activity are selected from:
[0564] a) P329G/L234A/L235A (PGLALA),
[0565] b) L234A/L235A (LALA),
[0566] c) P331S/L234A/L235A,
[0567] d) L234F/L235E/P331S, and
[0568] e) L234F/L235E/P329G.

[0569] In embodiments of the invention:
[0570] a) the fifth and sixth domains comprise the extracellular domain of a TNFR1B receptor; and
[0571] b) the third and fourth domains are Fab domains comprising the V region of a Fab domain of Adalimumab, Ustekinumab, Secukinumab, Vedolizumab or a variant thereof with at least 90%, preferably at least 95% identity to said V region.

[0572] In embodiments of the invention:
[0573] a) the third and fourth domains comprise the extracellular domain of a TNFR1B receptor; and
[0574] b) the fifth and sixth domains are Fab domains comprising the V region of a Fab domain of Adalimumab, Ustekinumab, Secukinumab, Vedolizumab or a variant thereof with at least 90%, preferably at least 95% identity to said V region.

[0575] In embodiments of the immediately preceding embodiment of the invention, the first and second domains each comprise one or more mutations that reduce Fc gamma receptor binding activity.

[0576] In embodiments of the immediately preceding embodiment of the invention, the one or more mutations that reduce Fc gamma receptor binding activity are selected from:
[0577] a) P329G/L234A/L235A (PGLALA),
[0578] b) L234A/L235A (LALA),
[0579] c) P331S/L234A/L235A,
[0580] d) L234F/L235E/P331S, and
[0581] e) L234F/L235E/P329G.

[0582] In embodiments of the immediately preceding embodiment of the invention, the extracellular domain of a TNFR1B receptor comprises the amino acid sequence set forth in SEQ ID NO: 1989.

[0583] In embodiments of the invention, the extracellular domain of a TNFR1B receptor comprises the amino acid sequence set forth in SEQ ID NO: 1989.

[0584] In embodiments of the invention:
[0585] a) the extracellular domain of a TNFR1B receptor comprises the amino acid sequence set forth in SEQ ID NO: 1989;
[0586] b) the V region of a Fab domain of Adalimumab comprises the amino acid sequence set forth in SEQ ID NO:5169 in a first polypeptide chain and the amino acid sequence set forth in SEQ ID NO:5173 in a second polypeptide chain;
[0587] c) the V region of a Fab domain of Secukinumab comprises the amino acid sequence set forth in SEQ ID NO: 7157 in a first polypeptide chain and the amino acid sequence set forth in SEQ ID NO: 7261 in a second polypeptide chain;
[0588] d) the V region of a Fab domain of Ustekinumab comprises the amino acid sequence set forth in SEQ ID NO:7645 in a first polypeptide chain and the amino acid sequence set forth in SEQ ID NO:7649 in a second polypeptide chain; and
[0589] e) the V region of a Fab domain of Vedolizumab comprises the amino acid sequence set forth in SEQ ID NO:7685 in a first polypeptide chain and the amino acid sequence set forth in SEQ ID NO: 7689 in a second polypeptide chain.

[0590] In embodiments of the invention:
[0591] a) if the fifth or sixth domain comprises the V region of a Fab domain of Adalimumab or a variant thereof with at least 90% or at least 95% identity to said V region, said domain comprises complementarity determining region (CDR) sequences set forth in SEQ ID NOs: 5170-5172 in a first polypeptide chain of the domain and complementarity determining region (CDR) sequences set forth in SEQ ID NOs: 5174-5176 in a second polypeptide chain of the domain;
[0592] b) if the fifth or sixth domain comprises the V region of a Fab domain of Secukinumab or a variant thereof with at least 90% or at least 95% identity to said V region, said domain comprises complementarity determining region (CDR) sequences set forth in SEQ ID NOs: 7258-7260 in a first polypeptide chain of the domain and complementarity determining region (CDR) sequences set forth in SEQ ID NOs: 7262-7264 in a second polypeptide chain of the domain;
[0593] c) if the fifth or sixth domain comprises the V region of a Fab domain of Ustekinumab or a variant thereof with at least 90% or at least 95% identity to said V region, said domain comprises complementarity determining region (CDR) sequences set forth in SEQ ID NOs: 7646-7648 in a first polypeptide chain of the domain and complementarity determining region (CDR) sequences set forth in SEQ ID NOs: 7650-7652 in a second polypeptide chain of the domain; and
[0594] d) if the fifth or sixth domain comprises the V region of a Fab domain of Vedolizumab or a variant thereof with at least 90% or at least 95% identity to said V region, said domain comprises complementarity determining region (CDR) sequences set forth in SEQ ID NOs: 7686-7688 in a first polypeptide chain of the domain and complementarity determining region (CDR) sequences set forth in SEQ ID NOs: 7690-7692 in a second polypeptide chain of the domain.

[0595] In embodiments of the immediately preceding embodiment of the invention, the extracellular domain of a TNFR1B receptor comprises the amino acid sequence set forth in SEQ ID NO: 1989.

[0596] In embodiments of the invention:
[0597] a) the third and fourth domains comprise the extracellular domain of a TNFR1B receptor and the fifth and sixth domains are Fab domains comprising the V region of a Fab domain of Adalimumab or a variant thereof with at least 90%, preferably at least 95% identity to said V region;
[0598] b) the third and fourth domains comprise the extracellular domain of a TNFR1B receptor and the fifth and sixth domains are Fab domains comprising the V region of a Fab domain of Ustekinumab or a variant thereof with at least 90%, preferably at least 95% identity to said V region;
[0599] c) the third and fourth domains comprise the extracellular domain of a TNFR1B receptor and the fifth and sixth domains are Fab domains comprising the V region of a Fab domain of Secukinumab or a variant thereof with at least 90%, preferably at least 95% identity to said V region; or
[0600] d) the third and fourth domains comprise the extracellular domain of a TNFR1B receptor and the fifth and sixth domains are Fab domains comprising the V region of a Fab domain of Vedolizumab or a variant thereof with at least 90%, preferably at least 95% identity to said V region.

[0601] In embodiments of the immediately preceding embodiment of the invention:
[0602] a) the extracellular domain of a TNFR1B receptor comprises the amino acid sequence set forth in SEQ ID NO: 1989;
[0603] b) the V region of a Fab domain of Adalimumab comprises the amino acid sequence set forth in SEQ ID NO:5169 in a first polypeptide chain and the amino acid sequence set forth in SEQ ID NO:5173 in a second polypeptide chain;
[0604] c) the V region of a Fab domain of Secukinumab comprises the amino acid sequence set forth in SEQ ID NO: 7157 in a first polypeptide chain and the amino acid sequence set forth in SEQ ID NO: 7261 in a second polypeptide chain;
[0605] d) the V region of a Fab domain of Ustekinumab comprises the amino acid sequence set forth in SEQ ID NO:7645 in a first polypeptide chain and the amino acid sequence set forth in SEQ ID NO:7649 in a second polypeptide chain; and
[0606] e) the V region of a Fab domain of Vedolizumab comprises the amino acid sequence set forth in SEQ ID NO:7685 in a first polypeptide chain and the amino acid sequence set forth in SEQ ID NO: 7689 in a second polypeptide chain.

[0607] In embodiments of the immediately preceding embodiment of the invention:
[0608] a) if the fifth or sixth domain comprises the V region of a Fab domain of Adalimumab or a variant thereof with at least 90% or at least 95% identity to said V region, said domain comprises complementarity determining region (CDR) sequences set forth in SEQ ID NOs: 5170-5172 in a first polypeptide chain of the domain and complementarity determining region (CDR) sequences set forth in SEQ ID NOs: 5174-5176 in a second polypeptide chain of the domain;
[0609] b) if the fifth or sixth domain comprises the V region of a Fab domain of Secukinumab or a variant thereof with at least 90% or at least 95% identity to said V region, said domain comprises complementarity determining region (CDR) sequences set forth in SEQ ID NOs: 7258-7260 in a first polypeptide chain of the domain and complementarity determining region (CDR) sequences set forth in SEQ ID NOs: 7262-7264 in a second polypeptide chain of the domain;
[0610] c) if the fifth or sixth domain comprises the V region of a Fab domain of Ustekinumab or a variant thereof with at least 90% or at least 95% identity to said V region, said domain comprises complementarity determining region (CDR) sequences set forth in SEQ ID NOs: 7646-7648 in a first polypeptide chain of the domain and complementarity determining region (CDR) sequences set forth in SEQ ID NOs: 7650-7652 in a second polypeptide chain of the domain; and
[0611] d) if the fifth or sixth domain comprises the V region of a Fab domain of Vedolizumab or a variant thereof with at least 90% or at least 95% identity to said V region, said domain comprises complementarity determining region (CDR) sequences set forth in SEQ ID NOs: 7686-7688 in a first polypeptide chain of the domain and complementarity determining region (CDR) sequences set forth in SEQ ID NOs: 7690-7692 in a second polypeptide chain of the domain.

[0612] In embodiments of the invention:
[0613] a) if the fifth or sixth domain comprises the V region of a Fab domain of Adalimumab or a variant thereof with at least 90% or at least 95% identity to said V region, said domain comprises complementarity determining region (CDR) sequences set forth in SEQ ID NOs: 5170-5172 in a first polypeptide chain of the domain and complementarity determining region (CDR) sequences set forth in SEQ ID NOs: 5174-5176 in a second polypeptide chain of the domain;
[0614] b) if the fifth or sixth domain comprises the V region of a Fab domain of Secukinumab or a variant thereof with at least 90% or at least 95% identity to said V region, said domain comprises complementarity determining region (CDR) sequences set forth in SEQ ID NOs: 7258-7260 in a first polypeptide chain of the domain and complementarity determining region (CDR) sequences set forth in SEQ ID NOs: 7262-7264 in a second polypeptide chain of the domain;
[0615] c) if the fifth or sixth domain comprises the V region of a Fab domain of Ustekinumab or a variant thereof with at least 90% or at least 95% identity to said V region, said domain comprises complementarity determining region (CDR) sequences set forth in SEQ ID NOs: 7646-7648 in a first polypeptide chain of the domain and complementarity determining region (CDR) sequences set forth in SEQ ID NOs: 7650-7652 in a second polypeptide chain of the domain; and
[0616] d) if the fifth or sixth domain comprises the V region of a Fab domain of Vedolizumab or a variant thereof with at least 90% or at least 95% identity to said V region, said domain comprises complementarity determining region (CDR) sequences set forth in SEQ ID NOs: 7686-7688 in a first polypeptide chain of the domain and complementarity determining region (CDR) sequences set forth in SEQ ID NOs: 7690-7692 in a second polypeptide chain of the domain.

[0617] In embodiments of the invention, the tetrahedral antibody is formed by three different types of polypeptide chains denoted H1, L1, and Fc wherein:
[0618] a) the C-terminal portion of the H1 chain pair the Fc chain to form each of the first and second domains,
[0619] b) the N-terminal portion the H1 chain pairs with the L1 chains to form each of the third and fourth domains,
[0620] c) the N-terminal portion of the Fc chain forms each of the fifth and sixth domains, and
[0621] d) the H1 chain contains the collectrin-like domain polypeptide between the portion of the H1 chain that pairs with the Fc chain and the portion that pairs with the L1 chain.

[0622] In embodiments of the immediately preceding embodiment of the invention:
[0623] a) the H1 chain comprises the amino acid sequence set forth in SEQ ID NO:4886, the L1 chain comprises the amino acid sequence set forth in SEQ ID NO: 4910, and the Fc chain comprises the amino acid sequence set forth in SEQ ID NO:4918;
[0624] b) the H1 chain comprises the amino acid sequence set forth in SEQ ID NO:4887, the L1 chain comprises the amino acid sequence set forth in SEQ ID NO: 4911, and the Fc chain comprises the amino acid sequence set forth in SEQ ID NO:4918;
[0625] c) the H1 chain comprises the amino acid sequence set forth in SEQ ID NO:4888, the L1 chain comprises the amino acid sequence set forth in SEQ ID NO: 4912, and the Fc chain comprises the amino acid sequence set forth in SEQ ID NO:4918;
[0626] d) the H1 chain comprises the amino acid sequence set forth in SEQ ID NO:4889, the L1 chain comprises the amino acid sequence set forth in SEQ ID NO: 4913, and the Fc chain comprises the amino acid sequence set forth in SEQ ID NO:4918;
[0627] e) the H1 chain comprises the amino acid sequence set forth in SEQ ID NO:4890, the L1 chain comprises the amino acid sequence set forth in SEQ ID NO: 4914, and the Fc chain comprises the amino acid sequence set forth in SEQ ID NO:4918;
[0628] f) the H1 chain comprises the amino acid sequence set forth in SEQ ID NO:4891, the L1 chain comprises the amino acid sequence set forth in SEQ ID NO: 4915, and the Fc chain comprises the amino acid sequence set forth in SEQ ID NO:4918;
[0629] g) the H1 chain comprises the amino acid sequence set forth in SEQ ID NO:4892, the L1 chain comprises the amino acid sequence set forth in SEQ ID NO: 4916, and the Fc chain comprises the amino acid sequence set forth in SEQ ID NO:4919; or
[0630] h) the H1 chain comprises the amino acid sequence set forth in SEQ ID NO:4893, the L1 chain comprises the amino acid sequence set forth in SEQ ID NO: 4917, and the Fc chain comprises the amino acid sequence set forth in SEQ ID NO:4919.

### Vectors

[0631] This invention provides one or more vectors comprising polynucleotides which encode polypeptides comprising four different polypeptide chains from a group listed in paragraph [0127], wherein each polynucleotide is operably linked to a promoter which directs expression of the polynucleotide in a host cell.

[0632] This invention provides one or more vectors comprising polynucleotides which encode polypeptides comprising four different polypeptide chains from a group listed in paragraph [0130], wherein each polynucleotide is operably linked to a promoter which directs expression of the polynucleotide in a host cell.

[0633] This invention provides one or more vectors comprising polynucleotides which encode polypeptides comprising four different polypeptide chains from a group listed in paragraph [0140], wherein each polynucleotide is operably linked to a promoter which directs expression of the polynucleotide in a host cell.

[0634] This invention provides one or more vectors comprising polynucleotides which encode polypeptides comprising four different polypeptide chains from a group listed in paragraph [0159], wherein each polynucleotide is operably linked to a promoter which directs expression of the polynucleotide in a host cell.

### Host Cells

[0635] This invention provides a host cell comprising any of the one or more vectors described above.

### Method of Producing

[0636] This invention provides a method of producing a tetrahedral antibody, the method comprising recombinantly expressing four different polypeptide chains from a group listed in paragraph [0127] in a host cell.

[0637] This invention provides a method of producing a tetrahedral antibody, the method comprising recombinantly expressing four different polypeptide chains from a group listed in paragraph [0140] in a host cell.

[0638] This invention provides a method of producing a tetrahedral antibody, the method comprising recombinantly expressing four different polypeptide chains from a group listed in paragraph [0130] in a host cell.

[0639] This invention provides a method of producing a tetrahedral antibody, the method comprising recombinantly expressing three different polypeptide chains from a group listed in paragraph [0130] in a host cell.

### Pharmaceutical Compositions

[0640] This invention provides a pharmaceutical composition comprising any one of the tetrahedral antibodies listed above and one or more pharmaceutically acceptable excipients.

### Methods of Treating

[0641] This invention provides a method of treating cancer in a subject, the method comprising administering to the subject a therapeutically effective amount of a pharmaceutical composition of the invention, preferably wherein the cancer is B cell cancer.

[0642] This invention provides a method of treating inflammatory disease in a subject, the method comprising administering to the subject a therapeutically effective amount of the pharmaceutical composition of the invention.

### Tetrahedral Antibodies

[0643] This invention provides a tetrahedral antibody comprising a first, second, third, and fourth domain, wherein:
[0644] a) each of the first and second domains are selected from the group consisting of a Fab domain and an Fc domain,
[0645] b) each of the first and second domains comprise:
   [0646] i) a first polypeptide chain comprising a first N-terminus and a first C-terminus of the domain, and
   [0647] ii) a second polypeptide chain comprising a second N-terminus and a second C-terminus of the domain,
[0648] c) the first domain and the second domain are joined to each other by a non-peptidyl linkage wherein the non-peptidyl linkage is:
   [0649] i) a covalent linkage
      [0650] (1) attached to the first N-terminus of the first domain and the first N-terminus of the second domain,
      [0651] (2) attached to the first C-terminus of the first domain and the first C-terminus of the second domain,
      [0652] (3) attached to the first N-terminus of the first domain and the first C-terminus of the second domain, or
      [0653] (4) attached to the first C-terminus of the first domain and the first N-terminus of the second domain, or
   [0654] ii) a non-covalent linkage
      [0655] (1) between a first dimerizing polypeptide attached by a peptide bond or via a peptide linker to the first N-terminus of the first domain, and a second dimerizing polypeptide attached by a peptide bond or via a peptide linker to the first N-terminus of the second domain,
      [0656] (2) between a first dimerizing polypeptide attached by a peptide bond or via a peptide linker to the first C-terminus of the first domain, and a second dimerizing polypeptide attached by a peptide bond or via a peptide linker to the first C-terminus of the second domain,
      [0657] (3) between a first dimerizing polypeptide attached by a peptide bond or via a peptide linker to the first N-terminus of the first domain, and a second dimerizing polypeptide attached by a peptide bond or via a peptide linker to the first C-terminus of the second domain, or
      [0658] (4) between a first dimerizing polypeptide attached by a peptide bond or via a peptide linker to the first C-terminus of the first domain, and a second dimerizing polypeptide attached by a peptide bond or via a peptide linker to the first N-terminus of the second domain,
      [0659] wherein the first and second dimerizing polypeptides are not immunoglobulin polypeptides,
[0660] d) if the first domain is joined to the second domain via a covalent linkage attached to the first N-terminus of the first domain, then the third domain is attached at its C-terminus to the second N-terminus of the first domain by a peptide bond or via a peptide linker,
[0661] e) if the first domain is joined to the second domain via a covalent linkage attached to the first C-terminus of the first domain then the third domain is attached at its N-terminus to the second C-terminus of the first domain by a peptide bond or via a peptide linker,
[0662] f) if the first domain is joined to the second domain via a first dimerizing polypeptide attached to the first N-terminus of the first domain, then the third domain is attached at its C-terminus by a peptide bond or via a peptide linker to
   [0663] i) the N-terminus of the first dimerizing polypeptide,
   [0664] ii) the second N-terminus of the first domain, or
   [0665] iii) the N-terminus of a third dimerizing polypeptide, wherein the third dimerizing polypeptide is attached at its C-terminus by a peptide bond or via a peptide linker to the second N-terminus of the first domain,
[0666] g) if the first domain is joined to the second domain via a first dimerizing polypeptide attached to the first C-terminus of the first domain, then the third domain is attached at its N-terminus by a peptide bond or via a peptide linker to
   [0667] i) the C-terminus of the first dimerizing polypeptide,
   [0668] ii) the second C-terminus of the first domain, or
   [0669] iii) the C-terminus of a third dimerizing polypeptide, wherein the third dimerizing polypeptide is attached at its N-terminus by a peptide bond or via a peptide linker to the second C-terminus of the first domain,
[0670] h) if the second domain is joined to the first domain via a covalent linkage attached to the first N-terminus of the second domain, then the fourth domain is attached at its C-terminus to the second N-terminus of the second domain by a peptide bond or via a peptide linker,
[0671] i) if the second domain is joined to the first domain via a covalent linkage attached to the first C-terminus of the second domain then the fourth domain is attached at its N-terminus to the second C-terminus of the second domain by a peptide bond or via a peptide linker,
[0672] j) if the second domain is joined to the first domain via a second dimerizing polypeptide attached to the first N-terminus of the second domain, then the fourth domain is attached at its C-terminus by a peptide bond or via a peptide linker to
   [0673] i) the N-terminus of the second dimerizing polypeptide,
   [0674] ii) the second N-terminus of the second domain, or
   [0675] iii) the N-terminus of a fourth dimerizing polypeptide, wherein the third dimerizing polypeptide is attached at its C-terminus by a peptide bond or via a peptide linker to the second N-terminus of the second domain,
[0676] k) if the second domain is joined to the first domain via a second dimerizing polypeptide attached to the first C-terminus of the second domain, then the fourth domain is attached at its N-terminus by a peptide bond or via a peptide linker to
   [0677] i) the C-terminus of the second dimerizing polypeptide,
   [0678] ii) the second C-terminus of the second domain, or
   [0679] iii) the C-terminus of a fourth dimerizing polypeptide, wherein the fourth dimerizing polypeptide is attached at its N-terminus by a peptide bond or via a peptide linker to the second C-terminus of the second domain.

[0680] In a preferred embodiment, the non-peptidyl linkage is a covalent linkage attached to the first N-terminus of the first domain and the first N-terminus of the second domain. In this preferred embodiment, the third domain is attached at its C-terminus to the second N-terminus of the first domain by a peptide bond or via a peptide linker. Further, in this preferred embodiment, the fourth domain is attached at its C-terminus to the second N-terminus of the second domain by a peptide bond or via a peptide linker.

[0681] In a preferred embodiment, the non-peptidyl linkage is a non-covalent linkage between a first dimerizing polypeptide attached by a peptide bond or via a peptide linker to the first N-terminus of the first domain, and a second dimerizing polypeptide attached by a peptide bond or via a peptide linker to the first N-terminus of the second domain. In this preferred embodiment, the third domain is attached at its N-terminus by a peptide bond or via a peptide linker to (a) the C-terminus of the first dimerizing polypeptide, or (b) the second C-terminus of the first domain. Further, in this preferred embodiment, the fourth domain is attached at its C-terminus by a peptide bond or via a peptide linker to (a) the N-terminus of the second dimerizing polypeptide, or (b) the second N-terminus of the second domain.

[0682] In an alternative embodiment, the non-peptidyl linkage is a covalent linkage:
[0683] a) attached to the first C-terminus of the first domain and the first C-terminus of the second domain,
[0684] b) attached to the first C-terminus of the first domain and the first C-terminus of the second domain, or
[0685] c) attached to the first N-terminus of the first domain and the first C-terminus of the second domain

[0686] In an alternative embodiment, the non-peptidyl linkage is a non-covalent linkage
[0687] a) between a first dimerizing polypeptide attached by a peptide bond or via a peptide linker to the first C-terminus of the first domain, and a second dimerizing polypeptide attached by a peptide bond or via a peptide linker to the first C-terminus of the second domain,
[0688] b) between a first dimerizing polypeptide attached by a peptide bond or via a peptide linker to the first N-terminus of the first domain, and a second dimerizing polypeptide attached by a peptide bond or via a peptide linker to the first C-terminus of the second domain, or
[0689] c) between a first dimerizing polypeptide attached by a peptide bond or via a peptide linker to the first C-terminus of the first domain, and a second dimerizing polypeptide attached by a peptide bond or via a peptide linker to the first N-terminus of the second domain.

[0690] In embodiments of the invention:
[0691] a) the first domain is an Fc domain and the second domain is a Fab domain,
[0692] b) the first and second domains are Fc domains,
[0693] c) the first and second domains are Fab domains,
[0694] d) the third and fourth domains are Fab domains,
[0695] e) the third and/or fourth domain are selected from the group consisting of (i) a secreted protein, and (ii) the extracellular domain of a transmembrane protein,
[0696] f) the third domain is selected from the group of (i) a secreted protein, and (ii) the extracellular domain of a transmembrane protein, and the fourth domain is a Fab,
[0697] g) the third domain is IL-15,
[0698] h) the third domain is IL-15 and the fourth domain is an IL-15Rα sushi domain,
[0699] i) the third domain is IL-15 and the fourth domain is a Fab,
[0700] j) the third and fourth domains are each the ACE2 peptidase domain (PD),
[0701] k) the first and second domains are Fc domains, and the third and fourth domains are selected from the group consisting of (i) a secreted protein, and (ii) the extracellular domain of a transmembrane protein,
[0702] l) the first and second domains are Fe domains, the third domain is selected from the group consisting of (i) a secreted protein, and (ii) the extracellular domain of a transmembrane protein, and the fourth domain is Fab,
[0703] m) the first and second domains are Fc domains and the third and fourth domains are Fab domains,
[0704] n) the first and second domains are Fc domains and the third and fourth domains are each the ACE2 peptidase domain (PD),
[0705] o) the first domain is an Fc domain and the second, third and fourth domains are Fab domains,
[0706] p) the first domain is an Fc domain, the second domain is a Fab domain, the third domain is IL-15, and the fourth domain is an IL-15Rα sushi domain, or
[0707] q) the first domain is an Fc domain, the second domain is a Fab domain, the third domain is IL-15, and the fourth domain is a Fab.

### Covalent Linkages

[0708] In embodiments of the invention, the non-peptidyl linkage between first domain and the second domain is a covalent linkage.

[0709] In embodiments of the invention, the covalent linkage comprises the structure:

[chemical structure]

[0710] wherein R₂ represents an organic structure which connects to the first or second domain and R₄ represents an organic structure which connects to the other of the first or second domain, wherein R₁ is H or is part of an additional structure that is a cyclic structure, wherein the additional cyclic structure comprises R₁ or a portion of R₁, and may also comprise R₂ or a portion of R₂, and the carbon between R₂ and the alkene double bond.

[0711] In embodiments of the invention, R₁ and R₂ are linked via at least one direct bond so as to form a cyclic structure comprising
[0712] a) a portion of R₁,
[0713] b) a portion of R₂,
[0714] c) the carbon between R₂ and the alkene double bond, and
[0715] d) the alkene double bond.

[0716] In embodiments of the invention, R₁ is selected from the group consisting of:

[chemical structure]

[0717] which is optionally substituted at any position.

[0718] In embodiments of the invention, the carbon between R₂ and the alkene double bond is directly bonded to R₂ via a double bond and a single bond.

[0719] In embodiments of the invention, R₂ is

[chemical structure]

[0720] which is optionally substituted at any position,
[0721] wherein R₂ is attached to R₁ via the nitrogen atom of R₂, and
[0722] wherein J is a bond or an organic structure comprising or consisting of a chain of 2, 3, 4, 5, 6, 7, 8, 9, 10 or more moieties selected from the group consisting of [PEG(y)]z, polyalkylene glycol, polyoxyalkylated polyol, polyvinyl alcohol, polyvinyl alkyl ether, poly(lactic acid), poly(lactic-glycolic acid), polysaccharide, a branched residue, C₁-C₄ alkyl, amine, sulfur, oxygen, succinimide, maleimide, glycerol, triazole, isoxazolidine, C₁-C₄ acyl, succinyl, malonyl, glutaryl, phthalyl, adipoyl and an amino acid, wherein [PEG(y)]z is:

[chemical structure]

[0723] wherein y=1-100 and z=1-10.

[0724] In embodiments of the invention, R₁ and R₂ taken together are:

[chemical structure]

[chemical structure]

[0725] which is optionally substituted at any position,
[0726] wherein J is a bond or an organic structure comprising or consisting of a chain of 2, 3, 4, 5, 6, 7, 8, 9, 10 or more moieties selected from the group consisting of [PEG(y)]z, polyalkylene glycol, polyoxyalkylated polyol, polyvinyl alcohol, polyvinyl alkyl ether, poly(lactic acid), poly(lactic-glycolic acid), polysaccharide, a branched residue, C₁-C₄ alkyl, amine, sulfur, oxygen, succinimide, maleimide, glycerol, triazole, isoxazolidine, C₁-C₄ acyl, succinyl, malonyl, glutaryl, phthalyl, adipoyl and an amino acid,
[0727] wherein [PEG(y)]z is:

[chemical structure]

[0728] wherein y=1-100 and z=1-10.

[0729] In embodiments of the invention, the covalent linkage comprises the structure:

[chemical structure]

[0730] which is optionally substituted at any position,
[0731] wherein J is a bond or an organic structure comprising or consisting of a chain of 2, 3, 4, 5, 6, 7, 8, 9, 10 or more moieties selected from the group consisting of [PEG(y)]z, polyalkylene glycol, polyoxyalkylated polyol, polyvinyl alcohol, polyvinyl alkyl ether, poly(lactic acid), poly(lactic-glycolic acid), polysaccharide, a branched residue, C₁-C₄ alkyl, amine, sulfur, oxygen, succinimide, maleimide, glycerol, triazole, isoxazolidine, C₁-C₄ acyl, succinyl, malonyl, glutaryl, phthalyl, adipoyl and an amino acid,
[0732] wherein [PEG(y)]z is:

[chemical structure]

[0733] wherein y=1-100 and z=1-10.

[0734] In embodiments of the invention, the covalent linkage comprises the structure:

[chemical structure]

[0735] wherein:
   [0736] a) Xₐ is a chemical structure selected from the group consisting of:
      [0737] i) a chemical structure which comprises a cyclooctane fused to a dihydropyridazine,
      [0738] ii) a chemical structure which comprises a cyclooctene fused to a pyridazine,
   [0739] b) Rₐ is a bond or a chemical structure which connects Xₐ to the first N-terminus of the first domain, and
   [0740] c) R_{b} is a bond or a chemical structure which connects Xₐ to the first N-terminus of the second domain.

[0741] In embodiments of the invention, Xₐ comprises the structure

[chemical structure]

wherein R_{c} is H, alkyl, or aryl, or a tautomer thereof.

[0742] In embodiments of the invention, the covalent linkage comprises the structure

[chemical structure]

wherein R_{c} is H, alkyl, or aryl, or a tautomer thereof.

[0743] In embodiments of the invention, Rₐ and Re are, independently, a bond, or a chemical structure comprising or consisting of a chain of 1, 2, 3, 4, 5, 6, 7, 8, 9, 10 or more moieties, wherein each moiety is independently selected from the group consisting of [PEG(y)]z, polyalkylene glycol, polyoxyalkylated polyol, polyvinyl alcohol, polyvinyl alkyl ether, poly(lactic acid), poly(lactic-glycolic acid), polysaccharide, a branched residue, C₁-C₁₀ alkyl, C₃-C₁₀ cycloalkane, C₂-C₁₀ alkene, C₅-C₁₀ cycloalkene, amine, sulfur, oxygen, succinimide, maleimide, glycerol, triazole, isoxazolidine, C₂-C₅ acyl, C₂-C₅ acylamino, C₂-C₅ acyloxy, succinyl, malonyl, glutaryl, phthalyl, adipoyl, an amino acid, an aryl group, a heteroaryl group, a carbamate, a chemical structure containing a cyclooctane fused to a dihydropyridazine, a chemical structure containing a cyclooctene fused to a triazole, a chemical structure containing a cyclooctene fused to a isoxazolidine, a dibenzocyclooctene, a dibenzoazacyclooctene,

[chemical structure]

[chemical structure]

and wherein X₁ is CH or N, X₂ is CH₂ or a carbonyl group and R₅ is an aryl or alkyl group, wherein [PEG(y)]z is:

[chemical structure]

wherein y=1-100 and z=1-10.

[0744] In embodiments of the invention, Rₐ and/or Re each independently:
[0745] a) comprise a [PEG(y)]z group;
[0746] b) comprise a polyalkylene glycol, polyoxyalkylated polyol, polyvinyl alcohol, polyvinyl alkyl ether, poly(lactic acid), poly(lactic-glycolic acid), or polysaccharide group;
[0747] c) comprise a C₁-C₄ alkyl group;
[0748] d) comprise a succinimide;
[0749] e) comprise an amine;
[0750] f) comprise a succinyl, malonyl, glutaryl, phthalyl or adipoyl;
[0751] g) comprise a malonyl;
[0752] h) comprise an amino acid;
[0753] i) comprise a cysteine;
[0754] j) comprise a lysine;
[0755] k) consist of a chain of 3 moieties selected from the group consisting of [PEG(y)]z, polyalkylene glycol, polyoxyalkylated polyol, polyvinyl alcohol, polyvinyl alkyl ether, poly(lactic acid), poly(lactic-glycolic acid), polysaccharide, a branched residue, C₁-C₁₀ alkyl, C₃-C₁₀ cycloalkane, C₂-C₁₀ alkene, C₅-C₁₀ cycloalkene, amine, sulfur, oxygen, succinimide, maleimide, glycerol, triazole, isoxazolidine, C₂-C₅ acyl, C₂-C₅ acylamino, C₂-C₅ acyloxy, succinyl, malonyl, glutaryl, phthalyl, adipoyl, an amino acid, an aryl group, a heteroaryl group, a carbamate, a chemical structure containing a cyclooctane fused to a dihydropyridazine, a chemical structure containing a cyclooctene fused to a triazole, a chemical structure containing a cyclooctene fused to a isoxazolidine, a dibenzocyclooctene, a dibenzoazacyclooctene,

[chemical structure]

[chemical structure]

[0756] l) consist of a chain of 4 moieties selected from the group consisting of [PEG(y)]z, polyalkylene glycol, polyoxyalkylated polyol, polyvinyl alcohol, polyvinyl alkyl ether, poly(lactic acid), poly(lactic-glycolic acid), polysaccharide, a branched residue, C₁-C₁₀ alkyl, C₃-C₁₀ cycloalkane, C₂-C₁₀ alkene, C₅-C₁₀ cycloalkene, amine, sulfur, oxygen, succinimide, maleimide, glycerol, triazole, isoxazolidine, C₂-C₅ acyl, C₂-C₅ acylamino, C₂-C₅ acyloxy, succinyl, malonyl, glutaryl, phthalyl, adipoyl, an amino acid, an aryl group, a heteroaryl group, a carbamate, a chemical structure containing a cyclooctane fused to a dihydropyridazine, a chemical structure containing a cyclooctene fused to a triazole, a chemical structure containing a cyclooctene fused to a isoxazolidine, a dibenzocyclooctene, a dibenzoazacyclooctene,

[chemical structure]

[chemical structure]

[0757] m) consist of a chain of 5 moieties selected from the group consisting of [PEG(y)]z, polyalkylene glycol, polyoxyalkylated polyol, polyvinyl alcohol, polyvinyl alkyl ether, poly(lactic acid), poly(lactic-glycolic acid), polysaccharide, a branched residue, C₁-C₁₀ alkyl, C₃-C₁₀ cycloalkane, C₂-C₁₀ alkene, C₅-C₁₀ cycloalkene, amine, sulfur, oxygen, succinimide, maleimide, glycerol, triazole, isoxazolidine, C₂-C₅ acyl, C₂-C₅ acylamino, C₂-C₅ acyloxy, succinyl, malonyl, glutaryl, phthalyl, adipoyl, an amino acid, an aryl group, a heteroaryl group, a carbamate, a chemical structure containing a cyclooctane fused to a dihydropyridazine, a chemical structure containing a cyclooctene fused to a triazole, a chemical structure containing a cyclooctene fused to a isoxazolidine, a dibenzocyclooctene, a dibenzoazacyclooctene,

[chemical structure]

[chemical structure]

[0758] n) comprise a [PEG(y)]z group bonded to a lysine;
[0759] o) comprise a C₁-C₄ acyl group bonded to a succinimide group;
[0760] p) comprise a lysine bonded to a C₁-C₄ acyl
[0761] q) comprise a [PEG(y)]z group, which is bonded to a glutaryl;
[0762] r) consist of a chain of three, four or five moieties selected from the group consisting of [PEG(y)]z, C₂-C₅ acyl, succinyl, malonyl, glutaryl, an amino acid, a chemical structure containing a cyclooctane fused to a dihydropyridazine, a chemical structure containing a cyclooctene fused to a triazole, a chemical structure containing a cyclooctene fused to a isoxazolidine, a dibenzocyclooctene, a dibenzoazacyclooctene,

[chemical structure]

[chemical structure]

wherein X₁ is CH or N, X₂ is CH₂ or a carbonyl group, and R₅ is an aryl or alkyl group, wherein [PEG(y)]z is:

[chemical structure]

wherein y=1-100 and z=1-10;
[0763] s) is a bond;
[0764] t) is a cysteine;
[0765] u) has a linear structure; or
[0766] v) has a branched structure;
[0767] w) has the structure:

[chemical structure]

[0768] x) is:

[chemical structure]

wherein n is 1, 2, 3, 4, 5, 6, 7, 8, 9, 10, 11, 12, 13, 14, 15, 16, 17, 18, 19, 20, 1-30, 1-40, or 1-50;
[0769] y) is:

[chemical structure]

[0770] wherein n is 1, 2, 3, 4, 5, 6, 7, 8, 9, 10, 11, 12, 13, 14, 15, 16, 17, 18, 19, 20, 1-30, 1-40, or 1-50, x is 1, 2, 3, 4, 5, 6, 7, 8, 9, 10, 11, 12, 13, 14, 15, 16, 17, 18, 19, 20, 1-30, 1-40, or 1-50 and z is 1, 2, 3, 4, 5, 6, 7, 8, 9, 10, 11, 12, 13, 14, 15, 16, 17, 18, 19, 20, 1-30, 1-40, or 1-50;
[0771] z) is:

[chemical structure]

[0772] wherein x is 1, 2, 3, 4, 5, 6, 7, 8, 9, 10, 11, 12, 13, 14, 15, 16, 17, 18, 19, 20, 1-30, 1-40, or 1-50 and z is 1, 2, 3, 4, 5, 6, 7, 8, 9, 10, 11, 12, 13, 14, 15, 16, 17, 18, 19, 20, 1-30, 1-40, or 1-50; or
[0773] aa) is:

[chemical structure]

wherein n is 1, 2, 3, 4, 5, 6, 7, 8, 9, 10, 11, 12, 13, 14, 15, 16, 17, 18, 19, 20, 1-30, 1-40, or 1-50.

[0774] In embodiments of the invention, Rₐ and/or R_{b} comprise the moiety

[chemical structure]

[0775] wherein X₁ is CH or N and X₂ is CH₂ or a carbonyl group.

### Non-Covalent Linkages

[0776] In embodiments of the invention, the non-peptidyl linkage is a non-covalent linkage between a first dimerizing polypeptide attached to the first domain and a second dimerizing polypeptide attached to the second domain.

[0777] In embodiments of the invention, the first and second dimerizing polypeptides are selected from the group consisting of:
[0778] a) dimerizing domains of an extracellular protein dimer, and
[0779] b) dimerizing domains of an intracellular protein dimer.

[0780] In embodiments of the invention, the first and second dimerizing polypeptides are selected from the group consisting of:
[0781] a) a leucine zipper domain,
[0782] b) a collectrin-like domain (CLD),
[0783] c) a collectrin domain (CD),
[0784] d) a CD8 alpha extracellular domain, and
[0785] e) a CD8 beta extracellular domain.

[0786] In preferred embodiments of the tetrahedral antibody of the invention, the first and second dimerizing polypeptides are selected from a collectrin-like domain (CLD) and a collectrin domain (CD), preferably a collectrin-like domain (CLD).

[0787] In embodiments of the invention:
[0788] a) the first dimerizing polypeptide is the same as the second dimerizing polypeptide, and
[0789] b) the dimerizing polypeptides form a homodimer.

[0790] In embodiments of the invention:
[0791] a) the first dimerizing polypeptide is different than the second dimerizing polypeptide, and
[0792] b) the first and second dimerizing polypeptides form a heterodimer.

[0793] In embodiments of the invention wherein the first and second dimerizing polypeptides form a heterodimer, the dimerizing polypeptides are collectrin-like domain (CLD), and the CLD comprises substitutions that disrupt homodimer formation in the CLD dimerizing polypeptide, preferably wherein the substitutions are at Arg652, Arg710, Tyr641, Tyr633, Asn638, Glu639, Gln653, Asn636, Ser709, Asp713, and/or Arg716, more preferably wherein Tyr641 and Tyr633 are substituted with positively charged amino acids lysine, arginine or histidine and Arg652 and Arg710 are substituted with the negatively charged amino acids glutamic acid or aspartic acid or the positively amino acid lysine.

[0794] In embodiments of the invention wherein the first and second dimerizing polypeptides form a heterodimer, the dimerizing polypeptides are collectrin, and the collectrin dimerizing polypeptide comprises substitutions that disrupt homodimer formation in the collectrin dimerizing polypeptide, preferably wherein the substitutions are at Arg59, Arg111, Tyr48, and/or Tyr40, more preferably wherein Tyr48 and/or Tyr40 are substituted with positively charged amino acids lysine, arginine or histidine and Arg59 and/or Arg111 are substituted with the negatively charged amino acids glutamic acid or aspartic acid or the positively charge amino acid lysine.

[0795] In embodiments wherein the dimerizing polypeptides are collectrin-like domain (CLD), and, the CLD comprises substitutions that promote heterodimer formation in the CLD dimerizing polypeptide, and preferably:
[0796] a) Tyr633 on either of the first or second CLD dimerizing polypeptide is substituted, preferably with either a positively charge or negatively charged amino acid;
[0797] b) Tyr641 on either of the first or second CLD dimerizing polypeptide is substituted, preferably with either a positively charge or negatively charged amino acid;
[0798] c) Arg652 on either of the first or second CLD dimerizing polypeptide is substituted, preferably with either a positively charge or negatively charged amino acid;
[0799] d) Arg710 on either of the first or second CLD dimerizing polypeptide is substituted, preferably with either a positively charge or negatively charged amino acid;
[0800] e) Ser709 on either of the first or second CLD dimerizing polypeptide is substituted, preferably with either a positively charge or negatively charged amino acid; and/or
[0801] f) Asp713 on either of the first or second CLD dimerizing polypeptide is substituted, preferably with either a positively charge or negatively charged amino acid.

[0802] In embodiments wherein the dimerizing polypeptides are collectrin and the collectrin dimerizing polypeptide comprises substitutions that promote heterodimer formation in the collectrin dimerizing polypeptide, preferably
[0803] a) Tyr40 on either the first or second collectrin dimerizing polypeptide is substituted, preferably with either a positively charge or negatively charged amino acid;
[0804] b) Tyr48 on either the first or second collectrin dimerizing polypeptide is substituted, preferably with either a positively charge or negatively charged amino acid;
[0805] c) Arg59 on either the first or second collectrin dimerizing polypeptide is substituted, preferably with either a positively charge or negatively charged amino acid; and/or
[0806] d) Arg111 on either the first or second collectrin dimerizing polypeptide is substituted, preferably with either a positively charge or negatively charged amino acid.

[0807] In embodiments wherein the dimerizing polypeptides are collectrin-like domain (CLD), and, the CLD comprises substitutions that promote heterodimer formation in the CLD dimerizing polypeptide, and preferably:
[0808] a) Tyr633 on the first CLD dimerizing polypeptide is substituted with either a positively charge or negatively charged amino acid, and Arg710 on the second CLD dimerizing polypeptide is substituted with the other of a positively charge or negatively charged amino acid;
[0809] b) Tyr633 on the second CLD dimerizing polypeptide is substituted with either a positively charge or negatively charged amino acid, and Arg710 on the first CLD dimerizing polypeptide is substituted with the other of a positively charge or negatively charged amino acid;
[0810] c) Tyr641 on the first CLD dimerizing polypeptide is substituted with either a positively charge or negatively charged amino acid, and Arg652 on the second CLD dimerizing polypeptide is substituted with the other of a positively charge or negatively charged amino acid;
[0811] d) Tyr641 on the second CLD dimerizing polypeptide is substituted with either a positively charge or negatively charged amino acid, and Arg652 on the first CLD dimerizing polypeptide is substituted with the other of a positively charge or negatively charged amino acid;
[0812] e) Arg652 on the first CLD dimerizing polypeptide is substituted with either a positively charge or negatively charged amino acid, and Asn638 on the second CLD dimerizing polypeptide is substituted with the other of a positively charge or negatively charged amino acid;
[0813] f) Arg652 on the second CLD dimerizing polypeptide is substituted with either a positively charge or negatively charged amino acid, and Arg638 on the first CLD dimerizing polypeptide is substituted with the other of a positively charge or negatively charged amino acid;
[0814] g) Arg710 on the first CLD dimerizing polypeptide is substituted with either a positively charge or negatively charged amino acid, and Glu639 on the second CLD dimerizing polypeptide is substituted with the other of a positively charge or negatively charged amino acid;
[0815] h) Arg710 on the second CLD dimerizing polypeptide is substituted with either a positively charge or negatively charged amino acid, and Glu639 on the first CLD dimerizing polypeptide is substituted with the other of a positively charge or negatively charged amino acid;
[0816] i) Ser709 on the first CLD dimerizing polypeptide is substituted with either a positively charge or negatively charged amino acid, and Arg716 on the second CLD dimerizing polypeptide is substituted with the other of a positively charge or negatively charged amino acid;
[0817] j) Ser709 on the second CLD dimerizing polypeptide is substituted with either a positively charge or negatively charged amino acid, and Arg716 on the first CLD dimerizing polypeptide is substituted with the other of a positively charge or negatively charged amino acid;
[0818] k) Asp713 on the first CLD dimerizing polypeptide is substituted with either a positively charge or negatively charged amino acid, and Arg716 on the second CLD dimerizing polypeptide is substituted with the other of a positively charge or negatively charged amino acid; and/or
[0819] l) Asp713 on the second CLD dimerizing polypeptide is substituted with either a positively charge or negatively charged amino acid, and Arg716 on the first CLD dimerizing polypeptide is substituted with the other of a positively charge or negatively charged amino acid;

[0820] In embodiments wherein the dimerizing polypeptides are collectrin and the collectrin dimerizing polypeptide comprises substitutions that promote heterodimer formation in the collectrin dimerizing polypeptide, preferably
[0821] a) Tyr40 on the first collectrin dimerizing polypeptide is substituted with either a positively charge or negatively charged amino acid, and Arg111 on the second collectrin dimerizing polypeptide is substituted with the other of a positively charge or negatively charged amino acid;
[0822] b) Tyr40 on the second collectrin dimerizing polypeptide is substituted with either a positively charge or negatively charged amino acid, and Arg111 on the first collectrin dimerizing polypeptide is substituted with the other of a positively charge or negatively charged amino acid;
[0823] c) Tyr48 on the first collectrin dimerizing polypeptide is substituted with either a positively charge or negatively charged amino acid, and Arg59 on the second collectrin dimerizing polypeptide is substituted with the other of a positively charge or negatively charged amino acid; and/or
[0824] d) Tyr48 on the second collectrin dimerizing polypeptide is substituted with either a positively charge or negatively charged amino acid, and Arg59 on the first collectrin dimerizing polypeptide is substituted with the other of a positively charge or negatively charged amino acid.

[0825] In embodiments of the invention wherein the first and second dimerizing polypeptides form a heterodimer:
[0826] a) the first and second dimerizing polypeptides are selected from the group consisting of:
   [0827] i) a T cell receptor alpha and T cell receptor beta extracellular domain,
   [0828] ii) a T cell receptor gamma and T cell receptor extracellular domain,
   [0829] iii) an MHC class I alpha extracellular domain and beta-2 microglobulin
   [0830] iv) an MHC class II alpha and MHC class II beta extracellular domain, and
   [0831] v) a CD8 alpha and CD8 beta extracellular domain,
[0832] b) the first dimerizing polypeptide is different from the second dimerizing polypeptide, and
[0833] c) the first and second dimerizing polypeptides form a heterodimer.

[0834] In some of these embodiments of the invention, the first and second dimerizing polypeptides, when in the presence of each other, form less than 30%, 20%, 10%, 5%, 4%, 3%, 2%, or 1% homodimers.

[0835] In embodiments of the invention, the first dimerizing polypeptide comprises one or more disulfide bonds with the second dimerizing polypeptide, and preferably:
[0836] a) the one or more disulfide bonds are at the interface between the first and second dimerizing polypeptides, more preferably:
   [0837] i) if the first and second dimerizing polypeptides are collectrin-like domain or collectrin, and the one or more disulfide bonds are in the second and fourth helices of the collectrin-like domain or corresponding region in collectrin, or
[0838] b) the one or more disulfide bonds are between an immunoglobulin hinge region, or portion thereof comprising at least one cysteine, appended at the N-terminus and/or C-terminus of the first and second dimerizing polypeptides, wherein said hinge regions are appended directly to the first and second dimerizing polypeptides or via peptide linkers, preferably wherein the first and second dimerizing polypeptides are collectrin-like domain or collectrin.

### Domains

[0839] In embodiments of the invention:
[0840] a) the third and fourth domains are each the ACE2 peptidase domain (PD), and
[0841] b) the first and second dimerizing polypeptides are each the ACE2 collectrin-like domain (CLD),

[0842] In an embodiment wherein the first and second domains are Fc domains, each polypeptide chain of the tetrahedral antibody comprises the amino acid sequence set forth in any one of SEQ ID NOs: 74-119, more preferably SEQ ID NO: 78.

[0843] In embodiments of the invention, the first and second domains are Fc domains.

[0844] In embodiments of the invention:
[0845] a) the first and second domains are Fc domains and the third domain is a first type of Fab domain,
[0846] b) the first and second domains are Fc domains and the third and fourth domains are independently selected from the group consisting of a first type of Fab domain and a second type of Fab domain,
[0847] c) the first domain is an Fc domain, and the second and third domains are independently selected from the group consisting of a first type of Fab domain and a second type of Fab domain, or
[0848] d) the first domain is an Fc domain, and the second, third, and fourth domains are independently selected from the group consisting of a first type of Fab domain, a second type of Fab domain, and a third type of Fab domain.

[0849] In embodiments of the invention the tetrahedral antibody of additionally comprises a fifth domain, wherein the fifth domain is attached at its C-terminus by a peptide bond or via a peptide linker to:
[0850] a) the N-terminus of the first dimerizing polypeptide,
[0851] b) the second N-terminus of the first domain, or
[0852] c) the N-terminus of a third dimerizing polypeptide, wherein the third dimerizing polypeptide is attached at its C-terminus by a peptide bond or via a peptide linker to the second N-terminus of the first domain.

[0853] In embodiments of the invention:
[0854] a) the first and second domains are Fc domains and the fifth domain is a first type of Fab domain,
[0855] b) the first and second domains are Fc domains, and the third and fifth domains are independently selected from the group consisting of a first type of Fab domain and a second type of Fab domain,
[0856] c) the first and second domains are Fc domains, and the fourth and fifth domains are independently selected from the group consisting of a first type of Fab domain and a second type of Fab domain,
[0857] d) the first and second domains are Fc domains, and the third, fourth, and fifth domains are independently selected from the group consisting of a first type of Fab domain, a second type of Fab domain, and a third type of Fab domain,
[0858] e) the first domain is an Fc domain, and the second and fifth domains are independently selected from the group consisting of a first type of Fab domain and a second type of Fab domain,
[0859] f) the first domain is an Fc domain, and the second, third, and fifth domains are independently selected from the group consisting of a first type of Fab domain, a second type of Fab domain, and a third type of Fab domain,
[0860] g) the first domain is an Fc domain, and the second, fourth, and fifth domains are independently selected from the group consisting of a first type of Fab domain, a second type of Fab domain, and a third type of Fab domain, or
[0861] h) the first domain is an Fc domain, and the second, third, fourth, and fifth domains are independently selected from the group consisting of a first type of Fab domain, a second type of Fab domain, a third type of Fab domain, and a fourth type of Fab domain.
   Tetrahedral Antibodies Comprising a Fifth and/or Sixth Domain

[0862] In embodiments of the invention, the tetrahedral antibody additionally comprises a fifth and/or sixth domain, wherein:
[0863] a) the first domain is joined to the second domain via a first dimerizing polypeptide attached to the first N-terminus of the first domain, and wherein
   [0864] i) the fifth domain is attached at its C-terminus by a peptide bond or via a peptide linker to:
      [0865] (1) the N-terminus of the first dimerizing polypeptide,
      [0866] (2) the second N-terminus of the first domain, or
      [0867] (3) the N-terminus of a third dimerizing polypeptide, wherein the third dimerizing polypeptide is attached at its C-terminus by a peptide bond or via a peptide linker to the second N-terminus of the first domain,
[0868] b) the first domain is joined to the second domain via a first dimerizing polypeptide attached to the first C-terminus of the first domain, and wherein
   [0869] i) the fifth domain is attached at its N-terminus by a peptide bond or via a peptide linker to:
      [0870] (1) the C-terminus of the first dimerizing polypeptide,
      [0871] (2) the second C-terminus of the first domain, or
      [0872] (3) the C-terminus of a third dimerizing polypeptide, wherein the third dimerizing polypeptide is attached at its N-terminus by a peptide bond or via a peptide linker to the second C-terminus of the first domain,
[0873] c) the second domain is joined to the first domain via a second dimerizing polypeptide attached to the first N-terminus of the second domain, and wherein
   [0874] i) the sixth domain is attached at its C-terminus by a peptide bond or via a peptide linker to:
      [0875] (1) the N-terminus of the second dimerizing polypeptide,
      [0876] (2) the second N-terminus of the second domain, or
      [0877] (3) the N-terminus of a fourth dimerizing polypeptide, wherein the fourth dimerizing polypeptide is attached at its C-terminus by a peptide bond or via a peptide linker to the second N-terminus of the second domain, or
[0878] d) the second domain is joined to the first domain via a second dimerizing polypeptide attached to the first C-terminus of the second domain, and wherein
   [0879] i) the sixth domain is attached at its N-terminus by a peptide bond or via a peptide linker to:
      [0880] (1) the C-terminus of the second dimerizing polypeptide,
      [0881] (2) the second C-terminus of the second domain, or
   [0882] ii) the C-terminus of a fourth dimerizing polypeptide, wherein the fourth dimerizing polypeptide is attached at its N-terminus by a peptide bond or via a peptide linker to the second C-terminus of the second domain.

[0883] In embodiments of the invention:
[0884] a) the first and second domains are Fc domains and the fifth domain is a first type of Fab domain,
[0885] b) the first and second domains are Fc domains, and the third and fifth domains are independently selected from the group consisting of a first type of Fab domain and a second type of Fab domain,
[0886] c) the first and second domains are Fc domains, and the fourth and fifth domains are independently selected from the group consisting of a first type of Fab domain and a second type of Fab domain,
[0887] d) the first and second domains are Fe domains, and the third, fourth, and fifth domains are independently selected from the group consisting of a first type of Fab domain, a second type of Fab domain, and a third type of Fab domain,
[0888] e) the first domain is an Fc domain, and the second and fifth domains are independently selected from the group consisting of a first type of Fab domain and a second type of Fab domain,
[0889] f) the first domain is an Fc domain, and the second, third, and fifth domains are independently selected from the group consisting of a first type of Fab domain, a second type of Fab domain, and a third type of Fab domain,
[0890] g) the first domain is an Fc domain, and the second, fourth, and fifth domains are independently selected from the group consisting of a first type of Fab domain, a second type of Fab domain, and a third type of Fab domain, or
[0891] h) the first domain is an Fc domain, and the second, third, fourth, and fifth domains are independently selected from the group consisting of a first type of Fab domain, a second type of Fab domain, a third type of Fab domain, and a fourth type of Fab domain.

### Tetrahedral Antibodies Containing the ACE2 PD

[0892] In embodiments of the invention:
[0893] a) the third, fourth, fifth and sixth domains are each the ACE2 PD and the dimerizing polypeptides are each the ACE2 CLD,
[0894] b) the first and second domains are Fc domains, the third, fourth, fifth and sixth domains are each the ACE2 PD and the dimerizing polypeptides are each the ACE2 CLD, preferably wherein the first and second domains are each connected to their respective dimerizing polypeptides via a peptide linker,
[0895] c) the third and fourth domains are each the ACE2 PD, the fifth and sixth domains are each Fab domains, and the dimerizing polypeptides are each the ACE2 CLD,
[0896] d) the first and second domains are Fc domains, the third and fourth domains are each the ACE2 PD, the fifth and sixth domains are each Fab domains, and the dimerizing polypeptides are each the ACE2 CLD, preferably wherein the first and second domains are each connected to their respective dimerizing polypeptides via a peptide linker,
[0897] e) the third and fourth domains are each Fab domains, the fifth and sixth domains are each the ACE2 PD, and the dimerizing polypeptides are each the ACE2 CLD, or
[0898] f) the first and second domains are Fc domains, the third and fourth domains are each Fab domains, the fifth and sixth domains are each the ACE2 PD, and the dimerizing polypeptides are each the ACE2 CLD, preferably wherein the first and second domains are each connected to their respective dimerizing polypeptides via a peptide linker, or
[0899] g) the first and second domains are Fc domains, the third and fourth domains are the ACE2 PD, the fifth and sixth domains are Fab domains, the dimerizing polypeptides are each the ACE2 CLD, and the first and second domains are each connected to their respective dimerizing polypeptides via a peptide linker, preferably wherein such domains and linkers are characterized by one or more or all of the following features:
   [0900] i) the Fc domains are characterized by one or more or all of the following features:
      [0901] (1) are heterodimers,
      [0902] (2) are IgG1 Fc domains,
      [0903] (3) comprise a silencing mutation such that the Fc domain lacks Fc gamma receptor binding activity, preferably wherein such mutation is one of the following combinations of mutations:
         [0904] a. P329G/L234A/L235A (PGLALA),
         [0905] b. L234A/L235A (LALA),
         [0906] c. P331S/L234A/L235A,
         [0907] d. L234F/L235E/P331S, and
         [0908] e. L234F/L235E/P329G,
      [0909] (4) comprise a mutation that enhances FcRn activity, preferably wherein such mutation extends the half-life of the tetrahedral antibody, preferably wherein the mutation is a combination the following mutations: L309D/Q311H/N434S (DHS),
      [0910] (5) comprise a mutation that enhances Fc gamma receptor binding activity, preferably wherein such mutation is one of the following combinations of mutations:
         [0911] a. a combination of the following mutations: S239D/I332E,
         [0912] b. S239D preferably wherein the other polypeptide chain of the Fc domain comprises a I332E mutation, or
         [0913] c. I332E, preferably wherein the other polypeptide chain of the Fc domain comprises a S239D mutation, and,
      [0914] (6) comprise a mutation that ablates their Protein A binding site, preferably wherein such mutation is H435R/Y436F (HY/RF),
   [0915] ii) the ACE2 peptidase domains comprise a mutation which blocks its angiotensin converting enzyme activity, preferably wherein such mutation is an H378A mutation,
   [0916] iii) the Fab domains are chimeric Fab domains comprising a murine variable region,
   [0917] iv) the peptide linkers each have a length of 23 amino acids and are derived from the stalk region of a TNF receptor, preferably wherein the TNF receptor is TNF receptor 1B, still more preferably wherein the peptide linker consists of the amino acid sequence set forth in SEQ ID NO: 4468,
   [0918] v) such domains and peptide linkers are formed by two or three different types of polypeptide chains.

[0919] In embodiments of the invention:
[0920] a) the third and fourth domains are each the ACE2 PD,
[0921] b) the fifth domain, if present, is attached at its C-terminus by a peptide bond or via a peptide linker to the N-terminus of a third dimerizing polypeptide, wherein the third dimerizing polypeptide is attached at its C-terminus by a peptide bond or via a peptide linker to the second N-terminus of the first domain,
[0922] c) the sixth domain, if present, is attached at its C-terminus by a peptide bond or via a peptide linker to the N-terminus of a fourth dimerizing polypeptide, wherein the fourth dimerizing polypeptide is attached at its C-terminus by a peptide bond or via a peptide linker to the second N-terminus of the second domain, and
[0923] d) the first, second, third, and fourth dimerizing polypeptides are each the ACE2 CLD.

[0924] In embodiments of the invention, the ACE2 PD comprises or consists of amino acids 18-615 of the ACE2 protein or a portion thereof.

[0925] In embodiments of the invention, the ACE2 CLD comprises or consists of amino acids 616-740 of the ACE2 protein or a portion thereof.

[0926] In embodiments of the invention, the ACE2 PD is catalytically active.

[0927] In embodiments of the invention, the ACE2 PD is catalytically inactive.

[0928] In embodiments of the invention, ACE2 PD comprises a R273Q, or a H378A mutation.

[0929] In embodiments of the invention, the Fc domains lack Fc gamma receptor binding activity.

[0930] In embodiments of the invention, the Fc domains comprise:
[0931] a) a P329G mutation, a L234A mutation and a L235A mutation (PGLALA);
[0932] b) a L234A mutation and a L235A mutation (LALA),
[0933] c) a P331S mutation, a L234A mutation, and a L235A mutation,
[0934] d) a L234F mutation, a L235E mutation, and a P331S mutation, or
[0935] e) a L234F mutation, a L235E mutation, and a P329G mutation.

[0936] In embodiments of the invention, the Fc domains comprise a mutation which enhances FcRn activity and/or half-life. In embodiments of the invention, such mutations are selected from any of the following combinations of mutations:
[0937] a) M252Y/S254T/T256E (YTE),
[0938] b) L309D/Q311H/N434S (DHS),
[0939] c) M428L/N434S (LS)

[0940] In embodiments of the invention, the Fe domains comprise a mutation which enhances Fc gamma receptor binding activity. In embodiments of the invention, such mutations are selected from:
[0941] a) S239D/I332E,
[0942] b) S239D, preferably wherein the other polypeptide chain of the Fc domain comprises a I332E mutation, or
[0943] c) I332E, preferably wherein the other polypeptide chain of the Fc domain comprises a S239D mutation.

[0944] In embodiments of the invention, the Fc domains comprise a mutation that ablates their Protein A binding site, preferably wherein such mutation is H435R/Y436F (HY/RF).

[0945] In embodiments of the invention, the Fab domains are chimeric Fab domains comprising a murine variable region.

[0946] In embodiments of the invention, the tetrahedral antibody comprises one or more Fab domains and the one or more Fab domains comprise the complementarity-determining region (CDR) of the Fab domain of the B13A antibody.

[0947] In embodiments of the invention, the one or more Fab domains comprise the VH and VL regions from the B13A antibody, preferably wherein the VH and VL regions comprise the amino acid sequences set forth in SEQ ID NOs 463 and 464 or variants thereof with at least 90%, preferably at least 95%, more preferably at least 98% identity to said sequences.

[0948] In embodiments of the invention, the one or more Fab domains are humanized.

[0949] In embodiments of the invention, the first and second domains are Fc domains, the third and fourth domains are the ACE2 PD, the fifth and sixth domains are Fab domains, the dimerizing polypeptides are each the ACE2 CLD, and the first and second domains are each connected to their respective dimerizing polypeptides via a peptide linker, wherein the domains and peptide linkers of the tetrahedral antibody are formed by three different types of polypeptide chains. In a preferred embodiment the three different types of polypeptide chains are denoted H1, L2, and H2, and:
[0950] a) the H1 chain comprises the amino acid sequence set forth in SEQ ID NO: 524, the L2 chain comprises the amino acid sequence set forth in SEQ ID NO: 465, and the H2 chain comprises the amino acid sequence set forth in SEQ ID NO: 535, or the H1, L2 and H2 chains are variants with at least 90%, preferably at least 95%, more preferably at least 98% identity to said sequences;
[0951] b) the H1 chain comprises the amino acid sequence set forth in SEQ ID NO: 473, the L2 chain comprises the amino acid sequence set forth in SEQ ID NO: 465, and the H2 chain comprises the amino acid sequence set forth in SEQ ID NO: 485, or the H1, L2 and H2 chains are variants with at least 90%, preferably at least 95%, more preferably at least 98% identity to said sequences;
[0952] c) the H1 chain comprises the amino acid sequence set forth in SEQ ID NO: 526, the L2 chain comprises the amino acid sequence set forth in SEQ ID NO: 465, and the H2 chain comprises the amino acid sequence set forth in SEQ ID NO: 527, or the H1, L2 and H2 chains are variants with at least 90%, preferably at least 95%, more preferably at least 98% identity to said sequences;
[0953] d) the H1 chain comprises the amino acid sequence set forth in SEQ ID NO: 514, the L2 chain comprises the amino acid sequence set forth in SEQ ID NO: 465, and the H2 chain comprises the amino acid sequence set forth in SEQ ID NO: 528, or the H1, L2 and H2 chains are variants with at least 90%, preferably at least 95%, more preferably at least 98% identity to said sequences;
[0954] e) the H1 chain comprises the amino acid sequence set forth in SEQ ID NO: 529, the L2 chain comprises the amino acid sequence set forth in SEQ ID NO: 465, and the H2 chain comprises the amino acid sequence set forth in SEQ ID NO: 530, or the H1, L2 and H2 chains are variants with at least 90%, preferably at least 95%, more preferably at least 98% identity to said sequences;
[0955] f) the H1 chain comprises the amino acid sequence set forth in SEQ ID NO: 518, the L2 chain comprises the amino acid sequence set forth in SEQ ID NO: 465, and the H2 chain comprises the amino acid sequence set forth in SEQ ID NO: 531; or the H1, L2 and H2 chains are variants with at least 90%, preferably at least 95%, more preferably at least 98% identity to said sequences,
[0956] g) the H1 chain comprises the amino acid sequence set forth in SEQ ID NO: 532, the L2 chain comprises the amino acid sequence set forth in SEQ ID NO: 465, and the H2 chain comprises the amino acid sequence set forth in SEQ ID NO: 533, or the H1, L2 and H2 chains are variants with at least 90%, preferably at least 95%, more preferably at least 98% identity to said sequences; or
[0957] h) the H1 chain comprises the amino acid sequence set forth in SEQ ID NO: 522, the L2 chain comprises the amino acid sequence set forth in SEQ ID NO: 465, and the H2 chain comprises the amino acid sequence set forth in SEQ ID NO: 534, or the H1, L2 and H2 chains are variants with at least 90%, preferably at least 95%, more preferably at least 98% identity to said sequences.

[0958] In the above embodiment, the C-terminal portion of the H1 and H2 chains pair with one another to form each of domains 1 and 2, the N-terminal portion of the H1 chain is the ACE2 PD (domains 3 and 4), and the N-terminal portion of the H2 chain pairs with the L2 chain to form domains 5 and 6. Further, the H1 chain contains a CLD dimerizing domain between the portion that pairs with the H2 chain and the ACE2 PD. Panel B of FIG. 31 provides a schematic representation of the structure of such tetrahedral antibodies, where the chains in the schematic are, from left to right, L2, H2, H1, H1, H2, L2. This invention also provides a method of producing a tetrahedral antibody, the method comprising recombinantly expressing the three different types of polypeptide chains of this embodiment in a host cell.

[0959] In embodiments of the invention, the first and second domains are Fc domains, the third, fourth, fifth and sixth domains are each the ACE2 PD and the dimerizing polypeptides are each the ACE2 CLD, the first and second domains are each connected to their respective dimerizing polypeptides via a peptide linker, and the domains and peptide linkers of the tetrahedral antibody are formed by two different types of polypeptide chains. In a preferred embodiment, the two different types of polypeptide chains are denoted H1 and H2, and:
[0960] a) the H1 chain comprises the amino acid sequence set forth in SEQ ID NO: 509, and the H2 chain comprises the amino acid sequence set forth in SEQ ID NO: 510, or the H1 and H2 chains are variants with at least 90%, preferably at least 95%, more preferably at least 98% identity to said sequences;
[0961] b) the H1 chain comprises the amino acid sequence set forth in SEQ ID NO: 512, and the H2 chain comprises the amino acid sequence set forth in SEQ ID NO: 513 or the H1 and H2 chains are variants with at least 90%, preferably at least 95%, more preferably at least 98% identity to said sequences;
[0962] c) the H1 chain comprises the amino acid sequence set forth in SEQ ID NO: 516, and the H2 chain comprises the amino acid sequence set forth in SEQ ID NO: 517 or the H1 and H2 chains are variants with at least 90%, preferably at least 95%, more preferably at least 98% identity to said sequences;
[0963] d) the H1 chain comprises the amino acid sequence set forth in SEQ ID NO: 520, and the H2 chain comprises the amino acid sequence set forth in SEQ ID NO: 521 or the H1 and H2 chains are variants with at least 90%, preferably at least 95%, more preferably at least 98% identity to said sequences;
[0964] e) the H1 chain comprises the amino acid sequence set forth in SEQ ID NO: 542, and the H2 chain comprises the amino acid sequence set forth in SEQ ID NO: 543 or the H1 and H2 chains are variants with at least 90%, preferably at least 95%, more preferably at least 98% identity to said sequences;
[0965] f) the H1 chain comprises the amino acid sequence set forth in SEQ ID NO: 545, and the H2 chain comprises the amino acid sequence set forth in SEQ ID NO: 546 or the H1 and H2 chains are variants with at least 90%, preferably at least 95%, more preferably at least 98% identity to said sequences;
[0966] g) the H1 chain comprises the amino acid sequence set forth in SEQ ID NO: 548, and the H2 chain comprises the amino acid sequence set forth in SEQ ID NO: 549 or the H1 and H2 chains are variants with at least 90%, preferably at least 95%, more preferably at least 98% identity to said sequences; or
[0967] h) the H1 chain comprises the amino acid sequence set forth in SEQ ID NO: 551, and the H2 chain comprises the amino acid sequence set forth in SEQ ID NO: 552 or the H1 and H2 chains are variants with at least 90%, preferably at least 95%, more preferably at least 98% identity to said sequences.

[0968] In the above embodiment, the C-terminal portion of the H1 and H2 chains pair with one another to form each of domains 1 and 2 and the N-terminal portions of the H1 and H2 chains are the ACE2 PD (domains 3-6). Further, the H1 chain contains a CLD dimerizing domain between the portion that pairs with the H2 chain and the ACE2 PD. Panel A of FIG. 31 provides a schematic representation of the structure of such tetrahedral antibodies, where the chains in the schematic are, from left to right, H2, H1, H1, H2. This invention also provides a method of producing a tetrahedral antibody, the method comprising recombinantly expressing the two different types of polypeptide chains of this embodiment in a host cell.

[0969] In embodiments of the invention:
[0970] a) the third domain, first dimerizing polypeptide, and first polypeptide chain of the first domain are part of a first stretch of consecutive amino acids,
[0971] b) the fourth domain, second dimerizing polypeptide, and first polypeptide chain of the second domain are part of a second stretch of consecutive amino acids,
[0972] c) the fifth domain, third dimerizing polypeptide, and second polypeptide chain of the first domain are part of a third stretch of consecutive amino acids, and
[0973] d) the sixth domain, fourth dimerizing polypeptide, and second polypeptide chain of the second domain are part of a fourth stretch of consecutive amino acids, and each stretch of consecutive amino acids consists of the sequence of amino acids selected from the group consisting of SEQ ID NOs: 74-119, or each such stretch of consecutive amino acids are variants with at least 90%, preferably at least 95%, more preferably at least 98% identity to said sequences.

### Polynucleotides

[0974] This invention also provides a polynucleotide which encodes any one of the polypeptide chains of the invention. In a preferred embodiment, the encoded polypeptide comprises the amino acid sequence set forth in any one of SEQ ID NOs: 74-119. In a preferred embodiment, the polynucleotide encodes one of the H1, L2, or H2 polypeptide chains of the embodiments described above. In a preferred embodiment, the polynucleotide encodes a stretch of consecutive amino acids consisting of the sequence of amino acids selected from the group consisting of SEQ ID NOs: 74-119 or a variant with at least 90%, preferably at least 95%, more preferably at least 98% identity to said sequences. As will be appreciated by those skilled in the art, polynucleotides of the invention may comprise various additional sequences depending on the type of expression system being employed. For example, mRNA polynucleotides of the invention may comprise 5′ untranslated (UTR) and 3′ untranslated (UTR) regions. Further, polynucleotides may encode signal peptide sequences for appropriate translocation of the expressed polypeptide. Therefore, without limitation, polynucleotides of the invention may include cis-regulatory elements such as promoters, enhancers, and/or introns, untranslated sequences such as 5′ UTR and 3′ UTR sequence, 5′caps or poly-A tails, and/or translated sequences such as signal peptide sequences. Without limitation, polynucleotides of the invention may comprise DNA or RNA, including mRNA, or modified versions thereof. Modified versions include versions that comprise non-standard nucleotides such as pseudouridine and the like.

### Vectors

[0975] This invention also provides a vector comprising polynucleotides which encode polypeptides comprising any of the polypeptide chains of the invention. In a preferred embodiment, the vector encodes a polypeptide comprising the amino acid sequence set forth in any one of SEQ ID NOs: 74-119. In a preferred embodiment, the vector encodes polypeptides comprising the H1, L2 and H2 polypeptide chains of the embodiments of the invention comprising three different polypeptide chains as described above. In a preferred embodiment, the vector encodes polypeptides comprising the H1 and H2 polypeptide chains of the embodiments of the invention comprising two different polypeptide chains as described above. In these vectors, each polynucleotide is operably linked to a promoter which directs expression of the polynucleotide in a host cell. This invention also provides a method of producing a tetrahedral antibody, the method comprising recombinantly expressing any of these vectors in a host cell.

### Host Cells

[0976] This invention also provides a host cell comprising any of the vectors of the invention. In a preferred embodiment, the host cell is for use in a method of producing a tetrahedral antibody. This invention also provides a method of producing a tetrahedral antibody comprising two, three, or four different types of polypeptide chains, the method comprising expressing the two, three, or four different types of polypeptide chains in a host cell of the invention.

### Pharmaceutical Compositions

[0977] This invention also provides a pharmaceutical composition comprising any of the tetrahedral antibodies of the invention comprising one or more ACE2 PDs, and one or more pharmaceutically acceptable excipients.

[0978] In a preferred embodiment, the pharmaceutical composition comprises a tetrahedral antibody wherein the first and second domains are Fc domains, the third and fourth domains are the ACE2 PD, the fifth and sixth domains are Fab domains, the dimerizing polypeptides are each the ACE2 CLD, and the first and second domains are each connected to their respective dimerizing polypeptides via a peptide linker, wherein the domains and peptide linkers of the tetrahedral antibody are formed by three different types of polypeptide chains. In a preferred embodiment the three different types of polypeptide chains are denoted H1, L2, and H2, and:
[0979] a) the H1 chain comprises the amino acid sequence set forth in SEQ ID NO: 524, the L2 chain comprises the amino acid sequence set forth in SEQ ID NO: 465, and the H2 chain comprises the amino acid sequence set forth in SEQ ID NO: 535, or the H1, L2 and H2 chains are variants with at least 90%, preferably at least 95%, more preferably at least 98% identity to said sequences;
[0980] b) the H1 chain comprises the amino acid sequence set forth in SEQ ID NO: 473, the L2 chain comprises the amino acid sequence set forth in SEQ ID NO: 465, and the H2 chain comprises the amino acid sequence set forth in SEQ ID NO: 485, or the H1, L2 and H2 chains are variants with at least 90%, preferably at least 95%, more preferably at least 98% identity to said sequences;
[0981] c) the H1 chain comprises the amino acid sequence set forth in SEQ ID NO: 526, the L2 chain comprises the amino acid sequence set forth in SEQ ID NO: 465, and the H2 chain comprises the amino acid sequence set forth in SEQ ID NO: 527, or the H1, L2 and H2 chains are variants with at least 90%, preferably at least 95%, more preferably at least 98% identity to said sequences;
[0982] d) the H1 chain comprises the amino acid sequence set forth in SEQ ID NO: 514, the L2 chain comprises the amino acid sequence set forth in SEQ ID NO: 465, and the H2 chain comprises the amino acid sequence set forth in SEQ ID NO: 528, or the H1, L2 and H2 chains are variants with at least 90%, preferably at least 95%, more preferably at least 98% identity to said sequences;
[0983] e) the H1 chain comprises the amino acid sequence set forth in SEQ ID NO: 529, the L2 chain comprises the amino acid sequence set forth in SEQ ID NO: 465, and the H2 chain comprises the amino acid sequence set forth in SEQ ID NO: 530, or the H1, L2 and H2 chains are variants with at least 90%, preferably at least 95%, more preferably at least 98% identity to said sequences;
[0984] f) the H1 chain comprises the amino acid sequence set forth in SEQ ID NO: 518, the L2 chain comprises the amino acid sequence set forth in SEQ ID NO: 465, and the H2 chain comprises the amino acid sequence set forth in SEQ ID NO: 531; or the H1, L2 and H2 chains are variants with at least 90%, preferably at least 95%, more preferably at least 98% identity to said sequences,
[0985] g) the H1 chain comprises the amino acid sequence set forth in SEQ ID NO: 532, the L2 chain comprises the amino acid sequence set forth in SEQ ID NO: 465, and the H2 chain comprises the amino acid sequence set forth in SEQ ID NO: 533, or the H1, L2 and H2 chains are variants with at least 90%, preferably at least 95%, more preferably at least 98% identity to said sequences; or
[0986] h) the H1 chain comprises the amino acid sequence set forth in SEQ ID NO: 522, the L2 chain comprises the amino acid sequence set forth in SEQ ID NO: 465, and the H2 chain comprises the amino acid sequence set forth in SEQ ID NO: 534, or the H1, L2 and H2 chains are variants with at least 90%, preferably at least 95%, more preferably at least 98% identity to said sequences.

[0987] In a preferred embodiment, the pharmaceutical composition comprises a tetrahedral antibody wherein the first and second domains are Fc domains, the third, fourth, fifth and sixth domains are each the ACE2 PD and the dimerizing polypeptides are each the ACE2 CLD, the first and second domains are each connected to their respective dimerizing polypeptides via a peptide linker, and the domains and peptide linkers of the tetrahedral antibody are formed by two different types of polypeptide chains. In a preferred embodiment, the two different types of polypeptide chains are denoted H1 and H2, and:
[0988] a) the H1 chain comprises the amino acid sequence set forth in SEQ ID NO: 509, and the H2 chain comprises the amino acid sequence set forth in SEQ ID NO: 510, or the H1 and H2 chains are variants with at least 90%, preferably at least 95%, more preferably at least 98% identity to said sequences;
[0989] b) the H1 chain comprises the amino acid sequence set forth in SEQ ID NO: 512, and the H2 chain comprises the amino acid sequence set forth in SEQ ID NO: 513 or the H1 and H2 chains are variants with at least 90%, preferably at least 95%, more preferably at least 98% identity to said sequences;
[0990] c) the H1 chain comprises the amino acid sequence set forth in SEQ ID NO: 516, and the H2 chain comprises the amino acid sequence set forth in SEQ ID NO: 517 or the H1 and H2 chains are variants with at least 90%, preferably at least 95%, more preferably at least 98% identity to said sequences;
[0991] d) the H1 chain comprises the amino acid sequence set forth in SEQ ID NO: 520, and the H2 chain comprises the amino acid sequence set forth in SEQ ID NO: 521 or the H1 and H2 chains are variants with at least 90%, preferably at least 95%, more preferably at least 98% identity to said sequences;
[0992] e) the H1 chain comprises the amino acid sequence set forth in SEQ ID NO: 542, and the H2 chain comprises the amino acid sequence set forth in SEQ ID NO: 543 or the H1 and H2 chains are variants with at least 90%, preferably at least 95%, more preferably at least 98% identity to said sequences;
[0993] f) the H1 chain comprises the amino acid sequence set forth in SEQ ID NO: 545, and the H2 chain comprises the amino acid sequence set forth in SEQ ID NO: 546 or the H1 and H2 chains are variants with at least 90%, preferably at least 95%, more preferably at least 98% identity to said sequences;
[0994] g) the H1 chain comprises the amino acid sequence set forth in SEQ ID NO: 548, and the H2 chain comprises the amino acid sequence set forth in SEQ ID NO: 549 or the H1 and H2 chains are variants with at least 90%, preferably at least 95%, more preferably at least 98% identity to said sequences; or
[0995] h) the H1 chain comprises the amino acid sequence set forth in SEQ ID NO: 551, and the H2 chain comprises the amino acid sequence set forth in SEQ ID NO: 552 or the H1 and H2 chains are variants with at least 90%, preferably at least 95%, more preferably at least 98% identity to said sequences.

### Methods of Treating

[0996] This invention also provides a method of treating Covid-19 in a subject, the method comprising administering to the subject a therapeutically effective amount of the any of the above pharmaceutical compositions comprising a tetrahedral antibody comprising one or more ACE2 PD.

Tetrahedral Antibodies Comprising a Seventh and/or Eighth Domain

[0997] In embodiments of the invention, the tetrahedral antibody further comprises a seventh and/or eight domain, wherein:
[0998] a) the first domain is joined to the second domain via a covalent linkage attached to the first N-terminus of the first domain or via a first dimerizing polypeptide attached to the first N-terminus of the first domain, and wherein
   [0999] i) the seventh domain is attached at its N-terminus by a peptide bond or via a peptide linker to:
      [1000] (1) the first C-terminus of the first domain, or
      [1001] (2) the second C-terminus of the first domain,
[1002] b) the first domain is joined to the second domain via a covalent linkage attached to the first C-terminus of the first domain or via a first dimerizing polypeptide attached to the first C-terminus of the first domain, and wherein
   [1003] i) the seventh domain is attached at its C-terminus by a peptide bond or via a peptide linker to:
      [1004] (1) the first N-terminus of the first domain, or
      [1005] (2) the second N-terminus of the first domain,
[1006] c) the second domain is joined to the first domain via a covalent linkage attached to the first N-terminus of the second domain or via a second dimerizing polypeptide attached to the first N-terminus of the second domain, and wherein
   [1007] i) the eighth domain is attached at its N-terminus by a peptide bond or via a peptide linker to:
      [1008] (1) the first C-terminus of the second domain, or
      [1009] (2) the second C-terminus of the second domain, or
[1010] d) the second domain is joined to the first domain via a covalent linkage attached to the first C-terminus of the second domain or via a second dimerizing polypeptide attached to the first C-terminus of the second domain, and wherein
   [1011] i) the eighth domain is attached at its C-terminus by a peptide bond or via a peptide linker to:
      [1012] (1) the first N-terminus of the second domain, or
      [1013] (2) the second N-terminus of the second domain.

### Tetrahedral Antibodies for Cancer Treatment

[1014] In embodiments of the invention, the tetrahedral antibody comprises six domains, and:
[1015] a) the first and second domains are Fe domains, the third and fourth domains are anti-CD20 Fab domains and the fifth and sixth domains are anti-CD19 Fab domains;
[1016] b) the first and second domains are Fe domains, the third and fourth domains are anti-CD19 Fab domains and the fifth and sixth domains are anti-CD20 Fab domains;
[1017] c) the first and second domains are Fe domains, the third and fourth domains are anti-CD20 Fab domains, the fifth and sixth domains are anti-CD19 Fab domains, and each dimerizing polypeptide is an ACE2 CLD;
[1018] d) the first and second domains are Fe domains, the third and fourth domains are anti-CD19 Fab domains and the fifth and sixth domains are anti-CD20 Fab domains, and each dimerizing polypeptide is an ACE2 CLD;
[1019] e) the first and second domains are Fe domains, the third and fourth domains are anti-CD20 Fab domains, the fifth and sixth domains are anti-CD19 Fab domains, each dimerizing polypeptide is an ACE2 CLD, and the first and second domains are each connected to their respective dimerizing polypeptides via a peptide linker;
[1020] f) the first and second domains are Fe domains, the third and fourth domains are anti-CD19 Fab domains and the fifth and sixth domains are anti-CD20 Fab domains, each dimerizing polypeptide is an ACE2 CLD, and the first and second domains are each connected to their respective dimerizing polypeptides via a peptide linker.

[1021] In embodiments of the invention, the tetrahedral antibody comprises eight domains, and:
[1022] a) the first and second domains are Fe domains, the third and fourth domains are anti-CD20 Fab domains and the fifth and sixth domains are anti-CD19 Fab domains, and the seventh and eighth domains are single chain 4-1BB ligands;
[1023] b) the first and second domains are Fe domains, the third and fourth domains are anti-CD19 Fab domains, the fifth and sixth domains are anti-CD20 Fab domains, and the seventh and eighth domains are single chain 4-1BB ligands;
[1024] c) the first and second domains are Fe domains, the third and fourth domains are anti-CD20 Fab domains, the fifth and sixth domains are anti-CD19 Fab domains, the seventh and eighth domains are single chain 4-1BB ligands, and each dimerizing polypeptide is an ACE2 CLD;
[1025] d) the first and second domains are Fc domains, the third and fourth domains are anti-CD19 Fab domains and the fifth and sixth domains are anti-CD20 Fab domains, the seventh and eighth domains are single chain 4-1BB ligands, and each dimerizing polypeptide is an ACE2 CLD;
[1026] e) the first and second domains are Fc domains, the third and fourth domains are anti-CD20 Fab domains, the fifth and sixth domains are anti-CD19 Fab domains, the seventh and eighth domains are single chain 4-1BB ligands, each dimerizing polypeptide is an ACE2 CLD, and the first and second domains are each connected to their respective dimerizing polypeptides via a peptide linker; or
[1027] f) the first and second domains are Fc domains, the third and fourth domains are anti-CD19 Fab domains and the fifth and sixth domains are anti-CD20 Fab domains, the seventh and eighth domains are single chain 4-1BB ligands, each dimerizing polypeptide is an ACE2 CLD, and the first and second domains are each connected to their respective dimerizing polypeptides via a peptide linker.

[1028] In embodiments of the invention:
[1029] a) the anti-CD19 Fab domain comprises:
   [1030] i) the CDRs of each of the heavy and lights chains of FMC63, preferably wherein the anti-CD19 Fab is the Fab domain of FMC63;
   [1031] ii) the CDRs of each of the heavy and lights chains of FMC60, preferably wherein the anti-CD19 Fab is the Fab domain of FMC60; or
   [1032] iii) the CDRs of each of the heavy and lights chains of FMC59, preferably wherein the anti-CD19 Fab is the Fab domain of FMC59; and/or
[1033] b) the anti-CD20 Fab domain comprises the CDR of rituximab, preferably wherein the anti-CD20 Fab is the Fab domain of rituximab.

[1034] In embodiments of the invention the Fc domains are characterized by one or more or all of the following features:
[1035] a) are heterodimers,
[1036] b) are IgG1 Fc domains,
[1037] c) comprise a silencing mutation such that the Fc domain lacks Fc gamma receptor binding activity, preferably wherein such mutation is one of the following combinations of mutations:
   [1038] i) P329G/L234A/L235A (PGLALA),
   [1039] ii) L234A/L235A (LALA),
   [1040] iii) P331S/L234A/L235A,
   [1041] iv) L234F/L235E/P331S, and
   [1042] v) L234F/L235E/P329G,
[1043] d) comprise a mutation that enhances FcRn activity, preferably wherein such mutation extends the half-life of the tetrahedral antibody, preferably wherein the mutation is a combination the following mutations: L309D/Q311H/N434S (DHS),
[1044] e) comprise a mutation that enhances Fc gamma receptor binding activity, preferably wherein the mutation is:
   [1045] i) a combination of the following mutations: S239D/I332E,
   [1046] ii) S239D, preferably wherein the other polypeptide chain of the Fc domain comprises a I332E mutation, or
   [1047] iii) I332E, preferably wherein the other polypeptide chain of the Fc domain comprises a S239D mutation, and
[1048] f) comprise a mutation that ablates their Protein A binding site, preferably wherein such mutation is H435R/Y436F (HY/RF).

[1049] In embodiments of the invention, the peptide linkers each have a length of 23 amino acids and are derived from the stalk region of a TNF receptor, preferably wherein the TNF receptor is TNF receptor 1B, still more preferably wherein the peptide linker consists of the amino acid sequence set forth in SEQ ID NO: 4468, and

[1050] In embodiments of the invention, the dimerizing polypeptides are each an ACE2 CLD, and wherein each ACE2 CLD comprises or consists of amino acids 616-740 of the ACE2 protein.

[1051] In embodiments of the invention comprising six domains, wherein such domains and peptide linkers are formed by four different types of polypeptide chains, preferably the four different types of polypeptide chains are denoted L1, H1, L2, and H2, and:
[1052] a) the L1 chain comprises the amino acid sequence set forth in SEQ ID NO: 733, the H1 chain comprises the amino acid sequence set forth in SEQ ID NO: 707, the L2 chain comprises the amino acid sequence set forth in SEQ ID NO: 734, and the H2 chain comprises the amino acid sequence set forth in SEQ ID NO: 708, or wherein the L1, H1, L2, and H2 chains are variants with at least 90%, preferably at least 95%, more preferably at least 98% identity to said sequences;
[1053] b) the L1 chain comprises the amino acid sequence set forth in SEQ ID NO: 735, the H1 chain comprises the amino acid sequence set forth in SEQ ID NO: 709, the L2 chain comprises the amino acid sequence set forth in SEQ ID NO: 736, and the H2 chain comprises the amino acid sequence set forth in SEQ ID NO: 710, or wherein the L1, H1, L2, and H2 chains are variants with at least 90%, preferably at least 95%, more preferably at least 98% identity to said sequences;
[1054] c) the L1 chain comprises the amino acid sequence set forth in SEQ ID NO: 735, the H1 chain comprises the amino acid sequence set forth in SEQ ID NO: 709, the L2 chain comprises the amino acid sequence set forth in SEQ ID NO: 737, and the H2 chain comprises the amino acid sequence set forth in SEQ ID NO: 711, or wherein the L1, H1, L2, and H2 chains are variants with at least 90%, preferably at least 95%, more preferably at least 98% identity to said sequences;
[1055] d) the L1 chain comprises the amino acid sequence set forth in SEQ ID NO: 738, the H1 chain comprises the amino acid sequence set forth in SEQ ID NO: 712, the L2 chain comprises the amino acid sequence set forth in SEQ ID NO: 739, and the H2 chain comprises the amino acid sequence set forth in SEQ ID NO: 713, or wherein the L1, H1, L2, and H2 chains are variants with at least 90%, preferably at least 95%, more preferably at least 98% identity to said sequences;
[1056] e) the L1 chain comprises the amino acid sequence set forth in SEQ ID NO: 740, the H1 chain comprises the amino acid sequence set forth in SEQ ID NO: 714, the L2 chain comprises the amino acid sequence set forth in SEQ ID NO: 741, and the H2 chain comprises the amino acid sequence set forth in SEQ ID NO: 715, or wherein the L1, H1, L2, and H2 chains are variants with at least 90%, preferably at least 95%, more preferably at least 98% identity to said sequences;
[1057] f) the L1 chain comprises the amino acid sequence set forth in SEQ ID NO: 740, the H1 chain comprises the amino acid sequence set forth in SEQ ID NO: 714, the L2 chain comprises the amino acid sequence set forth in SEQ ID NO: 742, and the H2 chain comprises the amino acid sequence set forth in SEQ ID NO: 716, or wherein the L1, H1, L2, and H2 chains are variants with at least 90%, preferably at least 95%, more preferably at least 98% identity to said sequences;
[1058] g) the L1 chain comprises the amino acid sequence set forth in SEQ ID NO: 4801, the H1 chain comprises the amino acid sequence set forth in SEQ ID NO: 4721, the L2 chain comprises the amino acid sequence set forth in SEQ ID NO: 4802, and the H2 chain comprises the amino acid sequence set forth in SEQ ID NO: 4722, or wherein the L1, H1, L2, and H2 chains are variants with at least 90%, preferably at least 95%, more preferably at least 98% identity to said sequences;
[1059] h) the L1 chain comprises the amino acid sequence set forth in SEQ ID NO: 4803, the H1 chain comprises the amino acid sequence set forth in SEQ ID NO: 4723, the L2 chain comprises the amino acid sequence set forth in SEQ ID NO: 4804, and the H2 chain comprises the amino acid sequence set forth in SEQ ID NO: 4724, or wherein the L1, H1, L2, and H2 chains are variants with at least 90%, preferably at least 95%, more preferably at least 98% identity to said sequences;
[1060] i) the L1 chain comprises the amino acid sequence set forth in SEQ ID NO: 4803, the H1 chain comprises the amino acid sequence set forth in SEQ ID NO: 4723, the L2 chain comprises the amino acid sequence set forth in SEQ ID NO: 4805, and the H2 chain comprises the amino acid sequence set forth in SEQ ID NO: 4725, or wherein the L1, H1, L2, and H2 chains are variants with at least 90%, preferably at least 95%, more preferably at least 98% identity to said sequences;
[1061] j) the L1 chain comprises the amino acid sequence set forth in SEQ ID NO: 4806, the H1 chain comprises the amino acid sequence set forth in SEQ ID NO: 4726, the L2 chain comprises the amino acid sequence set forth in SEQ ID NO: 4807, and the H2 chain comprises the amino acid sequence set forth in SEQ ID NO: 4727, or wherein the L1, H1, L2, and H2 chains are variants with at least 90%, preferably at least 95%, more preferably at least 98% identity to said sequences;
[1062] k) the L1 chain comprises the amino acid sequence set forth in SEQ ID NO: 4808, the H1 chain comprises the amino acid sequence set forth in SEQ ID NO: 4728, the L2 chain comprises the amino acid sequence set forth in SEQ ID NO: 4809, and the H2 chain comprises the amino acid sequence set forth in SEQ ID NO: 4729, or wherein the L1, H1, L2, and H2 chains are variants with at least 90%, preferably at least 95%, more preferably at least 98% identity to said sequences;
[1063] l) the L1 chain comprises the amino acid sequence set forth in SEQ ID NO: 4808, the H1 chain comprises the amino acid sequence set forth in SEQ ID NO: 4728, the L2 chain comprises the amino acid sequence set forth in SEQ ID NO: 4810, and the H2 chain comprises the amino acid sequence set forth in SEQ ID NO: 4730, or wherein the L1, H1, L2, and H2 chains are variants with at least 90%, preferably at least 95%, more preferably at least 98% identity to said sequences;
[1064] m) the L1 chain comprises the amino acid sequence set forth in SEQ ID NO: 4803, the H1 chain comprises the amino acid sequence set forth in SEQ ID NO: 4723, the L2 chain comprises the amino acid sequence set forth in SEQ ID NO: 4813, and the H2 chain comprises the amino acid sequence set forth in SEQ ID NO: 4772, or wherein the L1, H1, L2, and H2 chains are variants with at least 90%, preferably at least 95%, more preferably at least 98% identity to said sequences;
[1065] n) the L1 chain comprises the amino acid sequence set forth in SEQ ID NO: 4803, the H1 chain comprises the amino acid sequence set forth in SEQ ID NO: 4723, the L2 chain comprises the amino acid sequence set forth in SEQ ID NO: 4814, and the H2 chain comprises the amino acid sequence set forth in SEQ ID NO: 4773, or wherein the L1, H1, L2, and H2 chains are variants with at least 90%, preferably at least 95%, more preferably at least 98% identity to said sequences;
[1066] o) the L1 chain comprises the amino acid sequence set forth in SEQ ID NO: 4815, the H1 chain comprises the amino acid sequence set forth in SEQ ID NO: 4774, the L2 chain comprises the amino acid sequence set forth in SEQ ID NO: 4813, and the H2 chain comprises the amino acid sequence set forth in SEQ ID NO: 4772, or wherein the L1, H1, L2, and H2 chains are variants with at least 90%, preferably at least 95%, more preferably at least 98% identity to said sequences;
[1067] p) the L1 chain comprises the amino acid sequence set forth in SEQ ID NO: 4815, the H1 chain comprises the amino acid sequence set forth in SEQ ID NO: 4774, the L2 chain comprises the amino acid sequence set forth in SEQ ID NO: 4814, and the H2 chain comprises the amino acid sequence set forth in SEQ ID NO: 4773, or wherein the L1, H1, L2, and H2 chains are variants with at least 90%, preferably at least 95%, more preferably at least 98% identity to said sequences;
[1068] q) the L1 chain comprises the amino acid sequence set forth in SEQ ID NO: 4816, the H1 chain comprises the amino acid sequence set forth in SEQ ID NO: 4775, the L2 chain comprises the amino acid sequence set forth in SEQ ID NO: 4809, and the H2 chain comprises the amino acid sequence set forth in SEQ ID NO: 4729, or wherein the L1, H1, L2, and H2 chains are variants with at least 90%, preferably at least 95%, more preferably at least 98% identity to said sequences;
[1069] r) the L1 chain comprises the amino acid sequence set forth in SEQ ID NO: 4816, the H1 chain comprises the amino acid sequence set forth in SEQ ID NO: 4775, the L2 chain comprises the amino acid sequence set forth in SEQ ID NO: 4810, and the H2 chain comprises the amino acid sequence set forth in SEQ ID NO: 4730, or wherein the L1, H1, L2, and H2 chains are variants with at least 90%, preferably at least 95%, more preferably at least 98% identity to said sequences;
[1070] s) the L1 chain comprises the amino acid sequence set forth in SEQ ID NO: 4817, the H1 chain comprises the amino acid sequence set forth in SEQ ID NO: 4776, the L2 chain comprises the amino acid sequence set forth in SEQ ID NO: 4809, and the H2 chain comprises the amino acid sequence set forth in SEQ ID NO: 4729, or wherein the L1, H1, L2, and H2 chains are variants with at least 90%, preferably at least 95%, more preferably at least 98% identity to said sequences;
[1071] t) the L1 chain comprises the amino acid sequence set forth in SEQ ID NO: 4817, the H1 chain comprises the amino acid sequence set forth in SEQ ID NO: 4776, the L2 chain comprises the amino acid sequence set forth in SEQ ID NO: 4810, and the H2 chain comprises the amino acid sequence set forth in SEQ ID NO: 4730, or wherein the L1, H1, L2, and H2 chains are variants with at least 90%, preferably at least 95%, more preferably at least 98% identity to said sequences;
[1072] u) the L1 chain comprises the amino acid sequence set forth in SEQ ID NO: 4803, the H1 chain comprises the amino acid sequence set forth in SEQ ID NO: 4723, the L2 chain comprises the amino acid sequence set forth in SEQ ID NO: 4814, and the H2 chain comprises the amino acid sequence set forth in SEQ ID NO: 4794, or wherein the L1, H1, L2, and H2 chains are variants with at least 90%, preferably at least 95%, more preferably at least 98% identity to said sequences;
[1073] v) the L1 chain comprises the amino acid sequence set forth in SEQ ID NO: 4815, the H1 chain comprises the amino acid sequence set forth in SEQ ID NO: 4774, the L2 chain comprises the amino acid sequence set forth in SEQ ID NO: 4813, and the H2 chain comprises the amino acid sequence set forth in SEQ ID NO: 4793, or wherein the L1, H1, L2, and H2 chains are variants with at least 90%, preferably at least 95%, more preferably at least 98% identity to said sequences;
[1074] w) the L1 chain comprises the amino acid sequence set forth in SEQ ID NO: 4815, the H1 chain comprises the amino acid sequence set forth in SEQ ID NO: 4774, the L2 chain comprises the amino acid sequence set forth in SEQ ID NO: 4814, and the H2 chain comprises the amino acid sequence set forth in SEQ ID NO: 4794, or wherein the L1, H1, L2, and H2 chains are variants with at least 90%, preferably at least 95%, more preferably at least 98% identity to said sequences;
[1075] x) the L1 chain comprises the amino acid sequence set forth in SEQ ID NO: 4819, the H1 chain comprises the amino acid sequence set forth in SEQ ID NO: 4775, the L2 chain comprises the amino acid sequence set forth in SEQ ID NO: 4809, and the H2 chain comprises the amino acid sequence set forth in SEQ ID NO: 4729, or wherein the L1, H1, L2, and H2 chains are variants with at least 90%, preferably at least 95%, more preferably at least 98% identity to said sequences
[1076] y) the L1 chain comprises the amino acid sequence set forth in SEQ ID NO: 4819, the H1 chain comprises the amino acid sequence set forth in SEQ ID NO: 4775, the L2 chain comprises the amino acid sequence set forth in SEQ ID NO: 4810, and the H2 chain comprises the amino acid sequence set forth in SEQ ID NO: 4730, or wherein the L1, H1, L2, and H2 chains are variants with at least 90%, preferably at least 95%, more preferably at least 98% identity to said sequences;
[1077] z) the L1 chain comprises the amino acid sequence set forth in SEQ ID NO: 4820, the H1 chain comprises the amino acid sequence set forth in SEQ ID NO: 4776, the L2 chain comprises the amino acid sequence set forth in SEQ ID NO: 4809, and the H2 chain comprises the amino acid sequence set forth in SEQ ID NO: 4729, or wherein the L1, H1, L2, and H2 chains are variants with at least 90%, preferably at least 95%, more preferably at least 98% identity to said sequences; or
[1078] aa) the L1 chain comprises the amino acid sequence set forth in SEQ ID NO: 4820, the H1 chain comprises the amino acid sequence set forth in SEQ ID NO: 4776, the L2 chain comprises the amino acid sequence set forth in SEQ ID NO: 4810, and the H2 chain comprises the amino acid sequence set forth in SEQ ID NO: 4730, or wherein the L1, H1, L2, and H2 chains are variants with at least 90%, preferably at least 95%, more preferably at least 98% identity to said sequences.

[1079] In another embodiment of the invention comprising six domains, wherein such domains and peptide linkers are formed by four different types of polypeptide chains, the polypeptides are any of those listed in Table 54, preferably protein IDs 21-31 to 21-38 and 21-69 to 21-76.

[1080] In the above embodiment, the C-terminal portion of the H1 and H2 chains pair with one another to form each of domains 1 and 2, The N-terminal portion of the H1 chain pairs with L1 chains to form the third and fourth domains and the N-terminal portion of the H2 chain pairs with L2 to form the fifth and sixth domains Further, the H1 chain contains a CLD dimerizing domain between the portion that pairs with the H2 chain and the portion that pairs with the L1 chain. Panels C and D of FIG. 31 provide schematic representations of the structure of such tetrahedral antibodies, where the chains in the schematic are, from left to right, L2, H2, L1, H1, H1, L1, H2, L2. This invention provides a method of producing a tetrahedral antibody, the method comprising recombinantly expressing the four different types of polypeptide chains of this embodiment in a host cell.

[1081] In embodiments of the invention comprising eight domains, wherein such domains and peptide linkers are formed by four different types of polypeptide chains, preferably the four different types of polypeptide chains are denoted L1, H1, L2, and H2, and:
[1082] a) the L1 chain comprises the amino acid sequence set forth in SEQ ID NO: 733, the H1 chain comprises the amino acid sequence set forth in SEQ ID NO: 707, the L2 chain comprises the amino acid sequence set forth in SEQ ID NO: 734, and the H2 chain comprises the amino acid sequence set forth in SEQ ID NO: 717, or wherein the L1, H1, L2, and H2 chains are variants with at least 90%, preferably at least 95%, more preferably at least 98% identity to said sequences;
[1083] b) the L1 chain comprises the amino acid sequence set forth in SEQ ID NO: 735, the H1 chain comprises the amino acid sequence set forth in SEQ ID NO: 709, the L2 chain comprises the amino acid sequence set forth in SEQ ID NO: 736, and the H2 chain comprises the amino acid sequence set forth in SEQ ID NO: 718, or wherein the L1, H1, L2, and H2 chains are variants with at least 90%, preferably at least 95%, more preferably at least 98% identity to said sequences;
[1084] c) the L1 chain comprises the amino acid sequence set forth in SEQ ID NO: 735, the H1 chain comprises the amino acid sequence set forth in SEQ ID NO: 709, the L2 chain comprises the amino acid sequence set forth in SEQ ID NO: 737, and the H2 chain comprises the amino acid sequence set forth in SEQ ID NO: 719, or wherein the L1, H1, L2, and H2 chains are variants with at least 90%, preferably at least 95%, more preferably at least 98% identity to said sequences;
[1085] d) the L1 chain comprises the amino acid sequence set forth in SEQ ID NO: 738, the H1 chain comprises the amino acid sequence set forth in SEQ ID NO: 712, the L2 chain comprises the amino acid sequence set forth in SEQ ID NO: 739, and the H2 chain comprises the amino acid sequence set forth in SEQ ID NO: 720, or wherein the L1, H1, L2, and H2 chains are variants with at least 90%, preferably at least 95%, more preferably at least 98% identity to said sequences;
[1086] e) the L1 chain comprises the amino acid sequence set forth in SEQ ID NO: 740, the H1 chain comprises the amino acid sequence set forth in SEQ ID NO: 714, the L2 chain comprises the amino acid sequence set forth in SEQ ID NO: 741, and the H2 chain comprises the amino acid sequence set forth in SEQ ID NO: 721, or wherein the L1, H1, L2, and H2 chains are variants with at least 90%, preferably at least 95%, more preferably at least 98% identity to said sequences;
[1087] f) the L1 chain comprises the amino acid sequence set forth in SEQ ID NO: 740, the H1 chain comprises the amino acid sequence set forth in SEQ ID NO: 714, the L2 chain comprises the amino acid sequence set forth in SEQ ID NO: 742, and the H2 chain comprises the amino acid sequence set forth in SEQ ID NO: 722, or wherein the L1, H1, L2, and H2 chains are variants with at least 90%, preferably at least 95%, more preferably at least 98% identity to said sequences;
[1088] g) the L1 chain comprises the amino acid sequence set forth in SEQ ID NO: 733, the H1 chain comprises the amino acid sequence set forth in SEQ ID NO: 723, the L2 chain comprises the amino acid sequence set forth in SEQ ID NO: 734, and the H2 chain comprises the amino acid sequence set forth in SEQ ID NO: 724, or wherein the L1, H1, L2, and H2 chains are variants with at least 90%, preferably at least 95%, more preferably at least 98% identity to said sequences;
[1089] h) the L1 chain comprises the amino acid sequence set forth in SEQ ID NO: 735, the H1 chain comprises the amino acid sequence set forth in SEQ ID NO: 725, the L2 chain comprises the amino acid sequence set forth in SEQ ID NO: 736, and the H2 chain comprises the amino acid sequence set forth in SEQ ID NO: 726, or wherein the L1, H1, L2, and H2 chains are variants with at least 90%, preferably at least 95%, more preferably at least 98% identity to said sequences;
[1090] i) the L1 chain comprises the amino acid sequence set forth in SEQ ID NO: 735, the H1 chain comprises the amino acid sequence set forth in SEQ ID NO: 725, the L2 chain comprises the amino acid sequence set forth in SEQ ID NO: 737, and the H2 chain comprises the amino acid sequence set forth in SEQ ID NO: 727, or wherein the L1, H1, L2, and H2 chains are variants with at least 90%, preferably at least 95%, more preferably at least 98% identity to said sequences;
[1091] j) the L1 chain comprises the amino acid sequence set forth in SEQ ID NO: 738, the H1 chain comprises the amino acid sequence set forth in SEQ ID NO: 728, the L2 chain comprises the amino acid sequence set forth in SEQ ID NO: 739, and the H2 chain comprises the amino acid sequence set forth in SEQ ID NO: 729, or wherein the L1, H1, L2, and H2 chains are variants with at least 90%, preferably at least 95%, more preferably at least 98% identity to said sequences;
[1092] k) the L1 chain comprises the amino acid sequence set forth in SEQ ID NO: 740, the H1 chain comprises the amino acid sequence set forth in SEQ ID NO: 730, the L2 chain comprises the amino acid sequence set forth in SEQ ID NO: 741, and the H2 chain comprises the amino acid sequence set forth in SEQ ID NO: 731, or wherein the L1, H1, L2, and H2 chains are variants with at least 90%, preferably at least 95%, more preferably at least 98% identity to said sequences; or
[1093] l) the L1 chain comprises the amino acid sequence set forth in SEQ ID NO: 740, the H1 chain comprises the amino acid sequence set forth in SEQ ID NO: 730, the L2 chain comprises the amino acid sequence set forth in SEQ ID NO: 742, and the H2 chain comprises the amino acid sequence set forth in SEQ ID NO: 732, or wherein the L1, H1, L2, and H2 chains are variants with at least 90%, preferably at least 95%, more preferably at least 98% identity to said sequences.

[1094] In the above embodiment, the C-terminal portion of the H1 chain forms domains 7 and 8, while the C-terminal portion of the H2 chain pairs with part of the H1 chain to form each of domains 1 and 2, The N-terminal portion of the H1 chain pairs with L1 chains to form the third and fourth domains and the N-terminal portion of the H2 chain pairs with L2 to form the fifth and sixth domains Further, the H1 chain contains a CLD dimerizing domain between the portion that pairs with the H2 chain and the portion that pairs with the L1 chain. Panels D of FIG. 37 provides schematic representations of the structure of such tetrahedral antibodies, where the chains in the schematic are, from left to right, L2, H2, L1, H1, H1, L1, H2, L2. This invention provides a method of producing a tetrahedral antibody, the method comprising recombinantly expressing the four different types of polypeptide chains of this embodiment in a host cell.

### Polynucleotides

[1095] This invention also provides a polynucleotide which encodes a polypeptide comprising any one of the polypeptide chains of the above embodiments. In a preferred embodiment, the polynucleotide encodes one of the L1, H1, L2, and H2 polypeptide chains of the embodiments described above.

### Vectors

[1096] This invention also provides a vector comprising polynucleotides which encode polypeptides comprising any of the polypeptide chains of the invention. In a preferred embodiment, the vector encodes polypeptides comprising the L1, H1, L2, and H2 polypeptide chains of the embodiments of the invention comprising four different polypeptide chains as described above. In these vectors, each polynucleotide is operably linked to a promoter which directs expression of the polynucleotide in a host cell. This invention also provides a method of producing a tetrahedral antibody, the method comprising recombinantly expressing any of these vectors in a host cell.

### Host Cells

[1097] This invention also provides a host cell comprising any of the vectors of the invention. In a preferred embodiment, the host cell is for use in a method of producing a tetrahedral antibody. This invention also provides a method of producing a tetrahedral antibody comprising four different types of polypeptide chains, the method comprising expressing four different types of polypeptide chains in a host cell of the invention as described in the above embodiments.

### Pharmaceutical Compositions

[1098] This invention also provides a pharmaceutical composition comprising any of the tetrahedral antibodies of the invention comprising anti-CD20 and/or anti-CD19 Fab domains, and one or more pharmaceutically acceptable excipients.

[1099] In a preferred embodiment, the pharmaceutical composition comprises a tetrahedral antibody comprising six domains, wherein such domains and peptide linkers are formed by four different types of polypeptide chains, preferably the four different types of polypeptide chains are denoted L1, H1, L2, and H2, and:
[1100] a) the L1 chain comprises the amino acid sequence set forth in SEQ ID NO: 733, the H1 chain comprises the amino acid sequence set forth in SEQ ID NO: 707, the L2 chain comprises the amino acid sequence set forth in SEQ ID NO: 734, and the H2 chain comprises the amino acid sequence set forth in SEQ ID NO: 708, or wherein the L1, H1, L2, and H2 chains are variants with at least 90%, preferably at least 95%, more preferably at least 98% identity to said sequences;
[1101] b) the L1 chain comprises the amino acid sequence set forth in SEQ ID NO: 735, the H1 chain comprises the amino acid sequence set forth in SEQ ID NO: 709, the L2 chain comprises the amino acid sequence set forth in SEQ ID NO: 736, and the H2 chain comprises the amino acid sequence set forth in SEQ ID NO: 710, or wherein the L1, H1, L2, and H2 chains are variants with at least 90%, preferably at least 95%, more preferably at least 98% identity to said sequences;
[1102] c) the L1 chain comprises the amino acid sequence set forth in SEQ ID NO: 735, the H1 chain comprises the amino acid sequence set forth in SEQ ID NO: 709, the L2 chain comprises the amino acid sequence set forth in SEQ ID NO: 737, and the H2 chain comprises the amino acid sequence set forth in SEQ ID NO: 711, or wherein the L1, H1, L2, and H2 chains are variants with at least 90%, preferably at least 95%, more preferably at least 98% identity to said sequences;
[1103] d) the L1 chain comprises the amino acid sequence set forth in SEQ ID NO: 738, the H1 chain comprises the amino acid sequence set forth in SEQ ID NO: 712, the L2 chain comprises the amino acid sequence set forth in SEQ ID NO: 739, and the H2 chain comprises the amino acid sequence set forth in SEQ ID NO: 713, or wherein the L1, H1, L2, and H2 chains are variants with at least 90%, preferably at least 95%, more preferably at least 98% identity to said sequences;
[1104] e) the L1 chain comprises the amino acid sequence set forth in SEQ ID NO: 740, the H1 chain comprises the amino acid sequence set forth in SEQ ID NO: 714, the L2 chain comprises the amino acid sequence set forth in SEQ ID NO: 741, and the H2 chain comprises the amino acid sequence set forth in SEQ ID NO: 715, or wherein the L1, H1, L2, and H2 chains are variants with at least 90%, preferably at least 95%, more preferably at least 98% identity to said sequences; or
[1105] f) the L1 chain comprises the amino acid sequence set forth in SEQ ID NO: 740, the H1 chain comprises the amino acid sequence set forth in SEQ ID NO: 714, the L2 chain comprises the amino acid sequence set forth in SEQ ID NO: 742, and the H2 chain comprises the amino acid sequence set forth in SEQ ID NO: 716, or wherein the L1, H1, L2, and H2 chains are variants with at least 90%, preferably at least 95%, more preferably at least 98% identity to said sequences.

[1106] In a preferred embodiment, the pharmaceutical composition comprises a tetrahedral antibody comprising eight domains, wherein such domains and peptide linkers are formed by four different types of polypeptide chains, preferably the four different types of polypeptide chains are denoted L1, H1, L2, and H2, and:
[1107] a) the L1 chain comprises the amino acid sequence set forth in SEQ ID NO: 733, the H1 chain comprises the amino acid sequence set forth in SEQ ID NO: 707, the L2 chain comprises the amino acid sequence set forth in SEQ ID NO: 734, and the H2 chain comprises the amino acid sequence set forth in SEQ ID NO: 717, or wherein the L1, H1, L2, and H2 chains are variants with at least 90%, preferably at least 95%, more preferably at least 98% identity to said sequences;
[1108] b) the L1 chain comprises the amino acid sequence set forth in SEQ ID NO: 735, the H1 chain comprises the amino acid sequence set forth in SEQ ID NO: 709, the L2 chain comprises the amino acid sequence set forth in SEQ ID NO: 736, and the H2 chain comprises the amino acid sequence set forth in SEQ ID NO: 718, or wherein the L1, H1, L2, and H2 chains are variants with at least 90%, preferably at least 95%, more preferably at least 98% identity to said sequences;
[1109] c) the L1 chain comprises the amino acid sequence set forth in SEQ ID NO: 735, the H1 chain comprises the amino acid sequence set forth in SEQ ID NO: 709, the L2 chain comprises the amino acid sequence set forth in SEQ ID NO: 737, and the H2 chain comprises the amino acid sequence set forth in SEQ ID NO: 719, or wherein the L1, H1, L2, and H2 chains are variants with at least 90%, preferably at least 95%, more preferably at least 98% identity to said sequences;
[1110] d) the L1 chain comprises the amino acid sequence set forth in SEQ ID NO: 738, the H1 chain comprises the amino acid sequence set forth in SEQ ID NO: 712, the L2 chain comprises the amino acid sequence set forth in SEQ ID NO: 739, and the H2 chain comprises the amino acid sequence set forth in SEQ ID NO: 720, or wherein the L1, H1, L2, and H2 chains are variants with at least 90%, preferably at least 95%, more preferably at least 98% identity to said sequences;
[1111] e) the L1 chain comprises the amino acid sequence set forth in SEQ ID NO: 740, the H1 chain comprises the amino acid sequence set forth in SEQ ID NO: 714, the L2 chain comprises the amino acid sequence set forth in SEQ ID NO: 741, and the H2 chain comprises the amino acid sequence set forth in SEQ ID NO: 721, or wherein the L1, H1, L2, and H2 chains are variants with at least 90%, preferably at least 95%, more preferably at least 98% identity to said sequences;
[1112] f) the L1 chain comprises the amino acid sequence set forth in SEQ ID NO: 740, the H1 chain comprises the amino acid sequence set forth in SEQ ID NO: 714, the L2 chain comprises the amino acid sequence set forth in SEQ ID NO: 742, and the H2 chain comprises the amino acid sequence set forth in SEQ ID NO: 722, or wherein the L1, H1, L2, and H2 chains are variants with at least 90%, preferably at least 95%, more preferably at least 98% identity to said sequences;
[1113] g) the L1 chain comprises the amino acid sequence set forth in SEQ ID NO: 733, the H1 chain comprises the amino acid sequence set forth in SEQ ID NO: 723, the L2 chain comprises the amino acid sequence set forth in SEQ ID NO: 734, and the H2 chain comprises the amino acid sequence set forth in SEQ ID NO: 724, or wherein the L1, H1, L2, and H2 chains are variants with at least 90%, preferably at least 95%, more preferably at least 98% identity to said sequences;
[1114] h) the L1 chain comprises the amino acid sequence set forth in SEQ ID NO: 735, the H1 chain comprises the amino acid sequence set forth in SEQ ID NO: 725, the L2 chain comprises the amino acid sequence set forth in SEQ ID NO: 736, and the H2 chain comprises the amino acid sequence set forth in SEQ ID NO: 726, or wherein the L1, H1, L2, and H2 chains are variants with at least 90%, preferably at least 95%, more preferably at least 98% identity to said sequences;
[1115] i) the L1 chain comprises the amino acid sequence set forth in SEQ ID NO: 735, the H1 chain comprises the amino acid sequence set forth in SEQ ID NO: 725, the L2 chain comprises the amino acid sequence set forth in SEQ ID NO: 737, and the H2 chain comprises the amino acid sequence set forth in SEQ ID NO: 727, or wherein the L1, H1, L2, and H2 chains are variants with at least 90%, preferably at least 95%, more preferably at least 98% identity to said sequences;
[1116] j) the L1 chain comprises the amino acid sequence set forth in SEQ ID NO: 738, the H1 chain comprises the amino acid sequence set forth in SEQ ID NO: 728, the L2 chain comprises the amino acid sequence set forth in SEQ ID NO: 739, and the H2 chain comprises the amino acid sequence set forth in SEQ ID NO: 729, or wherein the L1, H1, L2, and H2 chains are variants with at least 90%, preferably at least 95%, more preferably at least 98% identity to said sequences;
[1117] k) the L1 chain comprises the amino acid sequence set forth in SEQ ID NO: 740, the H1 chain comprises the amino acid sequence set forth in SEQ ID NO: 730, the L2 chain comprises the amino acid sequence set forth in SEQ ID NO: 741, and the H2 chain comprises the amino acid sequence set forth in SEQ ID NO: 731, or wherein the L1, H1, L2, and H2 chains are variants with at least 90%, preferably at least 95%, more preferably at least 98% identity to said sequences; or
[1118] l) the L1 chain comprises the amino acid sequence set forth in SEQ ID NO: 740, the H1 chain comprises the amino acid sequence set forth in SEQ ID NO: 730, the L2 chain comprises the amino acid sequence set forth in SEQ ID NO: 742, and the H2 chain comprises the amino acid sequence set forth in SEQ ID NO: 732, or wherein the L1, H1, L2, and H2 chains are variants with at least 90%, preferably at least 95%, more preferably at least 98% identity to said sequences.

### Method of Treating

[1119] This invention also provides a method of treating cancer or inflammatory disease in a subject, the method comprising administering to the subject a therapeutically effective amount of the any of the above pharmaceutical compositions comprising a tetrahedral antibody comprising anti-CD20 and/or anti-CD19 Fab domains, preferably wherein the cancer is B cell cancer.

### Tetrahedral Molecules

[1120] This invention also provides a tetrahedral molecule comprising a first, second, third, and fourth domain, wherein:
[1121] a) the first and second domains each independently comprise:
   [1122] i) a first polypeptide chain comprising a first N-terminus and a first C-terminus of the domain, and
   [1123] ii) optionally a second polypeptide chain comprising a second N-terminus and a second C-terminus of the domain,
[1124] b) the first domain and the second domain are joined to each other by a non-covalent linkage
   [1125] (1) between a first dimerizing polypeptide attached by a peptide bond or via a peptide linker to the first N-terminus of the first domain, and a second dimerizing polypeptide attached by a peptide bond or via a peptide linker to the first N-terminus of the second domain,
   [1126] (2) between a first dimerizing polypeptide attached by a peptide bond or via a peptide linker to the first C-terminus of the first domain, and a second dimerizing polypeptide attached by a peptide bond or via a peptide linker to the first C-terminus of the second domain,
   [1127] (3) between a first dimerizing polypeptide attached by a peptide bond or via a peptide linker to the first N-terminus of the first domain, and a second dimerizing polypeptide attached by a peptide bond or via a peptide linker to the first C-terminus of the second domain, or
   [1128] (4) between a first dimerizing polypeptide attached by a peptide bond or via a peptide linker to the first C-terminus of the first domain, and a second dimerizing polypeptide attached by a peptide bond or via a peptide linker to the first N-terminus of the second domain,
   [1129] wherein the first and second dimerizing polypeptides are not immunoglobulin polypeptides,
[1130] c) if the first domain is joined to the second domain via a first dimerizing polypeptide attached to the first N-terminus of the first domain, then the third domain is attached at its C-terminus by a peptide bond or via a peptide linker to
   [1131] i) the N-terminus of the first dimerizing polypeptide,
   [1132] ii) the second N-terminus of the first domain if present, or
   [1133] iii) the N-terminus of a third dimerizing polypeptide, wherein the third dimerizing polypeptide is attached at its C-terminus by a peptide bond or via a peptide linker to the second N-terminus of the first domain if present,
[1134] d) if the first domain is joined to the second domain via a first dimerizing polypeptide attached to the first C-terminus of the first domain, then the third domain is attached at its N-terminus by a peptide bond or via a peptide linker to
   [1135] i) the C-terminus of the first dimerizing polypeptide,
   [1136] ii) the second C-terminus of the first domain if present, or
   [1137] iii) the C-terminus of a third dimerizing polypeptide, wherein the third dimerizing polypeptide is attached at its N-terminus by a peptide bond or via a peptide linker to the second C-terminus of the first domain if present,
[1138] e) if the second domain is joined to the first domain via a second dimerizing polypeptide attached to the first N-terminus of the second domain, then the fourth domain is attached at its C-terminus by a peptide bond or via a peptide linker to
   [1139] i) the N-terminus of the second dimerizing polypeptide,
   [1140] ii) the second N-terminus of the second domain if present, or
   [1141] iii) the N-terminus of a fourth dimerizing polypeptide, wherein the third dimerizing polypeptide is attached at its C-terminus by a peptide bond or via a peptide linker to the second N-terminus of the second domain if present, and
[1142] f) if the second domain is joined to the first domain via a second dimerizing polypeptide attached to the first C-terminus of the second domain, then the fourth domain is attached at its N-terminus by a peptide bond or via a peptide linker to
   [1143] i) the C-terminus of the second dimerizing polypeptide,
   [1144] ii) the second C-terminus of the second domain if present, or
   [1145] iii) the C-terminus of a fourth dimerizing polypeptide, wherein the fourth dimerizing polypeptide is attached at its N-terminus by a peptide bond or via a peptide linker to the second C-terminus of the second domain if present.

[1146] In embodiments of the invention, in particular in any one of the embodiments of the preceding paragraph, the tetrahedral antibody additionally comprises a fifth and/or sixth domain, wherein:
[1147] a) the first domain is joined to the second domain via a first dimerizing polypeptide attached to the first N-terminus of the first domain, and wherein
   [1148] i) the fifth domain is attached at its C-terminus by a peptide bond or via a peptide linker to:
      [1149] (1) the N-terminus of the first dimerizing polypeptide,
      [1150] (2) the second N-terminus of the first domain, or
      [1151] (3) the N-terminus of a third dimerizing polypeptide, wherein the third dimerizing polypeptide is attached at its C-terminus by a peptide bond or via a peptide linker to the second N-terminus of the first domain,
[1152] b) the first domain is joined to the second domain via a first dimerizing polypeptide attached to the first C-terminus of the first domain, and wherein
   [1153] i) the fifth domain is attached at its N-terminus by a peptide bond or via a peptide linker to:
      [1154] (1) the C-terminus of the first dimerizing polypeptide,
      [1155] (2) the second C-terminus of the first domain, or
      [1156] (3) the C-terminus of a third dimerizing polypeptide, wherein the third dimerizing polypeptide is attached at its N-terminus by a peptide bond or via a peptide linker to the second C-terminus of the first domain,
[1157] c) the second domain is joined to the first domain via a second dimerizing polypeptide attached to the first N-terminus of the second domain, and wherein
   [1158] i) the sixth domain is attached at its C-terminus by a peptide bond or via a peptide linker to:
      [1159] (1) the N-terminus of the second dimerizing polypeptide,
      [1160] (2) the second N-terminus of the second domain, or
      [1161] (3) the N-terminus of a fourth dimerizing polypeptide, wherein the fourth dimerizing polypeptide is attached at its C-terminus by a peptide bond or via a peptide linker to the second N-terminus of the second domain, or
[1162] d) the second domain is joined to the first domain via a second dimerizing polypeptide attached to the first C-terminus of the second domain, and wherein
   [1163] i) the sixth domain is attached at its N-terminus by a peptide bond or via a peptide linker to:
      [1164] (1) the C-terminus of the second dimerizing polypeptide,
      [1165] (2) the second C-terminus of the second domain, or
      [1166] (3) the C-terminus of a fourth dimerizing polypeptide, wherein the fourth dimerizing polypeptide is attached at its N-terminus by a peptide bond or via a peptide linker to the second C-terminus of the second domain.

[1167] In embodiments of the tetrahedral molecule of the invention, in particular in any one of the embodiments of the preceding two paragraphs, the tetrahedral molecule further comprises a seventh and/or eighth domain, wherein:
[1168] a) the first domain is joined to the second domain via a first dimerizing polypeptide attached to the first N-terminus of the first domain, and wherein
   [1169] i) the seventh domain is attached at its N-terminus by a peptide bond or via a peptide linker to:
      [1170] (1) the first C-terminus of the first domain, or
      [1171] (2) the second C-terminus of the first domain,
[1172] b) the first domain is joined to the second domain via a first dimerizing polypeptide attached to the first C-terminus of the first domain, and wherein
   [1173] i) the seventh domain is attached at its C-terminus by a peptide bond or via a peptide linker to:
      [1174] (1) the first N-terminus of the first domain, or
      [1175] (2) the second N-terminus of the first domain,
[1176] c) the second domain is joined to the first domain via a second dimerizing polypeptide attached to the first N-terminus of the second domain, and wherein
   [1177] i) the eighth domain is attached at its N-terminus by a peptide bond or via a peptide linker to:
      [1178] (1) the first C-terminus of the second domain, or
      [1179] (2) the second C-terminus of the second domain, or
[1180] d) the second domain is joined to the first domain via a second dimerizing polypeptide attached to the first C-terminus of the second domain, and wherein
   [1181] i) the eighth domain is attached at its C-terminus by a peptide bond or via a peptide linker to:
      [1182] (1) the first N-terminus of the second domain, or
      [1183] (2) the second N-terminus of the second domain.

[1184] In embodiments of the tetrahedral molecule of the invention, in particular in any one of the embodiments of the preceding three paragraphs, the tetrahedral molecule further comprises:
[1185] a) a ninth and/or tenth domain, preferably both a ninth and tenth domain, wherein:
   [1186] i) the third domain
      [1187] (1) is attached at its C-terminus by a peptide bond or via a peptide linker to the N-terminus of the first dimerizing polypeptide, and wherein the ninth domain is attached at its C-terminus by a peptide bond or via a peptide linker to an N-terminus of the third domain, or
      [1188] (2) is attached at its N-terminus by a peptide bond or via a peptide linker to the C-terminus of the first dimerizing polypeptide, and wherein the ninth domain is attached at its N-terminus by a peptide bond or via a peptide linker to a C-terminus of the third domain, and/or
   [1189] ii) the fourth domain
      [1190] (1) is attached at its C-terminus by a peptide bond or via a peptide linker to the N-terminus of the second dimerizing polypeptide, and wherein the tenth domain is attached at its C-terminus by a peptide bond or via a peptide linker to an N-terminus of the fourth domain, or
      [1191] (2) is attached at its N-terminus by a peptide bond or via a peptide linker to the C-terminus of the second dimerizing polypeptide, and wherein the tenth domain is attached at its N-terminus by a peptide bond or via a peptide linker to a C-terminus of the fourth domain; and/or
[1192] b) an eleventh and/or twelfth domain, preferably both an eleventh and twelfth domain, wherein:
   [1193] i) the fifth domain
      [1194] (1) is attached at its C-terminus by a peptide bond or via a peptide linker to the second N-terminus of the first domain, and wherein the eleventh domain is attached at its C-terminus by a peptide bond or via a peptide linker to an N-terminus of the fifth domain, or
      [1195] (2) is attached at its N-terminus by a peptide bond or via a peptide linker to the second C-terminus of the first domain, and wherein the eleventh domain is attached at its N-terminus by a peptide bond or via a peptide linker to a C-terminus of the fifth domain, and/or
   [1196] ii) the sixth domain
      [1197] (1) is attached at its C-terminus by a peptide bond or via a peptide linker to the second N-terminus of the second domain, and wherein the twelfth domain is attached at its C-terminus by a peptide bond or via a peptide linker to an N-terminus of the sixth domain, or
      [1198] (2) is attached at its N-terminus by a peptide bond or via a peptide linker to the second C-terminus of the second domain, and wherein the twelfth domain is attached at its N-terminus by a peptide bond or via a peptide linker to a C-terminus of the sixth domain.

[1199] In any one of the embodiments of the tetrahedral molecule of the invention, in particular in any one of the embodiments of the preceding four paragraphs:
[1200] a) the first domain is an Fc domain or Fab domain,
[1201] b) the first domain is an Fc domain or Fab domain and the second domain is not an Fc domain or Fab domain,
[1202] c) the first domain is an Fc domain and the second domain is a Fab domain,
[1203] d) the first and second domains are Fe domains,
[1204] e) the first and second domains are Fab domain,
[1205] f) the second, third and/or fourth domain are selected from the group consisting of (i) a secreted protein, and (ii) the extracellular domain of a transmembrane protein,
[1206] g) the third domain is selected from the group of (i) a secreted protein, and (ii) the extracellular domain of a transmembrane protein, and the fourth domain is a Fab,
[1207] h) the third domain is IL-15,
[1208] i) the third domain is IL-15 and the fourth domain is an IL-15Rα sushi domain,
[1209] j) the third domain is IL-15 and the fourth domain is a Fab,
[1210] k) the third and fourth domains are each the ACE2 peptidase domain (PD),
[1211] l) the first and second domains are Fc domains, and the third and fourth domains are selected from the group consisting of (i) a secreted protein, and (ii) the extracellular domain of a transmembrane protein,
[1212] m) the first and second domains are Fc domains, the third domain is selected from the group consisting of (i) a secreted protein, and (ii) the extracellular domain of a transmembrane protein, and the fourth domain is Fab,
[1213] n) the first and second domains are Fc domains and the third and fourth domains are Fab domains,
[1214] o) the first and second domains are Fc domains and the third and fourth domains are each the ACE2 peptidase domain (PD),
[1215] p) the first domain is an Fc domain and the second, third and fourth domains are Fab domains,
[1216] q) the first domain is an Fc domain, the second domain is a Fab domain, the third domain is IL-15, and the fourth domain is an IL-15Rα sushi domain,
[1217] r) the first domain is an Fc domain, the second domain is a Fab domain, the third domain is IL-15, and the fourth domain is a Fab,
[1218] s) the first and/or second domain is a transmembrane domain of a protein other than ACE2 and/or collectrin, the first and second dimerizing polypeptides are selected from a collectrin-like domain (CLD) and a collectrin domain (CD), and the first domain and the second domain are joined to each other by a non-covalent linkage
   [1219] (1) between a first dimerizing polypeptide attached by a peptide bond or via a peptide linker to the first N-terminus of the first domain, and a second dimerizing polypeptide attached by a peptide bond or via a peptide linker to the first N-terminus of the second domain, or
   [1220] (2) between a first dimerizing polypeptide attached by a peptide bond or via a peptide linker to the first C-terminus of the first domain, and a second dimerizing polypeptide attached by a peptide bond or via a peptide linker to the first C-terminus of the second domain;
[1221] t) the first and/or second domain is a transmembrane domain of ACE2 and/or collectrin, the third and/or fourth domain is other than the ACE2 peptidase domain, and the first domain and the second domain are joined to each other by a non-covalent linkage
   [1222] (1) between a first dimerizing polypeptide attached by a peptide bond or via a peptide linker to the first N-terminus of the first domain, and a second dimerizing polypeptide attached by a peptide bond or via a peptide linker to the first N-terminus of the second domain, or
   [1223] (2) between a first dimerizing polypeptide attached by a peptide bond or via a peptide linker to the first C-terminus of the first domain, and a second dimerizing polypeptide attached by a peptide bond or via a peptide linker to the first C-terminus of the second domain;
[1224] u) the first and/or second domain is an ACE2 transmembrane domain and/or collectrin, the first and second dimerizing polypeptides are selected from a collectrin-like domain (CLD) and a collectrin domain (CD), the third and/or fourth domain is other than the ACE2 peptidase domain, and the first domain and the second domain are joined to each other by a non-covalent linkage
   [1225] (1) between a first dimerizing polypeptide attached by a peptide bond or via a peptide linker to the first N-terminus of the first domain, and a second dimerizing polypeptide attached by a peptide bond or via a peptide linker to the first N-terminus of the second domain, or
   [1226] (2) between a first dimerizing polypeptide attached by a peptide bond or via a peptide linker to the first C-terminus of the first domain, and a second dimerizing polypeptide attached by a peptide bond or via a peptide linker to the first C-terminus of the second domain;
[1227] v) the first and second dimerizing polypeptides are selected from a collectrin-like domain (CLD) and a collectrin domain (CD), preferably a CLD, and the first domain is selected from the group consisting of: a binding domain of a protein or a portion or modified version thereof, a secreted protein or a portion or modified version thereof, a transmembrane protein or a portion or modified version thereof, an intracellular binding domain or a portion or modified version thereof, and an antibody or a portion or modified version thereof;
[1228] w) the first and second dimerizing polypeptides are selected from a collectrin-like domain (CLD) and a collectrin domain (CD), preferably a CLD, and the second domain is selected from the group consisting of: a binding domain of a protein or a portion or modified version thereof, a secreted protein or a portion or modified version thereof, a transmembrane protein or a portion or modified version thereof, an intracellular binding domain or a portion or modified version thereof, and an antibody or a portion or modified version thereof;
[1229] x) the first and second dimerizing polypeptides are selected from a collectrin-like domain (CLD) and a collectrin domain (CD), preferably a CLD, and the third domain is selected from the group consisting of: a binding domain of a protein or a portion or modified version thereof, a secreted protein or a portion or modified version thereof, a transmembrane protein or a portion or modified version thereof, an intracellular binding domain or a portion or modified version thereof, and an antibody or a portion or modified version thereof;
[1230] y) the first and second dimerizing polypeptides are selected from a collectrin-like domain (CLD) and a collectrin domain (CD), preferably a CLD, and the fourth domain is selected from the group consisting of: a binding domain of a protein or a portion or modified version thereof, a secreted protein or a portion or modified version thereof, a transmembrane protein or a portion or modified version thereof, an intracellular binding domain or a portion or modified version thereof, and an antibody or a portion or modified version thereof;
[1231] z) the first and second dimerizing polypeptides are selected from a collectrin-like domain (CLD) and a collectrin domain (CD), preferably a CLD, and the fifth domain, if present, is selected from the group consisting of: a binding domain of a protein or a portion or modified version thereof, a secreted protein or a portion or modified version thereof, a transmembrane protein or a portion or modified version thereof, an intracellular binding domain or a portion or modified version thereof, and an antibody or a portion or modified version thereof;
[1232] aa) the first and second dimerizing polypeptides are selected from a collectrin-like domain (CLD) and a collectrin domain (CD), preferably a CLD, and the sixth domain, if present, is selected from the group consisting of: a binding domain of a protein or a portion or modified version thereof, a secreted protein or a portion or modified version thereof, a transmembrane protein or a portion or modified version thereof, an intracellular binding domain or a portion or modified version thereof, and an antibody or a portion or modified version thereof;
[1233] bb) the first and second dimerizing polypeptides are selected from a collectrin-like domain (CLD) and a collectrin domain (CD), preferably a CLD, and the seventh domain, if present, is selected from the group consisting of: a binding domain of a protein or a portion or modified version thereof, a secreted protein or a portion or modified version thereof, a transmembrane protein or a portion or modified version thereof, an intracellular binding domain or a portion or modified version thereof, and an antibody or a portion or modified version thereof;
[1234] cc) the first and second dimerizing polypeptides are selected from a collectrin-like domain (CLD) and a collectrin domain (CD), preferably a CLD, and the eighth domain, if present, is selected from the group consisting of: a binding domain of a protein or a portion or modified version thereof, a secreted protein or a portion or modified version thereof, a transmembrane protein or a portion or modified version thereof, an intracellular binding domain or a portion or modified version thereof, and an antibody or a portion or modified version thereof;
[1235] dd) the first and second dimerizing polypeptides are selected from a collectrin-like domain (CLD) and a collectrin domain (CD), preferably a CLD, and the first domain is other than any one of: a binding domain of a protein or a portion or modified version thereof, a secreted protein or a portion or modified version thereof, a transmembrane protein or a portion or modified version thereof, an intracellular binding domain or a portion or modified version thereof, and an antibody or a portion or modified version thereof;
[1236] ee) the first and second dimerizing polypeptides are selected from a collectrin-like domain (CLD) and a collectrin domain (CD), preferably a CLD, and the second domain is other than any one of: a binding domain of a protein or a portion or modified version thereof, a secreted protein or a portion or modified version thereof, a transmembrane protein or a portion or modified version thereof, an intracellular binding domain or a portion or modified version thereof, and an antibody or a portion or modified version thereof;
[1237] ff) the first and second dimerizing polypeptides are selected from a collectrin-like domain (CLD) and a collectrin domain (CD), preferably a CLD, and the third domain is other than any one of: a binding domain of a protein or a portion or modified version thereof, a secreted protein or a portion or modified version thereof, a transmembrane protein or a portion or modified version thereof, an intracellular binding domain or a portion or modified version thereof, and an antibody or a portion or modified version thereof;
[1238] gg) the first and second dimerizing polypeptides are selected from a collectrin-like domain (CLD) and a collectrin domain (CD), preferably a CLD, and the fourth domain is other than any one of: a binding domain of a protein or a portion or modified version thereof, a secreted protein or a portion or modified version thereof, a transmembrane protein or a portion or modified version thereof, an intracellular binding domain or a portion or modified version thereof, and an antibody or a portion or modified version thereof;
[1239] hh) the first and second dimerizing polypeptides are selected from a collectrin-like domain (CLD) and a collectrin domain (CD), preferably a CLD, and the fifth domain, if present, is other than any one of: a binding domain of a protein or a portion or modified version thereof, a secreted protein or a portion or modified version thereof, a transmembrane protein or a portion or modified version thereof, an intracellular binding domain or a portion or modified version thereof, and an antibody or a portion or modified version thereof;
[1240] ii) the first and second dimerizing polypeptides are selected from a collectrin-like domain (CLD) and a collectrin domain (CD), preferably a CLD, and the sixth domain, if present, is other than any one of: a binding domain of a protein or a portion or modified version thereof, a secreted protein or a portion or modified version thereof, a transmembrane protein or a portion or modified version thereof, an intracellular binding domain or a portion or modified version thereof, and an antibody or a portion or modified version thereof;
[1241] jj) the first and second dimerizing polypeptides are selected from a collectrin-like domain (CLD) and a collectrin domain (CD), preferably a CLD, and the seventh domain, if present, is other than any one of: a binding domain of a protein or a portion or modified version thereof, a secreted protein or a portion or modified version thereof, a transmembrane protein or a portion or modified version thereof, an intracellular binding domain or a portion or modified version thereof, and an antibody or a portion or modified version thereof;
[1242] kk) the first and second dimerizing polypeptides are selected from a collectrin-like domain (CLD) and a collectrin domain (CD), preferably a CLD, and the eighth domain, if present, is other than any one of: a binding domain of a protein or a portion or modified version thereof, a secreted protein or a portion or modified version thereof, a transmembrane protein or a portion or modified version thereof, an intracellular binding domain or a portion or modified version thereof, and an antibody or a portion or modified version thereof;
[1243] ll) the first, second, third, and/or fourth domains are a CD3 zeta chain intracellular binding domain, a CD28 intracellular binding domain, or a 4-1BB intracellular binding domain, a CD3 epsilon chain intracellular binding domain an ICOS intracellular binding domain, an OX40 intracellular binding domain, or a 4-1BB intracellular binding domain;
[1244] mm) the seventh and/or eighth domains, if present, are a CD3 zeta chain intracellular binding domain, a CD28 intracellular binding domain, or a 4-1BB intracellular binding domain, a CD3 epsilon chain intracellular binding domain an ICOS intracellular binding domain, an OX40 intracellular binding domain, or a 4-1BB intracellular binding domain;
[1245] nn) the first, second, third, and fourth domains are other than an ACE2 peptidase domain;
[1246] oo) the first, second, third, and fourth domains are other than an ACE2 peptidase domain and the first and second dimerizing polypeptides are each a collectrin-like domain (CLD);
[1247] pp) the first, second, third, and fourth domains are other than an ACE2 peptidase domain or ACE2 transmembrane domain;
[1248] qq) the first, second, third, and fourth domains are other than an ACE2 peptidase domain or ACE2 transmembrane domain and the first and second dimerizing polypeptides are each a collectrin-like domain (CLD);
[1249] rr) the tetrahedral molecule comprises a first, second, third, fourth, seventh and eighth domain, the first domain and the second domain are joined to each other by a non-covalent linkage between a first dimerizing polypeptide attached by a peptide bond or via a peptide linker to the first N-terminus of the first domain, and a second dimerizing polypeptide attached by a peptide bond or via a peptide linker to the first N-terminus of the second domain, and
   [1250] i) the third and fourth domains are each a binding domain of a protein or a portion or modified version thereof, preferably a binding domain of a secreted protein, an extracellular domain of a transmembrane protein, or an antibody or portion thereof, more preferably a single-chain moiety of an antibody, more preferably a single-chain or single domain antibody molecules, more preferably an scFv domain;
   [1251] ii) the first and second domains are each a transmembrane domain, preferably a transmembrane domain of TNFRSF1, TNFRSF1B, LTBR, CD40, FasR, DCR3, CD27, CD30, DR4, DR5, DCR2, RANK, TWEAK-R, TACI, BAF-R, HVEM, BCMA, GITR, TROY, DR3, or XEDAR, more preferably a transmembrane domain of ACE2, Collectrin, CD8a, CD8b, CD3 zeta, CD3 epsilon, CD28, ICOS, OX40 or 4-1BB; and
   [1252] iii) the seventh and eighth domains are each an intracellular binding domain, preferably an intracellular binding domain of CD3 zeta chain, CD3 epsilon chain, CD28, ICOS, OX40, or 4-1BB;
[1253] ss) the tetrahedral molecule comprises a first, second, third, fourth, seventh and eighth domain, the first domain and the second domain are joined to each other by a non-covalent linkage between a first dimerizing polypeptide attached by a peptide bond or via a peptide linker to the first N-terminus of the first domain, and a second dimerizing polypeptide attached by a peptide bond or via a peptide linker to the first N-terminus of the second domain, the third and fourth domains are each an scFv domain, the first and second domains are each a transmembrane domain of ACE2, Collectrin, CD8a, CD8b, CD3 zeta, CD3 epsilon, CD28, ICOS, OX40 or 4-1BB, and the seventh and eighth domains are each an intracellular binding domain of CD3 zeta chain, CD3 epsilon chain, CD28, ICOS, OX40, or 4-1BB;
[1254] tt) the tetrahedral molecule comprises a first, second, third, fourth, ninth and tenth domain, the first domain and the second domain are joined to each other by a non-covalent linkage between a first dimerizing polypeptide attached by a peptide bond or via a peptide linker to the first N-terminus of the first domain, and a second dimerizing polypeptide attached by a peptide bond or via a peptide linker to the first N-terminus of the second domain, and
   [1255] i) the ninth and tenth domains are each a binding domain of a protein or a portion or modified version thereof, preferably a binding domain of a secreted protein, an extracellular domain of a transmembrane protein, or an antibody or portion thereof, more preferably a single-chain moiety of an antibody, more preferably a single-chain or single domain antibody molecules, more preferably an scFv domain;
   [1256] ii) the third and fourth domains each a transmembrane domain, preferably a transmembrane domain of TNFRSF1, TNFRSF1B, LTBR, CD40, FasR, DCR3, CD27, CD30, DR4, DR5, DCR2, RANK, TWEAK-R, TACI, BAF-R, HVEM, BCMA, GITR, TROY, DR3, or XEDAR, more preferably a transmembrane domain of ACE2, Collectrin, CD8a, CD8b, CD3 zeta, CD3 epsilon, CD28, ICOS, OX40 or 4-1BB; and
   [1257] iii) the first and second domains are each an intracellular binding domain, preferably an intracellular binding domain of CD3 zeta chain, CD3 epsilon chain, CD28, ICOS, OX40, or 4-1BB;
[1258] uu) the tetrahedral molecule comprises a first, second, third, fourth, ninth and tenth domain, the first domain and the second domain are joined to each other by a non-covalent linkage between a first dimerizing polypeptide attached by a peptide bond or via a peptide linker to the first N-terminus of the first domain, and a second dimerizing polypeptide attached by a peptide bond or via a peptide linker to the first N-terminus of the second domain, the ninth and tenth domains are each an scFv domain, the third and fourth domains each a transmembrane domain of ACE2, Collectrin, CD8a, CD8b, CD3 zeta, CD3 epsilon, CD28, ICOS, OX40 or 4-1BB, and the first and second domains are each an intracellular binding domain of CD3 zeta chain, CD3 epsilon chain, CD28, ICOS, OX40, or 4-1BB;
[1259] vv) the tetrahedral molecule comprises a first, second, third, fourth, seventh and eighth domain, the first domain and the second domain are joined to each other by a non-covalent linkage between a first dimerizing polypeptide attached by a peptide bond or via a peptide linker to the first N-terminus of the first domain, and a second dimerizing polypeptide attached by a peptide bond or via a peptide linker to the first N-terminus of the second domain, and
   [1260] i) the third and fourth domains are each a binding domain of a protein or a portion or modified version thereof, preferably a binding domain of a secreted protein, an extracellular domain of a transmembrane protein, or an antibody or portion thereof, more preferably a single-chain moiety of an antibody, more preferably a single-chain or single domain antibody molecules, more preferably an scFv domain;
   [1261] ii) the first and second domains are each a transmembrane domain, preferably a transmembrane domain of TNFRSF1, TNFRSF1B, LTBR, CD40, FasR, DCR3, CD27, CD30, DR4, DR5, DCR2, RANK, TWEAK-R, TACI, BAF-R, HVEM, BCMA, GITR, TROY, DR3, or XEDAR, more preferably a transmembrane domain of ACE2, Collectrin, CD8a, CD8b, CD3 zeta, CD3 epsilon, CD28, ICOS, OX40 or 4-1BB; and
   [1262] iii) the seventh and eighth domains are each an antigen or neo-antigen;
[1263] ww) the tetrahedral molecule comprises a first, second, third, fourth, seventh and eighth domain, the first domain and the second domain are joined to each other by a non-covalent linkage between a first dimerizing polypeptide attached by a peptide bond or via a peptide linker to the first N-terminus of the first domain, and a second dimerizing polypeptide attached by a peptide bond or via a peptide linker to the first N-terminus of the second domain, the third and fourth domains are each an scFv domain, the first and second domains are each a transmembrane domain of ACE2, Collectrin, CD8a, CD8b, CD3 zeta, CD3 epsilon, CD28, ICOS, OX40 or 4-1BB, and the seventh and eighth domains are each an antigen or neo-antigen;
[1264] xx) the tetrahedral molecule comprises a first, second, third, fourth, ninth and tenth domain, the first domain and the second domain are joined to each other by a non-covalent linkage between a first dimerizing polypeptide attached by a peptide bond or via a peptide linker to the first N-terminus of the first domain, and a second dimerizing polypeptide attached by a peptide bond or via a peptide linker to the first N-terminus of the second domain, and
   [1265] i) the ninth and tenth domains are each a binding domain of a protein or a portion or modified version thereof, preferably a binding domain of a secreted protein, an extracellular domain of a transmembrane protein, or an antibody or portion thereof, more preferably a single-chain moiety of an antibody, more preferably a single-chain or single domain antibody molecules, more preferably an scFv domain;
   [1266] ii) the third and fourth domains each a transmembrane domain, preferably a transmembrane domain of TNFRSF1, TNFRSF1B, LTBR, CD40, FasR, DCR3, CD27, CD30, DR4, DR5, DCR2, RANK, TWEAK-R, TACI, BAF-R, HVEM, BCMA, GITR, TROY, DR3, or XEDAR, more preferably a transmembrane domain of ACE2, Collectrin, CD8a, CD8b, CD3 zeta, CD3 epsilon, CD28, ICOS, OX40 or 4-1BB; and
   [1267] iii) the first and second domains are each an antigen or neo-antigen;
[1268] yy) the tetrahedral molecule comprises a first, second, third, fourth, ninth and tenth domain, the first domain and the second domain are joined to each other by a non-covalent linkage between a first dimerizing polypeptide attached by a peptide bond or via a peptide linker to the first N-terminus of the first domain, and a second dimerizing polypeptide attached by a peptide bond or via a peptide linker to the first N-terminus of the second domain, the ninth and tenth domains are each an scFv domain, the third and fourth domains each a transmembrane domain of ACE2, Collectrin, CD8a, CD8b, CD3 zeta, CD3 epsilon, CD28, ICOS, OX40 or 4-1BB, and the first and second domains are each an antigen or neo-antigen.

[1269] In embodiments of the invention that comprise transmembrane domains as the first and second domains, preferably the tetrahedral molecule comprises first and second dimerizing polypeptides that are naturally associated with said transmembrane domains. For example, if the first and second domains are transmembrane domains of ACE2, the first and second dimerizing polypeptides are collectrin-like domain (CLD). Thus, in a preferred embodiment of any one of the above embodiments, the first and second domains are transmembrane domains of ACE2 and the first and second dimerizing polypeptides are collectrin-like domain (CLD).

[1270] In embodiments of the invention, in particular in any one of the embodiments of the preceding six paragraphs, the non-peptidyl linkage is a non-covalent linkage between a first dimerizing polypeptide attached to the first domain and a second dimerizing polypeptide attached to the second domain.

[1271] In embodiments of the invention, in particular in any one of the embodiments of the preceding seven paragraphs, the first and second dimerizing polypeptides are selected from the group consisting of:
[1272] a) dimerizing domains of an extracellular protein dimer, and
[1273] b) dimerizing domains of an intracellular protein dimer.

[1274] In embodiments of the invention, in particular in any one of the embodiments of the preceding eight paragraphs, the first and second dimerizing polypeptides are selected from the group consisting of:
[1275] a) a leucine zipper domain,
[1276] b) a collectrin-like domain (CLD),
[1277] c) a collectrin domain (CD),
[1278] d) a CD8 alpha extracellular domain, and
[1279] e) a CD8 beta extracellular domain.

[1280] In preferred embodiments of the tetrahedral molecule of the invention, in particular in any one of the embodiments of the preceding nine paragraphs, the first and second dimerizing polypeptides are selected from a collectrin-like domain (CLD) and a collectrin domain (CD), preferably a collectrin-like domain (CLD).

[1281] In embodiments of the invention
[1282] a) the first dimerizing polypeptide is the same as the second dimerizing polypeptide, and
[1283] b) the dimerizing polypeptides form a homodimer.

[1284] In embodiments of the invention:
[1285] a) the first dimerizing polypeptide is different than the second dimerizing polypeptide, and
[1286] b) the first and second dimerizing polypeptides form a heterodimer.

[1287] In embodiments of the invention wherein the first and second dimerizing polypeptides form a heterodimer:
[1288] a) the first and second dimerizing polypeptides are selected from the group consisting of:
   [1289] i) a T cell receptor alpha and T cell receptor beta extracellular domain,
   [1290] ii) a T cell receptor gamma and T cell receptor extracellular domain,
   [1291] iii) an MHC class I alpha extracellular domain and beta-2 microglobulin
   [1292] iv) an MHC class II alpha and MHC class II beta extracellular domain, and
   [1293] v) a CD8 alpha and CD8 beta extracellular domain,
[1294] b) the first dimerizing polypeptide is different from the second dimerizing polypeptide, and
[1295] c) the first and second dimerizing polypeptides form a heterodimer.

[1296] In some of these embodiments of the invention, the first and second dimerizing polypeptides, when in the presence of each other, form less than 30%, 20%, 10%, 5%, 4%, 3%, 2%, or 1% homodimers.

### Dimeric Fusion Proteins

[1297] This invention also provides a non-naturally occurring fusion protein dimer comprising a dimer of a first dimerizing polypeptide and a second dimerizing polypeptide, wherein:
[1298] a) the first dimerizing polypeptide is attached by a peptide bond or via a peptide linker at its N-terminus or C-terminus to a first domain,
[1299] b) the second dimerizing polypeptide is optionally attached by a peptide bond or via a peptide linker at its N-terminus or C-terminus to a second domain,
[1300] c) the first and second dimerizing polypeptides are selected from the group consisting of:
   [1301] i) a collectrin-like domain (CLD), and
   [1302] ii) a collectrin domain (CD),
[1303] d) the first dimerizing polypeptide is optionally attached by a peptide bond or via a peptide linker at its remaining free N-terminus or C-terminus to a third domain, and
[1304] e) the second dimerizing polypeptide is optionally attached by a peptide bond or via a peptide linker at its remaining free N-terminus or C-terminus to a fourth domain.

[1305] In any one of the above embodiments, the first and second dimerizing polypeptides are collectrin-like domain (CLD).

[1306] In embodiments of the invention, the tetrahedral molecule or non-naturally occurring fusion protein dimer:
[1307] a) does not comprise
   [1308] i) an ACE2 PD at the N-terminal side of either dimerizing polypeptide; and/or
   [1309] ii) an ACE2 transmembrane domain and/or collectrin transmembrane domain at the C-terminal side of either dimerizing polypeptide; or
[1310] b) comprises
   [1311] i) an ACE2 PD at the N-terminal side of either dimerizing polypeptide; and/or
   [1312] ii) an ACE2 transmembrane domain and/or collectrin transmembrane domain at the C-terminal side of either dimerizing polypeptide.

[1313] In embodiments of the invention wherein the first and second dimerizing polypeptides form a heterodimer and the dimerizing polypeptides are collectrin-like domain (CLD), the CLD comprises substitutions that disrupt homodimer formation in the CLD dimerizing polypeptide, preferably wherein the substitutions are at Arg652, Arg710, Tyr641, Tyr633, Asn638, Glu639, Gln653, Asn636, Ser709, Asp713, and/or Arg716, more preferably wherein Tyr641 and Tyr633 are substituted with positively charged amino acids lysine, arginine or histidine and Arg652 and Arg710 are substituted with the negatively charged amino acids glutamic acid or aspartic acid or the positively amino acid lysine.

[1314] In embodiments of the invention wherein the first and second dimerizing polypeptides form a heterodimer and the dimerizing polypeptides are collectrin, the collectrin dimerizing polypeptide comprises substitutions that disrupt homodimer formation in the collectrin dimerizing polypeptide, preferably wherein the substitutions are at Arg59, Arg111, Tyr48, and/or Tyr40, more preferably wherein Tyr48 and/or Tyr40 are substituted with positively charged amino acids lysine, arginine or histidine and Arg59 and/or Arg111 are substituted with the negatively charged amino acids glutamic acid or aspartic acid or the positively charge amino acid lysine.

[1315] In embodiments wherein the dimerizing polypeptides are collectrin-like domain (CLD), and, the CLD comprises substitutions that promote heterodimer formation in the CLD dimerizing polypeptide, and preferably:
[1316] a) Tyr633 on either of the first or second CLD dimerizing polypeptide is substituted, preferably with either a positively charge or negatively charged amino acid;
[1317] b) Tyr641 on either of the first or second CLD dimerizing polypeptide is substituted, preferably with either a positively charge or negatively charged amino acid;
[1318] c) Arg652 on either of the first or second CLD dimerizing polypeptide is substituted, preferably with either a positively charge or negatively charged amino acid;
[1319] d) Arg710 on either of the first or second CLD dimerizing polypeptide is substituted, preferably with either a positively charge or negatively charged amino acid;
[1320] e) Ser709 on either of the first or second CLD dimerizing polypeptide is substituted, preferably with either a positively charge or negatively charged amino acid; and/or
[1321] f) Asp713 on either of the first or second CLD dimerizing polypeptide is substituted, preferably with either a positively charge or negatively charged amino acid.

[1322] In embodiments wherein the dimerizing polypeptides are collectrin and the collectrin dimerizing polypeptide comprises substitutions that promote heterodimer formation in the collectrin dimerizing polypeptide, preferably
[1323] a) Tyr40 on either the first or second collectrin dimerizing polypeptide is substituted, preferably with either a positively charge or negatively charged amino acid;
[1324] b) Tyr48 on either the first or second collectrin dimerizing polypeptide is substituted, preferably with either a positively charge or negatively charged amino acid;
[1325] c) Arg59 on either the first or second collectrin dimerizing polypeptide is substituted, preferably with either a positively charge or negatively charged amino acid; and/or
[1326] d) Arg111 on either the first or second collectrin dimerizing polypeptide is substituted, preferably with either a positively charge or negatively charged amino acid.

[1327] In embodiments wherein the dimerizing polypeptides are collectrin-like domain (CLD), and, the CLD comprises substitutions that promote heterodimer formation in the CLD dimerizing polypeptide, and preferably:
[1328] a) Tyr633 on the first CLD dimerizing polypeptide is substituted with either a positively charge or negatively charged amino acid, and Arg710 on the second CLD dimerizing polypeptide is substituted with the other of a positively charge or negatively charged amino acid;
[1329] b) Tyr633 on the second CLD dimerizing polypeptide is substituted with either a positively charge or negatively charged amino acid, and Arg710 on the first CLD dimerizing polypeptide is substituted with the other of a positively charge or negatively charged amino acid;
[1330] c) Tyr641 on the first CLD dimerizing polypeptide is substituted with either a positively charge or negatively charged amino acid, and Arg652 on the second CLD dimerizing polypeptide is substituted with the other of a positively charge or negatively charged amino acid;
[1331] d) Tyr641 on the second CLD dimerizing polypeptide is substituted with either a positively charge or negatively charged amino acid, and Arg652 on the first CLD dimerizing polypeptide is substituted with the other of a positively charge or negatively charged amino acid;
[1332] e) Arg652 on the first CLD dimerizing polypeptide is substituted with either a positively charge or negatively charged amino acid, and Asn638 on the second CLD dimerizing polypeptide is substituted with the other of a positively charge or negatively charged amino acid;
[1333] f) Arg652 on the second CLD dimerizing polypeptide is substituted with either a positively charge or negatively charged amino acid, and Arg638 on the first CLD dimerizing polypeptide is substituted with the other of a positively charge or negatively charged amino acid;
[1334] g) Arg710 on the first CLD dimerizing polypeptide is substituted with either a positively charge or negatively charged amino acid, and Glu639 on the second CLD dimerizing polypeptide is substituted with the other of a positively charge or negatively charged amino acid;
[1335] h) Arg710 on the second CLD dimerizing polypeptide is substituted with either a positively charge or negatively charged amino acid, and Glu639 on the first CLD dimerizing polypeptide is substituted with the other of a positively charge or negatively charged amino acid;
[1336] i) Ser709 on the first CLD dimerizing polypeptide is substituted with either a positively charge or negatively charged amino acid, and Arg716 on the second CLD dimerizing polypeptide is substituted with the other of a positively charge or negatively charged amino acid;
[1337] j) Ser709 on the second CLD dimerizing polypeptide is substituted with either a positively charge or negatively charged amino acid, and Arg716 on the first CLD dimerizing polypeptide is substituted with the other of a positively charge or negatively charged amino acid;
[1338] k) Asp713 on the first CLD dimerizing polypeptide is substituted with either a positively charge or negatively charged amino acid, and Arg716 on the second CLD dimerizing polypeptide is substituted with the other of a positively charge or negatively charged amino acid; and/or
[1339] l) Asp713 on the second CLD dimerizing polypeptide is substituted with either a positively charge or negatively charged amino acid, and Arg716 on the first CLD dimerizing polypeptide is substituted with the other of a positively charge or negatively charged amino acid.

[1340] In embodiments wherein the dimerizing polypeptides are collectrin and the collectrin dimerizing polypeptide comprises substitutions that promote heterodimer formation in the collectrin dimerizing polypeptide, preferably
[1341] a) Tyr40 on the first collectrin dimerizing polypeptide is substituted with either a positively charge or negatively charged amino acid, and Arg111 on the second collectrin dimerizing polypeptide is substituted with the other of a positively charge or negatively charged amino acid;
[1342] b) Tyr40 on the second collectrin dimerizing polypeptide is substituted with either a positively charge or negatively charged amino acid, and Arg111 on the first collectrin dimerizing polypeptide is substituted with the other of a positively charge or negatively charged amino acid;
[1343] c) Tyr48 on the first collectrin dimerizing polypeptide is substituted with either a positively charge or negatively charged amino acid, and Arg59 on the second collectrin dimerizing polypeptide is substituted with the other of a positively charge or negatively charged amino acid; and/or
[1344] d) Tyr48 on the second collectrin dimerizing polypeptide is substituted with either a positively charge or negatively charged amino acid, and Arg59 on the first collectrin dimerizing polypeptide is substituted with the other of a positively charge or negatively charged amino acid.

### Octahedral Antibodies

[1345] This invention also provides an octahedral antibody comprising a first, second, third, fourth, fifth and sixth domain, wherein:
[1346] a) each of the first, second and third domains are selected from the group consisting of a Fab domain and an Fc domain,
[1347] b) each of the first, second and third domains comprise:
   [1348] i) a first polypeptide chain comprising a first N-terminus of the domain, and
   [1349] ii) a second polypeptide chain comprising a second N-terminus of the domain,
[1350] c) the first N-terminus of the first domain, the first N-terminus of the second domain and the first N-terminus of the third domain are joined to each other by a non-peptidyl linkage wherein the non-peptidyl linkage is:
   [1351] i) a branched covalent linkage, or
   [1352] ii) a non-covalent linkage between
      [1353] (1) a first trimerizing polypeptide attached by a peptide bond or via a peptide linker to the first N-terminus of the first domain,
      [1354] (2) a second trimerizing polypeptide attached by a peptide bond or via a peptide linker to the first N-terminus of the second domain, and
      [1355] (3) a third trimerizing polypeptide attached by a peptide bond or via a peptide linker to the first N-terminus of the third domain, wherein the first, second, and third trimerizing polypeptides are not immunoglobulin polypeptides,
[1356] d) the fourth domain is attached at its C-terminus by a peptide bond or via a peptide linker to:
   [1357] i) the second N-terminus of the first domain, or
   [1358] ii) the N-terminus terminus of the first trimerizing polypeptide,
[1359] e) the fifth domain is attached at its C-terminus by a peptide bond or via a peptide linker to:
   [1360] i) the second N-terminus of the second domain, or
   [1361] ii) the N-terminus of the second trimerizing polypeptide, and
[1362] f) the sixth domain is attached at its C-terminus by a peptide bond or via a peptide linker to:
   [1363] i) the second N-terminus of the third domain, or
   [1364] ii) the N-terminus of the third trimerizing polypeptide.

[1365] In embodiments of the octahedral antibody of the invention, the non-peptidyl linkage is a non-covalent linkage between a first trimerizing polypeptide attached to the first N-terminus of the first domain, a second trimerizing polypeptide attached to the first N-terminus of the second domain, and a third trimerizing polypeptide attached to the first N-terminus of the third domain, wherein the first, second, and third trimerizing polypeptides are selected from the group consisting of TNF ligand superfamily members OX40L/TNFLSF4, CD40L/TNFLSF5, FASL/TNFLSF6, CD70L/TNFLSF7, CD30L/TNFLSF8, 4-1BBL/TNFLSF9, TRAIL/TNFLSF10, RANKL/TNFLSF11, TWEAK/TNFLSF12, APRIL/TNFLSF13, BAFF/TNFLSF13B, LIGHT/TNFLSF14, VEGI/TNFLSF15, GITRL/TNFLSF18, EctodyplasinATNFLSF19, TNF/TNFLSF2, lymphotoxin alpha/TNFLSF1, and lymphotoxin beta/TNFLSF3. In a preferred embodiment, the trimerizing polypeptides are selected from the group consisting of SEQ ID NOs: 787-790 (TNFSF1), SEQ ID NOs: 791-792 (TNFSF2), SEQ ID NOs: 793-795 (TNFSF3), SEQ ID NOs: 796-798 (TNFSF4), SEQ ID NOs: 799-802 (TNFSF5), SEQ ID NOs: 803-806, SEQ ID NOs: 807-809 (TNFSF7), SEQ ID NOs: 810-813 (TNFSF8), SEQ ID NOs: 814-816 (TNFSF9), SEQ ID NOs: 817-820 (TNFSF10), SEQ ID NOs: 821-822 (TNFSF11), SEQ ID NOs: 823-827 (TNFSF12), SEQ ID NOs: 828-831 (TNFSF13), SEQ ID NOs: 832-833 (TNFSF13B), SEQ ID NOs: 834-837 (TNFSF14), SEQ ID NOs: 838-841 (TNFSF15), and SEQ ID NOs: 842-843 (TNFSF18).

[1366] In embodiments of the invention, the octahedral antibody further comprises a seventh, eighth, and/or ninth domain, wherein:
[1367] a) the seventh domain is attached at its C-terminus by a peptide bond or via a peptide linker to the second N-terminus of the first domain,
[1368] b) the eighth domain is attached at its C-terminus by a peptide bond or via a peptide linker to the second N-terminus of the second domain, and/or
[1369] c) the ninth domain is attached at its C-terminus by a peptide bond or via a peptide linker to the second N-terminus of the third domain.

[1370] In embodiments of the invention, the octahedral antibody further comprises a tenth, eleventh, and/or twelfth domain, wherein:
[1371] a) the tenth domain is attached at its N-terminus by a peptide bond or via a peptide linker to:
   [1372] i) the first C-terminus of the first domain, or
   [1373] ii) the second C-terminus of the first domain,
[1374] b) the eleventh domain is attached at its N-terminus by a peptide bond or via a peptide linker to:
   [1375] i) the first C-terminus of the second domain, or
   [1376] ii) the second C-terminus of the second domain,
[1377] c) the twelfth domain is attached at its N-terminus by a peptide bond or via a peptide linker to:
   [1378] i) the first C-terminus of the third domain, or
   [1379] ii) the second C-terminus of the third domain.

[1380] In embodiments, the first, second, and third domains of octahedral antibodies of the invention may be any of the domains described herein as the first and second domains of a tetrahedral antibody of the invention. In embodiments, the fourth, fifth and sixth domains of octahedral antibodies of the invention may be any of the domains described herein as the third and fourth domains of a tetrahedral antibody of the invention. In embodiments, the seventh, eighth, and ninth domains of octahedral antibodies of the invention may be any of the domains described herein as the fifth and sixth domains of a tetrahedral antibody of the invention. In embodiments, the tenth, eleventh and twelfth domains of octahedral antibodies of the invention may be any of the domains described herein as the seventh and eighth domains of a tetrahedral antibody of the invention. Further, all such domains may comprise any of the features (such as mutations) described with respect to domains of tetrahedral antibodies of the invention.

### Octahedral Molecules

[1381] This invention also provides an octahedral molecule comprising a first, second, third, fourth, fifth and sixth domain, wherein:
[1382] a) at least one of the first, second and third domains are not Fab or Fc domains, and each of the first, second, third, fourth, fifth, and sixth domains independently comprise:
   [1383] i) a first polypeptide chain comprising a first N-terminus and a first C-terminus of the domain, and
   [1384] ii) optionally a second polypeptide chain comprising a second N-terminus and a second C-terminus of the domain,
[1385] b) the first N-terminus of the first domain, the first N-terminus of the second domain and the first N-terminus of the third domain are joined to each other by a non-covalent linkage between
   [1386] (1) a first trimerizing polypeptide attached by a peptide bond or via a peptide linker to the first N-terminus of the first domain,
   [1387] (2) a second trimerizing polypeptide attached by a peptide bond or via a peptide linker to the first N-terminus of the second domain, and
   [1388] (3) a third trimerizing polypeptide attached by a peptide bond or via a peptide linker to the first N-terminus of the third domain, wherein the first, second, and third trimerizing polypeptides are not immunoglobulin polypeptides,
[1389] c) the fourth domain is attached at its first C-terminus by a peptide bond or via a peptide linker to:
   [1390] i) the N-terminus terminus of the first trimerizing polypeptide, or
   [1391] ii) the second N-terminus of the first domain, if present,
[1392] d) the fifth domain is attached at its first C-terminus by a peptide bond or via a peptide linker to:
   [1393] i) the N-terminus of the second trimerizing polypeptide, or
   [1394] ii) the second N-terminus of the second domain, if present, and
[1395] e) the sixth domain is attached at its first C-terminus by a peptide bond or via a peptide linker to:
   [1396] i) the N-terminus of the third trimerizing polypeptide, or
   [1397] ii) the second N-terminus of the third domain, if present.

[1398] In embodiments of the octahedral molecule of the invention, in particular in any one of the embodiments of the preceding paragraph, the first, second, and third trimerizing polypeptides are selected from the group consisting of TNF ligand superfamily members OX40L/TNFLSF4, CD40L/TNFLSF5, FASL/TNFLSF6, CD70L/TNFLSF7, CD30L/TNFLSF8, 4-1BBL/TNFLSF9, TRAIL/TNFLSF10, RANKL/TNFLSF11, TWEAK/TNFLSF12, APRIL/TNFLSF13, BAFF/TNFLSF13B, LIGHT/TNFLSF14, VEGI/TNFLSF15, GITRL/TNFLSF18, EctodyplasinATNFLSF19, TNF/TNFLSF2, lymphotoxin alpha/TNFLSF1, and lymphotoxin beta/TNFLSF3. In a preferred embodiment, the trimerizing polypeptides are selected from the group consisting of SEQ ID NOs: 787-790 (TNFSF1), SEQ ID NOs: 791-792 (TNFSF2), SEQ ID NOs: 793-795 (TNFSF3), SEQ ID NOs: 796-798 (TNFSF4), SEQ ID NOs: 799-802 (TNFSF5), SEQ ID NOs: 803-806, SEQ ID NOs: 807-809 (TNFSF7), SEQ ID NOs: 810-813 (TNFSF8), SEQ ID NOs: 814-816 (TNFSF9), SEQ ID NOs: 817-820 (TNFSF10), SEQ ID NOs: 821-822 (TNFSF11), SEQ ID NOs: 823-827 (TNFSF12), SEQ ID NOs: 828-831 (TNFSF13), SEQ ID NOs: 832-833 (TNFSF13B), SEQ ID NOs: 834-837 (TNFSF14), SEQ ID NOs: 838-841 (TNFSF15), and SEQ ID NOs: 842-843 (TNFSF18)

[1399] In embodiments of the invention, in particular in any one of the embodiments of the preceding two paragraphs, the octahedral molecule further comprises a seventh, eighth, and/or ninth domain, wherein:
[1400] a) the seventh domain is attached at its C-terminus by a peptide bond or via a peptide linker to the second N-terminus of the first domain, if present,
[1401] b) the eighth domain is attached at its C-terminus by a peptide bond or via a peptide linker to the second N-terminus of the second domain, if present, and/or
[1402] c) the ninth domain is attached at its C-terminus by a peptide bond or via a peptide linker to the second N-terminus of the third domain, if present.

[1403] In embodiments of the invention, in particular in any one of the embodiments of the preceding three paragraphs, the octahedral molecule further comprises a tenth, eleventh, and/or twelfth domain, wherein:
[1404] a) the tenth domain is attached:
   [1405] i) at its N-terminus by a peptide bond or via a peptide linker to a C-terminus of the first domain, or
   [1406] ii) at its C-terminus by a peptide bond or via a peptide linker to an N-terminus of the fourth domain,
[1407] b) the eleventh domain is attached:
   [1408] i) at its N-terminus by a peptide bond or via a peptide linker to a first C-terminus of the second domain, or
   [1409] ii) at its C-terminus by a peptide bond or via a peptide linker to the N-terminus of the fifth domain,
[1410] c) the twelfth domain is attached:
   [1411] i) at its N-terminus by a peptide bond or via a peptide linker to a first C-terminus of the third domain, or
   [1412] ii) at its C-terminus by a peptide bond or via a peptide linker to the N-terminus of the sixth domain.

[1413] In embodiments, in particular in any one of the embodiments of the preceding four paragraphs, the first, second, and third domains of octahedral molecule of the invention may be any of the domains, preferably other than Fc or Fab domains, described herein as the first and second domains of a tetrahedral antibody or molecule of the invention. In embodiments, the fourth, fifth and sixth domains of octahedral molecules of the invention may be any of the domains described herein as the third and fourth domains of a tetrahedral antibody or molecule of the invention, preferably other than Fc or Fab domains. In embodiments, the seventh, eighth, and ninth domains of octahedral molecules of the invention may be any of the domains described herein as the fifth and sixth domains of a tetrahedral antibody or molecule of the invention. In embodiments, the tenth, eleventh and twelfth domains of octahedral molecules of the invention may be any of the domains described herein as the seventh and eighth domains of a tetrahedral antibody or molecule of the invention, or ninth and tenth domains of a tetrahedral molecule of the invention. Further, all such domains may comprise any of the features (such as mutations) described with respect to domains of tetrahedral antibodies of the invention.

[1414] In any one of the embodiments of the octahedral molecule of the invention, in particular in any one of the embodiments of the preceding five paragraphs, the first, second and third domains are each other than an Fc or Fab domain. In any one of the embodiments of the octahedral molecule of the invention, in particular in any one of the embodiments of the preceding five paragraphs, the first, second, third, fourth, fifth and sixth domains are each other than an Fc or Fab domain.

[1415] In any one of the embodiments of the octahedral molecule of the invention, in particular in any one of the embodiments of the preceding six paragraphs:
[1416] a) the first, second, and/or third domains are selected from the group consisting of (i) a secreted protein, and (ii) the extracellular domain of a transmembrane protein,
[1417] b) the fourth, fifth, and/or sixth domains are selected from the group consisting of (i) a secreted protein, and (ii) the extracellular domain of a transmembrane protein,
[1418] c) the first, second and third trimerizing polypeptides are selected from the group consisting of TNF ligand superfamily members OX40L/TNFLSF4, CD40L/TNFLSF5, FASL/TNFLSF6, CD70L/TNFLSF7, CD30L/TNFLSF8, 4-1BBL/TNFLSF9, TRAIL/TNFLSF10, RANKL/TNFLSF11, TWEAK/TNFLSF12, APRIL/TNFLSF13, BAFF/TNFLSF13B, LIGHT/TNFLSF14, VEGI/TNFLSF15, GITRL/TNFLSF18, EctodyplasinATNFLSF19, TNF/TNFLSF2, lymphotoxin alpha/TNFLSF1, and lymphotoxin beta/TNFLSF3;
[1419] d) the first, second and third trimerizing polypeptides are selected from the group consisting of SEQ ID NOs: 787-790 (TNFSF1), SEQ ID NOs: 791-792 (TNFSF2), SEQ ID NOs: 793-795 (TNFSF3), SEQ ID NOs: 796-798 (TNFSF4), SEQ ID NOs: 799-802 (TNFSF5), SEQ ID NOs: 803-806, SEQ ID NOs: 807-809 (TNFSF7), SEQ ID NOs: 810-813 (TNFSF8), SEQ ID NOs: 814-816 (TNFSF9), SEQ ID NOs: 817-820 (TNFSF10), SEQ ID NOs: 821-822 (TNFSF11), SEQ ID NOs: 823-827 (TNFSF12), SEQ ID NOs: 828-831 (TNFSF13), SEQ ID NOs: 832-833 (TNFSF13B), SEQ ID NOs: 834-837 (TNFSF14), SEQ ID NOs: 838-841 (TNFSF15), and SEQ ID NOs: 842-843 (TNFSF18);
[1420] e) the first, second and third trimerizing polypeptides are selected from the group consisting of TNF ligand superfamily members OX40L/TNFLSF4, CD40L/TNFLSF5, FASL/TNFLSF6, CD70L/TNFLSF7, CD30L/TNFLSF8, 4-1BBL/TNFLSF9, TRAIL/TNFLSF10, RANKL/TNFLSF11, TWEAK/TNFLSF12, APRIL/TNFLSF13, BAFF/TNFLSF13B, LIGHT/TNFLSF14, VEGI/TNFLSF15, GITRL/TNFLSF18, EctodyplasinATNFLSF19, TNF/TNFLSF2, lymphotoxin alpha/TNFLSF1, and lymphotoxin beta/TNFLSF3, and the first, second and/or third domain is a transmembrane domain that is not naturally associated with the selected first, second and third trimerizing polypeptides;
[1421] f) the first, second and third trimerizing polypeptides are selected from the group consisting of SEQ ID NOs: 787-790 (TNFSF1), SEQ ID NOs: 791-792 (TNFSF2), SEQ ID NOs: 793-795 (TNFSF3), SEQ ID NOs: 796-798 (TNFSF4), SEQ ID NOs: 799-802 (TNFSF5), SEQ ID NOs: 803-806, SEQ ID NOs: 807-809 (TNFSF7), SEQ ID NOs: 810-813 (TNFSF8), SEQ ID NOs: 814-816 (TNFSF9), SEQ ID NOs: 817-820 (TNFSF10), SEQ ID NOs: 821-822 (TNFSF11), SEQ ID NOs: 823-827 (TNFSF12), SEQ ID NOs: 828-831 (TNFSF13), SEQ ID NOs: 832-833 (TNFSF13B), SEQ ID NOs: 834-837 (TNFSF14), SEQ ID NOs: 838-841 (TNFSF15), and SEQ ID NOs: 842-843 (TNFSF18), and the first, second and/or third domain is a transmembrane domain that is not naturally associated with the selected first, second and third trimerizing polypeptides,
[1422] g) the first domain is selected from the group consisting of: a binding domain of a protein or a portion or modified version thereof, a secreted protein or a portion or modified version thereof, a transmembrane protein or a portion or modified version thereof, an intracellular binding domain or a portion or modified version thereof, and an antibody or a portion or modified version thereof;
[1423] h) the second domain is selected from the group consisting of: a binding domain of a protein or a portion or modified version thereof, a secreted protein or a portion or modified version thereof, a transmembrane protein or a portion or modified version thereof, an intracellular binding domain or a portion or modified version thereof, and an antibody or a portion or modified version thereof;
[1424] i) the third domain is selected from the group consisting of: a binding domain of a protein or a portion or modified version thereof, a secreted protein or a portion or modified version thereof, a transmembrane protein or a portion or modified version thereof, an intracellular binding domain or a portion or modified version thereof, and an antibody or a portion or modified version thereof;
[1425] j) the fourth domain is selected from the group consisting of: a binding domain of a protein or a portion or modified version thereof, a secreted protein or a portion or modified version thereof, a transmembrane protein or a portion or modified version thereof, an intracellular binding domain or a portion or modified version thereof, and an antibody or a portion or modified version thereof;
[1426] k) the fifth domain is selected from the group consisting of: a binding domain of a protein or a portion or modified version thereof, a secreted protein or a portion or modified version thereof, a transmembrane protein or a portion or modified version thereof, an intracellular binding domain or a portion or modified version thereof, and an antibody or a portion or modified version thereof;
[1427] l) the sixth domain is selected from the group consisting of: a binding domain of a protein or a portion or modified version thereof, a secreted protein or a portion or modified version thereof, a transmembrane protein or a portion or modified version thereof, an intracellular binding domain or a portion or modified version thereof, and an antibody or a portion or modified version thereof;
[1428] m) the seventh domain, if present, is selected from the group consisting of: a binding domain of a protein or a portion or modified version thereof, a secreted protein or a portion or modified version thereof, a transmembrane protein or a portion or modified version thereof, an intracellular binding domain or a portion or modified version thereof, and an antibody or a portion or modified version thereof;
[1429] n) the eighth domain, if present, is selected from the group consisting of: a binding domain of a protein or a portion or modified version thereof, a secreted protein or a portion or modified version thereof, a transmembrane protein or a portion or modified version thereof, an intracellular binding domain or a portion or modified version thereof, and an antibody or a portion or modified version thereof;
[1430] o) the ninth domain, if present, is selected from the group consisting of: a binding domain of a protein or a portion or modified version thereof, a secreted protein or a portion or modified version thereof, a transmembrane protein or a portion or modified version thereof, an intracellular binding domain or a portion or modified version thereof, and an antibody or a portion or modified version thereof;
[1431] p) the tenth domain, if present, is selected from the group consisting of: a binding domain of a protein or a portion or modified version thereof, a secreted protein or a portion or modified version thereof, a transmembrane protein or a portion or modified version thereof, an intracellular binding domain or a portion or modified version thereof, and an antibody or a portion or modified version thereof;
[1432] q) the eleventh domain, if present, is selected from the group consisting of: a binding domain of a protein or a portion or modified version thereof, a secreted protein or a portion or modified version thereof, a transmembrane protein or a portion or modified version thereof, an intracellular binding domain or a portion or modified version thereof, and an antibody or a portion or modified version thereof;
[1433] r) the twelfth domain, if present, is selected from the group consisting of: a binding domain of a protein or a portion or modified version thereof, a secreted protein or a portion or modified version thereof, a transmembrane protein or a portion or modified version thereof, an intracellular binding domain or a portion or modified version thereof, and an antibody or a portion or modified version thereof;
[1434] s) the first domain is other than any one of: a binding domain of a protein or a portion or modified version thereof, a secreted protein or a portion or modified version thereof, a transmembrane protein or a portion or modified version thereof, an intracellular binding domain or a portion or modified version thereof, and an antibody or a portion or modified version thereof;
[1435] t) the second domain is other than any one of: a binding domain of a protein or a portion or modified version thereof, a secreted protein or a portion or modified version thereof, a transmembrane protein or a portion or modified version thereof, an intracellular binding domain or a portion or modified version thereof, and an antibody or a portion or modified version thereof;
[1436] u) the third domain is other than any one of: a binding domain of a protein or a portion or modified version thereof, a secreted protein or a portion or modified version thereof, a transmembrane protein or a portion or modified version thereof, an intracellular binding domain or a portion or modified version thereof, and an antibody or a portion or modified version thereof;
[1437] v) the fourth domain is other than any one of: a binding domain of a protein or a portion or modified version thereof, a secreted protein or a portion or modified version thereof, a transmembrane protein or a portion or modified version thereof, an intracellular binding domain or a portion or modified version thereof, and an antibody or a portion or modified version thereof;
[1438] w) the fifth domain is other than any one of: a binding domain of a protein or a portion or modified version thereof, a secreted protein or a portion or modified version thereof, a transmembrane protein or a portion or modified version thereof, an intracellular binding domain or a portion or modified version thereof, and an antibody or a portion or modified version thereof;
[1439] x) the sixth domain is other than any one of: a binding domain of a protein or a portion or modified version thereof, a secreted protein or a portion or modified version thereof, a transmembrane protein or a portion or modified version thereof, an intracellular binding domain or a portion or modified version thereof, and an antibody or a portion or modified version thereof;
[1440] y) the seventh domain, if present, is other than any one of: a binding domain of a protein or a portion or modified version thereof, a secreted protein or a portion or modified version thereof, a transmembrane protein or a portion or modified version thereof, an intracellular binding domain or a portion or modified version thereof, and an antibody or a portion or modified version thereof;
[1441] z) the eighth domain, if present, is other than any one of: a binding domain of a protein or a portion or modified version thereof, a secreted protein or a portion or modified version thereof, a transmembrane protein or a portion or modified version thereof, an intracellular binding domain or a portion or modified version thereof, and an antibody or a portion or modified version thereof;
[1442] aa) the ninth domain, if present, is other than any one of: a binding domain of a protein or a portion or modified version thereof, a secreted protein or a portion or modified version thereof, a transmembrane protein or a portion or modified version thereof, an intracellular binding domain or a portion or modified version thereof, and an antibody or a portion or modified version thereof;
[1443] bb) the tenth domain, if present, is other than any one of: a binding domain of a protein or a portion or modified version thereof, a secreted protein or a portion or modified version thereof, a transmembrane protein or a portion or modified version thereof, an intracellular binding domain or a portion or modified version thereof, and an antibody or a portion or modified version thereof;
[1444] cc) the eleventh domain, if present, is other than any one of: a binding domain of a protein or a portion or modified version thereof, a secreted protein or a portion or modified version thereof, a transmembrane protein or a portion or modified version thereof, an intracellular binding domain or a portion or modified version thereof, and an antibody or a portion or modified version thereof;
[1445] dd) the twelfth domain, if present, is other than any one of: a binding domain of a protein or a portion or modified version thereof, a secreted protein or a portion or modified version thereof, a transmembrane protein or a portion or modified version thereof, an intracellular binding domain or a portion or modified version thereof, and an antibody or a portion or modified version thereof;
[1446] ee) the first, second, third, fourth, fifth, and/or sixth domains are a CD3 zeta chain intracellular binding domain, a CD28 intracellular binding domain, or a 4-1BB intracellular binding domain, a CD3 epsilon chain intracellular binding domain an ICOS intracellular binding domain, an OX40 intracellular binding domain, or a 4-1BB intracellular binding domain;
[1447] ff) the tenth, eleventh, and/or twelfth domains, if present, are a CD3 zeta chain intracellular binding domain, a CD28 intracellular binding domain, or a 4-1BB intracellular binding domain, a CD3 epsilon chain intracellular binding domain an ICOS intracellular binding domain, an OX40 intracellular binding domain, or a 4-1BB intracellular binding domain;
[1448] gg) the octahedral molecule comprises a first, second, third, fourth, fifth, sixth, tenth, eleventh and twelfth domain, and:
   [1449] i) the fourth, fifth and sixth domains are each a binding domain of a protein or a portion or modified version thereof, preferably a binding domain of a secreted protein, an extracellular domain of a transmembrane protein, or an antibody or portion thereof, more preferably a single-chain moiety of an antibody, more preferably a single-chain or single domain antibody molecules, more preferably an scFv domain;
   [1450] ii) the first, second, and third domains are each a transmembrane domain, preferably a transmembrane domain of TNFRSF1, TNFRSF1B, LTBR, CD40, FasR, DCR3, CD27, CD30, DR4, DR5, DCR2, RANK, TWEAK-R, TACI, BAF-R, HVEM, BCMA, GITR, TROY, DR3, or XEDAR, more preferably a transmembrane domain of ACE2, Collectrin, CD8a, CD8b, CD3 zeta, CD3 epsilon, CD28, ICOS, OX40, 4-1BB, TNFSF1, TNFSF2, TNFSF3, TNFSF4, TNFSF5, TNFSF6, TNFSF7, TNFSF8, TNFSF9, TNFSF10, TNFSF11, TNFSF12, TNFSF13, TNFSF13B, TNFSF14, TNFSF15 or TNFSF18; and
   [1451] iii) the tenth, eleventh and twelfth domains are each attached at an N-terminus to a C-terminus of the first, second and third domains, respectively, and each are an intracellular binding domain, preferably an intracellular binding domain of CD3 zeta chain, CD3 epsilon chain, CD28, ICOS, OX40, or 4-1BB;
[1452] hh) the octahedral molecule comprises a first, second, third, fourth, fifth, sixth, tenth, eleventh and twelfth domain, the fourth, fifth and sixth domains are each an scFv domain, the first, second, and third domains are each a transmembrane domain of ACE2, Collectrin, CD8a, CD8b, CD3 zeta, CD3 epsilon, CD28, ICOS, OX40 or 4-1BB, and the tenth, eleventh and twelfth domains are each attached at an N-terminus to a C-terminus of the first, second and third domains, respectively, and each are an intracellular binding domain of CD3 zeta chain, CD3 epsilon chain, CD28, ICOS, OX40, or 4-1BB;
[1453] ii) the octahedral molecule comprises a first, second, third, fourth, fifth, sixth, tenth, eleventh and twelfth domain, and:
   [1454] i) the tenth, eleventh and twelfth domains are each attached at a C-terminus to an N-terminus of the fourth, fifth, and sixth domains, respectively, and each are a binding domain of a protein or a portion or modified version thereof, preferably a binding domain of a secreted protein, an extracellular domain of a transmembrane protein, or an antibody or portion thereof, more preferably a single-chain moiety of an antibody, more preferably a single-chain or single domain antibody molecules, more preferably an scFv domain;
   [1455] ii) the fourth, fifth, and sixth are each a transmembrane domain, preferably a transmembrane domain of TNFSF1, TNFSF2, TNFSF3, TNFSF4, TNFSF5, TNFSF6, TNFSF7, TNFSF8, TNFSF9, TNFSF10, TNFSF11, TNFSF12, TNFSF13, TNFSF13B, TNFSF14, TNFSF15 or TNFSF18, more preferably a transmembrane domain of ACE2, Collectrin, CD8a, CD8b, CD3 zeta, CD3 epsilon, CD28, ICOS, OX40, 4-1BB, TNFRSF1, TNFRSF1B, LTBR, CD40, FasR, DCR3, CD27, CD30, DR4, DR5, DCR2, RANK, TWEAK-R, TACI, BAF-R, HVEM, BCMA, GITR, TROY, DR3, or XEDAR; and
   [1456] iii) the first, second, and third domains are each an intracellular binding domain, preferably an intracellular binding domain of CD3 zeta chain, CD3 epsilon chain, CD28, ICOS, OX40, or 4-1BB; or
[1457] jj) the octahedral molecule comprises a first, second, third, fourth, fifth, sixth, tenth, eleventh and twelfth domain, and the tenth, eleventh and twelfth domains are each attached at a C-terminus to an N-terminus of the fourth, fifth, and sixth domains, respectively, and each are an scFv domain, the fourth, fifth, and sixth are each a transmembrane domain of ACE2, Collectrin, CD8a, CD8b, CD3 zeta, CD3 epsilon, CD28, ICOS, OX40 or 4-1BB, and the first, second, and third domains are each an intracellular binding domain of CD3 zeta chain, CD3 epsilon chain, CD28, ICOS, OX40, or 4-1BB;
[1458] kk) the octahedral molecule comprises a first, second, third, fourth, fifth, sixth, tenth, eleventh and twelfth domain, and:
   [1459] i) the fourth, fifth and sixth domains are each a binding domain of a protein or a portion or modified version thereof, preferably a binding domain of a secreted protein, an extracellular domain of a transmembrane protein, or an antibody or portion thereof, more preferably a single-chain moiety of an antibody, more preferably a single-chain or single domain antibody molecules, more preferably an scFv domain;
   [1460] ii) the first, second, and third domains are each a transmembrane domain, preferably a transmembrane domain of TNFRSF1, TNFRSF1B, LTBR, CD40, FasR, DCR3, CD27, CD30, DR4, DR5, DCR2, RANK, TWEAK-R, TACI, BAF-R, HVEM, BCMA, GITR, TROY, DR3, or XEDAR, more preferably a transmembrane domain of ACE2, Collectrin, CD8a, CD8b, CD3 zeta, CD3 epsilon, CD28, ICOS, OX40, 4-1BB, TNFSF1, TNFSF2, TNFSF3, TNFSF4, TNFSF5, TNFSF6, TNFSF7, TNFSF8, TNFSF9, TNFSF10, TNFSF11, TNFSF12, TNFSF13, TNFSF13B, TNFSF14, TNFSF15 or TNFSF18; and
   [1461] iii) the tenth, eleventh and twelfth domains are each attached at an N-terminus to a C-terminus of the first, second and third domains, respectively, and each are an antigen or neo-antigen;
[1462] ll) the octahedral molecule comprises a first, second, third, fourth, fifth, sixth, tenth, eleventh and twelfth domain, the fourth, fifth and sixth domains are each an scFv domain, the first, second, and third domains are each a transmembrane domain of ACE2, Collectrin, CD8a, CD8b, CD3 zeta, CD3 epsilon, CD28, ICOS, OX40 or 4-1BB, and the tenth, eleventh and twelfth domains are each attached at an N-terminus to a C-terminus of the first, second and third domains, respectively, and each are an antigen or neo-antigen;
[1463] mm) the octahedral molecule comprises a first, second, third, fourth, fifth, sixth, tenth, eleventh and twelfth domain, and:
   [1464] i) the tenth, eleventh and twelfth domains are each attached at a C-terminus to an N-terminus of the fourth, fifth, and sixth domains, respectively, and each are a binding domain of a protein or a portion or modified version thereof, preferably a binding domain of a secreted protein, an extracellular domain of a transmembrane protein, or an antibody or portion thereof, more preferably a single-chain moiety of an antibody, more preferably a single-chain or single domain antibody molecules, more preferably an scFv domain;
   [1465] ii) the fourth, fifth, and sixth are each a transmembrane domain, preferably a transmembrane domain of TNFSF1, TNFSF2, TNFSF3, TNFSF4, TNFSF5, TNFSF6, TNFSF7, TNFSF8, TNFSF9, TNFSF10, TNFSF11, TNFSF12, TNFSF13, TNFSF13B, TNFSF14, TNFSF15 or TNFSF18, more preferably a transmembrane domain of ACE2, Collectrin, CD8a, CD8b, CD3 zeta, CD3 epsilon, CD28, ICOS, OX40, 4-1BB, TNFRSF1, TNFRSF1B, LTBR, CD40, FasR, DCR3, CD27, CD30, DR4, DR5, DCR2, RANK, TWEAK-R, TACI, BAF-R, HVEM, BCMA, GITR, TROY, DR3, or XEDAR; and
   [1466] iii) the first, second, and third domains are each an antigen or neo-antigen; or
[1467] nn) the octahedral molecule comprises a first, second, third, fourth, fifth, sixth, tenth, eleventh and twelfth domain, and the tenth, eleventh and twelfth domains are each attached at a C-terminus to an N-terminus of the fourth, fifth, and sixth domains, respectively, and each are an scFv domain, the fourth, fifth, and sixth are each a transmembrane domain of ACE2, Collectrin, CD8a, CD8b, CD3 zeta, CD3 epsilon, CD28, ICOS, OX40 or 4-1BB, and the first, second, and third domains are each an antigen or neo-antigen.

[1468] In embodiments of the invention that comprise transmembrane domains as the first, second, and third domains, preferably the octahedral molecule comprises first, second, and third trimerizing polypeptides that are naturally associated with said transmembrane domains. For example, if the first, second, and third domains are transmembrane domains of TNFSF1, the first, second, and third trimerizing polypeptides are extracellular domains of TNFSF1.

[1469] In preferred embodiments of any one of the embodiments of the octahedral molecule of the invention, in particular in any one of the embodiments of the preceding eight paragraphs the first, second, and third domains are each transmembrane domains. Alternatively, in preferred embodiments of any one of the embodiments of the octahedral molecule of the invention, in particular in any one of the embodiments of the preceding seven paragraphs the fourth, fifth, and sixth domains are each transmembrane domains.

### Tetrahedral and Octahedral Antibodies or Molecules

[1470] In embodiments of the invention:
[1471] a) one or more of the first, second, third, fourth, fifth, sixth, seventh, and eighth domains of the tetrahedral antibody or molecule, or one or more of the first, second, third, fourth, fifth, sixth domains, seventh, eighth, ninth, tenth, eleventh, and twelfth domains of the octahedral antibody or molecule are Fc domains, wherein the one or more Fc domains are independently selected from any of the Fc domains disclosed herein,
[1472] b) one or more of the first, second, third, fourth, fifth, sixth, seventh and eighth domains of the tetrahedral antibody or molecule, or one or more of the first, second, third, fourth, fifth, sixth domains, seventh, eighth, ninth, tenth, eleventh, and twelfth domains of the octahedral antibody or molecule are Fab domains, wherein the one or more Fab domains are independently selected from any of the Fab domains disclosed herein,
[1473] c) one or more of the third, fourth, fifth, sixth, seventh, and eighth domains of the tetrahedral antibody or molecule, or one or more of the fourth, fifth, sixth, seventh, eighth, ninth, tenth, eleventh, and twelfth domains of the octahedral antibody or molecule are a secreted protein, wherein the one or more secreted protein are independently selected from any of the secreted proteins disclosed herein,
[1474] d) one or more of the third, fourth, fifth, sixth, seventh, and eighth domains of the tetrahedral antibody or molecule, or one or more of the fourth, fifth, sixth, seventh, eighth, ninth, tenth, eleventh, and twelfth domains of the octahedral antibody or molecule are extracellular domains of a transmembrane protein, wherein the one or more extracellular domains of a transmembrane protein are independently selected from any of the extracellular domains of a transmembrane protein disclosed herein,
[1475] e) one or more of the third, fourth, fifth, sixth, seventh, and eighth domains of the tetrahedral or one or more of the fourth, fifth, sixth, seventh, eighth, ninth, tenth, eleventh, and twelfth domains of the octahedral antibody or molecule:
   [1476] i) comprise the structure of a compound that is a drug approved for treating a subject afflicted with a disease;
   [1477] ii) comprise the structure of an organic compound having a molecular weight less than 1000 Daltons, a DNA aptamer, an RNA aptamer, an oligonucleotide, or a protein that is biologically active;
   [1478] iii) comprise a primary or a secondary amine;
   [1479] iv) are aripiprazole or oseltamivir;
   [1480] v) are a respiratory drug, an antiasthmatic agent, an analgesic agent, an antidepressant, an antianginal agent, an antiarrhythmic agent, an antihypertensive agent, an antidiabetic agent, an antihistamine, an anti-infective agent, an antibiotic, an antiinflammatory agent, an antiparkinsonism drug, an antipsychotics, an antipyretic agent, an antiulcer agent, an attention deficit hyperactivity disorder (ADHD) drug, a central nervous system stimulant, a decongestant, or a psychostimulant;
   [1481] vi) are alprenolol, acebutolol, amidephrine, amineptine, amosulalol, amoxapine, amphetaminil, atenolol, atomoxetine, balofloxacin, bamethan, befunolol, benazepril, benfluorex, benzoctamine, betahistine, betaxolol, bevantolol, bifemelane, bisoprolol, brinzolamide, bufeniode, butethamine, camylofine, carazolol, carticaine, carvedilol, cephaeline, ciprofloxacin, cloZapine, clobenZorex, clorprenaline, cyclopentamine, delapril, demexiptiline, denopamine, desipramine, desloratadine, diclofenac, dimetofrine, dioxadrol, dobutamine, dopexamine, doripenem, dorzolamide, droprenilamine, duloxetine, eltopraZine, enalapril, enoxacin, epinephrine, ertapenem, esapraZole, esmolol, etoxadrol, fasudil, fendiline, fenethylline, fenfluramine, fenoldopam, fenoterol, fenproporex, flecamide, fluoxetine, formoterol, frovatriptan, gaboxadol, garenoxacin, gatifloxacin, grepafloxacin, hexoprenaline, imidapril, indalpine, indecainide, indeloxazine hydrochloride, isoxsuprine, ispronicline, labetalol, landiolol, lapatinib, levophacetoperane, lisinopril, lomefloxacin, lotrafiban, maprotiline, mecamylamine, mefloquine, mepindolol, meropenem, metapramine, metaproterenol, methoxyphenamine, dextrorotary methylphenidate, methylphenidate, metipranolol, metoprolol, mitoxantrone, mivazerol, moexipril, moprolol, moxifloxacin, nebivolol, nifenalol, nipradilol, norfloxacin, nortriptyline, nylidrin, olanZapine, oxamniquine, oxprenolol, oxyfedrine, paroxetine, perhexyline, phenmetrazine, phenylephrine, phenylpropylmethylamine, pholedrine, picilorex, pimethylline, pindolol, pipemidic acid, piridocaine, practolol, pradofloxacin, pramipexole, pramiverin, prenalterol, prenylamine, prilocalne, procaterol, pronethalol, propafenone, propranolol, propylhexedrine, protokylol, protriptyline, pseudoephedrine, reboxetine, rasagiline, (r)-rasagiline, repinotan, reproterol, rimiterol, ritodrine, safinamide, salbutamol/albuterol, salmeterol, sarizotan, sertraline, silodosin, sotalol, soterenol, sparfloxacin, spirapril, sulfinalol, synephrine, tamsulosin, tebanicline, tianeptine, tirofiban, tretoquinol, trimetazidine, troxipide, varenicline, vildagliptin, viloxazine, viquidil or xamoterol;
   [1482] vii) comprise a protein that is biologically active;
   [1483] viii) are biologically active such that it has target-binding activity;
   [1484] ix) are an independently-folding protein or a portion thereof;
   [1485] x) are a glycosylated protein;
   [1486] xi) comprise intra-chain disulfide bonds;
   [1487] xii) binds a cytokine;
   [1488] xiii) binds to a cytokine, wherein the cytokine is TNFα;
   [1489] xiv) comprise Atrial Natriuretic Peptide (ANP), Calcitonin, Corticotropin Releasing Hormone (CRH), Endothelin, Exenatide, Gastric Inhibitory Peptide (GIP), Glucagon-Like Peptide-1 (GLP-1), Glucagon-Like Peptide-2 (GLP-2), an analog of GLP-1 or GLP-2, Glucagon Vasoactive Intestinal Peptide (GVIP), Ghrelin, Peptide YY or Secretin, or a portion thereof;
   [1490] xv) comprise a stretch of consecutive amino acids in the sequence HGEGTFTSDVSSYLEEQAAKEFIAWLVKGRG (SEQ ID NO: 4657);
   [1491] xvi) comprise at least one stretch of consecutive amino acids which are identical to a stretch of consecutive amino acids present in the heavy chain of a Fab or a Fab′ of an antibody;
   [1492] xvii) comprise at least one at least one stretch of consecutive amino acids which are identical to a stretch of consecutive amino acids present in the light chain of a Fab or a Fab′ of an antibody;
   [1493] xviii) comprise at least one Fab or Fab′ of an antibody, or a portion of at least one Fab or Fab′;
   [1494] xix) comprise Fab-1 or Fab′1, or a portion thereof of an antibody;
   [1495] xx) comprise Fab-2 or Fab′2, or a portion thereof of an antibody;
   [1496] xxi) comprise two Fab or Fab′ hands of an antibody;
   [1497] xxii) comprise at least one stretch of consecutive amino acids which are identical to a stretch of consecutive amino acids present in a single chain antibody; or
   [1498] xxiii) comprise at least one stretch of consecutive amino acids which are identical to a stretch of consecutive amino acids present in a TNFα receptor.
[1499] f) the tetrahedral or octahedral antibody comprises a covalent linkage, wherein the covalent linkage is selected from any covalent linkage disclosed herein, or comprises any heterobifunctional crosslinker disclosed herein; and/or
[1500] g) the tetrahedral or octahedral antibody or molecule comprises one or more peptide linkers, wherein the one or more peptide linkers are independently selected from:
   [1501] i) a stretch of consecutive amino acids which is, or is present in, the sequence TSTSPTRSMAPGAVHLPQPVSTRSQHTQPTPEPSTAPS TSFLLPMGPSPPAEGSTGD (SEQ ID NO: 3227);
   [1502] ii) a stretch of consecutive amino acids which is, or is present in, the sequence GGGGAGGGGAGGGGAGGGGAGGGGAGGG (SEQ ID NO: 226), or
   [1503] iii) any peptide linker disclosed herein.

[1504] FIGS. 1-14 and 29A to 42 schematically describe various non-limiting examples of tetrahedral and octahedral antibodies of the invention. A description of the various types of domains of these tetrahedral and octahedral antibodies (as represented by ovals or groups of ovals in various colors and/or patterns) is provided in the Brief Description of the Drawings. Each figure represents an embodiment of the invention. Further, the Examples of this application provide specific tetrahedral antibodies, each of which is an embodiment of the invention. This invention contemplates producing variants of each of these specific tetrahedral antibodies. Specifically, where a tetrahedral antibody disclosed in the Examples includes a mutant or modified sequence, this invention specifically contemplates a variant which replaces the mutant or modified sequence with a wild type sequence. Conversely, this invention specifically contemplates modifying any of the tetrahedral antibody by replacing a wild-type sequence, if present, with a mutant counterpart sequence comprising any of the relevant mutations described herein.

[1505] This invention also provides a composition comprising at least 10%, at least 11%, at least 12%, at least 13%, at least 14%, at least 15%, at least 16%, at least 17%, at least 18%, at least 19%, at least 20%, at least 21%, at least 22%, at least 23%, at least 24%, at least 25%, at least 26%, at least 27%, at least 28%, at least 29%, at least 30%, at least 31%, at least 32%, at least 33%, at least 34%, at least 35%, at least 36%, at least 37%, at least 38%, at least 39%, at least 40%, at least 41%, at least 42%, at least 43%, at least 44%, at least 45%, at least 46%, at least 47%, at least 48%, at least 49%, at least 50%, at least 51%, at least 52%, at least 53%, at least 54%, at least 55%, at least 56%, at least 57%, at least 58%, at least 59%, at least 60%, at least 61%, at least 62%, at least 63%, at least 64%, at least 65%, at least 66%, at least 67%, at least 68%, at least 69%, at least 70%, at least 71%, at least 72%, at least 73%, at least 74%, at least 75%, at least 76%, at least 77%, at least 78%, at least 79%, at least 80%, at least 81%, at least 82%, at least 83%, at least 84%, at least 85%, at least 86%, at least 87%, at least 88%, at least 89%, at least 90%, at least 91%, at least 92%, at least 93%, at least 94%, at least 95%, at least 96%, at least 97%, at least 98%, or at least 99% of the tetrahedral or octahedral antibody of the invention, as a proportion (w/w) of peptide-containing molecules in the composition.

### Methods of Making

[1506] This invention also provides a method of making a tetrahedral antibody of the invention which comprises four domains, wherein the non-peptidyl linkage of the tetrahedral antibody is a non-covalent linkage between a first dimerizing polypeptide attached to the first N-terminus of first domain and a second dimerizing polypeptide attached to the first N-terminus of the second domain, the method comprising:
[1507] a) recombinantly expressing each of the following polypeptides in a host cell:
   [1508] i) a first polypeptide comprising, from its N-terminus to its C-terminus,
      [1509] (1) optionally, the third domain, which is attached at its C-terminus by a peptide bond or via a peptide linker to
      [1510] (2) the N-terminus of the first dimerizing polypeptide, which is attached at its C-terminus by a peptide bond or via a peptide linker to
      [1511] (3) the N-terminus of the first polypeptide chain of the first domain,
   [1512] ii) a second polypeptide comprising, from its N-terminus to its C-terminus,
      [1513] (1) optionally, the fourth domain, which is attached at its C-terminus by a peptide bond or via a peptide linker to
      [1514] (2) the N-terminus of the second dimerizing polypeptide, which is attached at its C-terminus by a peptide bond or via a peptide linker to
      [1515] (3) the N-terminus of the first polypeptide chain of the second domain,
   [1516] iii) a third polypeptide comprising, from its N-terminus to its C-terminus,
      [1517] (1) the third domain if not present on the first polypeptide, which is attached at its C-terminus by a peptide bond or via a peptide linker to
         [1518] a. the N-terminus of a third dimerizing polypeptide which is in turn attached at its C-terminus by a peptide bond or via a peptide linker to the N-terminus of the second polypeptide chain of the first domain, or
         [1519] b. the N-terminus of the second polypeptide chain of the first domain,
   [1520] iv) a fourth polypeptide comprising, from its N-terminus to its C-terminus,
      [1521] (1) the fourth domain if not present on the second polypeptide, which is attached at its C-terminus by a peptide bond or via a peptide linker to
         [1522] a. the N-terminus of a fourth dimerizing polypeptide which is in turn attached at its C-terminus by a peptide bond or via a peptide linker to the N-terminus of the second polypeptide chain of the first domain, or
         [1523] b. the N-terminus of the second polypeptide chain of the first domain, and
   [1524] v) optionally one or more additional polypeptides comprising a second polypeptide chain of the third and/or fourth domains, if present.

[1525] This invention also provides a method of making a tetrahedral antibody of the invention which comprises four domains, wherein the non-peptidyl linkage of the tetrahedral antibody is a non-covalent linkage between a first dimerizing polypeptide attached to the first C-terminus of first domain and a second dimerizing polypeptide attached to the first N-terminus of the second domain, the method comprising:
[1526] a) recombinantly expressing each of the following polypeptides in a host cell:
   [1527] i) a first polypeptide comprising, from its N-terminus to its C-terminus,
      [1528] (1) the first polypeptide chain of the first domain which is attached at its C-terminus by a peptide bond or via a peptide linker to
      [1529] (2) the N-terminus of the first dimerizing polypeptide, which is in turn optionally attached at its C-terminus by a peptide bond or via a peptide linker to
      [1530] (3) the N-terminus of the third domain,
   [1531] ii) a second polypeptide comprising, from its N-terminus to its C-terminus,
      [1532] (1) optionally, the fourth domain which is attached at its C-terminus by a peptide bond or via a peptide linker to
      [1533] (2) the N-terminus of the second dimerizing polypeptide which is attached at its C-terminus by a peptide bond or via a peptide linker to
      [1534] (3) the N-terminus of the first polypeptide chain of the second domain,
   [1535] iii) a third polypeptide comprising, from its N-terminus to its C-terminus,
      [1536] (1) the second polypeptide chain of the first domain, which is attached at its C-terminus by a peptide bond or via a peptide linker to
         [1537] a. the N-terminus of a third dimerizing polypeptide which is in turn attached at its C-terminus by a peptide bond or via a peptide linker to the N-terminus of the third domain if not present on the first polypeptide, or
         [1538] b. the N-terminus of the third domain if not present on the first polypeptide,
   [1539] iv) a fourth polypeptide comprising, from its N-terminus to its C-terminus,
      [1540] (1) the fourth domain if not present on the second polypeptide, which is attached at its C-terminus by a peptide bond or via a peptide linker to
         [1541] a. the N-terminus of a fourth dimerizing polypeptide which is in turn attached at its C-terminus by a peptide bond or via a peptide linker to the N-terminus of the second polypeptide chain of the first domain, or
         [1542] b. the N-terminus of the second polypeptide chain of the first domain, and
   [1543] v) optionally one or more additional polypeptides comprising a second polypeptide chain of the third and/or fourth domains, if present.

[1544] This invention also provides a method of making a tetrahedral antibody of the invention which comprises four domains, wherein the non-peptidyl linkage of the tetrahedral antibody is a non-covalent linkage between a first dimerizing polypeptide attached to the first N-terminus of first domain and a second dimerizing polypeptide attached to the first C-terminus of the second domain, the method comprising:
[1545] a) recombinantly expressing each of the following polypeptides in a host cell:
   [1546] i) a first polypeptide comprising, from its N-terminus to its C-terminus,
      [1547] (1) optionally, the third domain attached at its C-terminus by a peptide bond or via a peptide linker to
      [1548] (2) the N-terminus of the first dimerizing polypeptide attached at its C-terminus by a peptide bond or via a peptide linker to
      [1549] (3) the N-terminus of the first polypeptide chain of the first domain,
   [1550] ii) a second polypeptide comprising, from its N-terminus to its C-terminus,
      [1551] (1) the first polypeptide chain of the second domain attached at its C-terminus by a peptide bond or via a peptide linker to
      [1552] (2) the N-terminus of the second dimerizing polypeptide, which is in turn optionally attached at its C-terminus by a peptide bond or via a peptide linker to
      [1553] (3) the N-terminus of the third domain,
   [1554] iii) a third polypeptide comprising, from its N-terminus to its C-terminus,
      [1555] (1) the third domain if not present on the first polypeptide, attached at its C-terminus by a peptide bond or via a peptide linker to
         [1556] a. the N-terminus of a third dimerizing polypeptide which is in turn attached at its C-terminus by a peptide bond or via a peptide linker to the N-terminus of the second polypeptide chain of the first domain, or
         [1557] b. the N-terminus of the second polypeptide chain of the first domain,
   [1558] iv) a fourth polypeptide comprising, from its N-terminus to its C-terminus,
      [1559] (1) the second polypeptide chain of the first domain, which is attached at its C-terminus by a peptide bond or via a peptide linker to
         [1560] a. the N-terminus of a fourth dimerizing polypeptide which is in turn attached at its C-terminus by a peptide bond or via a peptide linker to the N-terminus of the fourth domain if not present on the second polypeptide, or
         [1561] b. the N-terminus of the fourth domain if not present on the second polypeptide, and
   [1562] v) optionally one or more additional polypeptides comprising a second polypeptide chain of the third and/or fourth domains, if present.

[1563] This invention also provides a method of making a tetrahedral antibody of the invention which comprises four domains, wherein the non-peptidyl linkage of the tetrahedral antibody is a non-covalent linkage between a first dimerizing polypeptide attached to the first C-terminus of first domain and a second dimerizing polypeptide attached to the first C-terminus of the second domain, the method comprising:
[1564] a) recombinantly expressing each of the following polypeptides in a host cell:
   [1565] i) a first polypeptide comprising, from its N-terminus to its C-terminus,
      [1566] (1) the first polypeptide chain of the first domain which is attached at its C-terminus by a peptide bond or via a peptide linker to
      [1567] (2) the N-terminus of the first dimerizing polypeptide, which is in turn optionally attached at its C-terminus by a peptide bond or via a peptide linker to
      [1568] (3) the N-terminus of the third domain,
   [1569] ii) a second polypeptide comprising, from its N-terminus to its C-terminus,
      [1570] (1) the first polypeptide chain of the second domain attached at its C-terminus by a peptide bond or via a peptide linker to
      [1571] (2) the N-terminus of the second dimerizing polypeptide, which is in turn optionally attached at its C-terminus by a peptide bond or via a peptide linker to
      [1572] (3) the N-terminus of the third domain,
   [1573] iii) a third polypeptide comprising, from its N-terminus to its C-terminus,
      [1574] (1) the second polypeptide chain of the first domain, which is attached at its C-terminus by a peptide bond or via a peptide linker to
         [1575] a. the N-terminus of a third dimerizing polypeptide which is in turn attached at its C-terminus by a peptide bond or via a peptide linker to the N-terminus of the third domain if not present on the first polypeptide, or
         [1576] b. the N-terminus of the third domain if not present on the first polypeptide,
   [1577] iv) a fourth polypeptide comprising, from its N-terminus to its C-terminus,
      [1578] (1) the second polypeptide chain of the first domain, which is attached at its C-terminus by a peptide bond or via a peptide linker to
         [1579] a. the N-terminus of a fourth dimerizing polypeptide which is in turn attached at its C-terminus by a peptide bond or via a peptide linker to the N-terminus of the fourth domain if not present on the second polypeptide, or
         [1580] b. the N-terminus of the fourth domain if not present on the second polypeptide, and
   [1581] v) optionally one or more additional polypeptides comprising a second polypeptide chain of the third and/or fourth domains, if present.

[1582] This invention also provides a method of making a tetrahedral antibody of the invention which comprises a fifth and/or sixth domain, wherein the non-peptidyl linkage of the tetrahedral antibody is a non-covalent linkage between a first dimerizing polypeptide attached to the first N-terminus of first domain and a second dimerizing polypeptide attached to the first N-terminus of the second domain, the method comprising:
[1583] a) recombinantly expressing each of the following polypeptides in a host cell:
   [1584] i) a first polypeptide comprising, from its N-terminus to its C-terminus,
      [1585] (1) the third domain, or fifth domain if present, which is attached at its C-terminus by a peptide bond or via a peptide linker to
      [1586] (2) the N-terminus of the first dimerizing polypeptide, which is attached at its C-terminus by a peptide bond or via a peptide linker to
      [1587] (3) the N-terminus of the first polypeptide chain of the first domain,
   [1588] ii) a second polypeptide comprising, from its N-terminus to its C-terminus,
      [1589] (1) the fourth domain, or sixth domain if present, which is attached at its C-terminus by a peptide bond or via a peptide linker to
      [1590] (2) the N-terminus of the second dimerizing polypeptide which is attached at its C-terminus by a peptide bond or via a peptide linker to
      [1591] (3) the N-terminus of the first polypeptide chain of the second domain,
   [1592] iii) a third polypeptide comprising, from its N-terminus to its C-terminus,
      [1593] (1) the third domain if not present on the first polypeptide, or the fifth domain if present, which is attached at its C-terminus by a peptide bond or via a peptide linker to
         [1594] a. the N-terminus of a third dimerizing polypeptide which is in turn attached at its C-terminus by a peptide bond or via a peptide linker to the N-terminus of the second polypeptide chain of the first domain, or
         [1595] b. the N-terminus of the second polypeptide chain of the first domain,
   [1596] iv) a fourth polypeptide comprising, from its N-terminus to its C-terminus,
      [1597] (1) the fourth domain if not present on the second polypeptide, or the sixth domain if present, which is attached at its C-terminus by a peptide bond or via a peptide linker to
         [1598] a. the N-terminus of a fourth dimerizing polypeptide which is in turn attached at its C-terminus by a peptide bond or via a peptide linker to the N-terminus of the second polypeptide chain of the first domain, or
         [1599] b. the N-terminus of the second polypeptide chain of the first domain, and
   [1600] v) optionally one or more additional polypeptides comprising a second polypeptide chain of the third, fourth, fifth, and/or sixth domains, if present.

[1601] This invention also provides a method of making a tetrahedral antibody of the invention which comprises a fifth and/or sixth domain, wherein the non-peptidyl linkage of the tetrahedral antibody is a non-covalent linkage between a first dimerizing polypeptide attached to the first C-terminus of first domain and a second dimerizing polypeptide attached to the first N-terminus of the second domain, the method comprising:
[1602] a) recombinantly expressing each of the following polypeptides in a host cell:
   [1603] i) a first polypeptide comprising, from its N-terminus to its C-terminus,
      [1604] (1) the first polypeptide chain of the first domain which is attached at its C-terminus by a peptide bond or via a peptide linker to
      [1605] (2) the N-terminus of the first dimerizing polypeptide which is attached at its C-terminus by a peptide bond or via a peptide linker to
      [1606] (3) the N-terminus of the third domain, or fifth domain if present,
   [1607] ii) a second polypeptide comprising, from its N-terminus to its C-terminus,
      [1608] (1) the fourth domain, or sixth domain if present, which is attached at its C-terminus by a peptide bond or via a peptide linker to
      [1609] (2) the N-terminus of the second dimerizing polypeptide which is attached at its C-terminus by a peptide bond or via a peptide linker to
      [1610] (3) the N-terminus of the first polypeptide chain of the second domain,
   [1611] iii) a third polypeptide comprising, from its N-terminus to its C-terminus,
      [1612] (1) the second polypeptide chain of the first domain which is attached at its C-terminus by a peptide bond or via a peptide linker to
         [1613] a. the N-terminus of a third dimerizing polypeptide which is in turn attached at its C-terminus by a peptide bond or via a peptide linker to the N-terminus of the third domain if not present on the first polypeptide, or the fifth domain if present, or
         [1614] b. the N-terminus of the third domain if not present on the first polypeptide, or the fifth domain if present,
   [1615] iv) a fourth polypeptide comprising, from its N-terminus to its C-terminus,
      [1616] (1) the fourth domain if not present on the second polypeptide, or the sixth domain if present, which is attached at its C-terminus by a peptide bond or via a peptide linker to
         [1617] a. the N-terminus of a fourth dimerizing polypeptide which is in turn attached at its C-terminus by a peptide bond or via a peptide linker to the N-terminus of the second polypeptide chain of the first domain, or
         [1618] b. the N-terminus of the second polypeptide chain of the first domain, and
   [1619] v) optionally one or more additional polypeptides comprising a second polypeptide chain of the third, fourth, fifth, and/or sixth domains, if present.

[1620] This invention also provides a method of making a tetrahedral antibody of the invention which comprises a fifth and/or sixth domain, wherein the non-peptidyl linkage of the tetrahedral antibody is a non-covalent linkage between a first dimerizing polypeptide attached to the first N-terminus of first domain and a second dimerizing polypeptide attached to the first C-terminus of the second domain, the method comprising:
[1621] a) recombinantly expressing each of the following polypeptides in a host cell:
   [1622] i) a first polypeptide comprising, from its N-terminus to its C-terminus,
      [1623] (1) the third domain, or fifth domain if present, which is attached at its C-terminus by a peptide bond or via a peptide linker to
      [1624] (2) the N-terminus of the first dimerizing polypeptide which is attached at its C-terminus by a peptide bond or via a peptide linker to
      [1625] (3) the N-terminus of the first polypeptide chain of the first domain,
   [1626] ii) a second polypeptide comprising, from its N-terminus to its C-terminus,
      [1627] (1) the first polypeptide chain of the second domain which is attached at its C-terminus by a peptide bond or via a peptide linker to
      [1628] (2) the N-terminus of the second dimerizing polypeptide which is attached at its C-terminus by a peptide bond or via a peptide linker to
      [1629] (3) the N-terminus of the fourth domain, or sixth domain if present,
   [1630] iii) a third polypeptide comprising, from its N-terminus to its C-terminus,
      [1631] (1) the third domain if not present on the first polypeptide, or the fifth domain if present, attached at its C-terminus by a peptide bond or via a peptide linker to
         [1632] a. the N-terminus of a third dimerizing polypeptide which is in turn attached at its C-terminus by a peptide bond or via a peptide linker to the N-terminus of the second polypeptide chain of the first domain, or
         [1633] b. the N-terminus of the second polypeptide chain of the first domain, and
   [1634] iv) a fourth polypeptide comprising, from its N-terminus to its C-terminus,
      [1635] (1) the second polypeptide chain of the first domain, which is attached at its C-terminus by a peptide bond or via a peptide linker to
         [1636] a. the N-terminus of a fourth dimerizing polypeptide which is in turn attached at its C-terminus by a peptide bond or via a peptide linker to the N-terminus of the fourth domain if not present on the second polypeptide, or the sixth domain if present, or
         [1637] b. the N-terminus of the fourth domain if not present on the second polypeptide, or the sixth domain if present, and
   [1638] v) optionally one or more additional polypeptides comprising a second polypeptide chain of the third, fourth, fifth, and/or sixth domains, if present.

[1639] This invention also provides a method of making a tetrahedral antibody of the invention which comprises a fifth and/or sixth domain, wherein the non-peptidyl linkage of the tetrahedral antibody is a non-covalent linkage between a first dimerizing polypeptide attached to the first C-terminus of first domain and a second dimerizing polypeptide attached to the first C-terminus of the second domain, the method comprising:
[1640] a) recombinantly expressing each of the following polypeptides in a host cell:
   [1641] i) a first polypeptide comprising, from its N-terminus to its C-terminus,
      [1642] (1) the first polypeptide chain of the first domain which is attached at its C-terminus by a peptide bond or via a peptide linker to
      [1643] (2) the N-terminus of the first dimerizing polypeptide which is attached at its C-terminus by a peptide bond or via a peptide linker to
      [1644] (3) the N-terminus of the third domain, or fifth domain if present,
   [1645] ii) a second polypeptide comprising, from its N-terminus to its C-terminus,
      [1646] (1) the first polypeptide chain of the second domain which is attached at its C-terminus by a peptide bond or via a peptide linker to
      [1647] (2) the N-terminus of the second dimerizing polypeptide which is attached at its C-terminus by a peptide bond or via a peptide linker to
      [1648] (3) the N-terminus of the fourth domain, or sixth domain if present,
   [1649] iii) a third polypeptide comprising, from its N-terminus to its C-terminus,
      [1650] (1) the second polypeptide chain of the first domain which is attached at its C-terminus by a peptide bond or via a peptide linker to
         [1651] a. the N-terminus of a third dimerizing polypeptide which is in turn attached at its C-terminus by a peptide bond or via a peptide linker to the N-terminus of the third domain if not present on the first polypeptide, or the fifth domain if present, or
         [1652] b. the N-terminus of the third domain if not present on the first polypeptide, or the fifth domain if present, and
   [1653] iv) a fourth polypeptide comprising, from its N-terminus to its C-terminus,
      [1654] (1) the second polypeptide chain of the first domain, which is attached at its C-terminus by a peptide bond or via a peptide linker to
         [1655] a. the N-terminus of a fourth dimerizing polypeptide which is in turn attached at its C-terminus by a peptide bond or via a peptide linker to the N-terminus of the fourth domain if not present on the second polypeptide, or the sixth domain if present, or
         [1656] b. the N-terminus of the fourth domain if not present on the second polypeptide, or the sixth domain if present, and
         [1657] c. optionally one or more additional polypeptides comprising a second polypeptide chain of the third, fourth, fifth, and/or sixth domains, if present.

### Domains

[1658] The domains of the tetrahedral and octahedral antibodies are numbered herein to facilitate description and identification of each domain. The first domain may be referred to herein as “D1,” or “domain 1.” The same principle applies to all other domains of the inventions (i.e. the second domain may be referred to herein as “D2” or “domain 2,” etc.). Further, unless specified otherwise, the tetrahedral antibodies of the invention may lack one or more domains without affecting the numbering of the other domains. For example, a tetrahedral antibody of the invention may comprise domains 1, 2, 3, 4, and 6 without comprising a domain 5. As another example, a tetrahedral antibody of the invention may comprise domains 1, 2, 3, 4, 7, and 8 without comprising domains 5 and 6 (see, e.g., FIG. 42).

[1659] In principle, the first and second domains of the tetrahedral antibodies of the invention are interchangeable, i.e. a feature that is described as applying to the first domain can equally apply to the second domain in some embodiments. Similarly, the third and fourth domains of the tetrahedral antibodies of the invention are interchangeable, the fifth and sixth domains of the invention are interchangeable and the seventh and eighth domains are interchangeable.

[1660] Similarly, with respect to octahedral antibodies of the invention, the first, second, and third domains of the invention are interchangeable, the fourth, fifth, and sixth domains are interchangeable, the seventh, eight, and ninth domains are interchangeable, and the tenth, eleventh and twelfth domains are interchangeable. As discussed above, in this context interchangeable means that any feature described herein as applying to one of the domains, may also apply to any of the other domains.

[1661] In the same way, a person of skill in the art will appreciate that domains 1 and 2 of the tetrahedral antibodies of the invention and domains 1, 2 and 3 of the octahedral antibodies of the invention serve a similar structural purpose and are therefore equivalent insofar as any description applying to domains 1 and 2 of tetrahedral antibodies of the invention may also apply to domains 1, 2, and 3 of octahedral antibodies of the invention. A similar equivalence applies as between domains 3 and 4 of the tetrahedral antibodies of the invention and domains 4, 5, and 6 of the octahedral antibodies of the invention. Further, a similar equivalence applies as between domains 5 and 6 of the tetrahedral antibodies of the invention and domains 7, 8 and 9 of the octahedral antibodies of the invention. Still further, a similar equivalence applies as between domains 7 and 8 of the tetrahedral antibodies of the invention and domains 10, 11 and 12 of the octahedral antibodies of the invention.

### Chains

[1662] Various embodiments of the invention comprise domains which are made up of “heavy chains” and “light chains.” Heavy chains of the invention may be referred to herein as “H Chain,” or “H1,” “H2,” “H3,” etc. Similarly, light chains of the invention may be referred to herein as “L Chain,” or “L1,” “L2,” “L3,” etc. Each of these chains is an embodiment of the invention. Further, each of these chains when bound to their corresponding heavy or light chain is an embodiment of the invention.

[1663] In embodiments of the tetrahedral antibody of the invention comprise a first heavy chain (“H1”) and a second heavy chain (“112”). H1 and H2 chains may pair with one another to form domains 1 and 2. H1 may also pair with a light chain to form domains 3 and 4, while H2 may also pair with a light chain to form domains 5 and 6. H1 and H2 chains may also homodimerize. In such cases, a dimerizing polypeptide on the H1 chain heterodimerizes with a dimerizing polypeptide on the H2 chain. The H1 or H2 chains may also comprise additional domains 7 and 8 as described herein. The H1 and/or H2 chains may also comprise a dimerizing polypeptide between domains 1 and 3 and/or between domains 2 and 4. In each of the tetrahedral antibodies of the invention, the H1 and H2 chains may comprise one or more peptide linkers. If the H1 and/or H2 chains comprise a dimerizing polypeptide the peptide linker may be present between either domain 1 or 2 and the dimerizing polypeptide, between the dimerizing polypeptide and domain 3 or 4, or both. A peptide linker may also be present between either domain 1 or 2 and the dimerizing polypeptide, between the dimerizing polypeptide and domain 5 or 6, or both.

[1664] A similar principle applies to octahedral antibody of invention. H1 and H2 chains pair with one another to form domains 1, 2 and 3. H1 may also pair with a light chain to form domains 4, 5, and 6, while H2 may pair with a light chain to form domains 7, 8, and 9. The H1 or H2 chains may also comprise additional domains 10, 11 and 12 as described herein.

[1665] Various embodiments of the invention comprise Fc fusion proteins. In such embodiments, part of an “Fe fusion chain” may pair with an “Fe chain” to form an Fc domain. Fc domains of the invention are typically domains 1 and/or 2 of the tetrahedral antibodies of the invention and domains 1, 2, and/or 3 of the octahedral antibodies of the invention. The “Fe fusion chains” typically also comprise a portion which forms domains 3, 4, 5, and/or 6 of the tetrahedral antibodies of the invention and domains 4, 5, 6, 7, 8, 9, 10, 11, and/or 12 of the octahedral antibodies of the invention.

[1666] In tetrahedral antibodies of the invention, the “Fe fusion chain” may include a dimerizing polypeptide between the portions forming part of domains 1 and 2 and the portions forming domains 3 and 4. In an alternative embodiment, the “Fe fusion chain” can lack a dimerizing polypeptide because the “Fe chain” of domains 1 and 2 each include a dimerizing polypeptide at their respective N-termini. In an alternative of this embodiment, the “Fe chain” of domains 1 and 2 are linked at their respective N-termini by a covalent linkage.

[1667] This invention specifically contemplates tetrahedral and octahedral antibodies wherein (1) the “Fe fusion chain” includes a dimerizing polypeptide between the portions forming part of domains 1 and 2 and the portions forming domains 3 and 4 and (2) domains 3 and 4 are not an ACE2 peptidase domain.

[1668] In octahedral antibodies of the invention, the “Fc fusion chain” may comprise a trimerizing polypeptide between the portions forming part of domains 1, 2, and 3, and the portion forming domains 4, 5, and 6.

[1669] In each of the tetrahedral antibodies of the invention, the “Fc fusion chain” may comprise one or more peptide linkers between the portion forming part of domain 1 and the portion forming domains 3 or 5. If the “Fc fusion chain” comprises a dimerizing polypeptide the peptide linker may be present between either domain 1 and the dimerizing polypeptide, between the dimerizing polypeptide and domain 3 or 5, or both. Similarly, the “Fc fusion chain” may comprise a peptide linker between the portion forming part of domain 2 and the portion forming domain 4, or 6. If the “Fc fusion chain” comprises a dimerizing polypeptide the peptide linker may be present between either domain 2 and the dimerizing polypeptide, between the dimerizing polypeptide and domain 4 or 6, or both.

[1670] In each of the octahedral antibodies of the invention, the “Fc fusion chain” may comprise a peptide linker between the portion forming part of domain 1 and the portion forming domain 4 or 7, between the portion forming part of domain 2 and the portion forming domain 5 or 8, and between the portion forming part of domain 3 and the portion forming domain 6 or 9. In each such case, if the “Fc fusion chain” comprises a trimerizing polypeptide, then the “Fc fusion chain” may comprise a peptide linker either between the portion forming part of domains 1, 2, and 3 and the trimerizing polypeptide, between the trimerizing polypeptide and the portion forming domains 4, 5, and 6, or both.

### Terms

[1671] As used herein, and unless stated otherwise, each of the following terms shall have the definition set forth below.

[1672] Peptidyl linkage: the structure

[chemical structure]

A peptidyl linkage may be a peptide bond.

[1673] Stretch of consecutive amino acids: a plurality of amino acids arranged in a chain, each of which is joined to a preceding amino acid by a peptide bond, excepting that the first amino acid in the chain may optionally not be joined to a preceding amino acid. The amino acids of the chain may be naturally or non-naturally occurring, or may comprise a mixture thereof. The amino acids, unless otherwise indicated, may be genetically encoded, naturally-occurring but not genetically encoded, or non-naturally occurring, and any selection thereof.

[1674] N-terminal amino acid residue: the terminal residue of a stretch of two or more consecutive amino acids having a free α-amino (NH₂) functional group, or a derivative of an α-amino (NH₂) functional group.

[1675] N-terminus: the free α-amino (NH₂) group (or derivative thereof) of an N-terminal amino acid residue.

[1676] C-terminal amino acid residue: the terminal residue of a stretch of two or more consecutive amino acids having a free α-carboxyl (COOH) functional group, or a derivative of a α-carboxyl (COOH) functional group.

[1677] C-terminus: the free α-carboxyl (COOH) group (or derivative thereof) of a C-terminal amino acid residue.

[1678] A “biologically active structure”, as used herein, means a structure of a molecule or fragment thereof, capable of treating a disease or condition or localizing or targeting a compound of the invention to a site of a disease or condition in the body by performing a function or an action, or stimulating or responding to a function, an action or a reaction, in a biological context (e.g. in an organism, a cell, or an in vitro model thereof). Biologically active structures may comprise a structure of at least one of polypeptides, nucleic acids, small molecules such as small organic or inorganic molecules.

[1679] A “bond”, unless otherwise specified, or contrary to context, is understood to include a covalent bond, a dipole-dipole interaction such as a hydrogen bond, and intermolecular interactions such as van der Waals forces.

[1680] A “Signal Sequence” is a short (3-60 amino acids long) peptide chain that directs the post-translational transport of a polypeptide.

[1681] “Amino acid” as used herein, in one embodiment, means a L or D isomer of the genetically encoded amino acids, i.e. isoleucine, alanine, leucine, asparagine, lysine, aspartate, methionine, cysteine, phenylalanine, glutamate, threonine, glutamine, tryptophan, glycine, valine, proline, arginine, serine, histidine, tyrosine, selenocysteine, pyrrolysine and also includes homocysteine and homoselenocysteine.

[1682] Other examples of amino acids include an L or D isomer of taurine, gaba, dopamine, lanthionine, 2-aminoisobutyric acid, dehydroalanine, ornithine and citrulline, as well as non-natural homologues and synthetically modified forms thereof including amino acids having alkylene chains shortened or lengthened by up to two carbon atoms, amino acids comprising optionally substituted aryl groups, and amino acids comprising halogenated groups, including halogenated alkyl and aryl groups as well as beta or gamma amino acids, and cyclic analogs.

[1683] Due to the presence of ionizable amino and carboxyl groups, the amino acids in these embodiments may be in the form of acidic or basic salts, or may be in neutral forms. Individual amino acid residues may also be modified by oxidation or reduction. Other contemplated modifications include hydroxylation of proline and lysine, phosphorylation of hydroxyl groups of seryl or threonyl residues, and methylation of the alpha-amino groups of lysine, arginine, and histidine side chains.

[1684] Covalent derivatives may be prepared by linking particular functional groups to the amino acid side chains or at the N- or C-termini.

[1685] Compounds comprising amino acids with R-group substitutions are within the scope of the invention. It is understood that substituents and substitution patterns on the compounds of the instant invention can be selected by one of ordinary skill in the art to provide compounds that are chemically stable from readily available starting materials.

[1686] “Natural amino acid” as used herein means a L or D isomer of the genetically encoded amino acids, i.e. isoleucine, alanine, leucine, asparagine, lysine, aspartate, methionine, cysteine, phenylalanine, glutamate, threonine, glutamine, tryptophan, glycine, valine, proline, arginine, serine, histidine, tyrosine, selenocysteine, pyrrolysine and homocysteine and homoselenocysteine.

[1687] “Non-natural amino acid” as used herein means a chemically modified L or D isomer of isoleucine, alanine, leucine, asparagine, lysine, aspartate, methionine, cysteine, phenylalanine, glutamate, threonine, glutamine, tryptophan, glycine, valine, proline, arginine, serine, histidine, tyrosine, selenocysteine, pyrrolysine, homocysteine, homoselenocysteine, taurine, gaba, dopamine, lanthionine, 2-aminoisobutyric acid, dehydroalanine, ornithine or citrulline, including cysteine and selenocysteine derivatives having C3-C10 aliphatic side chains between the alpha carbon and the S or Se. In one embodiment the aliphatic side chain is an alkylene. In another embodiment, the aliphatic side chain is an alkenylene or alkynylene.

[1688] In addition to the stretches of consecutive amino acid sequences described herein, it is contemplated that variants thereof can be prepared by introducing appropriate nucleotide changes into the encoding DNA, and/or by synthesis of the desired consecutive amino acid sequences. Those skilled in the art will appreciate that amino acid changes may alter post-translational processes of the stretches of consecutive amino acids described herein when expression is the chosen method of synthesis (rather than chemical synthesis for example), such as changing the number or position of glycosylation sites or altering the membrane anchoring characteristics.

[1689] Variations in the sequences described herein, can be made, for example, using any of the techniques and guidelines for conservative and non-conservative mutations set forth, for instance, in U.S. Pat. No. 5,364,934. Variations may be a substitution, deletion or insertion of one or more codons encoding the consecutive amino acid sequence of interest that results in a change in the amino acid sequence as compared with the native sequence. Optionally the variation is by substitution of at least one amino acid with any other amino acid in one or more of the domains. Guidance in determining which amino acid residue may be inserted, substituted or deleted without adversely affecting the desired activity may be found by comparing the sequence with that of homologous known protein molecules and minimizing the number of amino acid sequence changes made in regions of high homology. Amino acid substitutions can be the result of replacing one amino acid with another amino acid having similar structural and/or chemical properties, such as the replacement of a leucine with a serine, i.e., conservative amino acid replacements. Insertions or deletions may optionally be in the range of about 1 to 5 amino acids. The variation allowed may be determined by systematically making insertions, deletions or substitutions of amino acids in the sequence and testing the resulting variants for activity exhibited by the full-length or mature native sequence. It is understood that any terminal variations are made within the context of the invention disclosed herein.

[1690] Amino acid sequence variants of the binding partner are prepared with various objectives in mind, including increasing the affinity of the binding partner for its ligand, facilitating the stability, purification and preparation of the binding partner, modifying its plasma half life, improving therapeutic efficacy, and lessening the severity or occurrence of side effects during therapeutic use of the binding partner.

[1691] Amino acid sequence variants of these sequences are also contemplated herein including insertional, substitutional, or deletional variants. Such variants ordinarily can prepared by site-specific mutagenesis of nucleotides in the DNA encoding the target-binding monomer, by which DNA encoding the variant is obtained, and thereafter expressing the DNA in recombinant cell culture. Fragments having up to about 100-150 amino acid residues can also be prepared conveniently by in vitro synthesis. Such amino acid sequence variants are predetermined variants and are not found in nature. The variants exhibit the qualitative biological activity (including target-binding) of the nonvariant form, though not necessarily of the same quantitative value. While the site for introducing an amino acid sequence variation is predetermined, the mutation per se need not be predetermined. For example, in order to optimize the performance of a mutation at a given site, random or saturation mutagenesis (where all 20 possible residues are inserted) is conducted at the target codon and the expressed variant is screened for the optimal combination of desired activities. Such screening is within the ordinary skill in the art.

[1692] Amino acid insertions usually will be on the order of about from 1 to 10 amino acid residues; substitutions are typically introduced for single residues; and deletions will range about from 1 to 30 residues. Deletions or insertions preferably are made in adjacent pairs, i.e. a deletion of 2 residues or insertion of 2 residues. It will be amply apparent from the following discussion that substitutions, deletions, insertions or any combination thereof are introduced or combined to arrive at a final construct.

[1693] As used herein, “modification” means an amino acid substitution, insertion, and/or deletion in a polypeptide sequence or an alteration to a moiety chemically linked to a protein. For example, a modification may be an altered carbohydrate or PEG structure attached to a protein. As used herein, “amino acid modification” means an amino acid substitution, insertion, and/or deletion in a polypeptide sequence. For clarity, unless otherwise noted, the amino acid modification is always to an amino acid coded for by DNA, e.g. the 20 amino acids that have codons in DNA and RNA.

[1694] As used herein, “amino acid substitution” or “substitution” means the replacement of an amino acid at a particular position in a parent polypeptide sequence with a different amino acid. In particular, in some embodiments, the substitution is to an amino acid that is not naturally occurring at the particular position, either not naturally occurring within the organism or in any organism. For example, the substitution E272Y refers to a variant polypeptide, in this case an Fc variant, in which the glutamic acid at position 272 is replaced with tyrosine. For clarity, a protein which has been engineered to change the nucleic acid coding sequence but not change the starting amino acid (for example exchanging CGG (encoding arginine) to CGA (still encoding arginine) to increase host organism expression levels) is not an “amino acid substitution”; that is, despite the creation of a new gene encoding the same protein, if the protein has the same amino acid at the particular position that it started with, it is not an amino acid substitution.

[1695] As used herein, “amino acid insertion” or “insertion” means the addition of an amino acid sequence at a particular position in a parent polypeptide sequence. For example, −233E or 233E designates an insertion of glutamic acid after position 233 and before position 234. Additionally, −233ADE or A233ADE designates an insertion of AlaAspGlu after position 233 and before position 234.

[1696] As used herein, “amino acid deletion” or “deletion” means the removal of an amino acid sequence at a particular position in a parent polypeptide sequence. For example, E233- or E233 # or E233( ) designates a deletion of glutamic acid at position 233. Additionally, EDA233- or EDA233 # designates a deletion of the sequence GluAspAla that begins at position 233.

[1697] The terms “variant protein” or “protein variant”, or “variant” as used herein mean a protein that differs from that of a parent protein by virtue of at least one amino acid modification. Protein variant may refer to the protein itself, a composition comprising the protein, or the amino sequence that encodes it. Preferably, the protein variant has at least one amino acid modification compared to the parent protein, e.g. from about one to about seventy amino acid modifications, and preferably from about one to about five amino acid modifications compared to the parent. As described below, in some embodiments the parent polypeptide, for example an Fc parent polypeptide, is a human wild type sequence, such as the Fc region from IgG1, IgG2, IgG3 or IgG4, although human sequences with variants can also serve as “parent polypeptides”, for example the IgG1/2 hybrid of FIG. 13. The protein variant sequence herein will preferably possess at least about 80% identity with a parent protein sequence, and most preferably at least about 90% identity, more preferably at least about 95-98-99% identity. Variant protein can refer to the variant protein itself, compositions comprising the protein variant, or the DNA sequence that encodes it. Accordingly, the terms “antibody variant” or “variant antibody” as used herein mean an antibody that differs from a parent antibody by virtue of at least one amino acid modification, “IgG variant” or “variant IgG” as used herein is meant an antibody that differs from a parent IgG (again, in many cases, from a human IgG sequence) by virtue of at least one amino acid modification, and “immunoglobulin variant” or “variant immunoglobulin” as used herein mean an immunoglobulin sequence that differs from that of a parent immunoglobulin sequence by virtue of at least one amino acid modification. “Fc variant” or “variant Fc” as used herein means a protein comprising an amino acid modification in an Fc domain. The Fc variants of the present invention are defined according to the amino acid modifications that compose them. Thus, for example, N434S or 434S is an Fc variant with the substitution serine at position 434 relative to the parent Fc polypeptide, wherein the numbering is according to the EU index. Likewise, M428L/N434S defines an Fc variant with the substitutions M428L and N434S relative to the parent Fc polypeptide. The identity of the WT amino acid may be unspecified, in which case the aforementioned variant is referred to as 428L/434S. It is noted that the order in which substitutions are provided is arbitrary, that is to say that, for example, 428L/434S is the same Fc variant as M428L/N434S, and so on. For all positions discussed in the present invention that relate to antibodies, unless otherwise noted, amino acid position numbering is according to the EU index. The EU index or EU index as in Kabat or EU numbering scheme refers to the numbering of the EU antibody (Edelman et al., 1969, Proc Natl Acad Sci USA 63:78-85, hereby entirely incorporated by reference.) The modification can be an addition, deletion, or substitution. Substitutions can include naturally occurring amino acids and, in some cases, synthetic amino acids. Examples include U.S. Pat. No. 6,586,207; WO 98/48032; WO 03/073238; US2004-0214988A1; WO 05/35727A2; WO 05/74524A2; J. W. Chin et al., (2002), Journal of the American Chemical Society 124:9026-9027; J. W. Chin, & P. G. Schultz, (2002), ChemBioChem 11:1135-1137; J. W. Chin, et al., (2002), PICAS United States of America 99:11020-11024; and, L. Wang, & P. G. Schultz, (2002), Chem. 1-10, all entirely incorporated by reference.

[1698] As used herein, “protein” means at least two covalently attached amino acids, which includes proteins, polypeptides, oligopeptides and peptides. The terms “protein” and “stretch of consecutive amino acids” are used interchangeably herein. The peptidyl group may comprise naturally occurring amino acids and peptide bonds, or synthetic peptidomimetic structures, i.e. “analogs”, such as peptoids (see Simon et al., PNAS USA 89(20):9367 (1992), entirely incorporated by reference). The amino acids may either be naturally occurring or synthetic (e.g. not an amino acid that is coded for by DNA); as will be appreciated by those in the art. For example, homo-phenylalanine, citrulline, ornithine and noreleucine are considered synthetic amino acids for the purposes of the invention, and both D- and L-(R or S) configured amino acids may be utilized. The variants of the present invention may comprise modifications that include the use of synthetic amino acids incorporated using, for example, the technologies developed by Schultz and colleagues, including but not limited to methods described by Cropp & Shultz, 2004, Trends Genet. 20(12):625-30, Anderson et al., 2004, Proc Natl Acad Sci USA 101 (2):7566-71, Zhang et al., 2003, 303(5656):371-3, and Chin et al., 2003, Science 301(5635):964-7, all entirely incorporated by reference. In addition, polypeptides may include synthetic derivatization of one or more side chains or termini, glycosylation, PEGylation, circular permutation, cyclization, linkers to other molecules, fusion to proteins or protein domains, and addition of peptide tags or labels.

[1699] The term “residue” as used herein means a position in a protein and its associated amino acid identity. For example, Asparagine 297 (also referred to as Asn297 or N297) is a residue at position 297 in the human antibody IgG1.

[1700] As used herein “Fab” or “Fab region” means the polypeptide that comprises the VH, CH1, VL, and CL immunoglobulin domains. Fab may refer to this region in isolation, or this region in the context of a full length antibody, antibody fragment or Fab fusion protein. “Fv” or “Fv fragment” or “Fv region” as used herein mean a polypeptide that comprises the VL and VH domains of a single antibody.

[1701] “IgG subclass modification” or “isotype modification” as used herein mean an amino acid modification that converts one amino acid of one IgG isotype to the corresponding amino acid in a different, aligned IgG isotype. For example, because IgG1 comprises a tyrosine and IgG2 a phenylalanine at EU position 296, a F296Y substitution in IgG2 is considered an IgG subclass modification.

[1702] The term “non-naturally occurring modification” means an amino acid modification that is not isotypic. For example, because none of the IgGs comprise a serine at position 434, the substitution 434S in IgG1, IgG2, IgG3, or IgG4 (or hybrids thereof) is considered a non-naturally occurring modification.

[1703] The term “effector function” as used herein means a biochemical event that results from the interaction of an antibody Fc region with an Fc receptor or ligand. Effector functions include but are not limited to ADCC, ADCP, and CDC.

[1704] The term “IgG Fc ligand” as used herein means a molecule, preferably a polypeptide, from any organism that binds to the Fc region of an IgG antibody to form an Fc/Fc ligand complex. Fc ligands include but are not limited to FcγRIs, FcγRIIs, FcγRIIIs, FcRn, C1q, C3, mannan binding lectin, mannose receptor, staphylococcal protein A, streptococcal protein G, and viral FcγR. Fc ligands also include Fc receptor homologs (FcRH), which are a family of Fc receptors that are homologous to the FcγRs (Davis et al., 2002, Immunological Reviews 190:123-136, entirely incorporated by reference). Fc ligands may include undiscovered molecules that bind Fc. Particular IgG Fc ligands are FcRn and Fc gamma receptors. “Fc ligand” as used herein means a molecule, preferably a polypeptide, from any organism that binds to the Fc region of an antibody to form an Fc/Fc ligand complex.

[1705] The terms “Fc gamma receptor”, “FcγR”, “FcgammaR” or “FcgR” as used herein mean any member of the family of proteins that bind the IgG antibody Fc region and is encoded by an FcγR gene. In humans this family includes but is not limited to FcγRI (CD64), including isoforms FcγRIa, FcγRIb, and FcγRIc; FcγRII (CD32), including isoforms FcγRIIa (including allotypes H131 and R131), FcγRIIb (including FcγRIIb-1 and FcγRIIb-2), and FcγRIIc; and FcγRIII (CD16), including isoforms FcγRIIIa (including allotypes V158 and F158) and FcγRIIIb (including allotypes FcγRIIb-NA1 and FcγRIIb-NA2) (Jefferis et al., 2002, Immunol Lett 82:57-65, entirely incorporated by reference), as well as any undiscovered human FcγRs or FcγR isoforms or allotypes. An FcγR may be from any organism, including but not limited to humans, mice, rats, rabbits, and monkeys. Mouse FcγRs include but are not limited to FcγRI (CD64), FcγRII (CD32), FcγRIII (CD16), and FcγRIII-2 (CD16-2), as well as any undiscovered mouse FcγRs or FcγR isoforms or allotypes.

[1706] The terms “FcRn” or “neonatal Fc Receptor” as used herein is meant a protein that binds the IgG antibody Fc region and is encoded at least in part by an FcRn gene. The FcRn may be from any organism, including but not limited to humans, mice, rats, rabbits, and monkeys. As is known in the art, the functional FcRn protein comprises two polypeptides, often referred to as the heavy chain and light chain. The light chain is beta-2-microglobulin and the heavy chain is encoded by the FcRn gene. Unless otherwise noted herein, FcRn or an FcRn protein refers to the complex of FcRn heavy chain with beta-2-microglobulin. A variety of FcRn variants used to increase binding to the FcRn receptor, and in some cases, to increase serum half-life, are shown in the Figure Legend of FIG. 11.

[1707] The terms “parent polypeptide” as used herein mean a starting polypeptide that is subsequently modified to generate a variant. The parent polypeptide may be a naturally occurring polypeptide, or a variant or engineered version of a naturally occurring polypeptide. Parent polypeptide may refer to the polypeptide itself, compositions that comprise the parent polypeptide, or the amino acid sequence that encodes it. Accordingly, “parent immunoglobulin” as used herein means an unmodified immunoglobulin polypeptide that is modified to generate a variant, and “parent antibody” as used herein means an unmodified antibody that is modified to generate a variant antibody. It should be noted that “parent antibody” includes known commercial, recombinantly produced antibodies as outlined below.

[1708] The terms “Fc fusion protein” or “immunoadhesin” as used herein means a protein comprising an Fc region, generally linked (optionally through a linker moiety, as described herein) to a different protein, such as a binding moiety to a target protein, as described herein. In some cases, one monomer of the heterodimeric protein comprises an antibody heavy chain (either including an scFv or further including a light chain) and the other monomer is an Fc fusion, comprising a variant Fc domain and a ligand.

[1709] The term “position” as used herein is meant a location in the sequence of a protein. Positions may be numbered sequentially, or according to an established format, for example the EU index for antibody numbering.

[1710] The term “target antigen” as used herein means the molecule that is bound specifically by the variable region of a given antibody. A target antigen may be a protein, carbohydrate, lipid, or other chemical compound. A wide number of suitable target antigens are described below.

[1711] The term “target cell” as used herein means a cell that expresses a target antigen.

[1712] The term “variable region” as used herein means the region of an immunoglobulin that comprises one or more Ig domains substantially encoded by any of the Vκ, Vλ, and/or VH genes that make up the kappa, lambda, and heavy chain immunoglobulin genetic loci respectively.

[1713] The term “wild type or wt” as used herein means an amino acid sequence or a nucleotide sequence that is found in nature, including allelic variations. A WT protein has an amino acid sequence or a nucleotide sequence that has not been intentionally modified.

[1714] The antibodies of the present invention are generally isolated or recombinant. “Isolated,” when used to describe the various polypeptides disclosed herein, means a polypeptide that has been identified and separated and/or recovered from a cell or cell culture from which it was expressed. Ordinarily, an isolated polypeptide will be prepared by at least one purification step. An “isolated antibody,” refers to an antibody which is substantially free of other antibodies having different antigenic specificities.

[1715] “Specific binding” or “specifically binds to” or is “specific for” a particular antigen or an epitope means binding that is measurably different from a non-specific interaction. Specific binding can be measured, for example, by determining binding of a molecule compared to binding of a control molecule, which generally is a molecule of similar structure that does not have binding activity. For example, specific binding can be determined by competition with a control molecule that is similar to the target.

[1716] Specific binding for a particular antigen or an epitope can be exhibited, for example, by an antibody having a KD for an antigen or epitope of at least about 10-4 M, at least about 10-5 M, at least about 10-6 M, at least about 10-7 M, at least about 10-8 M, at least about 10-9 M, alternatively at least about 10-10 M, at least about 10-11 M, at least about 10-12 M, or greater, where KD refers to a dissociation rate of a particular antibody-antigen interaction. Typically, an antibody that specifically binds an antigen will have a KD that is 20-, 50-, 100-, 500-, 1000-, 5,000-, 10,000- or more times greater for a control molecule relative to the antigen or epitope.

[1717] Also, specific binding for a particular antigen or an epitope can be exhibited, for example, by an antibody having a KA or Ka for an antigen or epitope of at least 20-, 50-, 100-, 500-, 1000-, 5,000-, 10,000- or more times greater for the epitope relative to a control, where KA or Ka refers to an association rate of a particular antibody-antigen interaction.

[1718] As used herein “ablation” means a decrease or removal of activity. Thus, for example, “ablating FcγR binding” means the Fc region amino acid variant has less than 50% starting binding as compared to an Fc region not containing the specific variant, with less than 70-80-90-95-98% loss of activity being preferred, and in general, with the activity being below the level of detectable binding in a Carterra assay.

[1719] As used herein, “ADCC” or “antibody dependent cell-mediated cytotoxicity” means cell-mediated reaction wherein nonspecific cytotoxic cells that express FcγRs recognize bound antibody on a target cell and subsequently cause lysis of the target cell. ADCC is correlated with binding to FcγRIIIa; increased binding to FcγRIIIa leads to an increase in ADCC activity.

[1720] As used herein “ADCP” or antibody dependent cell-mediatedphagocytosis mean the cell-mediated reaction wherein nonspecific cytotoxic cells that express FcγRs recognize bound antibody on a target cell and subsequently cause phagocytosis of the target cell.

[1721] In an aspect, the invention provides a stretch of consecutive amino acids (i.e. a protein) having at least about 80% sequence identity, preferably at least about 81% sequence identity, more preferably at least about 82% sequence identity, yet more preferably at least about 83% sequence identity, yet more preferably at least about 84% sequence identity, yet more preferably at least about 85% sequence identity, yet more preferably at least about 86% sequence identity, yet more preferably at least about 87% sequence identity, yet more preferably at least about 88% sequence identity, yet more preferably at least about 89% sequence identity, yet more preferably at least about 90% sequence identity, yet more preferably at least about 91% sequence identity, yet more preferably at least about 92% sequence identity, yet more preferably at least about 93% sequence identity, yet more preferably at least about 94% sequence identity, yet more preferably at least about 95% sequence identity, yet more preferably at least about 96% sequence identity, yet more preferably at least about 97% sequence identity, yet more preferably at least about 98% sequence identity and yet more preferably at least about 99% sequence identity to an amino acid sequence disclosed in the specification, a figure, a SEQ ID NO. or a sequence listing of the present application. Similarly, the invention provides dimers and trimers comprising such proteins, including those described in the Examples of the invention.

[1722] The % amino acid sequence identity values can be readily obtained using, for example, the WU-BLAST-2 computer program (Altschul et al., Methods in Enzymology 266:460-480 (1996)).

[1723] Fragments of native sequences are provided herein. Such fragments may be truncated at the N-terminus or C-terminus, or may lack internal residues, for example, when compared with a full-length native protein. Again, it is understood that any terminal variations are made within the context of the invention disclosed herein.

[1724] Certain fragments lack amino acid residues that are not essential for a desired biological activity of the sequence of interest.

[1725] Any of a number of conventional techniques may be used. Desired peptide fragments or fragments of stretches of consecutive amino acids may be chemically synthesized. An alternative approach involves generating fragments by enzymatic digestion, e.g. by treating the protein with an enzyme known to cleave proteins at sites defined by particular amino acid residues, or by digesting the DNA with suitable restriction enzymes and isolating the desired fragment. Yet another suitable technique involves isolating and amplifying a DNA fragment encoding a desired polypeptide/sequence fragment, by polymerase chain reaction (PCR). Oligonucleotides that define the desired termini of the DNA fragment are employed at the 5′ and 3′ primers in the PCR.

[1726] In particular embodiments, conservative substitutions of interest are shown in Table A under the heading of preferred substitutions. If such substitutions result in a change in biological activity, then more substantial changes, denominated exemplary substitutions in Table A, or as further described below in reference to amino acid classes, are introduced and the products screened.

TABLE A
Conservative amino acid substitutions

| Original | Exemplary | Preferred |
|---|---|---|
| Ala (A) | val; leu; ile | val |
| Arg (R) | lys; gln; asn | lys |
| Asn (N) | gln; his; lys; arg | gln |
| Asp (D) | glu | glu |
| Cys (C) | ser | ser |
| Gln (Q) | asn | asn |
| Glu (E) | asp | asp |
| Gly (G) | pro; ala | ala |
| His (H) | asn; gln; lys; arg | arg |
| Ile (I) | leu; val; met; ala; phe; norleucine | leu |
| Leu (L) | norleucine; ile; val; met; ala; phe | ile |
| Lys (K) | arg; gln; asn | arg |
| Met (M) | leu; phe; ile | leu |
| Phe (F) | leu; val; ile; ala; tyr | leu |
| Pro (P) | ala | ala |
| Ser (S) | thr | thr |
| Thr (T) | ser | ser |
| Trp (W) | tyr; phe | tyr |
| Tyr (Y) | trp; phe; thr; ser | phe |
| Val (V) | ile; leu; met; phe; ala; norleucine | leu |

[1727] Substantial modifications in function or immunological identity of the sequence are accomplished by selecting substitutions that differ significantly in their effect on maintaining (a) the structure of the polypeptide backbone in the area of the substitution, for example, as a sheet or helical conformation, (b) the charge or hydrophobicity of the molecule at the target site, or (c) the bulk of the side chain. Naturally occurring residues are divided into groups based on common side-chain properties:
[1728] a) hydrophobic: norleucine, met, ala, val, leu, ile;
[1729] b) neutral hydrophilic: cys, ser, thr;
[1730] c) acidic: asp, glu;
[1731] d) basic: asn, gln, his, lys, arg;
[1732] e) residues that influence chain orientation: gly, pro;
[1733] f) aromatic: trp, tyr, phe.

[1734] Non-conservative substitutions will entail exchanging a member of one of these classes for another class. Such substituted residues also may be introduced into the conservative substitution sites or, more preferably, into the remaining (non-conserved) sites.

[1735] The variations can be made using methods known in the art such as oligonucleotide-mediated (site-directed) mutagenesis, alanine scanning, and PCR mutagenesis. Site-directed mutagenesis (Carter et al., Nucl. Acids Res., 13:4331 (1986); Zoller et al., Nucl. Acids Res., 10:6487 (1987)), cassette mutagenesis (Wells et al., Gene, 34:315 (1985)), restriction selection mutagenesis (Wells et al., Philos. Trans. R. Soc. London SerA, 317:415 (1986)) or other known techniques can be performed on the cloned DNA to produce the variant DNA.

[1736] Scanning amino acid analysis can also be employed to identify one or more amino acids along a contiguous sequence. Among the preferred scanning amino acids are relatively small, neutral amino acids. Such amino acids include alanine, glycine, serine, and cysteine. Alanine is typically a preferred scanning amino acid among this group because it eliminates the side-chain beyond the beta-carbon and is less likely to alter the main-chain conformation of the variant (Cunningham and Wells, Science, 244:1081-1085 (1989)). Alanine is also typically preferred because it is the most common amino acid. Further, it is frequently found in both buried and exposed positions (Creighton, The Proteins, (W.H. Freeman & Co., N.Y.); Chothia, J. Mol. Biol., 150:1 (1976)). If alanine substitution does not yield adequate amounts of variant, an isoteric amino acid can be used.

[1737] Covalent modifications: The stretch of consecutive amino acids may be covalently modified. One type of covalent modification includes reacting targeted amino acid residues with an organic derivatizing agent that is capable of reacting with selected side chains or the N- or C-terminal residues that are not involved in an -x-x- bond. Derivatization with bifunctional agents is useful, for instance, for crosslinking to a water-insoluble support matrix or surface for use in the method for purifying anti-sequence of interest antibodies, and vice-versa. Commonly used crosslinking agents include, e.g., 1,1-bis(diazoacetyl)-2-phenylethane, glutaraldehyde, N-hydroxysuccinimide esters, for example, esters with 4-azidosalicylic acid, homobifunctional imidoesters, including disuccinimidyl esters such as 3,3′-dithiobis(succinimidylpropionate), bifunctional maleimides such as bis-N-maleimido-1,8-octane and agents such as methyl-3-((p-azidophenyl)dithio)propioimidate.

[1738] Other modifications include deamidation of glutaminyl and asparaginyl residues to the corresponding glutamyl and aspartyl residues, respectively, hydroxylation of proline and lysine, phosphorylation of hydroxyl groups of seryl or threonyl residues, methylation of the .alpha.-amino groups of lysine, arginine, and histidine side chains (T. E. Creighton, Proteins: Structure and Molecular Properties, W.H. Freeman & Co., San Francisco, pp. 79-86 (1983)), acetylation of the N-terminal amine, and amidation of any C-terminal carboxyl group.

[1739] Another type of covalent modification comprises altering the native glycosylation pattern of the stretch of consecutive amino acids. “Altering the native glycosylation pattern” is intended for purposes herein to mean deleting one or more carbohydrate moieties found in amino acid sequences (either by removing the underlying glycosylation site or by deleting the glycosylation by chemical and/or enzymatic means), and/or adding one or more glycosylation sites that are not present in the native sequence. In addition, the phrase includes qualitative changes in the glycosylation of the native proteins, involving a change in the nature and proportions of the various carbohydrate moieties present.

[1740] Addition of glycosylation sites to the amino acid sequence may be accomplished by altering the amino acid sequence. The alteration may be made, for example, by the addition of, or substitution by, one or more serine or threonine residues to the native sequence (for O-linked glycosylation sites). The amino acid sequence may optionally be altered through changes at the DNA level, particularly by mutating the DNA encoding the amino acid sequence at preselected bases such that codons are generated that will translate into the desired amino acids.

[1741] Another means of increasing the number of carbohydrate moieties on the amino acid sequence is by chemical or enzymatic coupling of glycosides to the polypeptide. Such methods are described in the art, e.g., in WO 87/05330 published Sep. 11, 1987, and in Aplin and Wriston, CRC Crit. Rev. Biochem., pp. 259-306 (1981).

[1742] Removal of carbohydrate moieties present on the amino acid sequence may be accomplished chemically or enzymatically or by mutational substitution of codons encoding for amino acid residues that serve as targets for glycosylation. Chemical deglycosylation techniques are known in the art and described, for instance, by Hakimuddin, et al., Arch. Biochem. Biophys., 259:52 (1987) and by Edge et al., Anal. Biochem., 118:131 (1981). Enzymatic cleavage of carbohydrate moieties on polypeptides can be achieved by the use of a variety of endo- and exo-glycosidases as described by Thotakura et al., Meth. Enzymol., 138:350 (1987).

[1743] Another type of covalent modification comprises linking the amino acid sequence to one of a variety of nonproteinaceous polymers, e.g., polyethylene glycol (PEG), polypropylene glycol, or polyoxyalkylenes, in the manner set forth in U.S. Pat. Nos. 4,640,835; 4,496,689; 4,301,144; 4,670,417; 4,791,192 or 4,179,337.

[1744] The term “substitution”, “substituted” and “substituent” refers to a functional group in which one or more bonds to a hydrogen atom contained therein are replaced by a bond to non-hydrogen atoms, provided that normal valencies are maintained and that the substitution results in a stable compound. Substituted groups also include groups in which one or more bonds to a carbon(s) or hydrogen(s) atom are replaced by one or more bonds, including double or triple bonds, to a heteroatom. Examples of substituent groups include halogens (i.e., F, Cl, Br, and I); alkyl groups, such as methyl, ethyl, n-propyl, isopropryl, n-butyl, tert-butyl, and trifluoromethyl; aryl groups, such as phenyl; heteroaryl groups, such as triazole, dihydropyridazine and tetrazole; hydroxyl; alkoxy groups, such as methoxy, ethoxy, n-propoxy, and isopropoxy; aryloxy groups, such as phenoxy; arylalkyloxy, such as benzyloxy (phenylmethoxy) and p-trifluoromethylbenzyloxy (4-trifluoromethylphenylmethoxy); heteroaryloxy groups; sulfonyl groups, such as sulfonate, trifluoromethanesulfonyl, methanesulfonyl, and p-toluenesulfonyl; sulfnitro, nitrosyl; mercapto; sulfanyl groups, such as methylsulfanyl, ethylsulfanyl and propylsulfanyl; cyano; amino groups, such as amino, methylamino, dimethylamino, ethylamino, and diethylamino; and carboxyl. Where multiple substituent moieties are disclosed or claimed, the substituted compound can be independently substituted by one or more of the disclosed or claimed substituent moieties, singly or plurally. By independently substituted, it is meant that the (two or more) substituents can be the same or different. In the compounds used in the method of the present invention, alkyl, heteroalkyl, monocycle, bicycle, aryl, heteroaryl and heterocycle groups can be substituted by replacing one or more hydrogen atoms with alternative non-hydrogen groups. These include, but are not limited to, halo, hydroxy, mercapto, amino, carboxy, cyano and carbamoyl.

[1745] It is understood that substituents and substitution patterns on the compounds used in the method of the present invention can be selected by one of ordinary skill in the art to provide compounds that are chemically stable and that can be readily synthesized by techniques known in the art from readily available starting materials. If a substituent is itself substituted with more than one group, it is understood that these multiple groups may be on the same carbon or on different carbons, so long as a stable structure results.

[1746] In choosing the compounds used in the method of the present invention, one of ordinary skill in the art will recognize that the various substituents, i.e. R₁, R₂, etc. are to be chosen in conformity with well-known principles of chemical structure connectivity.

[1747] As used herein, “alkyl” includes both branched and straight-chain saturated aliphatic hydrocarbon groups having the specified number of carbon atoms and may be unsubstituted or substituted. Thus, C₁-Cₙ as in “C₁-Cₙ alkyl” is defined to include groups having 1, 2, . . . , n−1 or n carbons in a linear or branched arrangement. For example, C₁-C₆, as in “C₁-C₆ alkyl” is defined to include groups having 1, 2, 3, 4, 5, or 6 carbons in a linear or branched arrangement, and specifically includes methyl, ethyl, n-propyl, isopropyl, n-butyl, t-butyl, pentyl, and hexyl. Unless otherwise specified contains one to twelve carbons. Alkyl groups can be unsubstituted or substituted with one or more substituents, including but not limited to halogen, alkoxy, alkylthio, trifluoromethyl, difluoromethyl, methoxy, and hydroxyl. An embodiment can be C₁-C₁₂ alkyl, C₂-C₁₂ alkyl, C₃-C₁₂ alkyl, C₄-C₁₂ alkyl and so on. An embodiment can be C₁-C₈ alkyl, C₂-C₈ alkyl, C₃-C₈ alkyl, C₄-C₈ alkyl and so on. Alkyl is intended to include moieties that are monovalent, divalent, trivalent, etc.

[1748] As used herein, “C₁-C₄ alkyl” includes both branched and straight-chain C₁-C₄ alkyl.

[1749] As used herein, the term “cycloalkane” refers to a monocyclic or bicyclic ring system, which may be unsaturated or partially unsaturated, i.e. possesses one or more double bonds. Monocyclic ring systems are exemplified by a saturated cyclic hydrocarbon group containing from 3 to 8 carbon atoms. Examples of monocyclic ring systems include cyclopropyl, cyclobutyl, cyclopentyl, cyclopentenyl, cyclohexyl, cyclohexenyl, cycloheptyl and cyclooctyl. Bicyclic fused ring systems are exemplified by a cycloalkyl ring fused to another cycloalkyl ring. Examples of bicyclic fused ring systems include, but are not limited to, decalin, 1,2,3,7,8,8a-hexahydro-naphthalene, and the like. Thus, C₃-C₁₀ cycloalkane includes cyclic rings of alkanes of three to eight total carbon atoms, (e.g., cyclopropyl, cyclobutyl, cyclopentyl, cyclohexyl, cycloheptyl or cyclooctyl and so on). Cycloalkane groups can be unsubstituted or substituted with one or more substituents, including but not limited to halogen, alkoxy, alkylthio, trifluoromethyl, difluoromethyl, methoxy, and hydroxyl. Cycloalkane is intended to include moieties that are monovalent, divalent, trivalent, etc.

[1750] As used herein, the term “cycloalkene” refers to a cycloalkane which possesses one or more double bonds. Thus, C₅-C₁₀ cycloalkene includes cyclic rings of alkanes of five to ten total carbon atoms, (e.g., cyclopentenyl, cyclohexenyl, cycloheptenyl, cyclohexadienyl, cyclooctenyl or cyclooctadienyl and so on). Cycloalkene is intended to moieties that are monovalent, divalent, trivalent, etc. Cycloalkene is intended to include moieties that are monovalent, divalent, trivalent, etc.

[1751] As used herein, “alkene” includes both branched and straight-chain aliphatic hydrocarbon groups having one or more double bond and the specified number of carbon atoms and may be unsubstituted or substituted. Thus, C₂-C₁ as in “C₂-C₁ alkene” is defined to include groups having 2, 3, . . . , n−1 or n carbons in a linear or branched arrangement. For example, C₂-C₁₀, as in “C₂-C₁₀ alkene” is defined to include groups having 2, 3, 4, 5 . . . 10 carbons in a linear or branched arrangement, and specifically includes vinyl, allyl, 1-butene, 2-butene, iso-butene, 1-pentene, 2-pentene, etc. Alkylene groups can be unsubstituted or substituted with one or more substituents, including but not limited to halogen, alkoxy, alkylthio, trifluoromethyl, difluoromethyl, methoxy, and hydroxyl. An embodiment can be C₂-C₃ alkene, C₂-C₄ alkene, C₂-C₅ alkene, and so on. Alkene is intended to include moieties that are monovalent, divalent, trivalent, etc.

[1752] As used herein, an “acyl” refers to an alkyl group having a ketone at the first position. For example, an “acyl” embodiment can be acetyl, propionyl, butyryl and valeryl. As another example, an “acyl” embodiment can be:

[chemical structure]

wherein n is 1-10. In another embodiment, n is 1-4.

[1753] Thus, a “C₂-C₅ acyl” can be acetyl, propionyl, butyryl, or and valeryl. Acyl is intended to include moieties that are monovalent, divalent, trivalent, etc.

[1754] C₂-C₅ acylamino is an acyl group as defined above further substituted with an amine. The amine may be linked to the carbonyl portion of the acyl group so as to form an amide or the amine may linked to a non-carbonyl portion of the acyl group. For example, the amino group may be at the alpha-position, the beta-position, the gamma-position, the delta-position, etc. As further examples, acylamino includes both alpha-aminoacetyl and acetamido groups. Acylamino includes beta-aminopropionyl).

[1755] C₂-C₅ acyloxy is an acyl group as defined above further substituted with an oxygen. The oxygen may be linked to the carbonyl portion of the acyl group so as to form an amide or the oxygen may linked to a non-carbonyl portion of the acyl group. For example, the oxygen group may be at the alpha-position, the beta-position, the gamma-position, the delta-position, etc. As further examples, acyloxy includes both alpha-oxyacetyl and acetate groups. Acyloxy includes beta-oxypropionyl).

[1756] As used herein, “amino” includes primary, secondary, tertiary and quaternary amines. Thus, amino includes a —NH— group, a —NH₂ group, a —NR— group, a —NR₂⁺— group, a —NRH⁺— group, a —NH₂⁺— group, a —NH₃⁺ group and a —NR₃⁺ group, wherein R is alkyl or aryl. Amino is intended to include moieties that are monovalent, divalent, trivalent, etc.

[1757] As used herein, “sulfur” includes a —S— group and a —SH group. The term sulfur is intended to include moieties that are monovalent, divalent, trivalent, etc.

[1758] As used herein, “oxygen” includes a —O— group and a —OH group. The term sulfur is intended to moieties that are monovalent and divalent.

[1759] As used herein, “succinyl” is derived from succinic acid by removal of one or both hydroxyl groups. An embodiment can be —C(O)—CH₂—CH₂—C(O)—. Succinyl is intended to include moieties that are monovalent, divalent, trivalent, etc.

[1760] As used herein, a “malonyl” is derived from malonic acid by removal of one or both hydroxyl groups. An embodiment can be —C(O)—CH₂—C(O)—. Malonyl is intended to include moieties that are monovalent, divalent, trivalent, etc.

[1761] As used herein, a “glutaryl” is derived from glutaric acid by removal of one or both hydroxyl groups. An embodiment can be —C(O)—CH₂—CH₂—CH₂—C(O)—. Glutaryl is intended to include moieties that are monovalent, divalent, trivalent, etc.

[1762] As used herein, an “adipoyl” is derived from adipic acid by removal of one or both hydroxyl groups. An embodiment can be —C(O)—CH₂—CH₂—CH₂—CH₂—(O)—. Adipoyl is intended to include moieties that are monovalent, divalent, trivalent, etc.

[1763] A “polyalkylene glycol” is derived from polyalkylene glycol by removal of both hydrogens from the hydroxyl groups. An embodiment can be derived from polyethylene glycol, polypropylene glycol, or polybutylene glycol.

[1764] An “polyalkylene glycol” embodiment can be

[chemical structure]

wherein n is 1-10.

[1765] As used herein, “aryl” is intended to mean any stable monocyclic, bicyclic or polycyclic carbon ring of up to 10 atoms in each ring, wherein at least one ring is aromatic, and may be unsubstituted or substituted. Examples of such aryl elements include but are not limited to: phenyl, p-toluenyl (4-methylphenyl), naphthyl, tetrahydro-naphthyl, indanyl, phenanthryl, anthryl or acenaphthyl. In cases where the aryl substituent is bicyclic and one ring is non-aromatic, it is understood that attachment is via the aromatic ring.

[1766] The term “heteroaryl”, as used herein, represents a stable monocyclic, bicyclic or polycyclic ring of up to 10 atoms in each ring, wherein at least one ring is aromatic and contains from 1 to 4 heteroatoms selected from the group consisting of O, N and S. Bicyclic aromatic heteroaryl groups include phenyl, pyridine, pyrimidine or pyridizine rings that are (a) fused to a 6-membered aromatic (unsaturated) heterocyclic ring having one nitrogen atom; (b) fused to a 5- or 6-membered aromatic (unsaturated) heterocyclic ring having two nitrogen atoms; (c) fused to a 5-membered aromatic (unsaturated) heterocyclic ring having one nitrogen atom together with either one oxygen or one sulfur atom; or (d) fused to a 5-membered aromatic (unsaturated) heterocyclic ring having one heteroatom selected from O, N or S. Heteroaryl groups within the scope of this definition include but are not limited to: benzoimidazolyl, benzofuranyl, benzofurazanyl, benzopyrazolyl, benzotriazolyl, benzothiophenyl, benzoxazolyl, carbazolyl, carbolinyl, cinnolinyl, dihydropyridizine, furanyl, indolinyl, indolyl, indolazinyl, indazolyl, isobenzofuranyl, isoindolyl, isoquinolyl, isothiazolyl, isoxazolyl, naphthpyridinyl, oxadiazolyl, oxazolyl, oxazoline, isoxazoline, oxetanyl, pyranyl, pyrazinyl, pyrazolyl, pyridazinyl, pyridopyridinyl, pyridazinyl, pyridyl, pyrimidyl, pyrrolyl, quinazolinyl, quinolyl, quinoxalinyl, tetrazolyl, tetrazolopyridyl, thiadiazolyl, thiazolyl, thienyl, triazolyl, azetidinyl, aziridinyl, 1,4-dioxanyl, hexahydroazepinyl, dihydrobenzoimidazolyl, dihydrobenzofuranyl, dihydrobenzothiophenyl, dihydrobenzoxazolyl, dihydrofuranyl, dihydroimidazolyl, dihydroindolyl, dihydroisooxazolyl, dihydroisothiazolyl, dihydrooxadiazolyl, dihydrooxazolyl, dihydropyrazinyl, dihydropyrazolyl, dihydropyridinyl, dihydropyrimidinyl, dihydropyrrolyl, dihydroquinolinyl, dihydrotetrazolyl, dihydrothiadiazolyl, dihydrothiazolyl, dihydrothienyl, dihydrotriazolyl, dihydroazetidinyl, methylenedioxybenzoyl, tetrahydrofuranyl, tetrahydrothienyl, acridinyl, carbazolyl, cinnolinyl, quinoxalinyl, pyrrazolyl, indolyl, benzotriazolyl, benzothiazolyl, benzoxazolyl, isoxazolyl, isothiazolyl, furanyl, thienyl, benzothienyl, benzofuranyl, quinolinyl, isoquinolinyl, oxazolyl, isoxazolyl, indolyl, pyrazinyl, pyridazinyl, pyridinyl, pyrimidinyl, pyrrolyl, tetra-hydroquinoline. In cases where the heteroaryl substituent is bicyclic and one ring is non-aromatic or contains no heteroatoms, it is understood that attachment is via the aromatic ring or via the heteroatom containing ring, respectively. If the heteroaryl contains nitrogen atoms, it is understood that the corresponding N-oxides thereof are also encompassed by this definition.

[1767] The term “phenyl” is intended to mean an aromatic six membered ring containing six carbons, and any substituted derivative thereof.

[1768] The term “benzyl” is intended to mean a methylene attached directly to a benzene ring. A benzyl group is a methyl group wherein a hydrogen is replaced with a phenyl group, and any substituted derivative thereof.

[1769] The term “triazole” is intended to mean a heteraryl having a five-membered ring containing two carbon atoms and three nitrogen atoms, and any substituted derivative thereof.

[1770] Dihydropyradizine is optionally substituted and includes 1,2-dihydropyridazines,

[chemical structure]

1,4-dihydropyridazines,

[chemical structure]

1,6-dihydropyridazines,

[chemical structure]

and 4,5-dihydropyridazines,

[chemical structure]

[1771] A chemical structure containing a cyclooctane fused to a dihydropyridazine includes, but is not limited to, a chemical structure which contains a cyclooctane fused to the 3rd and 4th position of a dihydropyridazine or a chemical structure which contains a saturated cycloocta[d]pyridazine, any of which are optionally substituted. For example, the chemical structure containing a cyclooctane fused to a dihydropyridazine includes, but is not limited to, a chemical structure which contains a 2,4a,5,6,7,8,9,10-octahydrocycloocta[d]pyridazine,

[chemical structure]

a 4a,5,6,7,8,9,10,10a-octahydrocycloocta[d]pyridazine,

[chemical structure]

a 2,3,5,6,7,8,9,10-octahydrocycloocta[d]pyridazine,

[chemical structure]

or a 1,2,5,6,7,8,9,10-octahydrocycloocta[d]pyridazine,

[chemical structure]

each of which may be optionally substituted.

[1772] Tautomers of

[chemical structure]

include, but are not limited to:

[chemical structure]

[1773] In some embodiments, the dihydropyridazine is oxidized to a pyridazine.

[1774] In some embodiments, the dihydropyridazine is reduced to result in an open ring structure having a 1,4-dicarbonyl compound.

[1775] The compounds used in the method of the present invention may be prepared by techniques well know in organic synthesis and familiar to a practitioner ordinarily skilled in the art. However, these may not be the only means by which to synthesize or obtain the desired compounds.

[1776] Compounds of the subject invention can be converted to prodrugs to optimize absorption and bioavailability. Formation of a prodrug include, but is not limited to, reaction of a free hydroxyl group with a carboxylic acid to form an ester, reaction of a free hydroxyl group with an phosphorus oxychloride followed by hydrolysis to form a phosphate, or reaction of a free hydroxyl group with an amino acid to form an amino acid ester, the process of which has been described previously by Chandran in WO 2005/046575. The substituents are chosen and resulting analogs are evaluated according to principles well known in the art of medicinal and pharmaceutical chemistry, such as quantification of structure-activity relationships, optimization of biological activity and ADMET (absorption, distribution, metabolism, excretion, and toxicity) properties.

[1777] The various R groups attached to the aromatic rings of the compounds disclosed herein may be added to the rings by standard procedures, for example those set forth in Advanced Organic Chemistry: Part B: Reaction and Synthesis, Francis Carey and Richard Sundberg, (Springer) 5th ed. Edition. (2007), the content of which is hereby incorporated by reference.

[1778] The compounds of present invention may be prepared by techniques described in Vogel's Textbook of Practical Organic Chemistry, A. I. Vogel, A. R. Tatchell, B. S. Furnis, A. J. Hannaford, P. W. G. Smith, (Prentice Hall) 5th Edition (1996), March's Advanced Organic Chemistry: Reactions, Mechanisms, and Structure, Michael B. Smith, Jerry March, (Wiley-Interscience) 5th Edition (2007), and references therein, which are incorporated by reference herein. However, these may not be the only means by which to synthesize or obtain the desired compounds.

[1779] A person having ordinary skill in the art will immediately understand that the definitions of the substituents and moieties provided herein are intended to obey the standard rules of chemical valency. For example, where a structure provided herein requires a particular substituent or moiety to be divalent, (e.g. a moiety in a linear chain of moieties) a person having ordinary skill in the art will immediately understand that the definitions of that substituent or moiety are divalent in order to obey the standard rules of chemical valency.

[1780] A person having ordinary skill in the art will immediately understand that some divalent moieties depicted in the present invention may be linked to other chemical structures in more than one way, e.g., the depicted structures may be linked to other chemical structures when rotated or flipped.

[1781] In some embodiments of the present invention, a compound comprises a nonproteinaceous polymer. In some embodiments, the nonproteinaceous polymer may be is a hydrophilic synthetic polymer, i.e., a polymer not otherwise found in nature. However, polymers which exist in nature and are produced by recombinant or in vitro methods are useful, as are polymers which are isolated from nature. Hydrophilic polyvinyl polymers fall within the scope of this invention, e.g. polyvinylalcohol and polyvinylpyrrolidone. Particularly useful are polyalkylene ethers such as polyethylene glycol, polypropylene glycol, polyoxyethylene esters or methoxy polyethylene glycol; polyoxyalkylenes such as polyoxyethylene, polyoxypropylene, and block copolymers of polyoxyethylene and polyoxypropylene (Pluronics); polymethacrylates; carbomers; branched or unbranched polysaccharides which comprise the saccharide monomers D-mannose, D- and L-galactose, fucose, fructose, D-xylose, L-arabinose, D-glucuronic acid, sialic acid, D-galacturontc acid, D-mannuronic acid (e.g. polymannuronic acid, or alginic acid), D-glucosamine, D-galactosamine, D-glucose and neuraminic acid including homopolysaccharides and heteropolysaccharides such as lactose, amylopectin, starch, hydroxyethyl starch, amylose, dextran sulfate, dextran, dextrins, glycogen, or the polysaccharide subunit of acid mucopolysaccharides, e.g. hyaluronic acid; polymers of sugar alcohols such as polysorbitol and polymannitol; and heparin or heparon.

### Salts

[1782] Salts of the compounds disclosed herein are within the scope of the invention. As used herein, a “salt” is salt of the instant compounds which has been modified by making acid or base salts of the compounds.

### Stretches of Consecutive Amino Acids/Domains

[1783] Domains of the invention may be any of the stretches of consecutive amino acids as referred to herein. Examples of stretches of consecutive amino acids as referred to herein include, but are not limited to, consecutive amino acids including binding domains of proteins such as secreted or transmembrane proteins, intracellular binding domains and antibodies (whole or portions thereof) and modified versions thereof. Thus, domains of the invention include, without limitation, binding domains of proteins or portions or modified versions thereof, secreted proteins or portions or modified versions thereof, transmembrane proteins or portions or modified versions thereof, intracellular binding domains or portions or modified versions thereof, and antibodies or portions or modified versions thereof. In the case of portions of transmembrane proteins, this invention specifically contemplates transmembrane domains of transmembrane proteins, in particular heterologous transmembrane domains. The following are some non-limiting examples:

### Immunoglobulins

[1784] The term “antibody” is used in the broadest sense and specifically covers monoclonal antibodies (including full length monoclonal antibodies), polyclonal antibodies, multispecific antibodies (e.g., bispecific antibodies), monovalent antibodies, multivalent antibodies, and antibody fragments so long as they exhibit the desired biological activity (e.g., Fab and/or single-armed antibodies).

[1785] The “class” of an antibody refers to the type of constant domain or constant region possessed by its heavy chain. There are five major classes of antibodies: IgA, IgD, IgE, IgG, and IgM, and several of these may be further divided into subclasses (isotypes), e.g., IgG1, IgG2, IgG3, IgG4, IgA1, and IgA2. The heavy chain constant domains that correspond to the different classes of immunoglobulins are called α, δ, ε, γ, and μ, respectively.

[1786] An “antibody fragment” refers to a molecule other than an intact antibody that comprises a portion of an intact antibody that binds the antigen to which the intact antibody binds. Examples of antibody fragments include but are not limited to Fv, Fab, Fab′, Fab′-SH, F(ab′)2; diabodies; linear antibodies; single-chain antibody molecules (e.g., scFv); and multispecific antibodies formed from antibody fragments.

[1787] The terms “full length antibody,” “intact antibody,” and “whole antibody” are used herein interchangeably to refer to an antibody having a structure substantially similar to a native antibody structure or having heavy chains that contain an Fc region as defined herein.

[1788] A “blocking” antibody or an “antagonist” antibody is one which significantly inhibits (either partially or completely) a biological activity of the antigen it binds.

[1789] An “antibody that binds to the same epitope” as a reference antibody refers to an antibody that blocks binding of the reference antibody to its antigen in a competition assay by 50% or more, and conversely, the reference antibody blocks binding of the antibody to its antigen in a competition assay by 50% or more. An exemplary competition assay is provided herein.

[1790] The term “variable region” or “variable domain” refers to the domain of an antibody heavy or light chain that is involved in binding the antibody to antigen. The variable domains of the heavy chain and light chain (VH and VL, respectively) of a native antibody generally have similar structures, with each domain comprising four conserved framework regions (FRs) and three hypervariable regions (HVRs). (See, e.g., Kindt et al. Kuby Immunology, 6th ed., W.H. Freeman and Co., page 91 (2007).) A single VH or VL domain may be sufficient to confer antigen-binding specificity. Furthermore, antibodies that bind a particular antigen may be isolated using a VH or VL domain from an antibody that binds the antigen to screen a library of complementary VL or VH domains, respectively. See, e.g., Portolano et al., J. Immunol. 150:880-887 (1993); Clarkson et al., Nature 352:624-628 (1991).

[1791] The term “hypervariable region” or “HVR,” as used herein, refers to each of the regions of an antibody variable domain which are hypervariable in sequence and/or form structurally defined loops (“hypervariable loops”). Generally, native four-chain antibodies comprise six HVRs; three in the VH (H1, H2, H3), and three in the VL (L1, L2, L3). HVRs generally comprise amino acid residues from the hypervariable loops and/or from the “complementarity determining regions” (CDRs), the latter being of highest sequence variability and/or involved in antigen recognition. Exemplary hypervariable loops occur at amino acid residues 26-32 (L1), 50-52 (L2), 91-96 (L3), 26-32 (H1), 53-55 (H2), and 96-101 (H3). (Chothia and Lesk, J. Mol. Biol. 196:901-917 (1987).) Exemplary CDRs (CDR-L1, CDR-L2, CDR-L3, CDR-H1, CDR-H2, and CDR-H3) occur at amino acid residues 24-34 of L1, 50-56 of L2, 89-97 of L3, 31-35B of H1, 50-65 of H2, and 95-102 of H3. (Kabat et al., Sequences of Proteins of Immunological Interest, 5th Ed. Public Health Service, National Institutes of Health, Bethesda, Md. (1991).) With the exception of CDR1 in VH, CDRs generally comprise the amino acid residues that form the hypervariable loops. CDRs also comprise “specificity determining residues,” or “SDRs,” which are residues that contact antigen. SDRs are contained within regions of the CDRs called abbreviated-CDRs, or a-CDRs. Exemplary a-CDRs (a-CDR-L1, a-CDR-L2, a-CDR-L3, a-CDR-H1, a-CDR-H2, and a-CDR-H3) occur at amino acid residues 31-34 of L1, 50-55 of L2, 89-96 of L3, 31-35B of H1, 50-58 of H2, and 95-102 of H3. (See Almagro and Fransson, Front. Biosci. 13:1619-1633 (2008).) Unless otherwise indicated, HVR residues and other residues in the variable domain (e.g., FR residues) are numbered herein according to Kabat et al., supra.

[1792] “Framework” or “FR” refers to variable domain residues other than hypervariable region (HVR) residues. The FR of a variable domain generally consists of four FR domains: FR1, FR2, FR3, and FR4. Accordingly, the HVR and FR sequences generally appear in the following sequence in VH (or VL): FR1-H1(L1)-FR2-H2(L2)-FR3-H3(L3)-FR4.

[1793] The phrase “N-terminally truncated heavy chain”, as used herein, refers to a polypeptide comprising parts but not all of a full length immunoglobulin heavy chain, wherein the missing parts are those normally located on the N terminal region of the heavy chain. Missing parts may include, but are not limited to, the variable domain, CH1, and part or all of a hinge sequence. Generally, if the wild type hinge sequence is not present, the remaining constant domain(s) in the N-terminally truncated heavy chain would comprise a component that is capable of linkage to another Fc sequence (i.e., the “first” Fc polypeptide as described herein). For example, said component can be a modified residue or an added cysteine residue capable of forming a disulfide linkage.

[1794] “Fc receptor” or “FcR” describes a receptor that binds to the Fc region of an antibody. In some embodiments, an FcR is a native human FcR. In some embodiments, an FcR is one which binds an IgG antibody (a gamma receptor) and includes receptors of the FcγRI, FcγRII, and FcγRIII subclasses, including allelic variants and alternatively spliced forms of those receptors. FcγRII receptors include FcγRIIA (an “activating receptor”) and FcγRIIB (an “inhibiting receptor”), which have similar amino acid sequences that differ primarily in the cytoplasmic domains thereof. Activating receptor FcγRIIA contains an immunoreceptor tyrosine-based activation motif (ITAM) in its cytoplasmic domain Inhibiting receptor FcγRIIB contains an immunoreceptor tyrosine-based inhibition motif (ITIM) in its cytoplasmic domain. (see, e.g., Daeron, Annu. Rev. Immunol. 15:203-234 (1997)). FcRs are reviewed, for example, in Ravetch and Kinet, Annu. Rev. Immunol 9:457-92 (1991); Capel et al., Immunomethods 4:25-34 (1994); and de Haas et al., J. Lab. Clin. Med. 126:330-41 (1995). Other FcRs, including those to be identified in the future, are encompassed by the term “FcR” herein.

[1795] The term “Fc receptor” or “FcR” also includes the neonatal receptor, FcRn, which is responsible for the transfer of maternal IgGs to the fetus (Guyer et al., J. Immunol. 117:587 (1976) and Kim et al., J. Immunol. 24:249 (1994)) and regulation of homeostasis of immunoglobulins. Methods of measuring binding to FcRn are known (see, e.g., Ghetie and Ward., Immunol. Today 18(12):592-598 (1997); Ghetie et al., Nature Biotechnology, 15(7):637-640 (1997); Hinton et al., J. Biol. Chem. 279(8):6213-6216 (2004); WO 2004/92219 (Hinton et al.).

[1796] Binding to human FcRn in vivo and serum half life of human FcRn high affinity binding polypeptides can be assayed, e.g., in transgenic mice or transfected human cell lines expressing human FcRn, or in primates to which the polypeptides with a variant Fc region are administered. WO 2000/42072 (Presta) describes antibody variants with improved or diminished binding to FcRs. See also, e.g., Shields et al. J. Biol. Chem. 9(2):6591-6604 (2001).

[1797] The “hinge region,” “hinge sequence”, and variations thereof, as used herein, includes the meaning known in the art, which is illustrated in, for example, Janeway et al., Immuno Biology: the immune system in health and disease, (Elsevier Science Ltd., NY) (4th ed., 1999); Bloom et al., Protein Science (1997), 6:407-415; Humphreys et al., J. Immunol. Methods (1997), 209:193-202.

[1798] Unless indicated otherwise, the expression “multivalent antibody” is used throughout this specification to denote an antibody comprising three or more antigen binding sites. The multivalent antibody is preferably engineered to have the three or more antigen binding sites and is generally not a native sequence IgM or IgA antibody.

[1799] An “Fv” fragment is an antibody fragment which contains a complete antigen recognition and binding site. This region consists of a dimer of one heavy and one light chain variable domain in tight association, which can be covalent in nature, for example in scFv. It is in this configuration that the three HVRs of each variable domain interact to define an antigen binding site on the surface of the VH-VL dimer. Collectively, the six HVRs or a subset thereof confer antigen binding specificity to the antibody. However, even a single variable domain (or half of an Fv comprising only three HVRs specific for an antigen) has the ability to recognize and bind antigen, although usually at a lower affinity than the entire binding site.

[1800] The “Fab” fragment contains a variable and constant domain of the light chain and a variable domain and the first constant domain (CH1) of the heavy chain. F(ab′) 2 antibody fragments comprise a pair of Fab fragments which are generally covalently linked near their carboxy termini by hinge cysteines between them. Other chemical couplings of antibody fragments are also known in the art.

[1801] The phrase “antigen binding arm”, as used herein, refers to a component part of an antibody fragment that has an ability to specifically bind a target molecule of interest. Generally and preferably, the antigen binding arm is a complex of immunoglobulin polypeptide sequences, e.g., HVR and/or variable domain sequences of an immunoglobulin light and heavy chain.

[1802] “Single-chain Fv” or “scFv” antibody fragments comprise the VH and VL domains of antibody, wherein these domains are present in a single polypeptide chain. Generally the Fv polypeptide further comprises a polypeptide linker between the VH and VL domains, which enables the scFv to form the desired structure for antigen binding. For a review of scFv, see Pluckthun in The Pharmacology of Monoclonal Antibodies, Vol 113, Rosenburg and Moore eds. Springer-Verlag, New York, pp. 269-315 (1994).

[1803] The term “diabodies” refers to small antibody fragments with two antigen-binding sites, which fragments comprise a heavy chain variable domain (VH) connected to a light chain variable domain (VL) in the same polypeptide chain (VH and VL). By using a linker that is too short to allow pairing between the two domains on the same chain, the domains are forced to pair with the complementary domains of another chain and create two antigen-binding sites. Diabodies are described more fully in, for example, EP 404,097; WO 93/11161; and Hollinger et al., Proc. Natl. Acad. Sci. USA, 90:6444-6448 (1993).

[1804] The expression “linear antibodies” refers to the antibodies described in Zapata et al., Protein Eng., 8(10):1057-1062 (1995). Briefly, these antibodies comprise a pair of tandem Fd segments (V_{H}-C_{H1}-V_{H}-C_{H1}) which, together with complementary light chain polypeptides, form a pair of antigen binding regions. Linear antibodies can be bispecific or monospecific.

[1805] The term “monoclonal antibody” as used herein refers to an antibody obtained from a population of substantially homogeneous antibodies, i.e., the individual antibodies comprising the population are identical and/or bind the same epitope, except for possible variant antibodies, e.g., containing naturally occurring mutations or arising during production of a monoclonal antibody preparation, such variants generally being present in minor amounts. In contrast to polyclonal antibody preparations, which typically include different antibodies directed against different determinants (epitopes), each monoclonal antibody of a monoclonal antibody preparation is directed against a single determinant on an antigen. Thus, the modifier “monoclonal” indicates the character of the antibody as being obtained from a substantially homogeneous population of antibodies, and is not to be construed as requiring production of the antibody by any particular method. For example, the monoclonal antibodies to be used may be made by a variety of techniques, including but not limited to the hybridoma method, recombinant DNA methods, phage-display methods, and methods utilizing transgenic animals containing all or part of the human immunoglobulin loci, such methods and other exemplary methods for making monoclonal antibodies being described herein.

[1806] The term “chimeric” antibody refers to an antibody in which a portion of the heavy and/or light chain is derived from a particular source or species, while the remainder of the heavy and/or light chain is derived from a different source or species.

[1807] A “humanized” antibody refers to a chimeric antibody comprising amino acid residues from non-human HVRs and amino acid residues from human FRs. In certain embodiments, a humanized antibody will comprise substantially all of at least one, and typically two, variable domains, in which all or substantially all of the HVRs (e.g., CDRs) correspond to those of a non-human antibody, and all or substantially all of the FRs correspond to those of a human antibody. A humanized antibody optionally may comprise at least a portion of an antibody constant region derived from a human antibody. A “humanized form” of an antibody, e.g., a non-human antibody, refers to an antibody that has undergone humanization.

[1808] A “human antibody” is one which possesses an amino acid sequence which corresponds to that of an antibody produced by a human or a human cell or derived from a non-human source that utilizes human antibody repertoires or other human antibody-encoding sequences. This definition of a human antibody specifically excludes a humanized antibody comprising non-human antigen-binding residues.

[1809] A “naked antibody” refers to an antibody that is not conjugated to a heterologous moiety (e.g., a cytotoxic moiety) or radiolabel. The naked antibody may be present in a pharmaceutical formulation.

[1810] “Native antibodies” refer to naturally occurring immunoglobulin molecules with varying structures. For example, native IgG antibodies are heterotetrameric glycoproteins of about 150,000 Daltons, composed of two identical light chains and two identical heavy chains that are disulfide-bonded. From N- to C-terminus, each heavy chain has a variable region (VH), also called a variable heavy domain or a heavy chain variable domain, followed by three constant domains (CH1, CH2, and CH3). Similarly, from N- to C-terminus, each light chain has a variable region (VL), also called a variable light domain or a light chain variable domain, followed by a constant light (CL) domain. The light chain of an antibody may be assigned to one of two types, called kappa (κ) and lambda (λ), based on the amino acid sequence of its constant domain.

[1811] “Affinity” refers to the strength of the sum total of noncovalent interactions between a single binding site of a molecule (e.g., an antibody) and its binding partner (e.g., an antigen). Unless indicated otherwise, as used herein, “binding affinity” refers to intrinsic binding affinity which reflects a 1:1 interaction between members of a binding pair (e.g., antibody and antigen). The affinity of a molecule X for its partner Y can generally be represented by the dissociation constant (Kd). Affinity can be measured by common methods known in the art, including those described herein. Specific illustrative and exemplary embodiments for measuring binding affinity are described in the following.

[1812] An “affinity matured” antibody refers to an antibody with one or more alterations in one or more HVRs, compared to a parent antibody which does not possess such alterations, such alterations resulting in an improvement in the affinity of the antibody for antigen.

[1813] An antibody having a “biological characteristic” of a designated antibody is one which possesses one or more of the biological characteristics of that antibody which distinguish it from other antibodies that bind to the same antigen.

[1814] A “functional antigen binding site” of an antibody is one which is capable of binding a target antigen. The antigen binding affinity of the antigen binding site is not necessarily as strong as the parent antibody from which the antigen binding site is derived, but the ability to bind antigen must be measurable using any one of a variety of methods known for evaluating antibody binding to an antigen. Moreover, the antigen binding affinity of each of the antigen binding sites of a multivalent antibody herein need not be quantitatively the same. For the multimeric antibodies herein, the number of functional antigen binding sites can be evaluated using ultracentrifugation analysis as described in Example 2 of U.S. Patent Application Publication No. 2005/0186208 A1. According to this method of analysis, different ratios of target antigen to multimeric antibody are combined and the average molecular weight of the complexes is calculated assuming differing numbers of functional binding sites. These theoretical values are compared to the actual experimental values obtained in order to evaluate the number of functional binding sites.

[1815] A “species-dependent antibody” is one which has a stronger binding affinity for an antigen from a first mammalian species than it has for a homologue of that antigen from a second mammalian species. Normally, the species-dependent antibody “binds specifically” to a human antigen (i.e. has a binding affinity (K_{d}) value of no more than about 1×10⁻⁷ M, preferably no more than about 1×10⁻⁸ M and most preferably no more than about 1×10⁻⁹ M) but has a binding affinity for a homologue of the antigen from a second nonhuman mammalian species which is at least about 50 fold, or at least about 500 fold, or at least about 1000 fold, weaker than its binding affinity for the human antigen. The species-dependent antibody can be any of the various types of antibodies as defined above. In some embodiments, the species-dependent antibody is a humanized or human antibody.

[1816] An “isolated” antibody is one which has been separated from a component of its natural environment. In some embodiments, an antibody is purified to greater than 95% or 99% purity as determined by, for example, electrophoretic (e.g., SDS-PAGE, isoelectric focusing (IEF), capillary electrophoresis) or chromatographic (e.g., ion exchange or reverse phase HPLC). For review of methods for assessment of antibody purity, see, e.g., Flatman et al., J. Chromatogr. B 848:79-87 (2007).

### Fc Domains

[1817] The term “Fc domain”, as used herein, generally refers to a monomer or dimer complex, comprising the C-terminal polypeptide sequences of an immunoglobulin heavy chain. The Fc domain may comprise native or variant Fc sequences. Although the boundaries of the Fc domain of an immunoglobulin heavy chain might vary, the human IgG heavy chain Fc domain is usually defined to stretch from an amino acid residue in the hinge region to the carboxyl terminus of the Fc sequence. The Fc sequence of an immunoglobulin generally comprises two constant regions, a CH2 region and a CH3 region, and optionally comprises a CH4 region. A human Fc domain may be obtained from any suitable immunoglobulin, such as the IgG1, IgG2, IgG3, or IgG4 subtypes, IgA, IgE, IgD or IgM.

[1818] Suitable Fc domains are prepared by recombinant DNA expression of pre-Fc chimeric polypeptides comprising 1) a signal peptide, obtained from a secreted or transmembrane protein, that is cleaved in front of a mature polypeptide having an N-terminal cysteine residue, contiguous with 2) an Fc domain polypeptide having an N-terminal cysteine residue.

[1819] Suitable examples of signal peptides are sonic hedgehog (SHH) (GenBank Acc. No. NM000193), IFNalpha-2 (IFN) (GenBank Acc. No. NP000596), and cholesterol ester transferase (CETP) (GenBank Accession No. NM000078). Other suitable examples include Indian hedgehog (Genbank Acc. No. NM002181), desert hedgehog (Genbank Acc. No. NM021044), IFNalpha-1 (Genbank Ace. No. NP076918), IFNalpha-4 (Genbank Ace. No. NM021068), IFNalpha-5 (Genbank Ace. No. NM002169), IFNalpha-6 (Genbank Ace. No. NM021002), IFNalpha-7 (Genbank Ace. No. NM021057), IFNalpha-8 (Genbank Ace. No. NM002170), IFNalpha-10 (Genbank Ace. No. NM002171), IFNalpha-13 (Genbank Ace. No. NM006900), IFNalpha-14 (Genbank Ace. No. NM002172), IFNalpha-16 (Genbank Ace. No. NM002173), IFNalpha-17 (Genbank Ace. No. NM021268) and IFNalpha-21 (Genbank Ace. No. NM002175).

[1820] Suitable examples of Fe domains and their pre-Fc chimeric polypeptides are shown in SEQ ID NO: 120 through SEQ ID NO: 215. The Fe domains are obtained by expressing the pre-Fc chimeric polypeptides in cells under conditions leading to their secretion and cleavage of the signal peptide. The pre-Fc polypeptides may be expressed in either prokaryotic or eukaryotic host cells. Preferably, mammalian host cells are transfected with expression vectors encoding the pre-Fc polypeptides.

[1821] Human IgG1 Fe domains having the N-terminal sequence CDKTHTCPPCPAPE, CPPCPAPE, and CPAPE are shown in SEQ ID NO: 120, SEQ ID NO: 128, and SEQ ID NO: 136, respectively, and the DNA sequences encoding them are shown in SEQ ID NO: 121, SEQ ID NO: 129, and SEQ ID NO: 137, respectively. The IgG1 domain of SEQ ID NO: 120 is obtained by expressing the pre-Fc chimeric polypeptides shown in SEQ ID NO: 122 (SHH signal peptide), SEQ ID NO: 124 (IFN signal peptide), and SEQ ID NO: 126 (CETP signal peptide), using the DNA sequences shown in SEQ ID NO: 123, SEQ ID NO: 125, and SEQ ID NO: 127, respectively. The IgG1 domain of SEQ ID NO: 128 is obtained by expressing the pre-Fc chimeric polypeptides shown in SEQ ID NO: 130 (SHH signal peptide), SEQ ID NO: 132 (IFN signal peptide), and SEQ ID NO: 134 (CETP signal peptide), using the DNA sequences shown in SEQ ID NO: 131, SEQ ID NO: 133, and SEQ ID NO: 135, respectively. The IgG1 domain of SEQ ID NO: 136 is obtained by expressing the pre-Fc chimeric polypeptides shown in SEQ ID NO: 138 (SHH signal peptide), SEQ ID NO: 140 (IFN signal peptide), and SEQ ID NO: 142 (CETP signal peptide), using the DNA sequences shown in SEQ ID NO: 139, SEQ ID NO: 141, and SEQ ID NO: 143, respectively.

[1822] Human IgG2 Fe domains having the N-terminal sequence CCVECPPCPAPE, CVECPPCPAPE, CPPCPAPE, and CPAPE are shown in SEQ ID NO: 144, SEQ ID NO: 152, SEQ ID NO: 160, and SEQ ID NO: 168, respectively, and the DNA sequences encoding them are shown in SEQ ID NO: 145, SEQ ID NO: 153, SEQ ID NO: 161, and SEQ ID NO: 169, respectively. The IgG2 domain of SEQ ID NO: 144 is obtained by expressing the pre-Fc chimeric polypeptides shown in SEQ ID NO: 146 (SHH signal peptide), SEQ ID NO: 148 (IFN signal peptide), and SEQ ID NO: 150 (CETP signal peptide), using the DNA sequences shown in SEQ ID NO: 147, SEQ ID NO: 149, and SEQ ID NO: 151, respectively. The IgG2 domain of SEQ ID NO: 152 is obtained by expressing the pre-Fc chimeric polypeptides shown in SEQ ID NO: 154 (SHH signal peptide), SEQ ID NO: 156 (IFN signal peptide), and SEQ ID NO: 158 (CETP signal peptide) using the DNA sequences shown in SEQ ID NO: 155, SEQ ID NO: 157, and SEQ ID NO: 159, respectively. The IgG2 domain of SEQ ID NO: 160 is obtained from the pre-Fc chimeric polypeptides shown in SEQ ID NO: 162 (SHH signal peptide), SEQ ID NO: 164 (IFN signal peptide), and SEQ ID NO: 166 (CETP signal peptide), using the DNA sequences shown in SEQ ID NO: 163, SEQ ID NO: 165, and SEQ ID NO: 167, respectively. The IgG2 domain of SEQ ID NO: 168 is obtained from the pre-Fc chimeric polypeptides shown in SEQ ID NO: 170 (SHH signal peptide), SEQ ID NO: 172 (IFN signal peptide), and SEQ ID NO: 174 (CETP signal peptide), using the DNA sequences shown in SEQ ID NO: 171, SEQ ID NO: 173, and SEQ ID NO: 175, respectively.

[1823] Human IgG3 Fc domains having the N-terminal sequence (CPRCPEPKSDTPPP)3-CPRCPAPE, CPRCPAPE, and CPAPE are shown in SEQ ID NO: 176, SEQ ID NO: 184, and SEQ ID NO: 192, respectively, and the DNA sequences encoding them are shown in SEQ ID NO: 177, SEQ ID NO: 185, SEQ ID NO: 161, and SEQ ID NO: 193, respectively. The IgG3 domain of SEQ ID NO: 176 is obtained by expressing the pre-Fc chimeric polypeptides shown in SEQ ID NO: 178 (SHH signal peptide), SEQ ID NO: 180 (IFN signal peptide), and SEQ ID NO: 182 (CETP signal peptide), using the DNA sequences shown in SEQ ID NO: 179, SEQ ID NO: 181, and SEQ ID NO: 183, respectively. The IgG3 domain of SEQ ID NO: 184 is obtained by expressing the pre-Fc chimeric polypeptides shown in SEQ ID NO: 186 (SHH signal peptide), SEQ ID NO: 188 (IFN signal peptide), and SEQ ID NO: 190 (CETP signal peptide), using the DNA sequences shown in SEQ ID NO: 187, SEQ ID NO: 189, and SEQ ID NO: 191, respectively. The IgG3 domain of SEQ ID NO: 192 is obtained by expressing the pre-Fc chimeric polypeptides shown in SEQ ID NO: 194 (SHH signal peptide), SEQ ID NO: 196 (IFN signal peptide), and SEQ ID NO: 198 (CETP signal peptide), using the DNA sequences shown in SEQ ID NO: 195, SEQ ID NO: 197, and SEQ ID NO: 199, respectively.

[1824] The sequences of human IgG4 Fe domains having the N-terminal sequence CPSCPAPE and CPAPE are shown in SEQ ID NO: 200 and SEQ ID NO: 208, respectively, and the DNA sequences encoding them are shown in SEQ ID NO: 201 and SEQ ID NO: 209, respectively. The IgG4 domain of SEQ ID NO: 200 is obtained by expressing the pre-Fc chimeric polypeptides shown in SEQ ID NO: 202 (SHH signal peptide), SEQ ID NO: 204 (IFN signal peptide), and SEQ ID NO: 206 (CETP signal peptide), using the DNA sequences shown in SEQ ID NO: 203, SEQ ID NO: 205, and SEQ ID NO: 207, respectively. The IgG4 domain of SEQ ID NO: 208 is obtained by expressing the pre-Fc chimeric polypeptides shown in SEQ ID NO: 210 (SHH signal peptide), SEQ ID NO: 212 (IFN signal peptide), and SEQ ID NO: 214 (CETP signal peptide), using the DNA sequences shown in SEQ ID NO: 211, SEQ ID NO: 213, and SEQ ID NO: 215, respectively.

[1825] Suitable antibody variants having at their heavy chain N-terminus a cysteine residue are prepared by recombinant DNA expression of pre-heavy chain chimeric polypeptides comprising 1) a signal peptide, obtained from a secreted or transmembrane protein, that is cleaved in front of a mature polypeptide having an N-terminal cysteine residue, contiguous with 2) a antibody heavy chain polypeptide having an N-terminal cysteine residue.

[1826] Suitable antibody variants having at their light chain N-terminus a cysteine residue are prepared by recombinant DNA expression of pre-light chain chimeric polypeptides comprising 1) a signal peptide, obtained from a secreted or transmembrane protein, that is cleaved in front of a mature polypeptide having an N-terminal cysteine residue, contiguous with 2) a antibody light chain polypeptide having an N-terminal cysteine residue.

[1827] Trastuzumab heavy and light chains are obtained by expressing the pre-heavy and pre-light chimeric polypeptides in cells under conditions leading to their secretion and cleavage of the signal peptide. The pre-heavy chain and pre-light chain polypeptides may be expressed in either prokaryotic or eukaryotic host cells. Preferably, mammalian host cells are transfected with expression vectors encoding the pre-heavy chain and pre-light chain polypeptides.

[1828] Protein sequences added to the N-terminus of the aforementioned antibody heavy chain, pre-heavy chain, light chain, and pre-light chain variants are illustrated herein for the recombinant antibody trastuzumab, but are generally applicable to any recombinant antibody. DNA sequences encoding trastuzumab and its variants may be constructed and expressed in mammalian cells by cotransfecting DNA vectors for its heavy and light chains, and variants derived thereof, as described in U.S. Pat. No. 5,821,337 (“Immunoglobulin Variants”) which is hereby incorporated by reference. The amino acid sequence of the wild-type trastuzumab light and heavy chains are shown in SEQ ID NO: 247 and SEQ ID NO: 248, respectively.

[1829] Suitable examples of trastuzumab light chains with N-terminal cysteine residues and their pre-Fc chimeric polypeptides are shown in SEQ ID NO: 249 through SEQ ID NO: 284. Suitable examples of trastuzumab heavy chains with N-terminal cysteine residues and their pre-Fc chimeric polypeptides are shown in SEQ ID NO: 285 through SEQ ID NO: 320.

[1830] Trastuzumab light chains having the N-terminal sequence C, CP, CPP, CPR, CPS, CDKT, CDKTHT, CVE, and CDTPPP are shown in SEQ ID NO: 249, SEQ ID NO: 253, SEQ ID NO: 257, SEQ ID NO: 261, SEQ ID NO: 265, SEQ ID NO: 269, SEQ ID NO: 273, SEQ ID NO: 277, and SEQ ID NO: 281, respectively. The light chain of SEQ ID NO: 249 is obtained by expressing the pre-light chimeric polypeptides shown in SEQ ID NO: 250 (SHH signal peptide), SEQ ID NO: 251 (IFN signal peptide), and SEQ ID NO: 252 (CETP signal peptide). The light chain of SEQ ID NO: 253 is obtained by expressing the pre-light chain chimeric polypeptides shown in SEQ ID NO: 254 (SHH signal peptide), SEQ ID NO: 255 (IFN signal peptide), and SEQ ID NO: 256 (CETP signal peptide). The light chain of SEQ ID NO: 257 is obtained by expressing the pre-light chimeric polypeptides shown in SEQ ID NO: 258 (SHH signal peptide), SEQ ID NO: 259 (IFN signal peptide), and SEQ ID NO: 260 (CETP signal peptide). The light chain of SEQ ID NO: 261 is obtained by expressing the pre-light chimeric polypeptides shown in SEQ ID NO: 262 (SHH signal peptide), SEQ ID NO: 263 (IFN signal peptide), and SEQ ID NO: 264 (CETP signal peptide). The light chain of SEQ ID NO: 265 is obtained by expressing the pre-heavy light chimeric polypeptides shown in SEQ ID NO: 266 (SHH signal peptide), SEQ ID NO: 267 (IFN signal peptide), and SEQ ID NO: 268 (CETP signal peptide). The light chain of SEQ ID NO: 269 is obtained by expressing the pre-light chimeric polypeptides shown in SEQ ID NO: 270 (SHH signal peptide), SEQ ID NO: 271 (IFN signal peptide), and SEQ ID NO: 272 (CETP signal peptide). The light chain of SEQ ID NO: 273 is obtained by expressing the pre-light chimeric polypeptides shown in SEQ ID NO: 274 (SHH signal peptide), SEQ ID NO: 275 (IFN signal peptide), and SEQ ID NO: 276 (CETP signal peptide). The light chain of SEQ ID NO: 277 is obtained by expressing the pre-light chimeric polypeptides shown in SEQ ID NO: 278 (SHH signal peptide), SEQ ID NO: 279 (IFN signal peptide), and SEQ ID NO: 280 (CETP signal peptide). The light chain of SEQ ID NO: 281 is obtained by expressing the pre-light chimeric polypeptides shown in SEQ ID NO: 282 (SHH signal peptide), SEQ ID NO: 283 (IFN signal peptide), and SEQ ID NO: 284 (CETP signal peptide).

[1831] Trastuzumab heavy chains having the N-terminal sequence C, CP, CPP, CPR, CPS, CDKT, CDKTHT, CVE, and CDTPPP are shown in SEQ ID NO: 285, SEQ ID NO: 289, SEQ ID NO: 293, SEQ ID NO: 297, SEQ ID NO: 301, SEQ ID NO: 305, SEQ ID NO: 309, SEQ ID NO: 313, and SEQ ID NO: 317, respectively. The heavy chain of SEQ ID NO: 285 is obtained by expressing the pre-heavy chain chimeric polypeptides shown in SEQ ID NO: 286 (SHH signal peptide), SEQ ID NO: 287 (IFN signal peptide), and SEQ ID NO: 288 (CETP signal peptide). The heavy chain of SEQ ID NO: 289 is obtained by expressing the pre-heavy chain chimeric polypeptides shown in SEQ ID NO: 290 (SHH signal peptide), SEQ ID NO: 291 (IFN signal peptide), and SEQ ID NO: 292 (CETP signal peptide). The heavy chain of SEQ ID NO: 293 is obtained from the pre-heavy chain chimeric polypeptides shown in SEQ ID NO: 294 (SHH signal peptide), SEQ ID NO: 295 (IFN signal peptide), and SEQ ID NO: 296 (CETP signal peptide). The heavy chain of SEQ ID NO: 297 is obtained from the pre-heavy chain chimeric polypeptides shown in SEQ ID NO: 298 (SHH signal peptide), SEQ ID NO: 299 (IFN signal peptide), and SEQ ID NO: 300 (CETP signal peptide). The heavy chain of SEQ ID NO: 301 is obtained by expressing the pre-heavy chain chimeric polypeptides shown in SEQ ID NO: 302 (SHH signal peptide), SEQ ID NO: 303 (IFN signal peptide), and SEQ ID NO: 304 (CETP signal peptide). The heavy chain of SEQ ID NO: 305 is obtained by expressing the pre-heavy chain chimeric polypeptides shown in SEQ ID NO: 306 (SHH signal peptide), SEQ ID NO: 307 (IFN signal peptide), and SEQ ID NO: 308 (CETP signal peptide). The heavy chain of SEQ ID NO: 309 is obtained from the pre-heavy chain chimeric polypeptides shown in SEQ ID NO: 310 (SHH signal peptide), SEQ ID NO: 311 (IFN signal peptide), and SEQ ID NO: 312 (CETP signal peptide). The heavy chain of SEQ ID NO: 313 is obtained from the pre-heavy chain chimeric polypeptides shown in SEQ ID NO: 314 (SHH signal peptide), SEQ ID NO: 315 (IFN signal peptide), and SEQ ID NO: 316 (CETP signal peptide). The heavy chain of SEQ ID NO: 317 is obtained from the pre-heavy chain chimeric polypeptides shown in SEQ ID NO: 318 (SHH signal peptide), SEQ ID NO: 319 (IFN signal peptide), and SEQ ID NO: 320 (CETP signal peptide).

[1832] Suitable host cells include 293 human embryonic cells (ATCC CRL-1573) and CHO-K1 hamster ovary cells (ATCC CCL-61) obtained from the American Type Culture Collection (Rockville, Md.). Cells are grown at 37° C. in an atmosphere of air, 95%; carbon dioxide, 5%. 293 cells are maintained in Minimal essential medium (Eagle) with 2 mM L-glutamine and Earle's BSS adjusted to contain 1.5 g/L sodium bicarbonate, 0.1 mM non-essential amino acids, and 1.0 mM sodium pyruvate, 90%; fetal bovine serum, 10%. CHO-K1 cells are maintained in Ham's F12K medium with 2 mM L-glutamine adjusted to contain 1.5 g/L sodium bicarbonate, 90%; fetal bovine serum, 10%. Other suitable host cells include CV1 monkey kidney cells (ATCC CCL-70), COS-7 monkey kidney cells (ATCC CRL-1651), VERO-76 monkey kidney cells (ATCC CRL-1587), HELA human cervical cells (ATCC CCL-2), W138 human lung cells (ATCC CCL-75), MDCK canine kidney cells (ATCC CCL-34), BRL3A rat liver cells (ATCC CRL-1442), BHK hamster kidney cells (ATCC CCL-10), MMT060562 mouse mammary cells (ATCC CCL-51), and human CD8+T lymphocytes (described in U.S. Ser. No. 08/258,152 incorporated herein in its entirety by reference).

[1833] Examples of a suitable expression vectors are pCDNA3.1(+) shown in SEQ ID NO: 216 and pSA shown in SEQ ID NO: 217. Plasmid pSA contains the following DNA sequence elements: 1) pBluescriptIIKS(+) (nucleotides 912-2941/1-619, GenBank Accession No. X52327), 2) a human cytomegalovirus promoter, enhancer, and first exon splice donor (nucleotides 63-912, GenBank Accession No. K03104), 3) a human alpha1-globin second exon splice acceptor (nucleotides 6808-6919, GenBank Accession No. J00153), 4) an SV40 T antigen polyadenylation site (nucleotides 2770-2533, Reddy et al. (1978) Science 200, 494-502), and 5) an SV40 origin of replication (nucleotides 5725-5578, Reddy et al., ibid). Other suitable expression vectors include plasmids pSVeCD4DHFR and pRKCD4 (U.S. Pat. No. 5,336,603), plasmid pIK.1.1 (U.S. Pat. No. 5,359,046), plasmid pVL-2 (U.S. Pat. No. 5,838,464), plasmid pRT43.2F3 (described in U.S. Ser. No. 08/258,152 incorporated herein in its entirety by reference).

[1834] Suitable expression vectors for human IgG pre-Fc polypeptides may be constructed by the ligation of a HindII-PspOM1 vector fragment prepared from SEQ ID NO: 217, with a HindIII-EagI insert fragment prepared from SEQ ID NOs: 123, 125, 127, 131, 133, 135, 139, 141, 143, 147, 149, 151, 155, 157, 159, 163, 165, 167, 171, 173, 175, 179, 181, 183, 187, 189, 191, 195, 197, 199, 203, 205, 207, 211, 213, and 215.

[1835] Suitable selectable markers include the Tn5 transposon neomycin phosphotransferase (NEO) gene (Southern and Berg (1982) J. Mol. Appl. Gen. 1, 327-341), and the dihydrofolate reductase (DHFR) cDNA (Lucas et al. (1996) Nucl. Acids Res. 24, 1774-1779). One example of a suitable expression vector that incorporates a NEO gene is plasmid pSA-NEO, which is constructed by ligating a first DNA fragment, prepared by digesting SEQ ID NO: 218 with EcoRI and BglII, with a second DNA fragment, prepared by digesting SEQ ID NO: 217 with EcoRI and BglII. SEQ ID NO: 218 incorporates a NEO gene (nucleotides 1551 to 2345, Genbank Accession No. U00004) preceded by a sequence for translational initiation (Kozak (1991) J. Biol. Chem, 266, 19867-19870). Another example of a suitable expression vector that incorporates a NEO gene and a DHFR cDNA is plasmid pSVe-NEO-DHFR, which is constructed by ligating a first DNA fragment, prepared by digesting SEQ ID NO: 218 with EcoRI and BglII, with a second DNA fragment, prepared by digesting pSVeCD4DHFR with EcoRI and BglII. Plasmid pSVe-NEO-DHFR uses SV40 early promoter/enhancers to drive expression of the NEO gene and the DHFR cDNA. Other suitable selectable markers include the XPGT gene (Mulligan and Berg (1980) Science 209, 1422-1427) and the hygromycin resistance gene (Sugden et al. (1985) Mol. Cell. Biol. 5, 410-413).

[1836] In one embodiment, cells are transfected by the calcium phosphate method of Graham et al. (1977) J. Gen. Virol. 36, 59-74. A DNA mixture (10 ug) is dissolved in 0.5 ml of 1 mM Tris-HCl, 0.1 mM EDTA, and 227 mM CaCl2). The DNA mixture contains (in a ratio of 10:1:1) the expression vector DNA, the selectable marker DNA, and a DNA encoding the VA RNA gene (Thimmappaya et al. (1982) Cell 31, 543-551). To this mixture is added, dropwise, 0.5 mL of 50 mM Hepes (pH 7.35), 280 mM NaCl, and 1.5 mM NaPO4. The DNA precipitate is allowed to form for 10 minutes at 25° C., then suspended and added to cells grown to confluence on 100 mm plastic tissue culture dishes. After 4 hours at 37° C., the culture medium is aspirated and 2 ml of 20% glycerol in PBS is added for 0.5 minutes. The cells are then washed with serum-free medium, fresh culture medium is added, and the cells are incubated for 5 days.

[1837] In another embodiment, cells are transiently transfected by the dextran sulfate method of Somparyrac et al. (1981) Proc. Nat. Acad. Sci. 12, 7575-7579. Cells are grown to maximal density in spinner flasks, concentrated by centrifugation, and washed with PBS. The DNA-dextran precipitate is incubated on the cell pellet. After 4 hours at 37° C., the DEAE-dextran is aspirated and 20% glycerol in PBS is added for 1.5 minutes. The cells are then washed with serum-free medium, re-introduced into spinner flasks containing fresh culture medium with 5 micrograms/ml bovine insulin and 0.1 micrograms/ml bovine transferring, and incubated for 4 days.

[1838] Following transfection by either method, the conditioned media is centrifuged and filtered to remove the host cells and debris. The sample contained the Fc domain is then concentrated and purified by any selected method, such as dialysis and/or column chromatography (see below). To identify the Fc domain in the cell culture supernatant, the culture medium is removed 24 to 96 hours after transfection, concentrated, and analyzed by SDS-polyacrylamide gel electrophoresis (SDS-PAGE) in the presence or absence of a reducing agent such as dithiothreitol.

[1839] For unamplified expression, plasmids are transfected into human 293 cells (Graham et al., J. Gen. Virol. 36:59 74 (1977)), using a high efficiency procedure (Gorman et al., DNA Prot. Eng. Tech. 2:3 10 (1990)). Media is changed to serum-free and harvested daily for up to five days. For unamplified expression, plasmids are transfected into human 293 cells (Graham et al., J. Gen. Virol. 36:59 74 (1977)), using a high efficiency procedure (Gorman et al., DNA Prot. Eng. Tech. 2:3 10 (1990)). Media is changed to serum-free and harvested daily for up to five days. The Fc domains are purified from the cell culture supernatant using HiTrap Protein A HP (Pharmacia). The eluted Fc domains are buffer-exchanged into PBS using a Centricon-30 (Amicon), concentrated to 0.5 ml, sterile filtered using a Millex-GV (Millipore) at 4° C.

Fc Domain Modifications Altering Fc Receptor Binding and/or Effector Function

[1840] In certain embodiments, the Fc domain is engineered to have altered binding affinity to an Fc receptor and/or altered effector function, as compared to a non-engineered Fc domain. Embodiments of said modifications are described in U.S. Patent Application Publication No. US 20130058937 A1 and in the paragraphs that follow.

[1841] Binding to Fc receptors can be easily determined e.g. by ELISA, or by Surface Plasmon Resonance (SPR) using standard instrumentation such as a BIAcore instrument (GE Healthcare), and Fc receptors such as may be obtained by recombinant expression. A suitable such binding assay is described herein. Alternatively, binding affinity of Fc domains or tetrahedral antibodies comprising an Fc domain for Fc receptors may be evaluated using cell lines known to express particular Fc receptors, such as NK cells expressing FcγIIIa receptor.

[1842] Effector function of an Fc domain, can be measured by methods known in the art. Suitable in vitro assays to assess ADCC activity of a molecule of interest are described in PCT publication no. WO 2006/082515 or PCT patent application no. PCT/EP2012/055393, incorporated herein by reference in their entirety. Useful effector cells for such assays include peripheral blood mononuclear cells (PBMC) and Natural Killer (NK) cells. Alternatively, or additionally, ADCC activity of the molecule of interest may be assessed in vivo, e.g. in a animal model such as that disclosed in Clynes et al., Proc Natl Acad Sci USA 95, 652-656 (1998).

[1843] In some embodiments binding of the Fc domain to a complement component, specifically to C1q, is altered. Accordingly, in some embodiments wherein the Fc domain is engineered to have altered effector function, said altered effector function includes altered CDC. C1q binding assays may be carried out to determine whether the Fc domain is able to bind C1q and hence has CDC activity. See e.g., C1q and C3c binding ELISA in WO 2006/029879 and WO 2005/100402. To assess complement activation, a CDC assay may be performed (see, for example, Gazzano-Santoro et al., J Immunol Methods 202, 163 (1996); Cragg et al., Blood 101, 1045-1052 (2003); and Cragg and Glennie, Blood 103, 2738-2743 (2004))

### Fc Variants

[1844] The present invention is directed to the generation of multispecific, particularly bispecific binding proteins, and in particular, multispecific antibodies. The present invention generally relies on the use of engineered or variant Fc domains that can self-assemble in production cells to produce heterodimeric proteins, and methods to generate and purify such heterodimeric proteins.

[1845] Furthermore, as outlined herein, additional amino acid variants may be introduced into the Fc domains of the invention, to add additional functionalities. For example, amino acid changes within the Fc region can be added (either to one monomer or both) to facilitate increased ADCC or CDC (e.g. altered binding to Fcγ receptors); to allow or increase yield of the addition of toxins and drugs (e.g. for ADC), as well as to increase binding to FcRn and/or increase serum half-life of the resulting molecules. As is further described herein and as will be appreciated by those in the art, any and all of the variants outlined herein can be optionally and independently combined with other variants. Similarly, another category of functional variants are “Fcγ ablation variants” or “Fcγ silencing variants”. In these embodiments, for some therapeutic applications, it is desirable to reduce or remove the normal binding of the Fc domain to one or more or all of the Fcγ receptors (e.g. FcγRI, FcγRIIa, FcγRIIb, FcγRIIIa, etc.) to avoid additional mechanisms of action. That is, for example, in many embodiments, particularly in the use of bispecific antibodies that bind CD3 monovalently and a tumor antigen on the other (e.g. CD19, her2/neu, etc.), it is generally desirable to ablate FcγRIIIa binding to eliminate or significantly reduce ADCC activity.

### Additional Fc Variants for Additional Functionality

[1846] Accordingly, there are a number of useful Fc substitutions that can be made to alter binding to one or more of the FcγR receptors. Substitutions that result in increased binding as well as decreased binding can be useful. For example, it is known that increased binding to FcγRIIIa generally results in increased ADCC (antibody dependent cell-mediated cytotoxicity; the cell-mediated reaction wherein nonspecific cytotoxic cells that express FcγRs recognize bound antibody on a target cell and subsequently cause lysis of the target cell). Similarly, decreased binding to FcγRIIb (an inhibitory receptor) can be beneficial as well in some circumstances. Amino acid substitutions that find use in the present invention include those listed in U.S. Ser. No. 11/124,620 (particularly FIG. 41), Ser. Nos. 11/174,287, 11/396,495, 11/538,406, all of which are expressly incorporated herein by reference in their entirety and specifically for the variants disclosed therein. Particular variants that find use include, but are not limited to, Kabat positions 236A, 239D, 239E, 332E, 332D, 239D/332E, 267D, 267E, 328F, 267E/328F, 236A/332E, 239D/332E/330Y, 239D, 332E/330L, 243A, 243L, 264A, 264V and 299T.

[1847] In addition, there are additional Fc substitutions that find use in increased binding to the FcRn receptor and increased serum half-life, as specifically disclosed in U.S. Ser. No. 12/341,769, hereby incorporated by reference in its entirety, including, but not limited to, 434S, 434A, 428L, 308F, 259I, 428L/434S, 259I/308F, 436I/428L, 436I or V/434S, 436V/428L and 259I/308F/428L.

### Antigen Binding Domains

[1848] As will be appreciated by a skilled artisan, there are two basic types of antigen binding domains, those that resemble antibody and T cell antigen binding domains (e.g. comprising a set of six CDRs, or in the case of single domain antibodies, single domain T cell receptors and the like, three CDRs) and those that can be otherwise be “ligand binding partners” (i.e. ligands or receptors, enzymes or substrates, or their equivalents), for example, that bind to targets without the use of CDRs.

### Fab Domains

[1849] A challenge in the production of multispecific antibodies is formation of various undesired side products apart from the desired functional molecule. When two or more distinct Fab domains are present, mispairing generally results from the pairing of wrong heavy chains with each other as well as pairing of a light chain with a wrong heavy chain counterpart or undesired pairing of light chains. The light chain mispairing problem is particularly challenging, and to date, no single approach by itself has proven consistent in preventing improper association of light chains with heavy chains and/or the formation of other side-products.

[1850] One approach that has been useful in forcing the pairing of a light chain polypeptide with its correct heavy chain counterpart utilizes chimeric heavy and light chains. Originally described as “variable region domain exchanged IgG”, or “inside-out (io) antibodies”, this approach is based upon intradomain crossovers between heavy and light chains involving the exchange of the heavy and light variable regions within a particular Fab domain (Chan et al, Molecular Immunology 421, 527-538 (2004)).

[1851] This approach, also known as “CrossMab technology”, has been used to make distinct domain crossovers between heavy and light chains thereby creating different domain arrangements for heavy chains and light chains of different specificity. WO 2009/080251, WO 2009/080252, WO 2009/080253, WO 2009/080254 relate to bivalent, bispecific IgG antibodies with such domain crossovers. WO 2010/145792 and WO 2010/145792 relate to tetravalent antigen binding proteins with such domain crossovers. Multispecific antibodies with such a domain exchange in one binding arm (CrossMabVH-VL) are described in WO2009/080252 and Schaefer et al, PNAS, 108 (2011) 11187-1191. (All of the aforementioned citations are incorporated herein by reference in their entirety).

[1852] Variable region domain exchanges generally reduce but do not eliminate the byproducts due to the mismatch of a light chain against a first antigen with the wrong heavy chain against the second antigen. Moreover, the preparations are not completely free of other side products. The main side product is based on a Bence-Jones-type interaction (see also Schaefer, W. et al, PNAS, 108 (2011) 11187-1191; in FIG. S1I of the Supplement).

[1853] Further reduction of side products and the associated aggregation behavior to improve the yield of such multispecific antibodies has been aided by the introduction of substitutions of charged amino acids with the opposite charge at specific amino acid positions in the VH and CL domains, as well as the CH1 and CL domains. The resulting “charge pair” modifications mediate electrostatic steering effects are complementary to the effect of variable region domain exchanges in helping to force the correct pairing of a light chain with its correct heavy chain.

[1854] Amino acid substitutions that find use in the present invention as constituents of such charge pairs include those described in Kannan et al (WO2014//081955), Shaefer et al (WO2015/150447), Ast et al (WO/2016/020309, and Carter et al (WO2016/172485), hereby incorporated by reference in their entirety. Preferred variants that find use include, but are not limited to, EU positions E123, Q124 and V133 in kappa and lambda light chain constant regions, K147, 5183 and K213 in heavy chain constant regions, Q38 in light chain variable regions, and Q39 in the heavy chain variable regions. Specific examples of amino acid substitutions include, but are not limited to, substitution at position 123 or 124 in light chain constant regions by K, R or H, at position 147 or 213 in heavy chain constant regions by E or D, substitution at position 133 in light chain constant regions by K, R, H, E or D, substitution at position 183 in heavy chain constant regions by K, R, H, E or D, at position 38 in light chain variable regions by K, R, H, E or D, and at position 39 in heavy chain variable regions by K, R, H, E or D.

[1855] This invention provides tetrahedral antibodies comprising two types of heavy chains and two types of light chains. In such antibodies, the third and fourth domains may comprise one or more charge pairs, while the fifth and sixth domains are a “CrossMab.” Conversely, the third and fourth domains may be a “CrossMab,” while the fifth and sixth domains comprise one or more charge pairs. Further, the third and fourth domains may be a “CrossMab” and comprise one or more charge pairs, while the fifth and sixth domains comprise neither such modifications. Conversely, the fifth and sixth domains may be a “CrossMab” and comprise one or more charge pairs, while the third and fourth domains comprise neither such modifications. In each case, such modifications facilitate correct pairing between the two types of heavy chains with their corresponding light chains. Such tetrahedral antibodies may be bispecific and tetravalent.

[1856] Similarly, this invention provides octahedral antibodies comprising two types of heavy chains and two types of light chains. In such antibodies, the fourth, fifth, and sixth domains may comprise one or more charge pairs, while the seventh, eighth, and ninth domains are a “CrossMab.” Conversely, the fourth, fifth, and sixth domains may be a “CrossMab,” while the seventh, eighth, and ninth comprise one or more charge pairs. Further, the fourth, fifth, and sixth domains may be a “CrossMab” and comprise one or more charge pairs, while the seventh, eighth, and ninth domains comprise neither such modifications. Conversely, the seventh, eighth, and ninth domains may be a “CrossMab” and comprise one or more charge pairs, while the fourth, fifth, and sixth domains comprise neither such modifications. In each case, such modifications facilitate correct pairing between the two types of heavy chains with their corresponding light chains. Such antibodies may be bispecific and octavalent.

[1857] SEQ ID NOs: 5105-7764 provide the sequences of the V region and CDRs of antibodies which may be used in the present invention. Accordingly, the Fab domains of the invention may comprise any of the V regions and/or CDRs provided in SEQ ID NOs 5105-7764.

[1858] In any of the tetrahedral antibodies of the invention wherein the first domain is an Fc domain, and the second, third, and fourth domains are Fab domain, in an embodiment:
[1859] a) the third and fourth domains comprise a first type of Fab and the second domain comprise a second type of Fab,
   [1860] i) the first type of Fab is formed by a VH—CH on a H1 or H2 chain, and a VL-CL on a L1 chain, and the second type of Fab is formed by a VL-CH on a H1 chain, and a VH-CL domain on a L2 chain;
   [1861] ii) the first type of Fab is formed by a VL-CH on a H1 or H2 chain, and a VH-CL on a L1 chain, and the second type of Fab is formed by a VH—CH on a H2 chain, and a VL-CL domain on a L2 chain, or
   [1862] iii) the first type of Fab is formed by a VH—CH on a H1 or H2 chain, and VL-CL on a L1 chain, and the second type of Fab is formed by a VH—CH on a H2 chain, and a VL-CL domain on a L2 chain,
[1863] wherein VL is a kappa and/or lambda light chain V region.

[1864] In any of the tetrahedral antibodies of the invention wherein the third, fourth, fifth, and sixth domains are Fab domains, in an embodiment:
[1865] a) the third and fourth domain comprise a first type of Fab, and the fifth and/or sixth domain comprise a second type of Fab, and
   [1866] i) the first type of Fab is formed by a VH—CH on a H1 chain, and a VL-CL domain on a L1 chain, and the second type of Fab is formed by a VL-CH on a H2 chain, and a VH-CL on a L2 chain;
   [1867] ii) the first type of Fab is formed by a VL-CH on a H1 chain, and a VH-CL domain on a L1 chain, and the second type of Fab is formed by a VH—CH on a H2 chain, and a VL-CL on a L2 chain; or
   [1868] iii) the first type of Fab is formed by a VH—CH on a H1 chain, and a VL-CL domain on a L1 chain, and the second type of Fab is formed by a VH—CH on a H2 chain, and a VL-CL on a L2 chain,
[1869] wherein VL is a kappa and/or lambda light chain V region.

[1870] In any tetrahedral antibodies of the invention:
[1871] a) one type of Fab comprises the mutations Q39K and S183E in its heavy chain portion, and the mutations Q38E and V133K in its light chain portion, and the other type of Fab comprises the mutations S183K and Q38E in its heavy chain portion, and the mutations V133E and Q39K in its light chain portion;
[1872] b) one type of Fab comprises the mutations Q39K and S183E in its heavy chain portion, and the mutations Q38E and V133K in its light chain portion, and the other type of Fab comprises the mutations S183K and Q38K in its heavy chain portion, and the mutations V133E and Q39E in its light chain portion;
[1873] c) one type of Fab comprises the mutations Q39E and S183E in its heavy chain portion, and the mutations Q38E and V133K in its light chain portion, and the other type of Fab comprises the mutations S183K and Q38E in its heavy chain portion, and the mutations V133E and Q39K in its light chain portion;
[1874] d) one type of Fab comprises the mutations Q39E and S183E in its heavy chain portion, and the mutations Q38K and V133K in its light chain portion, and the other type of Fab comprises the mutations S183K and Q38K in its heavy chain portion, and the mutations S176E and Q39E in its light chain portion;
[1875] e) one type of Fab comprises the mutations Q39K and S183E in its heavy chain portion, and the mutations Q38E and S176K in its light chain portion, and the other type of Fab comprises the mutations S183K and Q38E in its heavy chain portion, and the mutations S176E and Q39K in its light chain portion;
[1876] f) one type of Fab comprises the mutations Q39K and S183E in its heavy chain portion, and the mutations Q38E and S176K in its light chain portion, and the other type of Fab comprises the mutations S183K and Q38K in its heavy chain portion, and the mutations S176E and Q39E in its light chain portion;
[1877] g) one type of Fab comprises the mutations Q39E and S183E in its heavy chain portion, and the mutations Q38E and S176K in its light chain portion, and the other type of Fab comprises the mutations S183K and Q38E in its heavy chain portion, and the mutations S176E and Q39K in its light chain portion; or
[1878] h) one type of Fab comprises the mutations Q39E and S183E in its heavy chain portion, and the mutations Q38K and S176K in its light chain portion, and the other type of Fab comprises the mutations S183K and Q38K in its heavy chain portion, and the mutations S176E and Q39E in its light chain portion.

### Extracellular Proteins

[1879] Extracellular proteins play important roles in, among other things, the formation, differentiation and maintenance of multicellular organisms. A discussion of various intracellular proteins of interest is set forth in U.S. Pat. No. 6,723,535, Ashkenazi et al., issued Apr. 20, 2004, hereby incorporated by reference. Extracellular proteins include secreted proteins and the extracellular domains of transmembrane proteins.

### Secreted Proteins

[1880] The fate of many individual cells, e.g., proliferation, migration, differentiation, or interaction with other cells, is typically governed by information received from other cells and/or the immediate environment. This information is often transmitted by secreted polypeptides (for instance, mitogenic factors, survival factors, cytotoxic factors, differentiation factors, neuropeptides, and hormones) which are, in turn, received and interpreted by diverse cell receptors or membrane-bound proteins. These secreted polypeptides or signaling molecules normally pass through the cellular secretory pathway to reach their site of action in the extracellular environment.

[1881] Secreted proteins have various industrial applications, including as pharmaceuticals, diagnostics, biosensors and bioreactors. Most protein drugs available at present, such as thrombolytic agents, interferons, interleukins, erythropoietins, colony stimulating factors, and various other cytokines, are secretory proteins. Their receptors, which are membrane proteins, also have potential as therapeutic or diagnostic agents. Efforts are being undertaken by both industry and academia to identify new, native secreted proteins. Many efforts are focused on the screening of mammalian recombinant DNA libraries to identify the coding sequences for novel secreted proteins. Examples of screening methods and techniques are described in the literature (see, for example, Klein et al., Proc. Natl. Acad. Sci. 93:7108-7113 (1996); U.S. Pat. No. 5,536,637)).

[1882] Interleukin-15 (IL-15) is a member of the gamma cytokine family that stimulates the proliferation of T, B, and natural killer (NK) cells and induces stem, central and effector memory CD8 T cells. The sequence of IL-15 is described in Grabstein et al., Science. 1994 May 13; 264(5161):965-8. The biology of IL-15 and its therapeutic implications are discussed, for example, in Steel et al. Trends Pharmacol Sci. 2012 January; 33(1): 35-41, Perera et al. Microbes Infect. 2012 March; 14(3): 247-261, and Waldmann et al. Nature Reviews Immunology volume 6, pages 595-601(2006).

### Extracellular Domains of Transmembrane Proteins

[1883] Membrane-bound proteins and receptors can play important roles in, among other things, the formation, differentiation, and maintenance of multicellular organisms. The fate of many individual cells, e.g., proliferation, migration, differentiation, or interaction with other cells, is typically governed by information received from other cells and/or the immediate environment. This information is often transmitted by secreted polypeptides (for instance, mitogenic factors, survival factors, cytotoxic factors, differentiation factors, neuropeptides, and hormones) which are, in turn, received and interpreted by diverse cell receptors or membrane-bound proteins. Such membrane-bound proteins and cell receptors include, but are not limited to, cytokine receptors, receptor kinases, receptor phosphatases, receptors involved in cell-cell interactions, and cellular adhesin molecules like selectins and integrins. For instance, transduction of signals that regulate cell growth and differentiation is regulated in part by phosphorylation of various cellular proteins. Protein tyrosine kinases, enzymes that catalyze that process, can also act as growth factor receptors. Examples include fibroblast growth factor receptor and nerve growth factor receptor.

[1884] Membrane-bound proteins and receptor molecules have various industrial applications, including as pharmaceutical and diagnostic agents. Receptor immunoadhesins, for instance, can be employed as therapeutic agents to block receptor-ligand interactions. The membrane-bound proteins can also be employed for screening of potential peptide or small molecule inhibitors of the relevant receptor/ligand interaction.

[1885] The tumor necrosis factor receptor superfamily (TNFRSF) is a protein superfamily of cytokine receptors characterized by the ability to bind tumor necrosis factors (TNFs) via an extracellular cysteine-rich domain. Members of the TNFRSF are described in Locksley et al., Cell. 2001 Feb. 23; 104(4):487-501 and the table reproduced below. See also Hehlgans et al., Immunology. 2005 May; 115(1): 1-20.

TABLE B-1
Members of the TNFR Superfamily

| | | | | Human | Mouse | |
|---|---|---|---|---|---|---|
| Receptor | Standardized | Other Names | Accession | Chromosome | Chromosome | |
| NGFR | TNFRSF16 | p75 | M14764 | 17q21-q22 | 11, 55.6 | cM |
| Troy | TNFRSF19 | Taj | AF167555 | 13q12.11-12.3 | 14 | |
| EDAR | | | AF130988 | 2q11-q13 | 10, 29.0 | cM |
| XEDAR | | EDA-A2R | | AF298812 | X | |
| CD40 | TNFRSF5 | p50, Bp50 | X60592 | 20q12-q13.2 | 2, 97.0 | cM |
| DcR3 | TNFRSF6B | | AF104419 | 20q13 | | |
| FAS | TNFRSF6 | CD95, APO-1, | M67454 | 10q24.1 | 19, 23.0 | cM |
| | | APT1 | | | | |
| OX40 | TNFRSF4 | CD134, ACT35, | X75962 | 1p36 | 4, 79.4 | cM |
| | | TXGP1L | | | | |
| AITR | TNFRSF18 | GITR | AF125304 | 1p36.3 | 4 | |
| CD30 | TNFRSF8 | Ki-1, D1S166E | M83554 | 1p36 | 4, 75.5 | cM |
| HveA | TNFRSF14 | HVEM, ATAR, | U70321 | 1p36.3-p36.2 | | |
| | | TR2, LIGHTR | | | | |
| 4-1BB | TNFRSF9 | CD137, ILA | L12964 | 1p36 | 4, 75.5 | cM |
| TNFR2 | TNFRSF1B | CD120b, p75, | M32315 | 1p36.3-p36.2 | 4, 75.5 | cM |
| | | TNFBR, | | | | |
| | | TNFR80, TNF-R-II | | | | |
| DR3 | TNFRSF12 | TRAMP, WSL- | U72763 | 1p36.2 | | |
| | | 1, LARD, WSL- | | | | |
| | | LR, DDR3, | | | | |
| | | TR3, APO-3 | | | | |
| CD27 | TNFRSF7 | Tp55, S152 | M63928 | 12p13 | 6, 60.35 | cM |
| TNFR1 | TNFRSF1A | CD120a p55-R, | M75866 | 12p13.2 | 6, 60.55 | cM |
| | | TNFAR | | | | |
| | | TNFR60 TNF-R-I | | | | |
| LTβR | TNFRSF3 | TNFR2-RP, | L04270 | 12p13 | 6, 60.4 | cM |

| | | | | | |
|---|---|---|---|---|---|
| | | TNFCR, TNF-R-III | | | |
| RANK | TNFRSF11A | TRANCE-R | AF018253 | 18q22.1 | |
| TACI | | CAML interactor | | AF023614 | 17p11 |
| BCMA | TNFRSF17 | BCM | Z29574 | 16p13.1 | |
| DR6 | | TR7 | NM 014452 | 6p21.1-12.2 | |
| OPG | TNFRSFHB | OCIF, TR1 | U94332 | 8Q24 | |
| | | osteoprotegerin | | | |
| DR4 | TNFRSF10A | Apo2, TRAILR-1 | U90875 | 8p21 | |
| DR5 | TNFRSF10B | KILLER, | AF012628 | 8p22-p21 | |
| | | TRICK2A, | | | |
| | | TRAIL-R2, TRICKB | | | |
| DcR1 | TNFRSF10C | TRAILR3, LIT, | AF012536 | 8p22-p21 | |
| | | TRID | | | |
| DcR2 | TNFRSF10D | TRUNDD | AF029761 | 8p21 | |
| | | TRAILR4 | | | |

[1886] The immunoglobulin superfamily (IgSF) is a large protein superfamily of cell surface and soluble proteins that are involved in the recognition, binding, or adhesion processes of cells. The IgSF is discussed in Natarajan et al. (April 2015) Immunoglobulin Superfamily. In: eLS. John Wiley & Sons, Ltd: Chichester.

[1887] Angiotensin-converting enzyme 2 (ACE2) is an enzyme attached to the cell membranes of cells in the lungs, arteries, heart, kidney, and intestines. ACE2 is discussed in Donoghue, et al., 2000. Circulation research, 87(5), pp. e1-e9.

[1888] Extracellular proteins of the invention are provided in SEQ ID NOs: 847-890 and 935-2038. SEQ ID NOs: 891-934 and 2039-3142 provide the sequences of extracellular domains that also include the sequence of the signal peptide (SP) and pre-protein (PP) sequence.

### Intracellular Binding Domains

[1889] Suitable examples of intracellular binding domains of the invention are the complete intracellular regions, portions thereof, or derivatives thereof of CD3 zeta chain (UniProtKB CD3Z_HUMAN; GenBank Accession No. P20963), CD3 epsilon chain (UniProtKB CD3E_HUMAN; GenBank Accession No. P07766), CD28 (UniProtKB CD28_HUMAN; GenBank Accession No. P10747), ICOS (UniProtKB ICOS_HUMAN, GenBank Accession No. Q9Y6W8), TNFRSF1 (UniProtKB TNR1A_HUMAN, GenBank Accession No. P19438), TNFRSF1B (UniProtKB TNR1B_HUMAN, GenBank Accession No. P20333), LTBR (UniProtKB TNR3_HUMAN, GenBank Accession No. Q36941), OX40 (UniProtKB TNR4_HUMAN, GenBank Accession No. P43489), CD40 (UniProtKB TNR5_HUMAN, GenBank Accession No. P25942), FasR (UniProtKB TNR6_HUMAN, GenBank Accession No. P25445), DCR3 (UniProtKB TNR6B_HUMAN, GenBank Accession No. 095407), CD27 (UniProtKB CD27_HUMAN, GenBank Accession No. 26842), CD30 (UniProtKB TNR8_HUMAN, GenBank Accession No. P28908), 4-1BB (UniProtKB TNR9_HUMAN, GenBank Accession No. Q07011), DR4 (UniProtKB TR10A_HUMAN, GenBank Accession No. 000220), DR5 (UniProtKB TR10B_HUMAN, GenBank Accession No. 014763), DCR2 (UniProtKB TR10D_HUMAN, GenBank Accession No. Q9UBN6), RANK (UniProtKB TNR11_HUMAN, GenBank Accession No. Q9Y6Q6), TWEAK-R (UniProtKB TNR12_HUMAN, GenBank Accession No. Q9NP84), TACI (UniProtKB TR13B_HUMAN, GenBank Accession No. 014836), BAFF-R (UniProtKB TR13C_HUMAN, GenBank Accession No. Q96RJ3), HVEM (UniProtKB TNR14_HUMAN; GenBank Accession No. Q92956), p75NTR (UniProtKB TNR16_HUMAN, GenBank Accession No. P08138), BCMA (UniProtKB TNR17_HUMAN; GenBank Accession No. Q02223), GITR (UniProtKB TNR18_HUMAN; GenBank Accession No. Q9Y5U5), TROY (UniProtKB TNR19_HUMAN; GenBank Accession No. Q9NS68), DR6 (UniProtKB TNR21_HUMAN; GenBank Accession No. 075509), DR3 (UniProtKB TNR25_HUMAN; GenBank Accession No. Q93038), XEDAR (UniProtKB TNR27_HUMAN; GenBank Accession No. Q9HAV5), CD8a (UniProtKB CD8A_HUMAN; GenBank Accession No. P01732), CD8b (UniProtKB CD8B_HUMAN; GenBank Accession No. P10966). The sequences of each of these proteins are hereby incorporated by reference.

[1890] Another preferred class of intracellular binding domains are antigens and neo-antigens, more particularly peptide fragments and derivatives thereof.

### Transmembrane Domains

[1891] Suitable examples of transmembrane domains of the invention are the complete transmembrane regions, portions thereof, or derivatives thereof of ACE2 (UniProtKB ACE2_HUMAN; GenBank Accession No. Q9BYF1), Collectrin (UniProtKB CLTRN_HUMAN; GenBank Accession No. Q9HBJ8), CD8a (UniProtKB CD8A_HUMAN; GenBank Accession No. P01732), CD8b (UniProtKB CD8B_HUMAN; GenBank Accession No. P10966), CD3 zeta chain (UniProtKB CD3Z_HUMAN; GenBank Accession No. P20963), CD3 epsilon chain (UniProtKB CD3E_HUMAN; GenBank Accession No. P07766), CD28 (UniProtKB CD28_HUMAN; GenBank Accession No. P10747), ICOS (UniProtKB ICOS_HUMAN, GenBank Accession No. Q9Y6W8), TNFRSF1 (UniProtKB TNR1A_HUMAN, GenBank Accession No. P19438), TNFRSF1B (UniProtKB TNR1B_HUMAN, GenBank Accession No. P20333), LTBR (UniProtKB TNR3_HUMAN, GenBank Accession No. Q36941), OX40 (UniProtKB TNR4_HUMAN, GenBank Accession No. P43489), CD40 (UniProtKB TNR5_HUMAN, GenBank Accession No. P25942), FasR (UniProtKB TNR6_HUMAN, GenBank Accession No. P25445), DCR3 (UniProtKB TNR6B_HUMAN, GenBank Accession No. 095407), CD27 (UniProtKB CD27_HUMAN, GenBank Accession No. 26842), CD30 (UniProtKB TNR8_HUMAN, GenBank Accession No. P28908), 4-1BB (UniProtKB TNR9_HUMAN, GenBank Accession No. Q07011), DR4 (UniProtKB TR10A_HUMAN, GenBank Accession No. 000220), DR5 (UniProtKB TR10B_HUMAN, GenBank Accession No. 014763), DCR2 (UniProtKB TR10D_HUMAN, GenBank Accession No. Q9UBN6), RANK (UniProtKB TNR11_HUMAN, GenBank Accession No. Q9Y6Q6), TWEAK-R (UniProtKB TNR12_HUMAN, GenBank Accession No. Q9NP84), TACI (UniProtKB TR13B_HUMAN, GenBank Accession No. 014836), BAFF-R (UniProtKB TR13C_HUMAN, GenBank Accession No. Q96RJ3), HVEM (UniProtKB TNR14_HUMAN; GenBank Accession No. Q92956), p75NTR (UniProtKB TNR16_HUMAN, GenBank Accession No. P08138), BCMA (UniProtKB TNR17_HUMAN; GenBank Accession No. Q02223), GITR (UniProtKB TNR18_HUMAN; GenBank Accession No. Q9Y5U5), TROY (UniProtKB TNR19_HUMAN; GenBank Accession No. Q9NS68), DR6 (UniProtKB TNR21_HUMAN; GenBank Accession No. 075509), DR3 (UniProtKB TNR25_HUMAN; GenBank Accession No. Q93038), XEDAR (UniProtKB TNR27_HUMAN; GenBank Accession No. Q9HAV5), TNFSF1 (UniProtKB TNFB_HUMAN, GenBank Accession No. P01374), TNFSF2 (UniProtKB TNFA_HUMAN, GenBank Accession No. P01375), TNFSF3 (UniProtKB TNFC_HUMAN, GenBank Accession No. Q06643), TNFSF4 (UniProtKB TNFL4_HUMAN, GenBank Accession No. P23510), TNFSF5 (UniProtKB CD40L_HUMAN, GenBank Accession No. P29965), TNFSF6 (UniProtKB TNFL6_HUMAN, GenBank Accession No. P48023), TNFSF7 (UniProtKB CD70_HUMAN, GenBank Accession No. P32970), TNFSF8 (UniProtKB TNFL8_HUMAN, GenBank Accession No. P32971), TNFSF9 (UniProtKB TNFL9_HUMAN, GenBank Accession No. P41273), TNFSF10 (UniProtKB TNF10_HUMAN, GenBank Accession No. P50591), TNFSF11 (UniProtKB TNF11_HUMAN, GenBank Accession No. 014788), TNFSF12 (UniProtKB TNF12_HUMAN, GenBank Accession No. 043508), TNFSF13 (UniProtKB TNF13_HUMAN, GenBank Accession No. 075888), TNFSF13B (UniProtKB TN13B_HUMAN, GenBank Accession No. Q9Y275), TNFSF14 (UniProtKB TNF14_HUMAN; GenBank Accession No. 043557), TNFSF15 (UniProtKB TNF15_HUMAN, GenBank Accession No. 095150), and TNFSF18 (UniProtKB TNF18_HUMAN; GenBank Accession No. Q9UNG2). The sequences of each of these proteins are hereby incorporated by reference.

### Covalent Linkages

[1892] Covalent linkages of the invention may comprise, or consist of, any “non-peptidyl linkage” described in U.S. Patent Application Publication No. US 20170008950 A1, published Jan. 12, 2017, the contents of which are hereby incorporated-by-reference.

### Peptide Linkers

[1893] Peptide linkers are stretches of consecutive amino acids which link two domains.

[1894] In one embodiment, the peptide linker has a length of at least 5 amino acids. In one embodiment, the peptide linker has a length of 5-100 amino acids.

[1895] In one embodiment, the peptide linker has a length of 10-50 amino acids.

[1896] In one embodiment, peptide linkers have a length of 23 amino acids. In one embodiment, the peptide linker connecting domain 1 and a dimerizing polypeptide and the peptide linker connecting domains 2 and a dimerizing polypeptide each have a length of 23 amino acids. In one embodiment, such peptide linkers each have a length of 23 amino acids and are derived from the stalk region of a TNF receptor, preferably wherein the TNF receptor is TNF receptor 1B, still more preferably wherein the peptide linker consists of the amino acid sequence set forth in SEQ ID NO: 4468.

[1897] In one embodiment, the peptide linker is a stretch of consecutive amino acids found in an immunoglobulin hinge region or portion thereof.

[1898] In one embodiment, the peptide linker is a stretch of 5 to 57 consecutive amino acids found in the sequence:

(SEQ ID NO: 3227)
TSTSPTRSMAPGAVHLPQPVSTRSQHTQPTPEPSTAPSTSFLLPMGPSPP
AEGSTGD

[1899] In one embodiment, the peptide linker is a glycine-serine or glycine-alanine linker.

[1900] In one embodiment, the peptide linker is
[1901] a) (GxS)n or (GxS)nGm or (GxA)n or (GxA)nGm
[1902] b) with G=glycine, S=serine, A=alanine, and
[1903] c) x=3, n=2, 3, 4, 5 or 6, m=0, 1, 2 or 3; or
[1904] d) x=4, n=1, 2, 3, 4 or 5, m=0, 1, 2 or 3.

[1905] Exemplary linkers of the invention are provided in SEQ ID NOs: 3143-4656.

Intra-Homodimerization and Intra-Heterodimerization within Domains

### Fc Domain Modifications Promoting Heterodimerization

[1906] The invention provides tetrahedral antibodies, wherein the first and second domains each comprise two polypeptide chains, such that there are two N-termini and two C-termini upon which additional domains may be attached either directly by a peptide bond or via a peptide linker). Similarly, the invention provides octahedral antibodies, wherein the first, second and third domains each comprise two polypeptide chains, such that there are two are two N-termini and two C-termini upon which additional domains may be attached either directly by a peptide bond or via a peptide linker). Other domains of the invention (such as the third, fourth, fifth, sixth, seventh, and eighth domains of a tetrahedral antibody, and the fourth, fifth, sixth, seventh, eighth, ninth, tenth, eleventh, and twelfth domains of an octahedral antibody) may also comprise two polypeptide chains.

[1907] In particular embodiments, such domains are Fc domains comprising a modification promoting association of two different Fc domain subunits, i.e. intra-heterodimerization. A modification may be present in the first Fc domain subunit and/or the second Fc domain subunit. Embodiments of said modifications are described in U.S. Patent Application Publication No. US 20130058937 A1 and in the paragraphs that follow.

[1908] The site of most extensive protein-protein interaction between the two subunits of a human IgG Fc domain is in the CH3 domain of the Fc domain. Thus, in one embodiment said modification is in the CH3 domain of the Fc domain.

[1909] In a specific embodiment said modification is a so-called “knob-into-hole” modification, comprising a “knob” modification in one of the two subunits of the Fc domain and a “hole” modification in the other one of the two subunits of the Fc domain.

[1910] The knob-into-hole technology is described e.g. in U.S. Pat. Nos. 5,731,168; 7,695,936; Ridgway et al., Prot Eng 9, 617-621 (1996) and Carter, J Immunol Meth 248, 7-15 (2001). Generally, the method involves introducing a protuberance (“knob”) at the interface of a first polypeptide and a corresponding cavity (“hole”) in the interface of a second polypeptide, such that the protuberance can be positioned in the cavity so as to promote heterodimer formation and hinder homodimer formation. Protuberances are constructed by replacing small amino acid side chains from the interface of the first polypeptide with larger side chains (e.g. tyrosine or tryptophan). Compensatory cavities of identical or similar size to the protuberances are created in the interface of the second polypeptide by replacing large amino acid side chains with smaller ones (e.g. alanine or threonine).

[1911] Accordingly, in a particular embodiment, in the CH3 domain of the first Fc domain subunit of an Fc domain an amino acid residue is replaced with an amino acid residue having a larger side chain volume, thereby generating a protuberance within the CH3 domain of the first subunit which is positionable in a cavity within the CH3 domain of the second subunit, and in the CH3 domain of the second Fc domain subunit an amino acid residue is replaced with an amino acid residue having a smaller side chain volume, thereby generating a cavity within the CH3 domain of the second subunit within which the protuberance within the CH3 domain of the first subunit is positionable.

[1912] The protuberance and cavity can be made by altering the nucleic acid encoding the polypeptides, e.g. by site-specific mutagenesis, or by peptide synthesis.

[1913] In a specific embodiment, in the CH3 domain of the first subunit of the Fc domain the threonine residue at position 366 is replaced with a tryptophan residue (T366W), and in the CH3 domain of the second subunit of the Fc domain the tyrosine residue at position 407 is replaced with a valine residue (Y407V). In one embodiment, in the second subunit of the Fc domain additionally the threonine residue at position 366 is replaced with a serine residue (T366S) and the leucine residue at position 368 is replaced with an alanine residue (L368A). In yet a further embodiment, in the first subunit of the Fc domain additionally the serine residue at position 354 is replaced with a cysteine residue (S354C), and in the second subunit of the Fc domain additionally the tyrosine residue at position 349 is replaced by a cysteine residue (Y349C). Introduction of these two cysteine residues results in formation of a disulfide bridge between the two subunits of the Fc domain, further stabilizing the dimer (Carter, J Immunol Methods 248, 7-15 (2001)).

[1914] In an alternative embodiment a modification promoting association of the first and the second subunit of the Fc domain comprises a modification mediating electrostatic steering effects, e.g. as described in PCT publication WO 2009/089004. Generally, this method involves replacement of one or more amino acid residues at the interface of the two Fc domain subunits by charged amino acid residues so that homodimer formation becomes electrostatically unfavorable but heterodimerization electrostatically favorable.

[1915] Illustrative examples include but are not limited to, for example, US Patent Application 20030078385 (Arathoon et al.—Genentech; describing knob into holes); WO2007147901 (Kjærgaard et al.—Novo Nordisk: describing ionic interactions); WO 2009089004 (Kannan et al.—Amgen: describing electrostatic steering effects); U.S. Provisional Patent Application 61/243,105 (Christensen et al.—Genentech; describing coiled coils).

[1916] In particular embodiments, domains 1 and 2 of a tetrahedral antibody of the invention, or domains 1, 2 and 3 of an octahedral antibody of the invention, are two or three distinct heterodimeric Fc domains comprising distinct sets of modifications promoting intra-heterodimerization of their respective Fc domain subunits. Illustrative examples of distinct sets of mutations in the antibody heavy chain constant region that can be used to promote the preferential assembly of distinct Fc heterodimers include but are not limited to, for example, U.S. Ser. Nos. 11/533,709, 13/494,870, 12/875,015, 13/289,934, 14/773,418, 12/811,207, 13/866,756, 14/647,480, and 14/830,336. For example, mutations can be made in the CH3 domain based on human IgG1 and incorporating distinct pairs of amino acid substitutions within a first polypeptide and a second polypeptide that allow these two chains to selectively heterodimerize with each other. The positions of amino acid substitutions illustrated below are all numbered according to the EU index as in Kabat.

[1917] For example, one or more mutations can be incorporated into the constant region as compared to human IgG1 constant region, for example at Q347, Y349, L351, 5354, E356, E357, K360, Q362, 5364, T366, L368, K370, N390, K392, T394, D399, S400, D401, F405, Y407, K409, T411 and/or K439. Exemplary substitutions include, for example, Q347E, Q347R, Y349S, Y349K, Y349T, Y349D, Y349E, Y349C, T350V, L351K, L351D, L351Y, S354C, E356K, E357Q, E357L, E357W, K360E, K360W, Q362E, S364K, S364E, S364H, S364D, T366V, T3661, T366L, T366M, T366K, T366W, T366S, L368E, L368A, L368D, K370S, N390D, N390E, K392L, K392M, K392V, K392F, K392D, K392E, T394F, T394W, D399R, D399K, D399V, S400K, S400R, D401K, F405A, F405T, Y407A, Y4071, Y407V, K409F, K409W, K409D, T411D, T411E, K439D, and K439E.

[1918] Alternatively, amino acid substitutions could be selected from the following sets of substitutions shown in the tables below:

TABLE C-1
Sets of substitutions

| | First Polypeptide | Second Polypeptide |
|---|---|---|
| Set 1 | S364E/F405A | Y349K/T394F |
| Set 2 | S364H/D401K | Y349T/T411E |
| Set 3 | S364H/T394F | Y349T/F405A |
| Set 4 | S364E/T394F | Y349K/F405A |
| Set 5 | S364E/T411E | Y349K/D401K |
| Set 6 | S364D/T394F | Y349K/F405A |
| Set 7 | S364H/F405A | Y349T/T394F |
| Set 8 | S364K/E357Q | L368D/K370S |
| Set 9 | L368D/K370S | S364K |
| Set 10 | L368E/K370S | S364K |
| Set 11 | K360E/Q362E | D401K |
| Set 12 | L368D/K370S | S364K/E357L |
| Set 13 | K370S | S364K/E357Q |
| Set 14 | F405L | K409R |
| Set 15 | K409R | F405L |

TABLE C-2
Sets of substitutions

| | First Polypeptide | Second Polypeptide |
|---|---|---|
| Set 1 | K409W | D399V/F405T |
| Set 2 | Y349S | E357W |
| Set 3 | K360E | Q347R |
| Set 4 | K360E/K409W | Q347R/D399V/F405T |
| Set 5 | Q347E/K360E/K409W | Q347R/D399V/F405T |
| Set 6 | Y349S/K409W | E357W/D399V/F405T |

TABLE C-3
Sets of substitutions

| | First Polypeptide | Second Polypeptide |
|---|---|---|
| Set 1 | T366K/L351K | L351D/L368E |
| Set 2 | T366K/L351K | L351D/Y349E |
| Set 3 | T366K/L351K | L351D/Y349D |
| Set 4 | T366K/L351K | L351D/Y349E/L368E |
| Set 5 | T366K/L351K | L351D/Y349D/L368E |
| Set 6 | E356K/D399K | K392D/K409D |

TABLE C-4
Sets of substitutions

| First Polypeptide | Second Polypeptide |
|---|---|
| L351Y, D399R, D399K, | T366V, T366I, T366L, T366M, N390D, |
| S400K, S400R, Y407A, | N390E, K392L, K392M, K392V, K392F |
| Y407I, Y407V | K392D, K392E, K409F, K409W, T411D |
| | and T411E |

[1919] Alternatively, at least one amino acid substitutions could be selected from the following set of substitutions in Table C-5, where the position(s) indicated in the First Polypeptide column is replaced by any known negatively-charged amino acid, and the position(s) indicated in the Second Polypeptide Column is replaced by any known positively-charged amino acid.

TABLE C-5
Sets of substitutions

| First Polypeptide | Second Polypeptide |
|---|---|
| K392, K370, K409, orK439 | D399, E356, or E357 |

[1920] Alternatively, at least one amino acid substitutions could be selected from the following set of in Table C-6, where the position(s) indicated in the First Polypeptide column is replaced by any known positively-charged amino acid, and the position(s) indicated in the Second Polypeptide Column is replaced by any known negatively-charged amino acid.

TABLE C-6
Sets of substitutions

| First Polypeptide | Second Polypeptide |
|---|---|
| D399, E356, or E357 | K409, K439, K370, or K392 |

[1921] Alternatively, amino acid substitutions could be selected from the following set of in Table C-7.

TABLE C-7
Sets of substitutions

| First Polypeptide | Second Polypeptide |
|---|---|
| T350V, L351Y, F405A, and Y407V | T350V, T366L, K392L, and |
| | T394W |

[1922] Alternatively, or in addition, the structural stability of a heteromultimer protein may be increased by introducing S354C on either of the first or second polypeptide chain, and Y349C on the opposing polypeptide chain, which forms an artificial disulfide bridge within the interface of the two polypeptides.

### Extra-Homodimerization and Extra-Heterodimerization Between Domain 1 and Domain 2

[1923] In an embodiment, homodimerization between domain 1 and domain 2 (i.e. extra-homodimerization) is achieved by use of a first and a second dimerizing polypeptide which homodimerize. One example of a homodimerization domain is the ACE2 collectrin-like domain (CLD).

[1924] In an embodiment, heterodimerization between domain 1 and domain 2 (i.e. extra-heterodimerization) is achieved by use of a first and a second dimerizing polypeptide which favor the formation of a heterodimer over a homodimer. Any non-immunoglobulin dimerization polypeptide having a strong preference for forming heterodimers over homodimers is within the scope of the invention.

### Dimerizing Polypeptides

### Leucine Zipper Domains

[1925] Leucine zippers are well known in the art (see Hakoshima; Encyclopedia of Life Sciences; 2005, for example). The leucine zipper is a super-secondary structure that may function as a dimerization domain. Its presence generates adhesion forces in parallel alpha helices. A single leucine zipper consists of multiple leucine residues at approximately 7-residue intervals, which forms an amphipathic alpha helix with a hydrophobic region running along one side. This hydrophobic region provides an area for dimerization, allowing the motifs to “zip” together. Leucine zippers are typically 20 to 40 amino acids in length, for example approximately 30 amino acids. See also Pack, P. & Plueckthun, A., Biochemistry 31, 1579-1584 (1992).

[1926] Leucine zipper domains may be such that the formation of heterodimers is more favorable than the formation of homodimers of the helices. Leucine zippers may be synthetic or naturally occurring. Synthetic leucines can be designed to have a much higher binding affinity. Alternatively, naturally occurring leucine zippers or leucine zippers with a similar binding affinity may be used. Leucine zippers from the c-jun and c-fos protein are an example of leucine zippers. Other leucine zippers include those from the myc and max proteins (Amati, B., S. Dalton, et al. (1992). Nature 359(6394): 423-6.). Other leucine zippers with suitable properties may be designed, for example as described in O'Shea, E. K., Lumb, K. J. and Kim, P. S. (1993) Curr. Biol. 3: 658-667. See also O'Shea, E. K., Rutkowski, R., et al. (1989) Science 245: 646-648 and O'Shea, E. K., R. Rutkowski, et al. (1992). Cell 68(4): 699-708 describe leucine zippers from c-jun (αchain) and c-fos (βchain).

[1927] As discussed in U.S. Patent Application Publication No. US 20020119149 A1 (Jakobsen), leucine zippers can be designed and engineered by those skilled in the art to form homodimers, heterodimers or trimeric complexes. See Lumb, K. J. and P. S. Kim (1995). Biochemistry 34(27): 8642-8; Nautiyal, S., D. N. Woolfson, et al. (1995). Biochemistry 34(37): 11645-51; Boice, J. A., G. R. Dieckmann, et al. (1996). Biochemistry 35(46): 14480-5; and Chao, H., M. E. Houston, Jr., et al. (1996). Biochemistry 35(37): 12175-85.

### Collectrin-Like Domains

[1928] Full-length ACE2 consists of an N-terminal Peptidase Domain (PD) and a C-terminal collectrin-like domain (CLD) that ends with a single transmembrane helix and a ˜40-residue intracellular segment. The CLD (residues 616 to 768 of ACE2), consists of a small extracellular domain, a long linker, and the single transmembrane (TM) helix. The CLD comprises the “neck domain” of ACE2 (residues 616 to 726), which is the primary mediator of dimerization of ACE2. (Yan et al., Science 367, 1444-1448 (2020))

### Collectrin Domains

[1929] Collectrin is a homolog of ACE2 and is a transmembrane glycoprotein specifically expressed in collecting tubules of the kidney. Based on its homology to the ACE2 CLD, it is expected that Collectrin domains may be capable of forming homodimers (Zhang et al. J Biol. Chem. Vol. 276, No. 20, Issue of May 18, pp. 17132-17139, 2001)

### Extra-Heterodimerization

[1930] An embodiment of the invention is a tetrahedral antibody or tetrahedral molecule comprising a heterodimeric dimerizing polypeptide. It is desirable to create versions of the dimerizing polypeptides of the collectrin-like domain and collectrin that form heterodimers but not homodimers. One strategy for engineering heterodimers from homodimers is the introduction of charged amino acids into the first dimerizing polypeptide that disrupt homodimerization concomitantly with the introduction of charge-complementary amino acids into the second dimerizing polypeptide at spatially proximal positions which can form salt bridges with the first dimerizing polypeptide that promote heterodimerization. Preferred charged-complementary amino acids are those having negatively and/or positively charged atoms on their side chains at physiological pH, e.g., glutamic acid and aspartic acid, and lysine, arginine, and histidine, respectively.

[1931] Dimerization of the ACE2 protein is mainly mediated by the collectrin-like domain (CLD) (Yan et al., 2020, Science, 367(6485):1444-1448). The homodimer interface formed by the first and second CLD dimerizing polypeptides, referred to herein as CLD-A and CLD-B, is mediated by extensive polar interactions mapped to the second (residues 636 to 658) and fourth (residues 708 to 717) helices of each CLD dimerizing polypeptide (all positions are based on the human ACE2 sequence shown in SEQ ID NO: 2040). For example, Arg652 and Arg710 in CLD-A are respectively hydrogen-bonded (H-bonded) to Asn638′ and Glu639′ in CLD-B, which also interact with Gln653 in CLD-A, as does Asn636′ in CLD-B. Ser709 and Asp713 from CLD-A are hydrogen-bonded to Arg716′ in CLD-B. This extensive network of polar interactions indicates stable dimer formation. Additionally, Arg652 and Arg710 in CLD-A form cation-π interactions with Tyr641′ and Tyr633′ in CLD-B, while Arg652′ and Arg710′ in CLD-B form cation-π interactions with Tyr641 and Tyr633 in CLD-A. Thus, Arg652 and Arg710 play a critical role in the homodimer interface both via extensive hydrogen bonding and the formation of four cross-strand cation-π interactions in concert with Tyr641 and Tyr633, thus offering a starting point for the creation of CLD dimerizing polypeptides that heterodimerize but do not homodimerize.

[1932] Additionally, the aforementioned arginine and tyrosine residues are conserved at essentially the same positions in human collectrin, specifically Arg59, Arg111, Tyr48, and Tyr40, suggesting they play an analogous role in collectrin dimerization and would benefit from the same charge pair substitutions in promoting the selective formation of heterodimers over homodimers (all positions are based on the human collectrin/TMEM27 sequence shown in SEQ ID NO: 3078).

[1933] Substitutions throughout the CLD and collectrin dimerizing polypeptides are readily screened for their ability to disrupt homodimer formation and promote heterodimer formation as neither dimerizing polypeptide is readily secreted as a discrete monomer into the culture supernatant. Preferred positions for substitutions that disrupt homodimer formation and promote heterodimer formation are in the second and fourth helices of the CLD and collectrin. Particularly preferred positions for substitutions that disrupt homodimer formation and promote heterodimer formation in the CLD dimerizing polypeptide are Arg652, Arg710, Tyr641, Tyr633, Asn638, Glu639, Gln653, and Asn636, Ser709, Asp713, and Arg716. Particularly preferred positions for substitutions that disrupt homodimer formation and promote heterodimer formation in the collectrin dimerizing polypeptide are Arg59, Arg111, Tyr48, and Tyr40.

[1934] Preferred amino acid substitutions at Tyr641 and Tyr633 (CLD) and Tyr48 and Tyr40 (collectrin) for disrupting homodimer formation are the positively charged amino acids lysine, arginine and histidine. Preferred amino acid substitutions at Arg652 and Arg710 (collectrin-like domain) and Arg59 and Arg111 (collectrin) for disrupting homodimer formation are the negatively charged amino acids glutamic acid and aspartic acid, which are likely to form much a weaker anion-π interaction with tyrosine given their shorter side-chain length, as well as the positively charged amino acid lysine. The utility of lysine substitution for arginine in disrupting CLD homodimer formation is indicated by the absence of substitution of lysine for Arg652 and Arg710 in an extensive evolutionary search; additionally, lysine forms significantly fewer stable cation-π interactions in proteins than arginine and lacks the hydrogen-bounding characteristics of arginine (Gallivan et al., 1999, Proc. Natl. Acad. Sci., 96(17):9459-9464; Kumar et al., 2018, Chem. Sci., 9(10):2655-2665).

[1935] Preferred charge pair substitutions for promoting heterodimer over homodimer formation include lysine-glutamic acid, lysine-aspartic acid, arginine-glutamic acid, and arginine-aspartic acid. The aforementioned charge pairs may be used in either orientation with respect to the first and second dimerizing polypeptides.

[1936] Preferred dimerizing polypeptides of the invention are collectrin or collectrin-like domains, or portions, derivatives and/or hybrids thereof. Preferred dimerizing polypeptides include those described in SEQ ID NOs: 782-786.

[1937] To identify mutations that disrupt homodimerization of the collectrin-like domain, a series of variants are prepared in which each of amino acid residues Tyr633, Tyr641, Arg652, and Arg710 is independently substituted with lysine and glutamic acid. Each of the resulting variants is expressed as tetrahedral antibody of three different chains, an 1-11 chain, L1 chain, and Fe chain, as shown in FIG. 29A. Domains D1 and D2 are heterodimeric Fe domains formed by the H1 and Fc chains, and domains D3 and D4 are anti-CD19 FMC63 Fabs formed by the H1 and L1 chains. Table 82 summarizes the SEQ IDs of the H1, L1, and Fc chains used for the expression of each variant. Table 83 summarizes the amino acid substitutions at Tyr633, Tyr641, Arg652, and Arg710 for each variant, Table 83 also summarizes the predicted interaction between the first and second dimerizing polypeptides for each of the variants with respect to the cognate Arg710-Tyr633 and Arg652-Tyr641 pairs of the parent CLD dimerizing polypeptides from which they are derived.

[1938] Each tetrahedral antibody is evaluated for its ability to be expressed and secreted in CHO cells. Variants that are not expressed and secreted as homodimers are further evaluated for their ability to expressed and secreted as heterodimers via their co-expression together with other variants that are not expressed and secreted as homodimers.

### Disulfide Linkages Between Dimerizing Polypeptides

[1939] Additionally, such charge pairs may be used together with one or more disulfide linkages between the first and second dimerizing polypeptides to further promote the formation and stability of the resulting heterodimers. Preferred disulfides are those engineered at the CLD-A/CLD-B interface, particularly at the second and fourth helices of the collectrin-like domain and the corresponding region in collectrin. Other preferred disulfides include immunoglobulin hinge regions appended at the N-terminus and/or C-terminus of the collectrin-like domain and collectrin. Such hinge regions may be appended directly or via peptide linkers.

[1940] IgG1, IgG2, IgG3, and IgG4 hinge regions or portions thereof comprising at least one cysteine available for forming a disulfide bond may be used to form the one or more disulfide linkages between the first and second dimerizing polypeptides as discussed above.

### Trimerizing Domains

### TNF Ligand Superfamily Members

[1941] Members of the TNF ligand superfamily may be used as trimerizing domains of the inventions. They are described in Locksley et al., Cell. 2001 Feb. 23; 104(4):487-501 and the table reproduced below.

TABLE B-2
Members of the TNF Superfamily

| | | | | Human | Mouse |
|---|---|---|---|---|---|
| | Stand- | Other | | Chromo- | Chromo- |
| Ligand | ardized | Names | Accession | some | some |
| EDA | | EDA1 | NM_ | Xq12- | X, 37.0 cM |
| | | | 001399 | q13.1 | |
| CD40L | TNFSF5 | IMD3, | X67878 | Xq26 | X, 18.0 cM |
| | | HIGM1, | | | |
| | | TRAP, | | | |
| | | CD 154, | | | |
| | | gp39 | | | |
| FasL | TNFSF6 | APT1LG1 | U11821 | 1q23 | 1, 85.0 cM |
| OX40L | TNFSF4 | gp34 | D90224 | 1q25 | 1, 84.9 cM |
| | | TXGP1 | | | |
| AITRL | TNFSF18 | TL6, | AF125303 | 1q23 | |
| | | hGITRL | | | |
| CD30L | TNFSF8 | | L09753 | 9q33 | 4, 32.2 cM |
| VEGI | TNFSF15 | TL1 | AF039390 | | |
| LIGHT | TNFSF14 | LT_, | AF036581 | 19 (prob- | 17 |
| | | HVEM-L | | able) | |
| 4-1BBL | TNFSF9 | | U03398 | 19p13.3 | 17 |
| CD27L | TNFSF7 | CD70 | L08096 | 19p13 | 17, 20.0 cM |
| LTα | TNFSF1 | TNFB, LT | X01393 | 6p21.3 | 17, |
| | | | | | 19.06 cM |
| TNF | TNFSF2 | tumor | X01394 | 6p21.3 | 17, 19.06 |
| | | necrosis | | | |
| | | factor; | | | |
| | | cachectin, | | | |
| | | TNFA, | | | |
| | | DIF | | | |
| LTβ | TNFSF3 | TNFC, | L11015 | 6p21.3 | 17, 19.061 |
| | | p33 | | | |
| TWEAK | TNFSF12 | DR3L | AF030099 | 17p13 | 11? |
| | | APO3L | | | |
| APRIL | TNFSF13 | | NM_ | 17p13.1 | 11? |
| | | | 003808 | | |
| BLYS | TNFSF13B | BAFF, | AF132600 | 13q32-34 | |
| | | THANK, | | | |
| | | TALL1 | | | |
| RANKL | TNFSF11 | TRANCE, | AF013171 | 13q14 | 14, 45.0 |
| | | OPGL, | | | |
| | | ODF | | | |
| TRAIL | TNFSF10 | Apo-2L | U37518 | 3q26 | |
| | | TL2 | | | |

[1942] Suitable examples of the trimerizing polypeptides of the invention are the complete extracellular regions or portions thereof of TNFSF1 (UniProtKB TNFB_HUMAN, GenBank Accession No. P01374), TNFSF2 (UniProtKB TNFA_HUMAN, GenBank Accession No. P01375), TNFSF3 (UniProtKB TNFC_HUMAN, GenBank Accession No. Q06643), TNFSF4 (UniProtKB TNFL4_HUMAN, GenBank Accession No. P23510), TNFSF5 (UniProtKB CD40L_HUMAN, GenBank Accession No. P29965), TNFSF6 (UniProtKB TNFL6_HUMAN, GenBank Accession No. P48023), TNFSF7 (UniProtKB CD70_HUMAN, GenBank Accession No. P32970), TNFSF8 (UniProtKB TNFL8_HUMAN, GenBank Accession No. P32971), TNFSF9 (UniProtKB TNFL9_HUMAN, GenBank Accession No. P41273), TNFSF10 (UniProtKB TNF10_HUMAN, GenBank Accession No. P50591), TNFSF11 (UniProtKB TNF11_HUMAN, GenBank Accession No. 014788), TNFSF12 (UniProtKB TNF12_HUMAN, GenBank Accession No. 043508), TNFSF13 (UniProtKB TNF13_HUMAN, GenBank Accession No. 075888), TNFSF13B (UniProtKB TN13B_HUMAN, GenBank Accession No. Q9Y275), TNFSF14 (UniProtKB TNF14_HUMAN; GenBank Accession No. 043557), TNFSF15 (UniProtKB TNF15_HUMAN, GenBank Accession No. 095150), and TNFSF18 (UniProtKB TNF18_HUMAN; GenBank Accession No. Q9UNG2).

[1943] Preferred trimerizing polypeptides are shown in SEQ ID NOs: 787-790 (TNFSF1), SEQ ID NOs: 791-792 (TNFSF2), SEQ ID NOs: 793-795 (TNFSF3), SEQ ID NOs: 796-798 (TNFSF4), SEQ ID NOs: 799-802 (TNFSF5), SEQ ID NOs: 803-806, SEQ ID NOs: 807-809 (TNFSF7), SEQ ID NOs: 810-813 (TNFSF8), SEQ ID NOs: 814-816 (TNFSF9), SEQ ID NOs: 817-820 (TNFSF10), SEQ ID NOs: 821-822 (TNFSF11), SEQ ID NOs: 823-827 (TNFSF12), SEQ ID NOs: 828-831 (TNFSF13), SEQ ID NOs: 832-833 (TNFSF13B), SEQ ID NOs: 834-837 (TNFSF14), SEQ ID NOs: 838-841 (TNFSF15), and SEQ ID NOs: 842-843 (TNFSF18). Kits

[1944] Another aspect of the present invention provides kits comprising the compounds disclosed herein and the pharmaceutical compositions comprising these compounds. A kit may include, in addition to the compound or pharmaceutical composition, diagnostic or therapeutic agents. A kit may also include instructions for use in a diagnostic or therapeutic method. In a diagnostic embodiment, the kit includes the compound or a pharmaceutical composition thereof and a diagnostic agent. In a therapeutic embodiment, the kit includes the antibody or a pharmaceutical composition thereof and one or more therapeutic agents, such as an additional antineoplastic agent, anti-tumor agent or chemotherapeutic agent.

### General Techniques

[1945] The description below relates primarily to production of stretches of consecutive amino acids or polypeptides of interest by culturing cells transformed or transfected with a vector containing an encoding nucleic acid. It is, of course, contemplated that alternative methods, which are well known in the art, may be employed. For instance, the amino acid sequence, or portions thereof, may be produced by direct peptide synthesis using solid-phase techniques (see, e.g., Stewart et al., Solid-Phase Peptide Synthesis, W.H. Freeman Co., San Francisco, Calif. (1969); Merrifield, J. Am. Chem. Soc., 85:2149-2154 (1963)). In vitro protein synthesis may be performed using manual techniques or by automation. Automated synthesis may be accomplished, for instance, using an Applied Biosystems Peptide Synthesizer (Foster City, Calif.) using manufacturer's instructions. Various portions of the stretches of consecutive amino acids or polypeptides of interest may be chemically synthesized separately and combined using chemical or enzymatic methods to produce the full-length stretches of consecutive amino acids or polypeptides of interest.

### Selection and Transformation of Host Cells

[1946] Host cells are transfected or transformed with expression or cloning vectors described herein for production and cultured in conventional nutrient media modified as appropriate for inducing promoters, selecting transformants, or amplifying the genes encoding the desired sequences. The culture conditions, such as media, temperature, pH and the like, can be selected by the skilled artisan without undue experimentation. In general, principles, protocols, and practical techniques for maximizing the productivity of cell cultures can be found in Mammalian Cell Biotechnology: a Practical Approach, M. Butler, ed. (IRL Press, 1991) and Sambrook et al., supra.

[1947] Methods of eukaryotic cell transfection and prokaryotic cell transformation are known to the ordinarily skilled artisan, for example, CaCl₂, CaPO₄, liposome-mediated and electroporation. Depending on the host cell used, transformation is performed using standard techniques appropriate to such cells. The calcium treatment employing calcium chloride, as described in Sambrook et al., supra, or electroporation is generally used for prokaryotes. Infection with Agrobacterium tumefaciens is used for transformation of certain plant cells, as described by Shaw et al., Gene, 23:315 (1983) and WO 89/05859 published Jun. 29, 1989. For mammalian cells without such cell walls, the calcium phosphate precipitation method of Graham and van der Eb, Virology, 52:456-457 (1978) can be employed. General aspects of mammalian cell host system transfections have been described in U.S. Pat. No. 4,399,216. Transformations into yeast are typically carried out according to the method of Van Solingen et al., J. Bact., 130:946(1977) and Hsiao et al., Proc. Natl. Acad. Sci. (USA), 76:3829 (1979). However, other methods for introducing DNA into cells, such as by nuclear microinjection, electroporation, bacterial protoplast fusion with intact cells, or polycations, e.g., polybrene, polyornithine, may also be used. For various techniques for transforming mammalian cells, see Keown et al., Methods in Enzymology, 185:527-537 (1990) and Mansour et al., Nature, 336:348-352 (1988).

[1948] Suitable host cells for cloning or expressing the DNA in the vectors herein include prokaryote, yeast, or higher eukaryote cells. Suitable prokaryotes include but are not limited to eubacteria, such as Gram-negative or Gram-positive organisms, for example, Enterobacteriaceae such as E. coli. Various E. coli strains are publicly available, such as E. coli K12 strain MM294 (ATCC 31,446); E. coli X1776 (ATCC 31,537); E. coli strain W3110 (ATCC 27,325) and K5772 (ATCC 53,635). Other suitable prokaryotic host cells include Enterobacteriaceae such as Escherichia, e.g., E. coli, Enterobacter, Erwinia, Klebsiella, Proteus, Salmonella, e.g., Salmonella typhimurium, Serratia, e.g., Serratia marcescans, and Shigella, as well as Bacilli such as B. subtilis and B. licheniformis (e.g., B. licheniformis 41P disclosed in DD 266,710 published Apr. 12, 1989), Pseudomonas such as P. aeruginosa, and Streptomyces. These examples are illustrative rather than limiting. Strain W3110 is one particularly preferred host or parent host because it is a common host strain for recombinant DNA product fermentations. Preferably, the host cell secretes minimal amounts of proteolytic enzymes. For example, strain W3110 may be modified to effect a genetic mutation in the genes encoding proteins endogenous to the host, with examples of such hosts including E. coli W3110 strain 1A2, which has the complete genotype tonA; E. coli W3110 strain 9E4, which has the complete genotype tonA ptr3; E. coli W3110 strain 27C7 (ATCC 55,244), which has the complete genotype tonAptr3phoA E15 (argF-lac)169 degP ompT kan^{r}; E. coli W3110 strain 37D6, which has the complete genotype tonA ptr3 phoA E15 (argF-lac)169 degP ompT rbs7 ilvG kan^{r}, E. coli W3110 strain 40B4, which is strain 37D6 with a non-kanamycin resistant degP deletion mutation; and an E. coli strain having mutant periplasmic protease disclosed in U.S. Pat. No. 4,946,783 issued Aug. 7, 1990. Alternatively, in vitro methods of cloning, e.g., PCR or other nucleic acid polymerase reactions, are suitable.

[1949] In addition to prokaryotes, eukaryotic microbes such as filamentous fungi or yeast are suitable cloning or expression hosts for encoding vectors. Saccharomyces cerevisiae is a commonly used lower eukaryotic host microorganism. Others include Schizosaccharomyces pombe (Beach and Nurse, Nature, 290:140 (1981); EP 139,383 published May 2, 1985); Kluyveromyces hosts (U.S. Pat. No. 4,943,529; Fleer et al., Bio/Technology, 9:968-975 (1991)) such as, e.g., K. lactis (MW98-8C, CBS683, CBS4574; Louvencourt et al., J. Bacteriol., 737 (1983)), K. fragilis (ATCC 12,424), K. bulgaricus (ATCC 16,045), K. wickeramii (ATCC 24,178), K. waltii (ATCC 56,500), K. drosophilarum (ATCC 36,906; Van den Berg et al., Bio/Technology, 8:135 (1990)), K. thermotolerans, and K. marxianus; yarrowia (EP 402,226); Pichia pastoris (EP 183,070; Sreekrishna et al., J. Basic Microbiol., 28:265-278 (1988)); Candida; Trichoderma reesia (EP 244,234); Neurospora crassa (Case et al., Proc. Natl. Acad. Sci. USA, 76:5259-5263 (1979)); Schwanniomyces such as Schwanniomyces occidentalis (EP 394,538 published Oct. 31, 1990); and filamentous fungi such as, e.g., Neurospora, Penicillium, Tolypocladium (WO 91/00357 published Jan. 10, 1991), and Aspergillus hosts such as A. nidulans (Ballance et al., Biochem. Biophys. Res. Commun., 112:284-289 (1983); Tilburn et al., Gene, 26:205-221 (1983); Yelton et al., Proc. Natl. Acad. Sci. USA, 81:1470-1474 (1984)) and A. niger (Kelly and Hynes, EMBO J., 4:475479 (1985)). Methylotropic yeasts are suitable herein and include, but are not limited to, yeast capable of growth on methanol selected from the genera consisting of Hansenula, Candida, Kloeckera, Pichia, Saccharomyces, Torulopsis, and Rhodotorula. A list of specific species that are exemplary of this class of yeasts may be found in C. Anthony, The Biochemistry of Methylotrophs, 269 (1982).

[1950] Suitable host cells for the expression of glycosylated stretches of consecutive amino acids or polypeptides of interest are derived from multicellular organisms. Examples of invertebrate cells include insect cells such as Drosophila S2 and Spodoptera Sf9, as well as plant cells. Examples of useful mammalian host cell lines include Chinese hamster ovary (CHO) and COS cells. More specific examples include monkey kidney CV1 line transformed by SV40 (COS-7, ATCC CRL 1651); human embryonic kidney line (293 or 293 cells subcloned for growth in suspension culture, Graham et al., J. Gen Virol., 36:59 (1977)); Chinese hamster ovary cells/-DHFR (CHO, Urlaub and Chasin, Proc. Natl. Acad. Sci. USA, 77:4216 (1980)); mouse sertoli cells (TM4, Mather, Biol. Reprod., 23:243-251 (1980)); human lung cells (W138, ATCC CCL 75); human liver cells (Hep G2, HB 8065); and mouse mammary tumor (MMT 060562, ATCC CCL51). The selection of the appropriate host cell is deemed to be within the skill in the art.

### Selection and Use of a Replicable Vector

[1951] The nucleic acid (e.g., cDNA or genomic DNA) encoding the stretch of consecutive amino acids or polypeptides of interest may be inserted into a replicable vector for cloning (amplification of the DNA) or for expression. Various vectors are publicly available. The vector may, for example, be in the form of a plasmid, cosmid, viral particle, or phage. The appropriate nucleic acid sequence may be inserted into the vector by a variety of procedures. In general, DNA is inserted into an appropriate restriction endonuclease site(s) using techniques known in the art. Vector components generally include, but are not limited to, one or more of a signal sequence, an origin of replication, one or more marker genes, an enhancer element, a promoter, and a transcription termination sequence. Construction of suitable vectors containing one or more of these components employs standard ligation techniques which are known to the skilled artisan.

[1952] The stretches of consecutive amino acids or polypeptides of interest may be produced recombinantly not only directly, but also as a fusion polypeptide with a heterologous polypeptide, which may be a signal sequence or other polypeptide having a specific cleavage site at the N-terminus of the mature protein or polypeptide. In general, the signal sequence may be a component of the vector, or it may be a part of the encoding DNA that is inserted into the vector. The signal sequence may be a prokaryotic signal sequence selected, for example, from the group of the alkaline phosphatase, penicillinase, 1pp, or heat-stable enterotoxin II leaders. For yeast secretion the signal sequence may be, e.g., the yeast invertase leader, alpha factor leader (including Saccharomyces and Kluyveromyces alpha-factor leaders, the latter described in U.S. Pat. No. 5,010,182), or acid phosphatase leader, the C. albicans glucoamylase leader (EP 362,179 published Apr. 4, 1990), or the signal described in WO 90/13646 published Nov. 15, 1990. In mammalian cell expression, mammalian signal sequences may be used to direct secretion of the protein, such as signal sequences from secreted polypeptides of the same or related species, as well as viral secretory leaders.

[1953] Both expression and cloning vectors contain a nucleic acid sequence that enables the vector to replicate in one or more selected host cells. Such sequences are well known for a variety of bacteria, yeast, and viruses. The origin of replication from the plasmid pBR322 is suitable for most Gram-negative bacteria, the 2mu plasmid origin is suitable for yeast, and various viral origins (SV40, polyoma, adenovirus, VSV or BPV) are useful for cloning vectors in mammalian cells.

[1954] Expression and cloning vectors will typically contain a selection gene, also termed a selectable marker. Typical selection genes encode proteins that (a) confer resistance to antibiotics or other toxins, e.g., ampicillin, neomycin, methotrexate, or tetracycline, (b) complement auxotrophic deficiencies, or (c) supply critical nutrients not available from complex media, e.g., the gene encoding D-alanine racemase for Bacilli.

[1955] An example of suitable selectable markers for mammalian cells are those that enable the identification of cells competent to take up the encoding nucleic acid, such as DHFR or thymidine kinase. An appropriate host cell when wild-type DHFR is employed is the CHO cell line deficient in DHFR activity, prepared and propagated as described by Urlaub et al., Proc. Natl. Acad. Sci. USA, 77:4216 (1980). A suitable selection gene for use in yeast is the trp1 gene present in the yeast plasmid YRp7 (Stinchcomb et al., Nature, 282:39 (1979); Kingsman et al., Gene, 7:141 (1979); Tschemper et al., Gene, 10:157 (1980)). The trp1 gene provides a selection marker for a mutant strain of yeast lacking the ability to grow in tryptophan, for example, ATCC No. 44076 or PEP4-1 (Jones, Genetics, 85:12 (1977)).

[1956] Expression and cloning vectors usually contain a promoter operably linked to the encoding nucleic acid sequence to direct mRNA synthesis. Promoters recognized by a variety of potential host cells are well known. Promoters suitable for use with prokaryotic hosts include the beta-lactamase and lactose promoter systems (Chang et al., Nature, 275:615 (1978); Goeddel et al., Nature, 281:544 (1979)), alkaline phosphatase, a tryptophan (trp) promoter system (Goeddel, Nucleic Acids Res., 8:4057 (1980); EP 36,776), and hybrid promoters such as the tac promoter (deBoer et al., Proc. Natl. Acad. Sci. USA, 80:21-25 (1983)). Promoters for use in bacterial systems also will contain a Shine-Dalgarno (S.D.) sequence operably linked to the encoding DNA.

[1957] Examples of suitable promoting sequences for use with yeast hosts include the promoters for 3-phosphoglycerate kinase (Hitzeman et al., J. Biol. Chem., 255:2073 (1980)) or other glycolytic enzymes (Hess et al., J. Adv. Enzyme Re.g., 7:149 (1968); Holland, Biochemistry, 17:4900 (1978)), such as enolase, glyceraldehyde-3-phosphate dehydrogenase, hexokinase, pyruvate decarboxylase, phosphofructokinase, glucose-6-phosphate isomerase, 3-phosphoglycerate mutase, pyruvate kinase, triosephosphate isomerase, phosphoglucose isomerase, and glucokinase.

[1958] Other yeast promoters, which are inducible promoters having the additional advantage of transcription controlled by growth conditions, are the promoter regions for alcohol dehydrogenase 2, isocytochrome C, acid phosphatase, degradative enzymes associated with nitrogen metabolism, metallothionein, glyceraldehyde-3-phosphate dehydrogenase, and enzymes responsible for maltose and galactose utilization. Suitable vectors and promoters for use in yeast expression are further described in EP 73,657.

[1959] Transcription from vectors in mammalian host cells is controlled, for example, by promoters obtained from the genomes of viruses such as polyoma virus, fowlpox virus (UK 2,211,504 published Jul. 5, 1989), adenovirus (such as Adenovirus 2), bovine papilloma virus, avian sarcoma virus, cytomegalovirus, a retrovirus, hepatitis-B virus and Simian Virus 40 (SV40), from heterologous mammalian promoters, e.g., the actin promoter or an immunoglobulin promoter, and from heat-shock promoters, provided such promoters are compatible with the host cell systems.

[1960] Transcription of a DNA encoding the stretches of consecutive amino acids or polypeptides of interest by higher eukaryotes may be increased by inserting an enhancer sequence into the vector. Enhancers are cis-acting elements of DNA, usually about from 10 to 300 bp, that act on a promoter to increase its transcription. Many enhancer sequences are now known from mammalian genes (globin, elastase, albumin, alpha-fetoprotein, and insulin). Typically, however, one will use an enhancer from a eukaryotic cell virus. Examples include the SV40 enhancer on the late side of the replication origin (bp 100-270), the cytomegalovirus early promoter enhancer, the polyoma enhancer on the late side of the replication origin, and adenovirus enhancers. The enhancer may be spliced into the vector at a position 5′ or 3′ to the coding sequence, but is preferably located at a site 5′ from the promoter.

[1961] Expression vectors used in eukaryotic host cells (yeast, fungi, insect, plant, animal, human, or nucleated cells from other multicellular organisms) will also contain sequences necessary for the termination of transcription and for stabilizing the mRNA. Such sequences are commonly available from the 5′ and, occasionally 3′, untranslated regions of eukaryotic or viral DNAs or cDNAs. These regions contain nucleotide segments transcribed as polyadenylated fragments in the untranslated portion of the mRNA encoding stretches of consecutive amino acids or polypeptides of interest.

[1962] Still other methods, vectors, and host cells suitable for adaptation to the synthesis of stretches of consecutive amino acids or polypeptides in recombinant vertebrate cell culture are described in Gething et al., Nature 293:620-625 (1981); Mantei et al., Nature, 281:4046 (1979); EP 117,060; and EP 117,058.

### Detecting Gene Amplification/Expression

[1963] Gene amplification and/or expression may be measured in a sample directly, for example, by conventional Southern blotting, Northern blotting to quantitate the transcription of mRNA (Thomas, Proc. Natl. Acad. Sci. USA, 77:5201-5205 (1980)), dot blotting (DNA analysis), or in situ hybridization, using an appropriately labeled probe, based on the sequences provided herein. Alternatively, antibodies may be employed that can recognize specific duplexes, including DNA duplexes, RNA duplexes, and DNA-RNA hybrid duplexes or DNA-protein duplexes. The antibodies in turn may be labeled and the assay may be carried out where the duplex is bound to a surface, so that upon the formation of duplex on the surface, the presence of antibody bound to the duplex can be detected.

[1964] Gene expression, alternatively, may be measured by immunological methods, such as immunohistochemical staining of cells or tissue sections and assay of cell culture or body fluids, to quantitate directly the expression of gene product. Antibodies useful for immunohistochemical staining and/or assay of sample fluids may be either monoclonal or polyclonal, and may be prepared in any mammal. Conveniently, the antibodies may be prepared against a native sequence stretches of consecutive amino acids or polypeptides of interest or against a synthetic peptide based on the DNA sequences provided herein or against exogenous sequence fused to DNA encoding a stretch of consecutive amino acids or polypeptide of interest and encoding a specific antibody epitope.

### Purification of Polypeptide

[1965] Forms of the stretches of consecutive amino acids or polypeptides of interest may be recovered from culture medium or from host cell lysates. If membrane-bound, it can be released from the membrane using a suitable detergent solution (e.g. Triton-X 100) or by enzymatic cleavage. Cells employed in expression of the stretches of consecutive amino acids or polypeptides of interest can be disrupted by various physical or chemical means, such as freeze-thaw cycling, sonication, mechanical disruption, or cell lysing agents.

[1966] It may be desired to purify the stretches of consecutive amino acids or polypeptides of interest from recombinant cell proteins or polypeptides. The following procedures are exemplary of suitable purification procedures: by fractionation on an ion-exchange column; ethanol precipitation; reverse phase HPLC; chromatography on silica or on a cation-exchange resin such as DEAE; chromatofocusing; SDS-PAGE; ammonium sulfate precipitation; gel filtration using, for example, Sephadex G-75; protein A Sepharose columns to remove contaminants such as IgG; and metal chelating columns to bind epitope-tagged forms. Various methods of protein purification may be employed and such methods are known in the art and described for example in Deutscher, Methods in Enzymology, 182 (1990); Scopes, Protein Purification: Principles and Practice, Springer-Verlag, New York (1982). The purification step(s) selected will depend, for example, on the nature of the production process used and the particular stretches of consecutive amino acids or polypeptides of interest produced.

### Intein-Based C-Terminal Syntheses

[1967] As described, for example, in U.S. Pat. No. 6,849,428, issued Feb. 1, 2005, inteins are the protein equivalent of the self-splicing RNA introns (see Perler et al., Nucleic Acids Res. 22:1125-1127 (1994)), which catalyze their own excision from a precursor protein with the concomitant fusion of the flanking protein sequences, known as exteins (reviewed in Perler et al., Curr. Opin. Chem. Biol. 1:292-299 (1997); Perler, F. B. Cell 92(1):1-4 (1998); Xu et al., EMBO J. 15(19):5146-5153 (1996)).

[1968] Studies into the mechanism of intein splicing led to the development of a protein purification system that utilized thiol-induced cleavage of the peptide bond at the N-terminus of the See VMA intein (Chong et al., Gene 192(2):271-281 (1997)). Purification with this intein-mediated system generates a bacterially-expressed protein with a C-terminal thioester (Chong et al., (1997)). In one application, where it is described to isolate a cytotoxic protein, the bacterially expressed protein with the C-terminal thioester is then fused to a chemically-synthesized peptide with an N-terminal cysteine using the chemistry described for “native chemical ligation” (Evans et al., Protein Sci. 7:2256-2264 (1998); Muir et al., Proc. Natl. Acad. Sci. USA 95:6705-6710 (1998)).

[1969] This technique, referred to as “intein-mediated protein ligation” (IPL), represents an important advance in protein semi-synthetic techniques. However, because chemically-synthesized peptides of larger than about 100 residues are difficult to obtain, the general application of IPL was limited by the requirement of a chemically-synthesized peptide as a ligation partner.

[1970] IPL technology was significantly expanded when an expressed protein with a predetermined N-terminus, such as cysteine, was generated, as described for example in U.S. Pat. No. 6,849,428. This allows the fusion of one or more expressed proteins from a host cell, such as bacterial, yeast or mammalian cells. In one non-limiting example the intein a modified RIR1 Methanobacterium thermoautotrophicum is that cleaves at either the C-terminus or N-terminus is used which allows for the release of a bacterially expressed protein during a one-column purification, thus eliminating the need proteases entirely.

[1971] Intein technology is one example of one route to obtain components. In one embodiment, the subunits of the compounds of the invention are obtained by transfecting suitable cells, capable of expressing and secreting mature chimeric polypeptides, wherein such polypeptides comprise, for example, an adhesin domain contiguous with an isolatable c-terminal intein domain (see U.S. Pat. No. 6,849,428, Evans et al., issued Feb. 1, 2005, hereby incorporated by reference). The cells, such as mammalian cells or bacterial cells, are transfected using known recombinant DNA techniques. The secreted chimeric polypeptide can then be isolated, e.g. using a chitin-derivatized resin in the case of an intein-chitin binding domain (see U.S. Pat. No. 6,897,285, Xu et al., issued May 24, 2005, hereby incorporated by reference), and is then treated under conditions permitting thiol-mediated cleavage and release of the now C-terminal thioester-terminated subunit. The thioester-terminated adhesion subunit is readily converted to a C-terminal cysteine terminated subunit.

[1972] For example, following an intein autocleavage reaction, a thioester intermediate is generated that permits the facile addition of cysteine, selenocysteine, homocysteine, or homoselenocysteine, or a derivative of cysteine, selenocysteine, homocysteine, homoselenocysteine, to the C-terminus by native chemical ligation. Methods of adding a cysteine, selenocysteine, homocysteine, or homoselenocysteine, or a derivative of cysteine, selenocysteine, homocysteine, homoselenocysteine, to the C-terminus by native chemical ligation which are useful in aspects of the present invention are described in U.S. Patent Application No. 2008/0254512, Capon, published Oct. 16, 2008, the entire contents of which are hereby incorporated herein by reference.

### Examples of Expression of Stretches of Consecutive Amino Acids or Polypeptide Components of Interest in Various Cells

In E. coli

[1973] The DNA sequence encoding the desired amino acid sequence of interest or polypeptide is initially amplified using selected PCR primers. The primers should contain restriction enzyme sites which correspond to the restriction enzyme sites on the selected expression vector. A variety of expression vectors may be employed. An example of a suitable vector is pBR322 (derived from E. coli; see Bolivar et al., Gene, 2:95 (1977)) which contains genes for ampicillin and tetracycline resistance. The vector is digested with restriction enzyme and dephosphorylated. The PCR amplified sequences are then ligated into the vector. The vector will preferably include sequences which encode for an antibiotic resistance gene, a trp promoter, a polyhis leader (including the first six STII codons, polyhis sequence, and enterokinase cleavage site), the specific amino acid sequence of interest/polypeptide coding region, lambda transcriptional terminator, and an argU gene.

[1974] The ligation mixture is then used to transform a selected E. coli strain using the methods described in Sambrook et al., supra. Transformants are identified by their ability to grow on LB plates and antibiotic resistant colonies are then selected. Plasmid DNA can be isolated and confirmed by restriction analysis and DNA sequencing.

[1975] Selected clones can be grown overnight in liquid culture medium such as LB broth supplemented with antibiotics. The overnight culture may subsequently be used to inoculate a larger scale culture. The cells are then grown to a desired optical density, during which the expression promoter is turned on.

[1976] After culturing the cells for several more hours, the cells can be harvested by centrifugation. The cell pellet obtained by the centrifugation can be solubilized using various agents known in the art, and the solubilized amino acid sequence of interest or polypeptide can then be purified using a metal chelating column under conditions that allow tight binding of the protein.

[1977] The primers can contain restriction enzyme sites which correspond to the restriction enzyme sites on the selected expression vector, and other useful sequences providing for efficient and reliable translation initiation, rapid purification on a metal chelation column, and proteolytic removal with enterokinase. The PCR-amplified, poly-His tagged sequences can be ligated into an expression vector used to transform an E. coli host based on, for example, strain 52 (W3110 fuhA(tonA) Ion galE rpoHts(htpRts) clpP(lacIq). Transformants can first be grown in LB containing 50 mg/ml carbenicillin at 30° C. with shaking until an O.D.600 of 3-5 is reached. Cultures are then diluted 50-100 fold into C RAP media (prepared by mixing 3.57 g (NH₄)₂ SO₄, 0.71 g sodium citrate-2H₂O, 1.07 g KCl, 5.36 g Difco yeast extract, 5.36 g Sheffield hycase SF in 500 mL water, as well as 110 mM MPOS, pH 7.3, 0.55% (w/v) glucose and 7 mM MgSO₄) and grown for approximately 20-30 hours at 30° C. with shaking. Samples were removed to verify expression by SDS-PAGE analysis, and the bulk culture is centrifuged to pellet the cells. Cell pellets were frozen until purification and refolding.

[1978] E. coli paste from 0.5 to 1 L fermentations (6-10 g pellets) was resuspended in 10 volumes (w/v) in 7 M guanidine, 20 mM Tris, pH 8 buffer. Solid sodium sulfite and sodium tetrathionate is added to make final concentrations of 0.1M and 0.02 M, respectively, and the solution was stirred overnight at 4° C. This step results in a denatured protein with all cysteine residues blocked by sulfitolization. The solution was centrifuged at 40,000 rpm in a Beckman Ultracentifuge for 30 min. The supernatant was diluted with 3-5 volumes of metal chelate column buffer (6 M guanidine, 20 mM Tris, pH 7.4) and filtered through 0.22 micron filters to clarify. Depending the clarified extract was loaded onto a 5 mil Qiagen Ni-NTA metal chelate column equilibrated in the metal chelate column buffer. The column was washed with additional buffer containing 50 mM imidazole (Calbiochem, Utrol grade), pH 7.4. The protein was eluted with buffer containing 250 mM imidazole. Fractions containing the desired protein were pooled and stored at 4.degree. C. Protein concentration was estimated by its absorbance at 280 nm using the calculated extinction coefficient based on its amino acid sequence.

### In Mammalian Cells

[1979] This general example illustrates a preparation of a glycosylated form of a desired amino acid sequence of interest or polypeptide component by recombinant expression in mammalian cells.

[1980] The vector pRK5 (see EP 307,247, published Mar. 15, 1989) can be employed as the expression vector. Optionally, the encoding DNA is ligated into pRK5 with selected restriction enzymes to allow insertion of the DNA using ligation methods such as described in Sambrook et al., supra.

[1981] In one embodiment, the selected host cells may be 293 cells. Human 293 cells (ATCC CCL 1573) are grown to confluence in tissue culture plates in medium such as DMEM supplemented with fetal calf serum and optionally, nutrient components and/or antibiotics. About g of the ligated vector DNA is mixed with about 1 μg DNA encoding the VA RNA gene [Thimmappaya et al., Cell 31:543 (1982)] and dissolved in 500 μl of I mM Tris-HCl, 0.1 mM EDTA, 0.227 M CaCl₂ To this mixture is added, dropwise, 500 μl of 50 mM HEPES (pH 7.35), 280 mM NaCl, 1.5 mM NaPO₄, and a precipitate is allowed to form for 10 minutes at 25° C. The precipitate is suspended and added to the 293 cells and allowed to settle for about four hours at 37° C. The culture medium is aspirated off and 2 ml of 20% glycerol in PBS is added for 30 seconds. The 293 cells are then washed with serum free medium, fresh medium is added and the cells are incubated for about 5 days.

[1982] Approximately 24 hours after the transfections, the culture medium is removed and replaced with culture medium (alone) or culture medium containing 200 μCi/ml ³⁵S-cysteine and 200 μCi/ml ³¹S-methionine. After a 12 hour incubation, the conditioned medium is collected, concentrated on a spin filter, and loaded onto a 15% SDS gel. The processed gel may be dried and exposed to film for a selected period of time to reveal the presence of amino acid sequence of interest or polypeptide component. The cultures containing transfected cells may undergo further incubation (in serum free medium) and the medium is tested in selected bioassays.

[1983] In an alternative technique, the nucleic acid amino acid sequence of interest or polypeptide component may be introduced into 293 cells transiently using the dextran sulfate method described by Somparyrac et al., Proc. Natl. Acad. Sci., 12:7575 (1981). 293 cells are grown to maximal density in a spinner flask and 700 μg of the ligated vector is added. The cells are first concentrated from the spinner flask by centrifugation and washed with PBS. The DNA-dextran precipitate is incubated on the cell pellet for four hours. The cells are treated with 20% glycerol for 90 seconds, washed with tissue culture medium, and re-introduced into the spinner flask containing tissue culture medium, 5 μg/ml bovine insulin and 0.1 μg/ml bovine transferrin. After about four days, the conditioned media is centrifuged and filtered to remove cells and debris. The sample containing expressed amino acid sequence of interest or polypeptide component can then be concentrated and purified by any selected method, such as dialysis and/or column chromatography.

[1984] In another embodiment, the amino acid sequence of interest or polypeptide component can be expressed in CHO cells. The amino acid sequence of interest or polypeptide component can be transfected into CHO cells using known reagents such as CaPO₄ or DEAE-dextran. As described above, the cell cultures can be incubated, and the medium replaced with culture medium (alone) or medium containing a radiolabel such as ³⁵S-methionine. After determining the presence of amino acid sequence of interest or polypeptide component, the culture medium may be replaced with serum free medium. Preferably, the cultures are incubated for about 6 days, and then the conditioned medium is harvested. The medium containing the expressed amino acid sequence of interest or polypeptide component can then be concentrated and purified by any selected method.

[1985] Epitope-tagged amino acid sequence of interest or polypeptide component may also be expressed in host CHO cells. The amino acid sequence of interest or polypeptide component may be subcloned out of a pRK5 vector. The subclone insert can undergo PCR to fuse in frame with a selected epitope tag such as a poly-his tag into a Baculovirus expression vector. The poly-his tagged amino acid sequence of interest or polypeptide component insert can then be subcloned into a SV40 driven vector containing a selection marker such as DHFR for selection of stable clones. Finally, the CHO cells can be transfected (as described above) with the SV40 driven vector. Labeling may be performed, as described above, to verify expression. The culture medium containing the expressed poly-His tagged amino acid sequence of interest or polypeptide component can then be concentrated and purified by any selected method, such as by Ni²⁺-chelate affinity chromatography.

[1986] In an embodiment the amino acid sequence of interest or polypeptide component are expressed as an IgG construct (immunoadhesin), in which the coding sequences for the soluble forms (e.g. extracellular domains) of the respective proteins are fused to an IgG1 constant region sequence containing the hinge, CH2 and CH2 domains and/or is a poly-His tagged form.

[1987] Following PCR amplification, the respective DNAs are subcloned in a CHO expression vector using standard techniques as described in Ausubel et al., Current Protocols of Molecular Biology, Unit 3.16, John Wiley and Sons (1997). CHO expression vectors are constructed to have compatible restriction sites 5′ and 3′ of the DNA of interest to allow the convenient shuttling of cDNA's. The vector used in expression in CHO cells is as described in Lucas et al., Nucl. Acids Res. 24:9 (1774-1779 (1996), and uses the SV40 early promoter/enhancer to drive expression of the cDNA of interest and dihydrofolate reductase (DHFR). DHFR expression permits selection for stable maintenance of the plasmid following transfection.

### In Yeast

[1988] The following method describes recombinant expression of a desired amino acid sequence of interest or polypeptide component in yeast.

[1989] First, yeast expression vectors are constructed for intracellular production or secretion of a stretch of consecutive amino acids from the ADH2/GAPDH promoter. DNA encoding a desired amino acid sequence of interest or polypeptide component, a selected signal peptide and the promoter is inserted into suitable restriction enzyme sites in the selected plasmid to direct intracellular expression of the amino acid sequence of interest or polypeptide component. For secretion, DNA encoding the stretch of consecutive amino acids can be cloned into the selected plasmid, together with DNA encoding the ADH2/GAPDH promoter, the yeast alpha-factor secretory signal/leader sequence, and linker sequences (if needed) for expression of the stretch of consecutive amino acids.

[1990] Yeast cells, such as yeast strain AB110, can then be transformed with the expression plasmids described above and cultured in selected fermentation media. The transformed yeast supernatants can be analyzed by precipitation with 10% trichloroacetic acid and separation by SDS-PAGE, followed by staining of the gels with Coomassie Blue stain.

[1991] Recombinant amino acid sequence of interest or polypeptide component can subsequently be isolated and purified by removing the yeast cells from the fermentation medium by centrifugation and then concentrating the medium using selected cartridge filters. The concentrate containing the amino acid sequence of interest or polypeptide component may further be purified using selected column chromatography resins.

### In Baculovirus-Infected Insect Cells

[1992] The following method describes recombinant expression of stretches of consecutive amino acids in Baculovirus-infected insect cells.

[1993] The desired nucleic acid encoding the stretch of consecutive amino acids is fused upstream of an epitope tag contained with a baculovirus expression vector. Such epitope tags include poly-his tags and immunoglobulin tags (like Fc regions of IgG). A variety of plasmids may be employed, including plasmids derived from commercially available plasmids such as pVL1393 (Novagen). Briefly, the amino acid sequence of interest or polypeptide component or the desired portion of the amino acid sequence of interest or polypeptide component (such as the sequence encoding the extracellular domain of a transmembrane protein) is amplified by PCR with primers complementary to the 5′ and 3′ regions. The 5′ primer may incorporate flanking (selected) restriction enzyme sites. The product is then digested with those selected restriction enzymes and subcloned into the expression vector.

[1994] Recombinant baculovirus is generated by co-transfecting the above plasmid and BaculoGold™ virus DNA (Pharmingen) into Spodoptera frugiperda (“Sf9”) cells (ATCC CRL 1711) using lipofectin (commercially available from GIBCO-BRL). After 4-5 days of incubation at 28° C., the released viruses are harvested and used for further amplifications. Viral infection and protein expression is performed as described by O'Reilley et al., Baculovirus expression vectors: A laboratory Manual, Oxford: Oxford University Press (1994).

[1995] Expressed poly-his tagged amino acid sequence of interest or polypeptide component can then be purified, for example, by Ni²⁺-chelate affinity chromatography as follows. Extracts are prepared from recombinant virus-infected Sf9 cells as described by Rupert et al., Nature, 362:175-179 (1993). Briefly, Sf9 cells are washed, resuspended in sonication buffer (25 mL Hepes, pH 7.9; 12.5 mM MgCl₂; 0.1 mM EDTA; 10% Glycerol; 0.1% NP40; 0.4 M KCl), and sonicated twice for 20 seconds on ice. The sonicates are cleared by centrifugation, and the supernatant is diluted 50-fold in loading buffer (50 mM phosphate, 300 mM NaCl, 10% Glycerol, pH 7.8) and filtered through a 0.45 μm filter. A Ni²⁺-NTA agarose column (commercially available from Qiagen) is prepared with a bed volume of 5 mL, washed with 25 mL of water and equilibrated with 25 mL of loading buffer. The filtered cell extract is loaded onto the column at 0.5 mL per minute. The column is washed to baseline A₂₈₀ with loading buffer, at which point fraction collection is started. Next, the column is washed with a secondary wash buffer (50 mM phosphate; 300 mM NaCl, 10% Glycerol, pH 6.0), which elutes nonspecifically bound protein. After reaching A₂₈₀ baseline again, the column is developed with a 0 to 500 mM Imidazole gradient in the secondary wash buffer. One mL fractions are collected and analyzed by SDS-PAGE and silver staining or western blot with Ni²⁺-NTA-conjugated to alkaline phosphatase (Qiagen). Fractions containing the eluted His₁₀-tagged sequence are pooled and dialyzed against loading buffer.

[1996] Alternatively, purification of the IgG tagged (or Fc tagged) amino acid sequence can be performed using known chromatography techniques, including for instance, Protein A or Protein G column chromatography.

[1997] Fc containing constructs of proteins can be purified from conditioned media as follows. The conditioned media is pumped onto a 5 ml Protein A column (Pharmacia) which is equilibrated in 20 mM Na phosphate buffer, pH 6.8. After loading, the column is washed extensively with equilibration buffer before elution with 100 mM citric acid, pH 3.5. The eluted protein is immediately neutralized by collecting 1 ml fractions into tubes containing 275 mL of 1 M Tris buffer, pH 9. The highly purified protein is subsequently desalted into storage buffer as described above for the poly-His tagged proteins. The homogeneity of the proteins is verified by SDS polyacrylamide gel (PEG) electrophoresis and N-terminal amino acid sequencing by Edman degradation.

### Examples of Pharmaceutical Compositions

[1998] Non-limiting examples of compositions and dosages of the invention are set forth as follows:

### Etanercept and Related Compositions

[1999] Compositions comprising tetrahedral or octahedral antibodies wherein one or more domains of tetrahedral or octahedral antibodies comprise consecutive amino acids having the sequence of etanercept (e.g. Enbrel) or the sequence of one or more domains thereof, may comprise mannitol, sucrose, and tromethamine. In an embodiment, the composition is in the form of a lyophilizate. In an embodiment, the composition is reconstituted with, for example, Sterile Bacteriostatic Water for Injection (BWFI), USP (containing 0.9% benzyl alcohol). In an embodiment the compound is administered to a subject for reducing signs and symptoms, inducing major clinical response, inhibiting the progression of structural damage, and improving physical function in subjects with moderately to severely active rheumatoid arthritis. The compound may be initiated in combination with methotrexate (MTX) or used alone. In an embodiment the compound is administered to a subject for reducing signs and symptoms of moderately to severely active polyarticular-course juvenile rheumatoid arthritis in subjects who have had an inadequate response to one or more DMARDs. In an embodiment the compound is administered to a subject for reducing signs and symptoms, inhibiting the progression of structural damage of active arthritis, and improving physical function in subjects with psoriatic arthritis. In an embodiment the compound is administered to a subject for reducing signs and symptoms in subjects with active ankylosing spondylitis. In an embodiment the compound is administered to a subject for the treatment of chronic moderate to severe plaque psoriasis. In an embodiment wherein the subject has rheumatoid arthritis, psoriatic arthritis, or ankylosing spondylitis the compound is administered at 25-75 mg per week given as one or more subcutaneous (SC) injections. In a further embodiment the compound is administered at 50 mg per week in a single SC injection. In an embodiment wherein the subject has plaque psoriasis the compound is administered at 25-75 mg twice weekly or 4 days apart for 3 months followed by a reduction to a maintenance dose of 25-75 mg per week. In a further embodiment the compound is administered at a dose of at 50 mg twice weekly or 4 days apart for 3 months followed by a reduction to a maintenance dose of 50 mg per week. In an embodiment the dose is between 2× and 100× less than the doses set forth herein. In an embodiment wherein the subject has active polyarticular-course JRA the compound may be administered at a dose of 0.2-1.2 mg/kg per week (up to a maximum of 75 mg per week). In a further embodiment the compound is administered at a dose of 0.8 mg/kg per week (up to a maximum of 50 mg per week). In some embodiments the dose is between 2× and 100× less than the doses set forth hereinabove.

### Infliximab, Adalimumab, and Related Compositions

[2000] Compositions comprising tetrahedral or octahedral antibodies wherein one or more domains of tetrahedral or octahedral antibodies comprise consecutive amino acids having the sequence of infliximab (e.g. Remicade) or the sequence of one or more domains thereof, may comprise sucrose, polysorbate 80, monobasic sodium phosphate, monohydrate, and dibasic sodium phosphate, dihydrate. Preservatives are not present in one embodiment. In an embodiment, the composition is in the form of a lyophilizate. In an embodiment, the composition is reconstituted with, for example, Water for Injection (BWFI), USP. In an embodiment the pH of the composition is 7.2 or is about 7.2. In one embodiment the compound is administered is administered to a subject with rheumatoid arthritis in a dose of 2-4 mg/kg given as an intravenous infusion followed with additional similar doses at 2 and 6 weeks after the first infusion then every 8 weeks thereafter. In a further embodiment the compound is administered in a dose of 3 mg/kg given as an intravenous infusion followed with additional similar doses at 2 and 6 weeks after the first infusion then every 8 weeks thereafter. In an embodiment the dose is adjusted up to 10 mg/kg or treating as often as every 4 weeks. In an embodiment the compound is administered in combination with methotrexate. In one embodiment the compound is administered to a subject with Crohn's disease or fistulizing Crohn's disease at dose of 2-7 mg/kg given as an induction regimen at 0, 2 and 6 weeks followed by a maintenance regimen of 4-6 mg/kg every 8 weeks thereafter for the treatment of moderately to severely active Crohn's disease or fistulizing disease. In a further embodiment the compound is administered at a dose of 5 mg/kg given as an induction regimen at 0, 2 and 6 weeks followed by a maintenance regimen of 5 mg/kg every 8 weeks thereafter for the treatment of moderately to severely active Crohn's disease or fistulizing disease. In an embodiment the dose is adjusted up to 10 mg/kg. In one embodiment the compound is administered to a subject with ankylosing spondylitis at a dose of 2-7 mg/kg given as an intravenous infusion followed with additional similar doses at 2 and 6 weeks after the first infusion, then every 6 weeks thereafter. In a further embodiment the compound is administered at a dose of 5 mg/kg given as an intravenous infusion followed with additional similar doses at 2 and 6 weeks after the first infusion, then every 6 weeks thereafter. In one embodiment the compound is administered to a subject with psoriatic arthritis at a dose of 2-7 mg/kg given as an intravenous infusion followed with additional similar doses at 2 and 6 weeks after the first infusion then every 8 weeks thereafter. In a further embodiment the compound is administered at a dose of 5 mg/kg given as an intravenous infusion followed with additional similar doses at 2 and 6 weeks after the first infusion then every 8 weeks thereafter. In an embodiment the compound is administered with methotrexate. In one embodiment the compound is administered to a subject with ulcerative colitis at a dose of 2-7 mg/kg given as an induction regimen at 0, 2 and 6 weeks followed by a maintenance regimen of 2-7 mg/kg every 8 weeks thereafter for the treatment of moderately to severely active ulcerative colitis. In a further embodiment the compound is administered to a subject with ulcerative colitis at a dose of 5 mg/kg given as an induction regimen at 0, 2 and 6 weeks followed by a maintenance regimen of 5 mg/kg every 8 weeks thereafter. In some embodiments the dose is between 2× and 100× less than the doses set forth hereinabove for treating the individual diseases.

### Rituximab, Ocrelizumab, and Related Compositions

[2001] Compositions comprising tetrahedral or octahedral antibodies wherein one or more domains of tetrahedral or octahedral antibodies comprise consecutive amino acids having the sequence of rituximab, ocrelizumab, or the sequence of one or more domains thereof, may comprise sodium chloride, sodium citrate dihydrate, sodium citrate dihydrate, and Sterile Water for Injection. In an embodiment, the composition is provided in a sterile, clear, colourless, preservative-free liquid concentrate for intravenous (IV) administration. In an embodiment, the composition is supplied at a concentration of 10 mg/ml. In an embodiment, the product is formulated for intravenous administration in 9.0 mg/ml sodium chloride, 7.35 mg/ml sodium citrate dihydrate, 0.7 mg/ml polysorbate 80, and Sterile Water for Injection. In an embodiment the pH of the composition is 6.5 or about 6.5. In an embodiment, the composition comprises the tetrahedral or octahedral antibody at a concentration of 30 mg/mL in 20 mM sodium acetate, 106 mM trehalose dihydrate, 0.02% (w/v) polysorbate 20, at pH 5.3.

### Blinatumomab, and Related Compositions

[2002] Compositions comprising tetrahedral or octahedral antibodies wherein one or more domains of tetrahedral or octahedral antibodies comprise consecutive amino acids having the sequence of blinatumomab, or the sequence of one or more domains thereof, may comprise citric acid monohydrate (E330), trehalose dihydrate, lysine hydrochloride, polysorbate 80, sodium hydroxide (for pH-adjustment), and water for injections. In an embodiment, the pH is 7 or about 8. For treatment of relapsed or refractory B-precursor ALL, the dose depends on the patient's bodyweight. The composition is infused continuously during a treatment cycle of 4 weeks. Each cycle of treatment is separated by a 2-week treatment-free interval. Patients who have no signs of cancer after 2 cycles may be treated with up to 3 additional cycles of treatment. For treatment of patients with minimal residual disease, the dose depends on the patient's bodyweight. The composition is infused continuously during a treatment cycle of 4 weeks. Patients may be treated for up to 3 additional treatment cycles, each one given after a 2-week treatment-free interval.

### ACE2 and Related Compositions

[2003] Compositions comprising tetrahedral or octahedral antibodies wherein one or more domains of tetrahedral or octahedral antibodies comprise consecutive amino acids having the sequence of ACE2 or portions thereof, may comprise known excipients such as those discussed in the sections above. Such compositions may be used, for example, for treatment of SARS-CoV-2.

[2004] In each of the embodiments of the compositions described herein, the compositions, when in the form of a lyophilizate, may be reconstituted with, for example, sterile aqueous solutions, sterile water, Sterile Water for Injections (USP), Sterile Bacteriostatic Water for Injections (USP), and equivalents thereof known to those skilled in the art.

[2005] It is understood that in administration of any of the instant compounds, the compound may be administered in isolation, in a carrier, as part of a pharmaceutical composition, or in any appropriate vehicle.

### Dosage

[2006] It is understood that where a dosage range is stated herein, e.g. 1-10 mg/kg per week, the invention disclosed herein also contemplates each integer dose, and tenth thereof, between the upper and lower limits. In the case of the example given, therefore, the invention contemplates 1.0, 1.1, 1.2, 1.3, 1.4, 1.5, 1.6, 1.7, 1.8, 1.9, 2.0, 2.1, 2.2, 2.3, 2.4 etc. mg/kg up to 10 mg/kg.

[2007] In embodiments, the compounds of the present invention can be administered as a single dose or may be administered as multiple doses.

[2008] In general, the daily dosage for treating a disorder or condition according to the methods described above will generally range from about 0.01 to about 10.0 mg/kg body weight of the subject to be treated.

[2009] Variations based on the aforementioned dosage ranges may be made by a physician of ordinary skill taking into account known considerations such as the weight, age, and condition of the person being treated, the severity of the affliction, and the particular route of administration chosen.

[2010] It is also expected that the compounds disclosed will affect cooperative binding with attendant consequences on effective dosages required.

### Pharmaceuticals

[2011] The term “pharmaceutically acceptable carrier” is understood to include excipients, carriers or diluents. The particular carrier, diluent or excipient used will depend upon the means and purpose for which the active ingredient is being applied.

[2012] For parenteral administration, solutions containing a compound of this invention or a pharmaceutically acceptable salt thereof in sterile aqueous solution may be employed. Such aqueous solutions should be suitably buffered if necessary and the liquid diluent first rendered isotonic with sufficient saline or glucose. These particular aqueous solutions are especially suitable for intravenous, intramuscular, subcutaneous and intraperitoneal administration. The sterile aqueous media employed are all readily available by standard techniques known to those skilled in the art.

[2013] The compositions of this invention may be in a variety of forms. These include, for example, liquid, semi-solid and solid dosage forms, such as liquid solutions (e.g., injectable and infusible solutions), dispersions or suspensions. The preferred form depends on the intended mode of administration and therapeutic application. Some compositions are in the form of injectable or infusible solutions. A mode of administration is parenteral (e.g., intravenous, subcutaneous, intraperitoneal, intramuscular). In an embodiment, the compound is administered by intravenous infusion or injection. In another embodiment, the compound is administered by intramuscular or subcutaneous injection. In another embodiment, the compound is administered intranasally.

[2014] For therapeutic use, the compositions disclosed here can be administered in various manners, including soluble form by bolus injection, continuous infusion, sustained release from implants, oral ingestion, local injection (e.g. intracardiac, intramuscular), systemic injection, or other suitable techniques well known in the pharmaceutical arts. Other methods of pharmaceutical administration include, but are not limited to oral, subcutaneously, transdermal, intravenous, intramuscular and parenteral methods of administration. Typically, a soluble composition will comprise a purified compound in conjunction with physiologically acceptable carriers, excipients or diluents. Such carriers will be nontoxic to recipients at the dosages and concentrations employed. The preparation of such compositions can entail combining a compound with buffers, antioxidants, carbohydrates including glucose, sucrose or dextrins, chelating agents such as EDTA, glutathione and other stabilizers and excipients. Neutral buffered saline or saline mixed with conspecific serum albumin are exemplary appropriate diluents. The product can be formulated as a lyophilizate using appropriate excipient solutions (e.g., sucrose) as diluents.

[2015] Other derivatives comprise the compounds/compositions of this invention covalently bonded to a nonproteinaceous polymer. The bonding to the polymer is generally conducted so as not to interfere with the preferred biological activity of the compound, e.g. the binding activity of the compound to a target. The nonproteinaceous polymer ordinarily is a hydrophilic synthetic polymer, i.e., a polymer not otherwise found in nature. However, polymers which exist in nature and are produced by recombinant or in vitro methods are useful, as are polymers which are isolated from nature. Hydrophilic polyvinyl polymers fall within the scope of this invention, e.g. polyvinylalcohol and polyvinylpyrrolidone. Particularly useful are polyalkylene ethers such as polyethylene glycol, polypropylene glycol, polyoxyethylene esters or methoxy polyethylene glycol; polyoxyalkylenes such as polyoxyethylene, polyoxypropylene, and block copolymers of polyoxyethylene and polyoxypropylene (Pluronics); polymethacrylates; carbomers; branched or unbranched polysaccharides which comprise the saccharide monomers D-mannose, D- and L-galactose, fucose, fructose, D-xylose, L-arabinose, D-glucuronic acid, sialic acid, D-galacturontc acid, D-mannuronic acid (e.g. polymannuronic acid, or alginic acid), D-glucosamine, D-galactosamine, D-glucose and neuraminic acid including homopolysaccharides and heteropolysaccharides such as lactose, amylopectin, starch, hydroxyethyl starch, amylose, dextran sulfate, dextran, dextrins, glycogen, or the polysaccharide subunit of acid mucopolysaccharides, e.g. hyaluronic acid; polymers of sugar alcohols such as polysorbitol and polymannitol; as well as heparin or heparon.

[2016] The pharmaceutical compositions of the invention may include a “therapeutically effective amount” or a “prophylactically effective amount” of a compound of the invention. A “therapeutically effective amount” refers to an amount effective, at dosages and for periods of time necessary, to achieve the desired therapeutic result. A therapeutically effective amount of the compound may vary according to factors such as the disease state, age, sex, and weight of the individual. A therapeutically effective amount is also one in which any toxic or detrimental effects of the compound are outweighed by the therapeutically beneficial effects. A “prophylactically effective amount” refers to an amount effective, at dosages and for periods of time necessary, to achieve the desired prophylactic result. Typically, since a prophylactic dose is used in subjects prior to or at an earlier stage of disease, the prophylactically effective amount will be less than the therapeutically effective amount.

### General

[2017] All combinations of the various elements disclosed herein are within the scope of the invention.

[2018] As used herein, all headings are simply for organization and are not intended to limit the disclosure in any manner. The content of any individual section may be equally applicable to all sections. All combinations of the various elements disclosed herein are within the scope of the invention.

[2019] Additional objects, advantages, and novel features of the present invention will become apparent to one ordinarily skilled in the art upon examination of the following examples, which are not intended to be limiting. Additionally, each of the various embodiments and aspects of the present invention as delineated hereinabove and as claimed in the claims section below finds experimental support in the following examples.

[2020] It is appreciated that certain features of the invention, which are, for clarity, described in the context of separate embodiments, may also be provided in combination in a single embodiment. Conversely, various features of the invention, which are, for brevity, described in the context of a single embodiment, may also be provided separately or in any suitable sub-combination or as suitable in any other described embodiment of the invention. Certain features described in the context of various embodiments are not to be considered essential features of those embodiments, unless the embodiment is inoperative without those elements.

[2021] This invention will be better understood by reference to the Examples which follow, but those skilled in the art will readily appreciate that the specific experiments detailed are only illustrative of the invention as described more fully in the claims which follow thereafter. In the Examples that follow and in their associated figures, exemplary proteins of the invention are described by reference to unique protein ID numbers (i.e. protein ID 15-07) or HB number (i.e. HB1507). HB numbers correspond to the protein ID numbers used herein, except that they lack a hyphen (i.e. HB1507 corresponds to protein ID 15-07).

### EXAMPLES

### Example 1—Methods and Materials

### Recombinant Proteins

[2022] Recombinant proteins were expressed in Chinese hamster ovary (CHO) cells using a mammalian expression vector and purified by Protein A affinity chromatography and size-exclusion chromatography (SEC). Production was carried out by transient expression in CHO-K1 cells adapted to serum-free suspension culture (TunaCHO, LakePharma Inc., Belmont, CA). Suspension CHO cells were seeded in a shake flask and expanded using a serum-free and chemically defined medium. On the day of transfection, the expanded cells were seeded into a new vessel with fresh medium. Transient transfections were done with the addition of transfection reagents complexed with DNA under high density conditions. Transfections were carried out in cultures of 0.1 to 2.0 liters. After transfection, the cells were maintained as a batch-fed culture in a shake flask until the end of the production run. The conditioned cell culture fluid was harvested after 7 to 14 days, clarified by centrifugation, and sterile-filtered prior to purification.

[2023] Protein A affinity chromatography was carried out by applying the culture supernatant to a column packed with CaptivA® Protein A Affinity Resin (Repligen, Massachusetts, USA) pre-equilibrated with 137 mM NaCl 2.7 mM KCl 10 mM Na2HPO4 2 mM KH2PO4 pH 7.4 (PBS). The column was washed with PBS buffer until the OD280 value returned to baseline. The target protein was then eluted with 0.25% acetic acid buffer at pH 3.5. Fractions were collected, buffered with 1 M HEPES, and the 0D280 value of each fraction was recorded. Fractions containing the target protein were pooled, buffer exchanged into 100 mM HIEPES, 100 mM NaCl, 50 mM NaOAc, pH 6.0, and filtered through a 0.2 μm membrane filter and stored at 4° C. prior to use. The protein concentration was calculated from the 0D280 value and the calculated extinction coefficient.

[2024] Preparative SEC was carried out using an AKTA Avant 25 FPLC system (GE Healthcare, Uppsala, Sweden). Proteins were first concentrated to 10-15 mg/ml using an Amicon Ultra-15, 3MWCO, ultracentrifugal filter unit, catalog #UFC900324 (Millipore, Burlington, MA), then loaded onto a HiLoad 26/600 Superdex 200 prep grade column (GE Healthcare). Elution was carried out with Dulbecco's phosphate-buffered saline without calcium or magnesium salts (PBS) (UCSF Cell Culture Facility, San Francisco, CA) containing 10 mM EDTA. Fractions corresponding to the protein of interest were identified based upon analytical SEC and analysis by reducing and non-reducing SDS-PAGE, and pooled, concentrated by ultrafiltration, and stored at 4° C.

### Heterobifunctional Crosslinkers

TABLE 1
Heterobifunctional Crosslinkers

| Name | Formula | Mol Wt | Sequence | Manufacture | Item # |
|---|---|---|---|---|---|
| Az-thioester | C₃₂H₄₅O₁₀N₁₁S | 775.83 | Azidoacetyl-DKTHT-thiophenol | CPC Scientific Inc | 860245 |
| Az-P12- | C₅₉H₉₈O₂₃N₁₂S | 1375.54 | Azide-PEG₁₂-DHTHT-thiophenol | CPC Scientific Inc | 852119 |
| thioester | | | | | |
| Az-P24- | C₈₃H₁₄₆O₃₅N₁₂S | 1904.17 | Azide-PEG₂₄-DHTHT-thiophenol | CPC Scientific Inc | 834144 |
| thioester | | | | | |
| Az-P36- | C₁₀₇H₁₉₄O₄₇N₁₂S | 2432.79 | Azide-PEG₃₆-DHTHT-thiophenol | CPC Scientific Inc | 860249 |
| thioester | | | | | |
| Az-P48- | C₁₃₄H₂₄₇O₆₀N₁₃S | 3032.50 | Azidoacetyl-PEG₃₆PEG₁₂-DKTHT- | CPC Scientific Inc | 869441 |
| thioester | | | thiophenol | | |
| Tet-DBCO | C₃₄H₃₃N₇O₇S | 683.70 | Methyltetrazine-Sulfo-DBCO | Click Chemistry | 1022 |
| | | | | Tools | |
| TCO-P4- | C₄₁H₅₄N₄O₁₂S | 826.95 | Trans-Cyclooctene-Sulfo-PEG₄- | Click Chemistry | 1005 |
| DBCO | | | DBCO | Tools | |
| Tet-P4-Mal | C₂₄H₃₀N₆O₇ | 514.53 | Methyltetrazine-PEG₄-Maleimide | Click Chemistry | 1068 |
| | | | | Tools | |
| TCO-P3-Mal | C₂₆H₄₁N₃O₈ | 523.62 | Trans-Cyclooctene-PEG₃-Maleimide | Click Chemistry | 1002 |
| | | | | Tools | |
| TCO-P12-Mal | C₄₆H₈₀N₄O₁₈ | 977.14 | Trans-Cyclooctene-PEG₁₂- | AnaSpecInc | 659252 |
| | | | Maleimide | | |
| TCO-P24-Mal | C₇₀H₁₂₈N₄O₃₀ | 1505.77 | Trans-Cyclooctene-PEG₂₄- | AnaSpecInc | 659254 |
| | | | Maleimide | | |
| TCO-P36-Mal | C₉₄H₁₇₆N₄O₄₂ | 2034.40 | Trans-Cyclooctene-PEG₃₆- | AnaSpecInc | 659256 |
| | | | Maleimide | | |

### Electrospray Ionization Mass Spectrometry (ESI-MS)

[2025] Intact proteins were analyzed by ESI-MS using a Model 1260 HPLC system (Agilent Technologies, Santa Clara, CA) and MicroTOF-QII MS system (Bruker Corporation, Billerica, MA). A BioResolve RP mAb Polyphenyl column with a 2.7 micron particle size, 450 angstrom pore size, and dimensions of 2.1×100 mm (Waters Corporation, Milford, MA) was used at 50° C. with a flow rate of 0.3 ml/min, and injection volume of 2-5 uL. The mobile phase was a gradient of 0.1% formic acid in water (solvent A) and 0.1% formic acid in acetonitrile (solvent B) as follows: 0 min, 95%:5%; 2 min, 65%:35%; 10 min, 54%:46%; 11 min, 5%:95% held for 3 minutes. Data was collected in full scan MS mode with a mass range of 600-4000 Da. The collision RF setting was 800 Vpp. For deglycosylation analysis, samples were reduced and deglycosylated with Rapid PNGase F, P0710S (New England BioLabs Inc, Ipswich, MA) according to the manufacturer's instructions. Bruker DataAnalysis Version 4.0 SP4 software was used for mass spectral display and deconvolution.

### Analytical Size-Exclusion HPLC (SE-HPLC)

[2026] Analytical SE-HPLC was carried out using a Prominence HPLC system (Shimadzu Corporation, Kyoto, Japan). Zenix-C columns with a 3 micron particle size, 300 angstrom pore size, and dimensions of 4.6×300 mm (Sepax Technologies, Newark, Delaware) were used individually or as a pair of columns connected in series. Mobile phase, flow rate, column temperature, and detection wavelength used were 50 mM sodium phosphate pH 7.4 and 300 mM NaCl, 0.2 mL/min, 25° C., and 280/214 nm, respectively. LabSolutions v5.9 software (Shimadzu Corporation) was used for UV data acquisition and processing.

### Multi-Angle Light Scattering Analysis (MALS)

[2027] The molar mass of proteins was determined by combining SE-HPLC with measurement of refractive index (RI) and multi-angle light scattering (SEC-MALS) using an Optilab T-rEX RI detector and Treos MALS detector in-line (Wyatt Technology, Goleta, CA). The temperature of detectors was maintained at 25° C. The signal obtained for the monomeric form of bovine serum albumin (BSA) was used to normalize the detectors and to correct for band broadening between detectors. Astra v7.3 software (Wyatt Technology) was used for light scattering and refractive index data acquisition and processing. A value of 0.185 mL/g was used for the dn/dc ratio of proteins.

### Stoichiometric Binding Measurements by SE-HPLC

[2028] The relative binding affinities of two distinct proteins to a common ligand-binding partner was determined by stoichiometric binding analysis using SE-HPLC. Partially purified mixtures of the two proteins, or mixtures prepared by combining two purified proteins, were assessed for the relative binding affinity of their constituents in a binding reaction containing a molar ratio of 0.2 to 2.0 of the ligand-binding partner. Following incubation for two hours at 25° C., binding reaction were analyzed by SE-HPLC to determine the remaining unbound fraction of each of the two proteins.

### Kinetic Exclusion Assay (KinExA®)

[2029] Equilibrium binding affinity and kinetic binding measurements were made between unmodified molecules in solution using a KinExA 3200 instrument (Sapidyne Instruments, Boise, Idaho). For Kd analysis of ACE2 binding to SARS-CoV-2 S protein, PMMA beads were adsorption-coated with recombinant SARS-CoV-2 spike protein, Reference No. 46328 (LakePharma Inc, Belmont, CA); then used as the solid-phase to capture the ACE2 protein (the constant binding partner (CBP)). For each experiment, S protein was titrated in a background of the ACE2 protein and allowed to reach equilibrium. The binding reactions were then briefly exposed to the solid phase and a portion of free ACE2 protein was captured and then detected with a fluorescent secondary molecule. The short contact time with the solid phase is less than the time needed for dissociation of the pre-formed complex in solution, thus competition between the solution and the solid phase titrated binding partner is “kinetically excluded.” Since the solid phase is only used as a probe for the free CBP in each sample, the solution equilibrium is not altered during such KinExA measurements.

### Octet

### Kinetic Assay on Fc Gamma Receptors

[2030] The kinetic characterization of antibody binding on Fe gamma receptors were performed on a Octet Red384 (Satorius) using 384-well plates.

[2031] Various recombinant human Fc gamma receptors containing polyhistidine tag at C-terminus were purchased from R&D systems. The Fc gamma receptors with concentration of 5 g/ml were immobilized on Anti-Penta-His biosensors (Satorius) in PBS—B (PBS with 1 mg/mL BSA, pH 7.4) at 26° C. with the orbital shake speed of 1000 rpm. After washing with PBS—B, the Fc gamma receptors captured biosensors were submerged in different concentrations of testing antibodies for 15 seconds. The biosensors were then submerged in PBS—B for 60 seconds during dissociation. Biosensors were regenerated by stripping with glycine pH1.5 at the end of each cycle. Data analysis was conducted using a standard 1:1 binding model.

### Example 2—Tetrahedral Antibodies with the Structures Shown in FIG. 1 (Panel A), FIG. 2, FIG. 11 (Panels A-H), FIG. 12

[2032] Panel A of FIG. 1, FIG. 2, and panels A-H of FIG. 11 show the schematic structure of tetrahedral antibodies of this example.

[2033] FIG. 12 describes the preparation of tetrahedral antibody Rc6-P4-Rc6.

### Rc6-Rc6

[2034] A tetrahedral antibody with the structure shown in FIG. 1, Panel A was constructed with the following domains:
[2035] a) Domain 1: Fc
[2036] b) Domain 2: Fc
[2037] c) Domain 3: anti-CD20Fab
[2038] d) Domain 4: anti-CD20Fab

### Rc6-B19

[2039] A tetrahedral antibody with the structure shown in FIG. 1, Panel A was constructed with the following domains:
[2040] a) Domain 1: Fc
[2041] b) Domain 2: Fc
[2042] c) Domain 3: anti-CD20Fab
[2043] d) Domain 4: anti-CD19Fab

### Rc66SIDE-Rc66SIDE

[2044] A tetrahedral antibody with the structure shown in FIG. 1A was constructed with the following domains:
[2045] a) Domain 1: FcSIDE
[2046] b) Domain 2: FcSIDE
[2047] c) Domain 3: anti-CD20Fab
[2048] d) Domain 4: anti-CD20Fab

### HA9AAC9-HA9AAC9

[2049] A tetrahedral antibody with the structure shown in FIG. 1, Panel A was constructed with the following domains:
[2050] a) Domain 1: FcAAC9
[2051] b) Domain 2: FcAAC9
[2052] c) Domain 3: anti-CD16Fab
[2053] d) Domain 4: anti-CD26Fab

### 6Ec66-Soc66

[2054] A tetrahedral antibody with the structure shown in FIG. 1, Panel A was constructed with the following domains:
[2055] a) Domain 1: Fc
[2056] b) Domain 2: Fc
[2057] c) Domain 3: anti-betaAmyloidFab
[2058] d) Domain 4: anti-betaAmyloid Fab

### Ace2-Ace2

[2059] A tetrahedral antibody with the structure shown in FIG. 1, Panel A was constructed with the following domains:
[2060] a) Domain 1: Fc
[2061] b) Domain 2: Fc
[2062] c) Domain 3: Ace2-615
[2063] d) Domain 4: Ace2-615

TABLE 2
SEQ IDs of Proteins Used for the Preparation of Tetrahedral Antibodies

| Protein | Light chain 1 | Light Chain 2 | Heavy chain | Fc fusion chain | Fc chain |
|---|---|---|---|---|---|
| Rc6 | SEQ ID NO 1 | | SEQ ID NO 2 | | SEQ ID NO 3 |
| Rc6HYRF | SEQ ID NO 1 | | SEQ ID NO 4 | | SEQ ID NO 3 |
| Rc60 | SEQ ID NO 1 | | SEQ ID NO 5 | | SEQ ID NO 6 |
| Rc66 | SEQ ID NO 1 | | SEQ ID NO 7 | | SEQ ID NO 8 |
| Rc66SIDE | SEQ ID NO 1 | | SEQ ID NO 9 | | SEQ ID NO 10 |
| Rc66AAC9 | SEQ ID NO 1 | | SEQ ID NO 11 | | SEQ ID NO 12 |
| HA9c66AAC9 | SEQ ID NO 16 | | SEQ ID NO 17 | | SEQ ID NO 12 |
| HRc66 | SEQ ID NO 18 | | SEQ ID NO 19 | | SEQ ID NO 8 |
| B19c66 | SEQ ID NO 20 | | SEQ ID NO 21 | | SEQ ID NO 8 |
| B19c66AAC9 | SEQ ID NO 20 | | SEQ ID NO 22 | | SEQ ID NO 12 |
| Blc6AAC9 | | | | SEQ ID NO 23 | SEQ ID NO 12 |
| Drc66 | SEQ ID NO 24 | | SEQ ID NO 25 | | SEQ ID NO 8 |
| 6Ec66 | SEQ ID NO 32 | | SEQ ID NO 33 | | SEQ ID NO 8 |
| Soc66 | SEQ ID NO 35 | | SEQ ID NO 36 | | SEQ ID NO 8 |
| IL15c6AAC9 | | | | SEQ ID NO 26 | SEQ ID NO 12 |
| IL15c6AAC9N79Q | | | | SEQ ID NO 31 | SEQ ID NO 12 |
| IL15Rc6AAC9 | | | | SEQ ID NO 27 | SEQ ID NO 12 |
| ObSpc60PG | SEQ ID NO 43 | SEQ ID NO 44 | SEQ ID NO 45 | | SEQ ID NO 42 |
| Obc60PG | SEQ ID NO 46 | | SEQ ID NO 47 | | SEQ ID NO 42 |
| ObSP41BBLc60PG | SEQ ID NO 43 | SEQ ID NO 44 | SEQ ID NO 48 | | SEQ ID NO 42 |
| Ob41BBLc60PG | SEQ ID NO 46 | | SEQ ID NO 49 | | SEQ ID NO 42 |
| ObSpc60PG41BBL- | SEQ ID NO 43 | SEQ ID NO 44 | SEQ ID NO 45 | | SEQ ID NO 50 |
| RF | | | | | |
| Obc60PG41BBL- | SEQ ID NO 46 | | SEQ ID NO 47 | | SEQ ID NO 50 |
| RF | | | | | |
| GlC60PG | SEQ ID NO 38 | SEQ ID NO 39 | SEQ ID NO 40 | | SEQ ID NO 42 |
| Cic60PG | SEQ ID NO 51 | SEQ ID NO 52 | SEQ ID NO 53 | | SEQ ID NO 42 |
| ACE2RQ615c60PG | | | | SEQ ID NO 62 | SEQ ID NO 42 |
| ACE2RQ615c61PG | | | | SEQ ID NO 63 | SEQ ID NO 64 |
| ACE2RQ106c60PG | | | | SEQ ID NO 82 | SEQ ID NO 42 |
| ACE2RQ106x6c60PG | | | | SEQ ID NO 84 | SEQ ID NO 42 |
| CoV2spike680c60PG | | | | SEQ ID NO 86 | SEQ ID NO 42 |
| SARSspike666c60PG | | | | SEQ ID NO 88 | SEQ ID NO 42 |
| RaTG13spike680c60PG | | | | SEQ ID NO 89 | SEQ ID NO 42 |
| CD3Ec60PG | | | | SEQ ID NO 55 | SEQ ID NO 42 |
| 41BBc60PG | | | | SEQ ID NO 56 | SEQ ID NO 42 |
| CD19c60PG | | | | SEQ ID NO 58 | SEQ ID NO 42 |
| CEACAM5c60PG | | | | SEQ ID NO 60 | SEQ ID NO 42 |

TABLE 3
Properties of Proteins Used for the Preparation of Tetrahedral Antibodies

| | | D1 binding | | D3 binding |
|---|---|---|---|---|
| Protein | D1 domain type | specificity | D3 domain type | specificity |
| Rc6 | Fc homodimer | FcRn, FcRγ | Fab | CD20 |
| Rc6HYRF | Fc heterodimer | FcRn, FcRγ | Fab | CD20 |
| | (HYRF) | (SpA-low) | | |
| Rc60 | Fc heterodimer | FcRn, FcRγ | Fab | CD20 |
| | (KiH) | | | |
| Rc66 | Fc heterodimer | FcRn, FcRγ | Fab | CD20 |
| | (ZW1) | | | |
| Rc66SIDE | Fc heterodimer | FcRn, FcRγ-high | Fab | CD20 |
| | (ZW1) | | | |
| Rc66AAC9 | Fc heterodimer | FcRn, FcRγ-low | Fab | CD20 |
| | (ZW1) | | | |
| HA9c66AAC9 | Fc heterodimer | FcRn, FcRγ-low | Fab | CD16 |
| | (ZW1) | | | |
| HRc66 | Fc heterodimer | FcRn, FcRγ | Fab | CD20 |
| | (ZW1) | | | |
| B19c66 | Fc heterodimer | FcRn, FcRγ | Fab | CD19 |
| | (ZW1) | | | |
| B19c66AAC9 | Fc heterodimer | FcRn, FcRγ-low | Fab | CD19 |
| | (ZW1) | | | |
| B1c6AAC9 | Fc heterodimer | FcRn, FcRγ-low | ScFv-ScFv | CD19, CD3e |
| | (ZW1) | | | |
| Drc66 | Fc heterodimer | FcRn, FcRγ | Fab | DR5 |
| | (ZW1) | | | |
| 6Ec66 | Fc heterodimer | FcRn, FcRγ | Fab | amyloid beta (3-8) |
| | (ZW1) | | | |
| Soc66 | Fc heterodimer | FcRn, FcRγ | Fab | amyloid beta (17- |
| | (ZW1) | | | 24) |
| IL15c6AAC9 | Fc heterodimer | FcRn, FcRγ-low | IL-15 | IL-15R alpha |
| | (ZW1) | | | |
| IL15c6AAC9N79Q | Fc heterodimer | FcRn, FcRγ-low | IL-15 | IL-15R alpha |
| | (ZW1) | | | |
| IL15Rc6AAC9 | Fc heterodimer | FcRn, FcRγ-low | IL-15Ra | IL-15 |
| | (ZW1) | | | |
| ObSpc60PG | Fc heterodimer | FcRn, FcRγ-low | Fab-Fab | CD20, CD3e |
| | (KiH) | | | |
| Obc60PG | Fc heterodimer | FcRn, FcRγ-low | Fab | CD20 |
| | (KiH) | | | |
| ObSP41BBLc60PG | Fc heterodimer | FcRn, FcRγ-low, | Fab-Fab | CD20, CD3e |
| | (KiH) | 4-1BB | | |
| Ob41BBLc60PG | Fc heterodimer | FcRn, FcRγ-low, | Fab | CD20 |
| | (KiH) | 4-1BB | | |
| ObSpc60PG41BBL-RF | Fc heterodimer | FcRn, FcRγ-low, | Fab-Fab | CD20, CD3e |
| | (KiH) | 4-1BB | | |
| Obc60PG41BBL-RF | Fc heterodimer | FcRn, FcRγ-low, | Fab | CD20 |
| | (KiH) | 4-1BB | | |
| G1C60PG | Fc heterodimer | FcRn, FcRγ-low | Fab-CrossFab(VH- | CD20, CD3e |
| | (KiH) | | VL) | |
| Cic60PG | Fc heterodimer | FcRn, FcRγ-low | Fab-CrossFab(CHl- | CEACAM5, CD3e |
| | (KiH) | | CL) | |
| ACE2RQ615c60PG | Fc heterodimer | FcRn, FcRγ-low | ACE2 | SARS-CoV-2 Spike |
| | (KiH) | | | protein |
| ACE2RQ615c61PG | Fc heterodimer | FcRn, FcRγ-low | ACE2 | SARS-CoV-2 Spike |
| | (KiH) | | | protein |
| ACE2RQ106c60PG | Fc heterodimer | FcRn, FcRγ-low | ACE2 | SARS-CoV-2 Spike |
| | (KiH) | | | protein |
| ACE2RQ106x6c60PG | Fc heterodimer | FcRn, FcRγ-low | ACE2 | SARS-CoV-2 Spike |
| | (KiH) | | | protein |
| CoV2spike680c60PG | Fc heterodimer | FcRn, FcRγ-low | SARS-CoV-2 Spike | ACE2 |
| | (KiH) | | | |
| SARSspike666c60PG | Fc heterodimer | FcRn, FcRγ-low | SARS-CoV-1 Spike | ACE2 |
| | (KiH) | | | |
| RaTG13spike680c60PG | Fc heterodimer | FcRn, FcRγ-low | RaTG13 Spike | ACE2 |
| | (KiH) | | | |
| CD3Ec60PG | Fc heterodimer | FcRn, FcRγ-low | CD3e | anti-CD3e |
| | (KiH) | | | |
| 41BBc60PG | Fc heterodimer | FcRn, FcRγ-low | 4-1BB | anti-4-1BB, 4-1BBL |
| | (KiH) | | | |
| CD19c60PG | Fc heterodimer | FcRn, FcRγ-low | CD19 | anti-CD19 |
| | (KiH) | | | |
| CEACAM5c60PG | Fc heterodimer | FcRn, FcRγ-low | CEACAM5 | anti-CEACAM5 |
| | (KiH) | | | |

TABLE 4
Preparation of Tetrahedral Antibodies

| | | | Crosslinker | Crosslinker | Crosslinker | Crosslinker |
|---|---|---|---|---|---|---|
| Name | Protein 1 | Protein 2 | 1a | 1b | 2a | 2b |
| Rc6-P4-Rc6 | Rc6 | Rc6 | Az-Thioester | Tet-DBCO | TCO-P4- | Az-Thioester |
| | | | | | DBCO | |
| Rc66SIDE-P4- | Rc66SIDE | Rc66SIDE | Az-Thioester | Tet-DBCO | TCO-P4- | Az-Thioester |
| Rc66SIDE | | | | | DBCO | |
| Rc66SIDE-P16- | Rc66SIDE | Rc66SIDE | Az-Thioester | Tet-DBCO | TCO-P4- | Az-P12- |
| Rc66SIDE | | | | | DBCO | Thioester |
| Rc66SIDE-P28- | Rc66SIDE | Rc66SIDE | Az-P12- | Tet-DBCO | TCO-P4- | Az-P12- |
| Rc66SIDE | | | Thioester | | DBCO | Thioester |
| B19c66-P4-Rc6 | B19c66 | Rc6 | Az-Thioester | Tet-DBCO | TCO-P4- | Az-Thioester |
| | | | | | DBCO | |
| Soc66-P28-6Ec66 | Soc66 | 6Ec66 | Az-P12- | Tet-DBCO | TCO-P4- | Az-P12- |
| | | | Thioester | | DBCO | Thioester |
| HA9c66AAC9- | HA9c66AAC9 | HA9c66AAC9 | Az-Thioester | Tet-DBCO | TCO-P4- | Az-Thioester |
| P4-HA9c66AAC9 | | | | | DBCO | |
| HA9c66AAC9- | HA9c66AAC9 | IL15c6AAC9 | Az-Thioester | Tet-DBCO | TCO-P4- | Az-Thioester |
| P4-IL15c6AAC9 | | | | | DBCO | |
| Obc60PG-P4- | Obc60PG | Obc60PG | Az-Thioester | Tet-DBCO | TCO-P4- | Az-Thioester |
| Obc60PG | | | | | DBCO | |
| Obc60PG-P4- | Obc60PG | Ob41BBc60 | Az-Thioester | Tet-DBCO | TCO-P4- | Az-Thioester |
| Ob41BBc60PG | | PG | | | DBCO | |
| Obc60PG-P4- | Obc60PG | Obc60PG41 | Az-Thioester | Tet-DBCO | TCO-P4- | Az-Thioester |
| Obc60PG41BB | | BB | | | DBCO | |
| Ob41BBc60PG- | Ob41BBc60PG | Ob41BBc60PG | Az-Thioester | Tet-DBCO | TCO-P4- | Az-Thioester |
| P4-Ob41BBc60PG | | | | | DBCO | |
| Ob41BBc6OPG- | Ob41BBc60PG | Obc60PG41BB | Az-Thioester | Tet-DBCO | TCO-P4- | Az-Thioester |
| P4-Obc60PG41BB | | | | | DBCO | |
| Obc60PG41BB- | Obc60PG41BB | Obc60PG41BB | Az-Thioester | Tet-DBCO | TCO-P4- | Az-Thioester |
| P4-Obc60PG41BB | | | | | DBCO | |
| ObSpc60PG-P4- | ObSpc60PG | Obc60PG | Az-Thioester | Tet-DBCO | TCO-P4- | Az-Thioester |
| Obc60PG | | | | | DBCO | |
| ObSpc60PG-P4- | ObSpc60PG | Ob41BBc60PG | Az-Thioester | Tet-DBCO | TCO-P4- | Az-Thioester |
| Ob41BBc60PG | | | | | DBCO | |
| ObSpc60PG-P4- | ObSpc60PG | Obc60PG41BB | Az-Thioester | Tet-DBCO | TCO-P4- | Az-Thioester |
| Obc60PG41BB | | | | | DBCO | |
| ObSP41BBLc60PG- | ObSP41BBLc60PG | Ob41BBLc60PG | Az-Thioester | Tet-DBCO | TCO-P4- | Az-Thioester |
| P4-Ob41BBLc60PG | | | | | DBCO | |
| ObSP41BBLc60PG- | ObSP41BBLc60PG | Obc60PG41BBL | Az-Thioester | Tet-DBCO | TCO-P4- | Az-Thioester |
| P4-Obc60PG41BBL | | | | | DBCO | |
| ObSpc60PG41BBL- | ObSpc60PG41BBL | Obc60PG41BBL | Az-Thioester | Tet-DBCO | TCO-P4- | Az-Thioester |
| P4-Obc60PG41BBL | | | | | DBCO | |
| Glc60PG-P4- | GlC60PG | Obc60PG | Az-Thioester | Tet-DBCO | TCO-P4- | Az-Thioester |
| Obc60PG | | | | | DBCO | |
| Glc60PG-P4- | GlC60PG | Ob41BBc60PG | Az-Thioester | Tet-DBCO | TCO-P4- | Az-Thioester |
| Ob41BBc60PG | | | | | DBCO | |
| Glc60PG-P4- | GlC60PG | Obc60PG41BB | Az-Thioester | Tet-DBCO | TCO-P4- | Az-Thioester |
| Obc60PG41BB | | | | | DBCO | |
| IL15c6AAC9-P4- | IL15c6AAC9 | IL15Rc6AAC9 | Az-Thioester | Tet-DBCO | TCO-P4- | Az-Thioester |
| IL15Rc6AAC9 | | | | | DBCO | |
| IL15c6AAC9-P4- | IL15c6AAC9 | Rc66AAC9 | Az-Thioester | Tet-DBCO | TCO-P4- | Az-Thioester |
| Rc66AAC9 | | | | | DBCO | |
| IL15c6AAC9-P4- | IL15c6AAC9 | B19c66AAC9 | Az-Thioester | Tet-DBCO | TCO-P4- | Az-Thioester |
| B19c66AAC9 | | | | | DBCO | |
| IL15c6AAC9-P4- | IL15c6AAC9 | GlC60PG | Az-Thioester | Tet-DBCO | TCO-P4- | Az-Thioester |
| Glc60PG | | | | | DBCO | |
| IL15c6AAC9-P4- | IL15c6AAC9 | Cic60PG | Az-Thioester | Tet-DBCO | TCO-P4- | Az-Thioester |
| Cic60PG | | | | | DBCO | |
| IL15c6AAC9-P4- | IL15c6AAC9 | Obc60PG | Az-Thioester | Tet-DBCO | TCO-P4- | Az-Thioester |
| Obc60PG | | | | | DBCO | |
| IL15c6AAC9-P4- | IL15c6AAC9 | Ob41BBc60PG | Az-Thioester | Tet-DBCO | TCO-P4- | Az-Thioester |
| Ob41BBc60PG | | | | | DBCO | |
| IL15c6AAC9-P4- | IL15c6AAC9 | Obc60PG41BB | Az-Thioester | Tet-DBCO | TCO-P4- | Az-Thioester |
| Obc60PG41BB | | | | | DBCO | |
| IL15c6AAC9-P4- | IL15c6AAC9 | ObSpc60PG | Az-Thioester | Tet-DBCO | TCO-P4- | Az-Thioester |
| ObSpc60PG | | | | | DBCO | |
| IL15c6AAC9-P4- | IL15c6AAC9 | ObSP41BBLc60PG | Az-Thioester | Tet-DBCO | TCO-P4- | Az-Thioester |
| ObSP41BBLc60PG | | | | | DBCO | |
| IL15c6AAC9-P4- | IL15c6AAC9 | ObSpc60PG41BBL | Az-Thioester | Tet-DBCO | TCO-P4- | Az-Thioester |
| ObSpc60PG41BBL | | | | | DBCO | |
| ACE2RQ615c60P | ACE2RQ615c60PG | ACE2RQ615c60PG | Az-Thioester | Tet-DBCO | TCO-P4- | Az-Thioester |
| G-P4- | | | | | DBCO | |
| ACE2RQ615c60PG | | | | | | |
| ACE2RQ615c61P | ACE2RQ615c61PG | ACE2RQ615c61PG | Tet-P4-Mal | NA | Tco-P3-Mal | NA |
| G-P7- | | | | | | |
| ACE2RQ615c61PG | | | | | | |
| ACE2RQ106c60P | ACE2RQ106c60PG | ACE2RQ106c60PG | Az-Thioester | Tet-DBCO | TCO-P4- | Az-Thioester |
| G-P4- | | | | | DBCO | |
| ACE2RQ106c60PG | | | | | | |
| ACE2RQ106x6c6 | ACE2RQ106x6c60PG | ACE2RQ106x6c60PG | Az-Thioester | Tet-DBCO | TCO-P4- | Az-Thioester |
| OPG-P4- | | | | | DBCO | |
| ACE2RQ106c60PG | | | | | | |
| CoV2spike680c60 | CoV2spike680c60PG | CoV2spike680c60PG | Az-Thioester | Tet-DBCO | TCO-P4- | Az-Thioester |
| PG-P4- | | | | | DBCO | |
| CoV2spike680c60PG | | | | | | |
| SARSspike666c6 | SARSspike666c60PG | SARSspike666c60PG | Az-Thioester | Tet-DBCO | TCO-P4- | Az-Thioester |
| OPG-P4- | | | | | DBCO | |
| SARSspike666c6 | | | | | | |
| OPG | | | | | | |
| RaTG13spike680c | RaTG13spike680c60PG | RaTG13spike680c60PG | Az-Thioester | Tet-DBCO | TCO-P4- | Az-Thioester |
| 60PG-P4- | | | | | DBCO | |
| RaTG13spike680c | | | | | | |
| 60PG | | | | | | |

NA, not applicable (only two crosslinkers are required)

TABLE 5
Yields of Tetrahedral Antibodies

| Tetrahedral | | | Reactant 1 | Reactant 2 | Product | Unreacted | Yield |
|---|---|---|---|---|---|---|---|
| Antibody | Reactant 1 | Reactant 2 | (mg) | (mg) | (AUC) | (AUC) | % |
| Rc6-P4-Rc6 | Rc6-Tet | Rc6-P4-TCO | 3.03 | 3.10 | 885.87 | 626.26 | 58.6 |
| Rc66SIDE-P4- | Rc66SIDE- | Rc66SIDE-P4- | 2.15 | 2.50 | 785.13 | 674.60 | 59.9 |
| Rc66SIDE | Tet | TCO | | | | | |
| Rc66SIDE-P16- | Rc66SIDE- | Rc66SIDE- | 2.15 | 2.50 | 675.70 | 513.68 | 56.8 |
| Rc66SIDE | Tet | P16-TCO | | | | | |
| Rc66SIDE-P28- | Rc66SIDE- | Rc66SIDE- | 2.61 | 2.90 | 760.10 | 679.84 | 52.8 |
| Rc66SIDE | P12-Tet | P16-TCO | | | | | |
| B19c66-P4-Rc6 | B19c66-Tet | Rc6-P4-TCO | 4.02 | 2.87 | 913.82 | 1164.97 | 44.0 |
| Soc66-P28-6Ec66 | Soc66-P12- | 6Ec66-P16- | 4.96 | 3.55 | 756.17 | 2083.34 | 26.6 |
| | Tet | TCO | | | | | |
| HA9c66AAC9- | HA9c66AA | HA9c66AAC9- | 11.52 | 8.37 | 1134.69 | 2510.24 | 31.1 |
| P4-HA9c66AAC9 | C9-Tet | P4-TCO | | | | | |
| HA9c6AAC9-P4- | HA9c66AA | IL15c6AAC9- | 1.55 | 1.33 | 288.00 | 471.32 | 37.9 |
| IL15c6AAC9 | C9-Tet | P4-TCO | | | | | |

Yield (%) = (Product)/(Product + Unreacted)

TABLE 6
Intact Mass Measurements of Tetrahedral Antibodies bv ESI-MS

| | | Intact | | | | | |
|---|---|---|---|---|---|---|---|
| | | Mass | | | | | Fc fusion |
| Control | Tetrahedral | (non- | L1 chain | H1 chain | Fc chain | Fc-Px-Fc | chain |
| Antibody | Antibody | reducing) | (reducing) | (reducing) | (reducing) | (reducing) | (reducing) |
| Rituxan* | | 147,077.1 | 23,039.3 | 50,514.2 | | | |
| | | (147,077.0) | (23,057.7) | (50,530.8) | | | |
| Rc6* | | 99,815.6 | 23,039.4 | 50,513.9 | 26,281.9 | | |
| | | (99,814.4) | (23,057.7) | (50,530.8) | (26,281.9) | | |
| | Rc6-P4-Rc6* | 202,450.4 | 23,035.9 | 50,510.4 | | 55,374.3 | |
| | | (202,445.2) | (23.057.7) | (50,530.8) | | (55,380.2) | |

*The heavy and light chains undergo an N-terminal glutamine to pyroglutamate conversion (17 Da decrease)

TABLE 7
Predicted Binding Domains of Tetrahedral Antibodies

| | D1 binding | D2 binding | D3 binding | D4 binding |
|---|---|---|---|---|
| Tetrahedral Antibody | specificity | specificity | specificity | specificity |
| Rc6-P4-Rc6 | FcRn, FcRγ | FcRn, FcRγ | CD20 | CD20 |
| Rc66SIDE-P4-Rc66SIDE | FcRn, FcRγ-high | FcRn, FcRγ-high | CD20 | CD20 |
| Rc66SIDE-P16-Rc66SIDE | FcRn, FcRγ-high | FcRn, FcRγ-high | CD20 | CD20 |
| Rc66SIDE-P28-Rc66SIDE | FcRn, FcRγ-high | FcRn, FcRγ-high | CD20 | CD20 |
| B19c66-P4-Rc6 | FcRn, FcRγ | FcRn, FcRγ | CD19 | CD20 |
| Soc66-P28-S6Ec66 | FcRn, FcRγ | FcRn, FcRγ | amyloid beta | amyloid beta |
| | | | (17-24) | (3-8) |
| HA9c66AAC9-P4-HA9c66AAC9 | FcRn, FcRγ-low | FcRn, FcRγ-low | CD16 | CD16 |
| HA9c66 AAC9-P4-IL15c6 AAC9 | FcRn, FcRγ-low | FcRn, FcRγ-low | CD16 | IL-15R alpha |
| Obc60PG-P4-Obc60PG | FcRn, FcRγ-low | FcRn, FcRγ-low | CD20 | CD20 |
| Obc60PG-P4-Ob41BBc60PG | FcRn, FcRγ-low | FcRn, FcRγ-low, | CD20 | CD20 |
| | | 4-1BB | | |
| Obc60PG-P4-Obc60PG41BB | FcRn, FcRγ-low | FcRn, FcRγ-low, | CD20 | CD20 |
| | | 4-1BB | | |
| Ob41BBc60PG-P4- | FcRn, FcRγ-low, | FcRn, FcRγ-low, | CD20 | CD20 |
| Ob41BBc60PG | 4-1BB | 4-1BB | | |
| Ob41BBc60PG-P4- | FcRn, FcRγ-low, | FcRn, FcRγ-low, | CD20 | CD20 |
| Obc60PG41BB | 4-1BB | 4-1BB | | |
| Obc60PG41BB-P4- | FcRn, FcRγ-low, | FcRn, FcRγ-low, | CD20 | CD20 |
| Obc60PG41BB | 4-1BB | 4-1BB | | |
| ObSpc60PG-P4-Obc60PG | FcRn, FcRγ-low | FcRn, FcRγ-low | CD20, CD3 | CD20 |
| ObSpc60PG-P4-Ob41BBc60PG | FcRn, FcRγ-low | FcRn, FcRγ-low, | CD20, CD3 | CD20 |
| | | 4-1BB | | |
| ObSpc60PG-P4-Obc60PG41BB | FcRn, FcRγ-low | FcRn, FcRγ-low, | CD20, CD3 | CD20 |
| | | 4-1BB | | |
| ObSP41BBLc60PG-P4- | FcRn, FcRγ-low, | FcRn, FcRγ-low, | CD20, CD3 | CD20 |
| Ob41BBLc60PG | 4-1BB | 4-1BB | | |
| ObSP41BBLc60PG-P4- | FcRn, FcRγ-low, | FcRn, FcRγ-low, | CD20, CD3 | CD20 |
| Obc60PG41BBL | 4-1BB | 4-1BB | | |
| ObSpc60PG41BBL-P4- | FcRn, FcRγ-low, | FcRn, FcRγ-low, | CD20, CD3 | CD20 |
| Obc60PG41BBL | 4-1BB | 4-1BB | | |
| Glc60PG-P4-Obc60PG | FcRn, FcRγ-low | FcRn, FcRγ-low | CD20, CD3 | CD20 |
| Glc60PG-P4-Ob41BBc60PG | FcRn, FcRγ-low | FcRn, FcRγ-low, | CD20, CD3 | CD20 |
| | | 4-1BB | | |
| Glc60PG-P4-Obc60PG41BB | FcRn, FcRγ-low | FcRn, FcRγ-low, | CD20, CD3 | CD20 |
| | | 4-1BB | | |
| IL15c6AAC9-P4-IL15Rc6AAC9 | FcRn, FcRγ-low | FcRn, FcRγ-low | IL-15R alpha | IL-15 |
| IL15c6AAC9-P4-Rc66AAC9 | FcRn, FcRγ-low | FcRn, FcRγ-low | IL-15R alpha | CD20 |
| IL15c6AAC9-P4-B19c66AAC9 | FcRn, FcRγ-low | FcRn, FcRγ-low | IL-15R alpha | CD19 |
| IL15c6AAC9-P4-Obc60PG | FcRn, FcRγ-low | FcRn, FcRγ-low | IL-15R alpha | CD20 |
| IL15c6AAC9-P4-Ob41BBc60PG | FcRn, FcRγ-low | FcRn, FcRγ-low, | IL-15R alpha | CD20 |
| | | 4-1BB | | |
| IL15c6AAC9-P4-Obc60PG41BB | FcRn, FcRγ-low | FcRn, FcRγ-low, | IL-15R alpha | CD20 |
| | | 4-1BB | | |
| IL15c6AAC9-P4-ObSpc60PG | FcRn, FcRγ-low | FcRn, FcRγ-low | IL-15R alpha | CD20, CD3 |
| IL15c6AAC9-P4- | FcRn, FcRγ-low | FcRn, FcRγ-low, | IL-15R alpha | CD20, CD3 |
| ObSP41BBLc60PG | | 4-1BB | | |
| IL15c6AAC9-P4- | FcRn, FcRγ-low | FcRn, FcRγ-low, | IL-15R alpha | CD20, CD3 |
| ObSpc60PG41BBL | | 4-1BB | | |
| IL15c6AAC9-P4-Glc60PG | FcRn, FcRγ-low | FcRn, FcRγ-low | IL-15R alpha | CD20, CD3 |
| IL15c6 AAC9-P4-Cic60PG | FcRn, FcRγ-low | FcRn, FcRγ-low | IL-15R alpha | CEACAM5, |
| | | | | CD3 |
| ACE2RQ615c60PG-P4- | FcRn, FcRγ-low | FcRn, FcRγ-low | SARS-CoV-2 S | SARS-CoV-2 S |
| ACE2RQ615c60PG | | | protein | protein |
| ACE2RQ615c61PG-P7- | FcRn, FcRγ-low | FcRn, FcRγ-low | SARS-CoV-2 S | SARS-CoV-2 S |
| ACE2RQ615c61PG | | | protein | protein |
| ACE2RQ106c60PG-P4- | FcRn, FcRγ-low | FcRn, FcRγ-low | SARS-CoV-2 S | SARS-CoV-2 S |
| ACE2RQ106c60PG | | | protein | protein |
| ACE2RQ106x6c60PG-P4- | FcRn, FcRγ-low | FcRn, FcRγ-low | SARS-CoV-2 S | SARS-CoV-2 S |
| ACE2RQ106c60PG | | | protein | protein |
| CoV2spike680c60PG-P4- | FcRn, FcRγ-low | FcRn, FcRγ-low | ACE2 | ACE2 |
| CoV2spike680c60PG | | | | |
| SARSspike666c60PG-P4- | FcRn, FcRγ-low | FcRn, FcRγ-low | ACE2 | ACE2 |
| SARSspike666c60PG | | | | |
| RaTG13 spike680c60PG-P4- | FcRn, FcRγ-low | FcRn, FcRγ-low | ACE2 | ACE2 |
| RaTG13spike680c60PG | | | | |

TABLE 8
Observed IgG-FcRγ Binding of Tetrahedral Antibodies

| | | CD16a | CD16a | | CD32a | CD32a | | |
|---|---|---|---|---|---|---|---|---|
| Tetrahedral | Control | 158F | 158V | CD16b | 131H | 131R | CD32b/c | CD64 |
| Antibody | Antibody | FcRγIIIa | FcRγIIIa | FcRγIIIb | FcRγIIa | FcRγIIa | FcRγIIb | FcRγI |
| | Rituxan | 1.10E−06 | 7.15E−07 | 1.53E−06 | 8.92E−07 | 1.25E−06 | 1.52E−06 | 5.28E−08 |
| | (antibody) | (1.0) | (1.0) | (1.0) | (1.0) | (1.0) | (1.0) | (1.0) |
| | Rituximab- | 1.18E−07 | 6.08E−08 | 1.94E−07 | 4.45E−07 | 3.88E−07 | 4.52E−07 | 9.41E−09 |
| | SIDE | (9.3) | (11.8) | (7.9) | (2.0) | (3.2) | (3.3) | (5.6) |
| | (antibody) | | | | | | | |
| | Rc66SIDE | 7.68E−08 | 4.62E−08 | 1.63E−07 | 2.55E−07 | 2.02E−07 | 2.53E−07 | 1.20E−08 |
| | (One-arm | (14.3) | (15.5) | (9.4) | (3.5) | (6.2) | (6.0) | (4.4) |
| | antibody) | | | | | | | |
| Rc66SIDE- | | 3.87E−09 | 1.14E−09 | 1.05E−09 | 2.54E−09 | 4.93E−09 | 3.17E−09 | <1.0E−12 |
| P4- | | (283.8) | (628.9) | (1456.1) | (351.3) | (252.9) | (478.5) | (>10,000) |
| Rc66SIDE | | | | | | | | |
| Rc66SIDE- | | 2.71E−09 | 2.57E−10 | <1.0E−12 | 8.08E−10 | 1.83E−09 | 5.56E−10 | <1.0E−12 |
| P16- | | (405.6) | (2785.7) | (>10,000) | (1103.3) | (682.0) | (2727.3) | (>10,000) |
| Rc66SIDE | | | | | | | | |
| Rc66SIDE- | | 6.62E−09 | 4.98E−09 | 5.64E−09 | 5.42E−09 | 8.11E−09 | 7.28E−09 | 1.14E−09 |
| P28- | | (166.0) | (143.7) | (270.7) | (164.4) | (153.7) | (208.1) | (46.3) |
| Rc66SIDE | | | | | | | | |

TABLE 9
Observed Binding by Tetrahedral Antibodies to CD20, CD10 and CD16a

| | | CD20 | CD20 | | CD16a |
|---|---|---|---|---|---|
| Tetrahedral | | Lipoparticles | Lipoparticles | | 158V |
| Antibody | Control Antibody | Expt #1 | Expt #2 | CD19 | FcRγIIIa |
| | Rituxan | <1.0E−12 | <1.0E−12 | No binding | 2.62E−07 |
| | (antibody) | | | | |
| | Rc6 | 5.23E−08 | 1.71E−08 | No binding | 3.03E−07 |
| | (one-arm antibody) | | | | |
| | Rc66-SIDE | 2.14E−08 | ND | ND | ND |
| | (one-arm antibody) | | | | |
| Rc6-P4-Rc6 | | <1.0E−12 | ND | ND | ND |
| Rc66SIDE-P4- | | <1.0E−12 | ND | ND | ND |
| Rc66SIDE | | | | | |
| Rc66SIDE-P16- | | <1.0E−12 | ND | ND | ND |
| Rc66SIDE | | | | | |
| Rc66SIDE-P28- | | <1.0E−12 | ND | ND | ND |
| Rc66SIDE | | | | | |
| | B19c66 | No binding | No binding | 2.18E−08 | 2.34E−07 |
| | (one-arm antibody) | | | | |
| | B19c66AAC9 | ND | ND | 2.10E−08 | No binding |
| | (one-arm antibody | | | | |
| B19c66-P4-Rc6 | | ND | 3.99E−08 | 1.81E−08 | 2.45E−08 |

ND, not done

### Example 3—Tetrahedral Antibodies with the Structures Shown in Panel B of FIG. 1, FIG. 3, and FIG. 13

[2064] Panel B of FIG. 1 and FIG. 3 show the schematic structure of tetrahedral antibodies of this example.

[2065] FIG. 13 describes the preparation of tetrahedral antibodies with non-covalent linkages as shown in Panel B of FIG. 1.

### Example 4—Tetrahedral Antibodies with the Structures Shown in Panel C of FIG. 1, FIG. 4, and FIG. 14-18

[2066] Panel C of Figure C and FIG. 4 show the schematic structure of tetrahedral antibodies of this example.

[2067] FIG. 14 describes the preparation of tetrahedral antibody ACE2RQ740c60PG-ACE2RQ740c60PG.

[2068] FIG. 15 shows analysis of tetrahedral antibody ACE2RQ740c60PG-ACE2RQ740c60PG by SE-HPLC.

[2069] FIG. 16 shows analysis of tetrahedral antibodies by SE-HPLC with different peptide linkers (L-1) ACE2RQ740c60PGRF-ACE2RQ740c60PGRF, (L-185) ACE2RQ740c60PGRF185-ACE2RQ740c60PGRF185, (L-198) ACE2RQ740c60PGRF198-ACE2RQ740c60PGRF198, (L-208) ACE2RQ740c60PGRF208-ACE2RQ740c60PGRF208, (L-212) ACE2RQ740c60PGRF235-ACE2RQ740c60PGRF235, (L-235) ACE2RQ740c60PGRF235-ACE2RQ740c60PGRF235, (L-240) ACE2RQ74c60PGRF240-ACE2RQ742c6PGRF240.

[2070] FIG. 17 shows analysis of tetrahedral antibody ACE2RQ740c60PG-ACE2RQ740c60PG by SE-HPLC/MALS.

[2071] FIG. 18 describes the stoichiometric binding analysis of a mixture of tetrahedral antibody ACE2RQ740c60PG-ACE2RQ740c60PG and ACE monomer ACE2RQ615c60PG.

TABLE 10
SEQ IDs of Proteins Used for the Preparation of Tetrahedral Antibodies

| | Fc fusion | Linker | | |
|---|---|---|---|---|
| Protein name | chain | length | Linker Sequence | Fc chain |
| ACE2RQ740c60PG | SEQ ID NO 65 | 5 | EPKSS (Residues 724-728 | SEQ ID NO 42 |
| | | | of SEQ ID NO 65) | |
| ACE2RQ740c60PGRF- | SEQ ID NO 66 | 62 | TSTSPTRSMAPGAVHLP | SEQ ID NO 73 |
| 240 | | | QPVSTRSQHTQPTPEPST | |
| | | | APSTSFLLPMGPSPPAEG | |
| | | | STGDEPKSS (Residues | |
| | | | 724-785 of SEQ ID NO 66) | |
| ACE2RQ740c60PGRF- | SEQ ID NO 67 | 57 | TSTSPTRSMAPGAVHLP | SEQ ID NO 73 |
| 235 | | | QPVSTRSQHTQPTPEPST | |
| | | | APSTSFLLPMGPSPPAEG | |
| | | | STGD (Residues 724-780 of | |
| | | | SEQ ID NO 67) | |
| ACE2RQ740c60PGRF- | SEQ ID NO 68 | 34 | TSTSPTRSMAPGAVHLP | SEQ ID NO 73 |
| 212 | | | QPVSTRSQHTQPTPEPS | |
| | | | (Residues 724-757 of SEQ | |
| | | | ID NO 68) | |
| ACE2RQ740c60PGRF- | SEQ ID NO 69 | 30 | TSTSPTRSMAPGAVHLP | SEQ ID NO 73 |
| 208 | | | QPVSTRSQHTQPT | |
| | | | (Residues 724-753 of SEQ | |
| | | | ID NO 69) | |
| ACE2RQ740c60PGRF- | SEQ ID NO 70 | 20 | TSTSPTRSMAPGAVHLP | SEQ ID NO 73 |
| 198 | | | QPV (Residues 724-743 of | |
| | | | SEQ ID NO 70) | |
| ACE2RQ740c60PGRF- | SEQ ID NO 71 | 7 | TSTSPTR (Residues 724- | SEQ ID NO 73 |
| 185 | | | 730 of SEQ ID NO 71) | |
| ACE2RQ740c60PGRF | SEQ ID NO 72 | 5 | EPKSS (Residues 724-728 | SEQ ID NO 73 |
| | | | of SEQ ID NO 72) | |

TABLE 11
Tetrahedral Antibody formation by dimerization of the ACE2RQ740c60 protein

| | ACE2 | | | | | |
|---|---|---|---|---|---|---|
| | Tetrahedral | | ACE2 | | | |
| | Antibody | ACE2 | Monomer | | HMW | |
| | retention | Tetrahedral | retention | ACE2 | retention | |
| | time | Antibody | time | Monomer | time | HMW |
| Protein | (minutes) | (%) | (minutes) | (%) | (minutes) | (%) |
| ACE2RQ615c60PG | ND | ND | 27.169 | 54.2 | 22.004-23.975 | 45.8 |
| ACE2RQ740c60PG | 23.912 | 76.1 | ND | ND | 21.642 | 23.9 |

ND; not detected;
HMW, high molecular weight

TABLE 12
Molar Mass of the SEC-purified ACE2RQ740c60 Tetrahedral Antibody by SE−
HPLC/MALS

| | | Tetrahedral | | |
|---|---|---|---|---|
| | | Antibody | ACE2 Monomer | |
| ACE2 Tetrahedral | | retention time | retention time | Molar Mass |
| Antibody | ACE2 Monomer | (minutes) | (minutes) | (kDa) |
| ACE2RQ740c60PG- | | 24.206 | ND | 297.4 (±1.9%) |
| ACE2RQ740c60PG | | | | |
| | ACE2RQ615c60PG | ND | 27.567 | 143.4 (±1.7%) |

ND; not detected;
HMW, high molecular weight

TABLE 13
Tetrahedral Antibody Formation by Non-covalent Linkage of ACE2RQ740c60
Protein with Different Peptide Linkers

| | | | Dimer | | | |
|---|---|---|---|---|---|---|
| | | | retention | | | |
| Tetrahedral | Linker | | time | Dimer | Monomer | HMW |
| Antibody | length | Linker sequence | (minutes) | (%) | (%) | (%) |
| ACE2RQ740c60PGRF240- | 62 | TSTSPTRSMAPGAVHLP | 22.566 | 87.7 | ND | 11.0 |
| ACE2RQ740c60PGRF240 | | QPVSTRSQHTQPTPEPS | | | | |
| | | TAPSTSFLLPMGPSPPA | | | | |
| | | EGSTGDEPKSS | | | | |
| | | (Residues 724-785 of | | | | |
| | | SEQ ID NO 66) | | | | |
| ACE2RQ740c60PGRF235- | 57 | TSTSPTRSMAPGAVHLP | 22.634 | 94.7 | ND | 4.0 |
| ACE2RQ740c60PGRF235 | | QPVSTRSQHTQPTPEPS | | | | |
| | | TAPSTSFLLPMGPSPPA | | | | |
| | | EGSTGD (Residues 724- | | | | |
| | | 780 of SEQ ID NO 67) | | | | |
| ACE2RQ740c60PGRF212- | 34 | TSTSPTRSMAPGAVHLP | 23.138 | 93.4 | ND | 5.4 |
| ACE2RQ740c60PGRF212 | | QPVSTRSQHTQPTPEPS | | | | |
| | | (Residues 724-757 of | | | | |
| | | SEQ ID NO 68) | | | | |
| ACE2RQ740c60PGRF208- | 30 | TSTSPTRSMAPGAVHLP | 23.227 | 96.3 | ND | 2.4 |
| ACE2RQ740c60PGRF208 | | QPVSTRSQHTQPT | | | | |
| | | (Residues 724-753 of | | | | |
| | | SEQ ID NO 69) | | | | |
| ACE2RQ740c60PGRF198- | 20 | TSTSPTRSMAPGAVHLP | 23.544 | 64.8 | ND | 32.8 |
| ACE2RQ740c60PGRF198 | | QPV (Residues 724-743 | | | | |
| | | of SEQ ID NO 70) | | | | |
| ACE2RQ740c60PGRF185- | 7 | TSTSPTR (Residues 724- | 23.817 | 87.6 | ND | 11.0 |
| ACE2RQ740c60PGRF185 | | 730 of SEQ ID NO 71) | | | | |
| ACE2RQ740c60PGRF- | 5 | EPKSS (Residues 724- | 23.995 | 88.0 | ND | 11.1 |
| ACE2RQ740c60PGRF | | 728 of SEQ ID NO 72) | | | | |

ND, not detected; HMW, high molecular weight

TABLE 14
Predicted Binding Domains of ACE2 Tetrahedral Antibodies

| | D1 binding | D2 binding | D3 binding | D4 binding |
|---|---|---|---|---|
| Tetrahedral Antibody | specificity | specificity | specificity | specificity |
| ACE2RQ740c60PG- | FcRn, FcRγ-low | FcRn, FcRγ-low | SARS-CoV-2 | SARS-CoV-2 |
| ACE2RQ740c60PG | | | Spike protein | Spike protein |
| ACE2RQ740c60PGRF240- | FeRn, FcRγ-low | FcRn, FcRγ-low | SARS-CoV-2 | SARS-CoV-2 |
| ACE2RQ740c60PGRF240 | | | Spike protein | Spike protein |
| ACE2RQ740c60PGRF235- | FcRn, FcRγ-low | FcRn, FcRγ-low | SARS-CoV-2 | SARS-CoV-2 |
| ACE2RQ740c60PGRF235 | | | Spike protein | Spike protein |
| ACE2RQ740c60PGRF212- | FcRn, FcRγ-low | FcRn, FcRγ-low | SARS-CoV-2 | SARS-CoV-2 |
| ACE2RQ740c60PGRF212 | | | Spike protein | Spike protein |
| ACE2RQ740c60PGRF208- | FcRn, FcRγ-low | FcRn, FcRγ-low | SARS-CoV-2 | SARS-CoV-2 |
| ACE2RQ740c60PGRF208 | | | Spike protein | Spike protein |
| ACE2RQ740c60PGRF198- | FcRn, FcRγ-low | FcRn, FcRγ-low | SARS-CoV-2 | SARS-CoV-2 |
| ACE2RQ740c60PGRF198 | | | Spike protein | Spike protein |
| ACE2RQ740c60PGRF185- | FcRn, FcRγ-low | FcRn, FcRγ-low | SARS-CoV-2 | SARS-CoV-2 |
| ACE2RQ740c60PGRF185 | | | Spike protein | Spike protein |
| ACE2RQ740c60PGRF- | FcRn, FcRγ-low | FcRn, FcRγ-low | SARS-CoV-2 | SARS-CoV-2 |
| ACE2RQ740c60PGRF | | | Spike protein | Spike protein |

### Example 5—Tetrahedral Antibodies with the Structure Shown in Panel D of FIG. 1 and FIGS. 5-10, 19-28

[2072] Panel D of FIG. 1 and FIGS. 5-10 show the schematic structure of tetrahedral antibodies of this example.

[2073] FIG. 19 describes preparation of tetrahedral antibody ACE2740FcG9-ACE2740FcG9.

[2074] FIG. 20 shows analysis of tetrahedral antibody ACE2740FcG9-ACE2740FcG9 by SE-HPLC.

[2075] FIG. 21 shows analysis of tetrahedral antibody ACE2740FcG9-ACE2740FcG9 by SE-HPLC/MALS.

[2076] FIG. 22 shows analysis of tetrahedral antibody ACE2RQ740FcPG-ACE2RQ740FcPG by SE-HPLC/MALS.

[2077] FIG. 23 shows stoichiometric binding analysis of an impure preparation of tetrahedral antibody ACE2740FcG9-ACE2740FcG9 and ACE2 dimer ACE2740FcG9.

[2078] FIG. 24 shows stoichiometric binding analysis of a mixture of tetrahedral antibody ACE2740FcG9-ACE2740FcG9 and ACE2 dimer ACE2-740Fc-G9.

[2079] FIG. 25 shows stoichiometric binding analysis of a mixture of tetrahedral antibody ACE2RQ740FcPG-ACE2RQ74FcPG and ACE2 dimer ACE2-740Fc-G9.

[2080] FIG. 26 shows stoichiometric binding analysis of a mixture of tetrahedral antibody ACE2740FcG9-ACE2740FcG9 and ACE2 dimer ACE2-615Fc-G9.

[2081] FIG. 27 shows inhibition of SARS-CoV-2-VSV pseudotype virus infection by ACE2 tetrahedral antibodies ACE274FcG9-ACE2740FcG9 and ACE2RQ740FcPG-ACE2RQ740FcPG, and by ACE2 dimers ACE2-615Fc-G9 and ACE2RQ615FcPG.

[2082] FIG. 28 shows inhibition of SARS-CoV-2-VSV pseudotype virus infection by ACE2 tetrahedral antibodies ACE274 FcG9-ACE2740FcG9 and ACE2RQ74 FcPG-ACE2RQ740FcPG, and by ACE2 dimers ACE2-740Fc-G9 and ACE2RQ740FcPG.

TABLE 15
SEQ IDs of Proteins Used for the Preparation of Tetrahedral Antibodies

| | Fc fusion | Linker | |
|---|---|---|---|
| Protein name | chain | length | Linker Sequence |
| ACE2-615Fc-G9 | SEQ ID NO 74 | 9 | GGGGAGGGG (Residues 598-607 of SEQ ID NO: |
| | | | 74) |
| ACE2-740Fc-G9 | SEQ ID NO 75 | 9 | GGGGAGGGG (Residues 724-732 of SEQ ID NO: |
| | | | 75) |
| ACE2RQ615FcPG | SEQ ID NO 76 | 5 | EPKSS (Residues 598-603 of SEQ ID NO: 76) |
| ACE2RQ740FcPG | SEQ ID NO 77 | 5 | EPKSS (Residues 724-728 of SEQ ID NO: 77) |
| ACE2RQ740FcPG-G9 | SEQ ID NO 78 | 9 | GGGGAGGGG (Residues 724-732 of SEQ ID NO: |
| | | | 78) |
| ACE2-740FcPG-G9 | SEQ ID NO 79 | 9 | GGGGAGGGG (Residues 724-732 of SEQ ID NO: |
| | | | 79) |
| ACE2RQ740Fc-G9 | SEQ ID NO 80 | 9 | GGGGAGGGG (Residues 724-732 of SEQ ID NO: |
| | | | 80) |
| ACE2-740Fc-G9 | SEQ ID NO 81 | 9 | GGGGAGGGG (Residues 724-732 of SEQ ID NO: |
| | | | 81) |
| ACE2RQ740FcPG-235 | SEQ ID NO 90 | 57 | TSTSPTRSMAPGAVHLPQPVSTRSQHTQPTPEPS |
| | | | TAPSTSFLLPMGPSPPAEGSTGD (Residues 724- |
| | | | 780 of SEQ ID NO: 90) |
| ACE2RQ740FcPG-212 | SEQ ID NO 91 | 34 | TSTSPTRSMAPGAVHLPQPVSTRSQHTQPTPEPS |
| | | | (Residues 724-757 of SEQ ID NO: 91) |
| ACE2RQ740FcPG-208 | SEQ ID NO 92 | 30 | TSTSPTRSMAPGAVHLPQPVSTRSQHTQPT |
| | | | (Residues 724-753 of SEQ ID NO: 92) |
| ACE2RQ740FcPG-202 | SEQ ID NO 93 | 24 | TSTSPTRSMAPGAVHLPQPVSTRS (Residues 724- |
| | | | 747 of SEQ ID NO: 93) |
| ACE2RQ740FcPG-201 | SEQ ID NO 94 | 23 | TSTSPTRSMAPGAVHLPQPVSTR (Residues 724- |
| | | | 746 of SEQ ID NO: 94) |
| ACE2RQ740FcPG-200 | SEQ ID NO 95 | 22 | TSTSPTRSMAPGAVHLPQPVST (Residues 724- |
| | | | 745 of SEQ ID NO: 95) |
| ACE2RQ740FcPG-199 | SEQ ID NO 96 | 21 | TSTSPTRSMAPGAVHLPQPVS (Residues 724-744 |
| | | | of SEQ ID NO: 96) |
| ACE2RQ740FcPG-198 | SEQ ID NO 97 | 20 | TSTSPTRSMAPGAVHLPQPV (Residues 724-743 of |
| | | | SEQ ID NO: 97) |
| ACE2RQ740FcPG-197 | SEQ ID NO 98 | 19 | TSTSPTRSMAPGAVHLPQP (Residues 724-742 of |
| | | | SEQ ID NO: 98) |
| ACE2RQ740FcPG-196 | SEQ ID NO 99 | 18 | TSTSPTRSMAPGAVHLPQ (Residues 724-741 of |
| | | | SEQ ID NO: 99) |
| ACE2RQ740FcPG-195 | SEQ ID NO 100 | 17 | TSTSPTRSMAPGAVHLP (Residues 724-740 of |
| | | | SEQ ID NO: 100) |
| ACE2RQ740FcPG-194 | SEQ ID NO 101 | 16 | TSTSPTRSMAPGAVHL (Residues 724-739 of SEQ |
| | | | ID NO: 101) |
| ACE2RQ740FcPG-193 | SEQ ID NO 102 | 15 | TSTSPTRSMAPGAVH (Residues 724-738 of SEQ |
| | | | ID NO: 102) |
| ACE2RQ740FcPG-192 | SEQ ID NO 103 | 14 | TSTSPTRSMAPGAV (Residues 724-737 of SEQ ID |
| | | | NO: 103) |
| ACE2RQ740FcPG-191 | SEQ ID NO 104 | 13 | TSTSPTRSMAPGA (Residues 724-736 of SEQ ID |
| | | | NO: 104) |
| ACE2RQ740FcPG-190 | SEQ ID NO 105 | 12 | TSTSPTRSMAPG (Residues 724-735 of SEQ ID |
| | | | NO: 105) |
| ACE2RQ740FcPG-189 | SEQ ID NO 106 | 11 | TSTSPTRSMAP (Residues 724-734 of SEQ ID NO: |
| | | | 106) |
| ACE2RQ740FcPG-188 | SEQ ID NO 107 | 10 | TSTSPTRSMA (Residues 724-733 of SEQ ID NO: |
| | | | 107) |
| ACE2RQ740FcPG-187 | SEQ ID NO 108 | 9 | TSTSPTRSM (Residues 724-732 of SEQ ID NO: |
| | | | 108) |
| ACE2RQ740FcPG-186 | SEQ ID NO 109 | 8 | TSTSPTRS (Residues 724-731 of SEQ ID NO: 109) |
| ACE2RQ740FcPG-185 | SEQ ID NO 110 | 7 | TSTSPTR (Residues 724-730 of SEQ ID NO: 110) |
| ACE2RQ740FcPG-184 | SEQ ID NO 111 | 6 | TSTSPT (Residues 724-729 of SEQ ID NO: 111) |
| ACE2RQ740FcPG-183 | SEQ ID NO 112 | 5 | TSTSP (Residues 724-728 of SEQ ID NO: 105) |
| ACE2RQ740FcPG-G14 | SEQ ID NO 113 | 14 | GGGGAGGGGAGGGG (Residues 724-737 of SEQ |
| | | | ID NO: 113) |
| ACE2RQ740FcPG-G12 | SEQ ID NO 114 | 12 | GGAGGGGAGGGG (Residues 724-735 of SEQ ID |
| | | | NO: 114) |
| ACE2RQ740FcPG-G10 | SEQ ID NO 115 | 10 | AGGGGAGGGG (Residues 724-733 of SEQ ID NO: |
| | | | 115) |
| ACE2RQ740FcPG-G8 | SEQ ID NO 116 | 8 | GGGAGGGG (Residues 724-731 of SEQ ID NO: |
| | | | 116) |
| ACE2RQ740FcPG-G7 | SEQ ID NO 117 | 7 | GGAGGGG (Residues 724-730 of SEQ ID NO: 117) |
| ACE2RQ740FcPG-G6 | SEQ ID NO 118 | 6 | GAGGGG (Residues 724-729 of SEQ ID NO: 118) |
| ACE2RQ740FcPG-G5 | SEQ ID NO 119 | 5 | AGGGG (Residues 724-728 of SEQ ID NO: 119) |

TABLE 16
Tetrahedral Antibody formation by dimerization of the
ACE2RQ740c60 and ACE2-740Fc-G9 proteins

| | ACE2 | | | | | |
|---|---|---|---|---|---|---|
| | Tetrahedral | | ACE2 | | High Mol | |
| | Antibody | ACE2 | Dimer | | Wt | High |
| | retention | Tetrahedral | retention | ACE2 | retention | Molecular |
| Protein | time | Antibody | time | Dimer | time | Weight |
| name | (minutes) | (%) | (minutes) | (%) | (minutes) | (%) |
| ACE2-615Fc-G9 | ND | ND | 25.255 | 90.1 | 21.956-22.857 | 8.6 |
| ACE2-740Fc-G9 | 22.674 | 26.7 | 24.960 | 63.8 | 21.679 | 8.9 |

TABLE 17
Molar Mass of SEC-purified ACE2 Tetrahedral Antibodies by
SE−HLPC/MALS

| ACE2 Tetrahedral | | Retention time | Molar Mass |
|---|---|---|---|
| Antibody | ACE2 DIMER | (minutes) | (kDa) |
| ACE2740FcG9- | | 22.621 | 510.1 (±2.3%) |
| ACE2740FcG9 | | | |
| | ACE2-740Fc-G9 | 24.919 | 256.6 (±2.9%) |
| ACE2RQ740FcPG- | | 22.454 | 493.8 (±2.0%) |
| ACE2RQ740FcPG | | | |
| | ACE2RQ740FcPG | 24.831 | 242.4 (±3.6%) |

TABLE 18
Binding domains of Tetrahedral Antibodies

| | D1/D2 binding | D3/D4 binding | D5/D6 binding |
|---|---|---|---|
| Tetrahedral Antibody | specificity | specificity | specificity |
| ACE2615FcG9- | NA | NA | NA |
| ACE2615FcG9 | | | |
| ACE2740FcG9- | FcRn, FcRγ-low | FcRn, FcRγ-low | SARS-CoV-2 Spike |
| ACE2740FcG9 | | | protein |
| ACE2RQ615FcPG- | NA | NA | NA |
| ACE2RQ615FcPG | | | |
| ACE2RQ740FcPG- | FcRn, FcRγ-low | SARS-CoV-2 Spike | SARS-CoV-2 Spike |
| ACE2RQ740FcPG | | protein | protein |
| ACE2RQ740FcPGG9- | FcRn, FcRγ-low | SARS-CoV-2 Spike | SARS-CoV-2 Spike |
| ACE2RQ740FcPGG9 | | protein | protein |
| ACE2740FcPGG9- | FcRn, FcRγ-low | SARS-CoV-2 Spike | SARS-CoV-2 Spike |
| ACE2740FcPGG9 | | protein | protein |
| ACE2RQ740FcG9- | FcRn, FcRγ-low | SARS-CoV-2 Spike | SARS-CoV-2 Spike |
| ACE2RQ740FcG9 | | protein | protein |
| ACE2740FcG9- | FcRn, FcRγ-low | SARS-CoV-2 Spike | SARS-CoV-2 Spike |
| ACE2740FcG9 | | protein | protein |
| ACE2RQ740FcPG235- | FcRn, FcRγ-low | SARS-CoV-2 Spike | SARS-CoV-2 Spike |
| ACE2RQ740FcPG235 | | protein | protein |
| ACE2RQ740FcPG212- | FcRn, FcRγ-low | SARS-CoV-2 Spike | SARS-CoV-2 Spike |
| ACE2RQ740FcPG212 | | protein | protein |
| ACE2RQ740FcPG208- | FcRn, FcRγ-low | SARS-CoV-2 Spike | SARS-CoV-2 Spike |
| ACE2RQ740FcPG208 | | protein | protein |
| ACE2RQ740FcPG202- | FcRn, FcRγ-low | SARS-CoV-2 Spike | SARS-CoV-2 Spike |
| ACE2RQ740FcPG202 | | protein | protein |
| ACE2RQ740FcPG201- | FcRn, FcRγ-low | SARS-CoV-2 Spike | SARS-CoV-2 Spike |
| ACE2RQ740FcPG201 | | protein | protein |
| ACE2RQ740FcPG200- | FcRn, FcRγ-low | SARS-CoV-2 Spike | SARS-CoV-2 Spike |
| ACE2RQ740FcPG200 | | protein | protein |
| ACE2RQ740FcPG199- | FcRn, FcRγ-low | SARS-CoV-2 Spike | SARS-CoV-2 Spike |
| ACE2RQ740FcPG199 | | protein | protein |
| ACE2RQ740FcPG198- | FcRn, FcRγ-low | SARS-CoV-2 Spike | SARS-CoV-2 Spike |
| ACE2RQ740FcPG198 | | protein | protein |
| ACE2RQ740FcPG197- | FcRn, FcRγ-low | SARS-CoV-2 Spike | SARS-CoV-2 Spike |
| ACE2RQ740FcPG197 | | protein | protein |
| ACE2RQ740FcPG196- | FcRn, FcRγ-low | SARS-CoV-2 Spike | SARS-CoV-2 Spike |
| ACE2RQ740FcPG196 | | protein | protein |
| ACE2RQ740FcPG195- | FcRn, FcRγ-low | SARS-CoV-2 Spike | SARS-CoV-2 Spike |
| ACE2RQ740FcPG195 | | protein | protein |
| ACE2RQ740FcPG194- | FcRn, FcRγ-low | SARS-CoV-2 Spike | SARS-CoV-2 Spike |
| ACE2RQ740FcPG194 | | protein | protein |
| ACE2RQ740FcPG193- | FcRn, FcRγ-low | SARS-CoV-2 Spike | SARS-CoV-2 Spike |
| ACE2RQ740FcPG193 | | protein | protein |
| ACE2RQ740FcPG192- | FcRn, FcRγ-low | SARS-CoV-2 Spike | SARS-CoV-2 Spike |
| ACE2RQ740FcPG192 | | protein | protein |
| ACE2RQ740FcPG191- | FcRn, FcRγ-low | SARS-CoV-2 Spike | SARS-CoV-2 Spike |
| ACE2RQ740FcPG191 | | protein | protein |
| ACE2RQ740FcPG190- | FcRn, FcRγ-low | SARS-CoV-2 Spike | SARS-CoV-2 Spike |
| ACE2RQ740FcPG190 | | protein | protein |
| ACE2RQ740FcPG189- | FcRn, FcRγ-low | SARS-CoV-2 Spike | SARS-CoV-2 Spike |
| ACE2RQ740FcPG189 | | protein | protein |
| ACE2RQ740FcPG188- | FcRn, FcRγ-low | SARS-CoV-2 Spike | SARS-CoV-2 Spike |
| ACE2RQ740FcPG188 | | protein | protein |
| ACE2RQ740FcPG187- | FcRn, FcRγ-low | SARS-CoV-2 Spike | SARS-CoV-2 Spike |
| ACE2RQ740FcPG187 | | protein | protein |
| ACE2RQ740FcPG186- | FcRn, FcRγ-low | SARS-CoV-2 Spike | SARS-CoV-2 Spike |
| ACE2RQ740FcPG186 | | protein | protein |
| ACE2RQ740FcPG185- | FcRn, FcRγ-low | SARS-CoV-2 Spike | SARS-CoV-2 Spike |
| ACE2RQ740FcPG185 | | protein | protein |
| ACE2RQ740FcPG184- | FcRn, FcRγ-low | SARS-CoV-2 Spike | SARS-CoV-2 Spike |
| ACE2RQ740FcPG184 | | protein | protein |
| ACE2RQ740FcPG183- | FcRn, FcRγ-low | SARS-CoV-2 Spike | SARS-CoV-2 Spike |
| ACE2RQ740FcPG183 | | protein | protein |
| ACE2RQ740FcPGG14- | FcRn, FcRγ-low | SARS-CoV-2 Spike | SARS-CoV-2 Spike |
| ACE2RQ740FcPGG14 | | protein | protein |
| ACE2RQ740FcPGG12- | FcRn, FcRγ-low | SARS-CoV-2 Spike | SARS-CoV-2 Spike |
| ACE2RQ740FcPGG12 | | protein | protein |
| ACE2RQ740FcPGG10- | FcRn, FcRγ-low | SARS-CoV-2 Spike | SARS-CoV-2 Spike |
| ACE2RQ740FcPGG10 | | protein | protein |
| ACE2RQ740FcPGG8- | FcRn, FcRγ-low | SARS-CoV-2 Spike | SARS-CoV-2 Spike |
| ACE2RQ740FcPGG8 | | protein | protein |
| ACE2RQ740FcPGG7- | FcRn, FcRγ-low | SARS-CoV-2 Spike | SARS-CoV-2 Spike |
| ACE2RQ740FcPGG7 | | protein | protein |
| ACE2RQ740FcPGG6- | FcRn, FcRγ-low | SARS-CoV-2 Spike | SARS-CoV-2 Spike |
| ACE2RQ740FcPGG6 | | protein | protein |
| ACE2RQ740FcPGG5- | FcRn, FcRγ-low | SARS-CoV-2 Spike | SARS-CoV-2 Spike |
| ACE2RQ740FcPGG5 | | protein | protein |

NA, not applicable (no appreciable formation)

TABLE 19
SARS-CoV-2-VSV Virus Inhibition by ACE2 Tetrahedral Antibodies

| | | SARS-CoV-2 | VSV-G |
|---|---|---|---|
| | | (VSV pseudotype) | (VSV contro)l |
| ACE2 Tetrahedral Antibody | ACE2 DIMER | NT₅₀ (ug/mL) | NT₅₀ (ug/mL) |
| ACE2740FcG9-ACE2740FcG9 | | 0.060 | >66.6 |
| | ACE2-740Fc-G9 | 3.12 | >66.6 |
| | ACE2-615Fc-G9 | 13.05 | >66.6 |
| ACE2RQ740FcPG- | | 0.11 | >66.6 |
| ACE2RQ740FcPG | | | |
| | ACE2RQ740FcPG | 3.10 | >66.6 |
| | ACE2RQ615FcPG | 17.56 | >66.6 |

### Example 6—Structural Studies of the Superdimeric ACE2 Tetrahedral Antibody

[2083] The experiment of FIG. 19 demonstrated the production of a tetrahedral antibody comprising four ACE 2 domains via the superdimerization of four identical ACE2-Fc fusion polypeptide chains, construct ACE2-740FcPG-G9 (SEQ ID NO:81). The superdimerization reaction required the presence of the collectrin-like domain acting as a dimerizing polypeptide (Panel B of FIG. 19); in its absence no tetrahedral antibody was detected (Panel A of FIG. 19). The yield of tetrahedral antibody in this experiment was 27%; in addition, a dimeric form of ACE2-740FcPG-G9 was produced at a level of 64% (FIG. 20, Table 16). SEC-MALS analysis indicated a molar mass of 510 kDa and 257 kDa for the superdimeric and dimeric forms in good agreement with their predicted molecular weights of 438 kDa and 219 kDa, respectively, especially in view of the extensive glycosylation of the ACE2 molecule (FIG. 21, Table 17).

[2084] The quaternary structure predicted for the superdimeric ACE2 tetrahedral antibody is shown in part C of FIG. 43. Confirmation of this structure was provided by fragmentation studies carried out with the IdeZ protease which cuts the IgG1 molecule just below the hinge region. Upon digestion with IdeZ (Genovis, Lund, Sweden), followed by reduction of the hinge disulfides with TCEP, both the superdimeric form (part C of FIG. 43) and dimeric form (Part B of FIG. 43) yielded ACE2 dimer as predicted, whereas the monomeric ACE2-Fc fusion protein shown in part A of FIG. 43 (SEQ ID NO:74) yielded only the expected ACE2 monomer.

[2085] The superdimer and dimer forms of the ACE2 tetrahedral antibody were readily separated by size exclusion chromatography (FIGS. 20, 21). Following purification, both forms were apparently stable and did not noticeably interconvert over a period of a month, suggesting that the relative formation of the two species had occurred prior to transit from the cell. To determine whether the linker connecting the dimerizing polypeptide to the Fc domain plays a role in the relative abundance of the superdimeric and dimeric forms obtained from the cell supernatant, a series of tetrahedral antibodies was prepared using a series of linkers of varying lengths (Table 15) and the relative yield of superdimer and dimer determined. As summarized in Table 20, the 201 linker consisting of 23 amino acid sequence derived from the stalk region of TNF receptor 1B gave rise to the highest ratio of the superdimeric and dimeric forms, 38%, as well as the lowest levels of high molecular weight (HMW) species, 5.1% (Table 20).

TABLE 20

| Protein | | | Linker | | | | % SD: |
|---|---|---|---|---|---|---|---|
| ID | Protein name | SEQ ID | length | HMW | SD | D | D |
| 6-01 | ACE2RQ740FcPG-235 | SEQ ID NO 90 | 57 | 6.2 | 25.4 | 68.0 | 27.2 |
| 6-02 | ACE2RQ740FcPG-212 | SEQ ID NO 91 | 34 | 5.1 | 29.6 | 65.1 | 31.2 |
| 6-03 | ACE2RQ740FcPG-208 | SEQ ID NO 92 | 30 | 3.8 | 33.8 | 62.1 | 35.3 |
| 6-04 | ACE2RQ740FcPG-202 | SEQ ID NO 93 | 24 | 5.3 | 35.8 | 58.7 | 37.8 |
| 6-05 | ACE2RQ740FcPG-201 | SEQ ID NO 94 | 23 | 5.1 | 36.2 | 58.7 | 38.1 |
| 6-06 | ACE2RQ740FcPG-200 | SEQ ID NO 95 | 22 | 7.8 | 34.5 | 57.4 | 37.6 |
| 6-07 | ACE2RQ740FcPG-199 | SEQ ID NO 96 | 21 | 6.2 | 35.2 | 58.4 | 37.6 |
| 6-08 | ACE2RQ740FcPG-198 | SEQ ID NO 97 | 20 | 8.0 | 34.1 | 57.6 | 37.2 |
| 6-09 | ACE2RQ740FcPG-197 | SEQ ID NO 98 | 19 | 8.0 | 33.9 | 57.7 | 37.0 |
| 6-10 | ACE2RQ740FcPG-196 | SEQ ID NO 99 | 18 | 9.5 | 33.4 | 56.9 | 37.0 |
| 6-11 | ACE2RQ740FcPG-195 | SEQ ID NO 100 | 17 | 8.6 | 32.8 | 58.4 | 36.0 |
| 6-12 | ACE2RQ740FcPG-194 | SEQ ID NO 101 | 16 | 6.3 | 34.3 | 59.2 | 36.7 |
| 6-13 | ACE2RQ740FcPG-193 | SEQ ID NO 102 | 15 | 7.9 | 32.1 | 59.7 | 35.0 |
| 6-14 | ACE2RQ740FcPG-192 | SEQ ID NO 103 | 14 | 8.2 | 31.8 | 59.7 | 34.7 |
| 6-15 | ACE2RQ740FcPG-191 | SEQ ID NO 104 | 13 | 7.1 | 33.3 | 59.5 | 35.9 |
| 6-16 | ACE2RQ740FcPG-190 | SEQ ID NO 105 | 12 | 7.5 | 30.4 | 61.8 | 33.0 |
| 6-17 | ACE2RQ740FcPG-189 | SEQ ID NO 106 | 11 | 8.1 | 30.2 | 61.6 | 32.9 |
| 6-18 | ACE2RQ740FcPG-188 | SEQ ID NO 107 | 10 | 7.5 | 30.9 | 61.5 | 33.4 |
| 6-19 | ACE2RQ740FcPG-187 | SEQ ID NO 108 | 9 | 9.3 | 28.8 | 61.7 | 31.9 |
| 6-20 | ACE2RQ740FcPG-186 | SEQ ID NO 109 | 8 | 6.6 | 30.2 | 63.0 | 32.4 |
| 6-21 | ACE2RQ740FcPG-185 | SEQ ID NO 110 | 7 | 6.7 | 27.7 | 65.4 | 29.7 |
| 6-22 | ACE2RQ740FcPG-184 | SEQ ID NO 111 | 6 | 7.4 | 28.2 | 64.1 | 30.6 |
| 6-23 | ACE2RQ740FcPG-183 | SEQ ID NO 112 | 5 | 8.2 | 26.3 | 65.5 | 28.7 |
| 6-24 | ACE2RQ740FcPG-G14 | SEQ ID NO 113 | 14 | 6.5 | 27.8 | 65.4 | 29.8 |
| 6-25 | ACE2RQ740FcPG-G12 | SEQ ID NO 114 | 12 | 15.0 | 29.8 | 54.7 | 35.3 |
| 6-26 | ACE2RQ740FcPG-G10 | SEQ ID NO 115 | 10 | 8.8 | 27.5 | 63.6 | 30.2 |
| | ACE2RQ740FcPG-G9 | SEQ ID NO 78 | 9 | 9.3 | 26.3 | 63.4 | 29.3 |
| | ACE2RQ740FcPG-G9 | SEQ ID NO 78 | 9 | 9.3 | 26.3 | 63.4 | 29.3 |
| | ACE2RQ740Fc-G9 | SEQ ID NO 80 | 9 | 7.8 | 27.0 | 64.1 | 29.6 |
| | ACE2-740FcPG-G9 | SEQ ID NO 79 | 9 | 10.8 | 25.6 | 62.2 | 29.2 |
| | ACE2-740Fc-G9 | SEQ ID NO 81 | 9 | 6.8 | 25.7 | 66.3 | 27.9 |
| 6-27 | ACE2RQ740FcPG-G8 | SEQ ID NO 116 | 8 | 11.3 | 28.8 | 59.7 | 32.6 |
| 6-28 | ACE2RQ740FcPG-G7 | SEQ ID NO 117 | 7 | 11.4 | 29.0 | 59.6 | 32.7 |
| 6-29 | ACE2RQ740FcPG-G6 | SEQ ID NO 118 | 6 | 6.7 | 26.8 | 65.8 | 28.9 |
| 6-30 | ACE2RQ740FcPG-G5 | SEQ ID NO 119 | 5 | 8.5 | 25.6 | 65.7 | 28.1 |

### Example 7—Functional Studies of the Superdimeric ACE2 Tetrahedral Antibody

[2086] The stoichiometric binding experiments of FIGS. 23-25 demonstrated that when SARS-CoV-2 spike protein is added to mixtures of the ACE2 superdimer and dimer, essentially all of the superdimer is consumed before the dimer begins to bind. This was observed whether the experiment was carried out with the superdimer/dimer mixture produced by cells (FIG. 23) or with a mixture that was prepared using purified and separated superdimer and dimer obtained by size exclusion chromatography (FIG. 24). Similar order-of-binding results were obtained whether the wild-type ACE2 protein or a catalytically inactive ACE2 mutant protein (R₂₇₃Q) was used in the experiment (compare FIGS. 24 and 25). These results suggested that the ACE2 superdimer binds with much higher affinity than the dimer. SARS-CoV-2 pseudovirus neutralization experiments (FIGS. 27, 28) consistently demonstrated that the ACE2 superdimer is approximately two orders of magnitude more potent than either the ACE2 dimer found in superdimer preparations (FIG. 43, panel b) or an ACE2-Fc dimer lacking the collectrin-like dimerizing polypeptide (FIG. 43, panel a).

[2087] To confirm the biological relevance of the stoichiometric binding and pseudovirus experiments, neutralization assays were carried out with live SARS-CoV-2 virus. These experiments confirmed that the ACE2 is approximately two orders of magnitude more potent in neutralizing virus than the ACE2 dimer, and approximately three orders of magnitude more potent than the ACE2-Fc dimer (FIG. 44). Similar results were obtained in neutralization assay carried out with the NL63 alpha coronavirus which also infects cells through the ACE2 receptor.

[2088] Method: Live SARS-Cov-2 neutralization assay. USA-WA1/2020 (NR-52281) and Germany/BavPat1/2020 (NR-52370) were obtained from BEI Resources, Manassas, VA and expanded using a single passage in Vero/TMPRSS2. Virus was end-point titrated in Vero/TMPRSS2 and 100 TCID₅₀ used per well. Virus was pre-incubated for 1 hour at 37° C. with serial dilutions of antibody and then plated in replicates of 8 on Vero/TMPRSS2 cells. After 7 days wells were scored for cytopathic effect.

TABLE 21

| | EC50 (nM) Live Virus Neutralization | | | |
|---|---|---|---|---|
| Protein ID | SARS-CoV-2 | Fold Increase | NL63 | Fold Increase |
| 6-05 Superdimer | 0.233 | 403.7 | 1.58 | 86.5 |
| 6-05 Dimer | 0.970 | 96.9 | 10.43 | 13.1 |
| 6-05 Impure | 14.87 | 6.3 | 29.94 | 4.6 |
| ACE2Fc615 | 93.95 | 1.0 | 136.50 | 1.0 |

### Example 8—Engineering ACE 2 Super-Heterodimeric Tetrahedral Antibodies

[2089] As linker optimization alone did not overcome the apparent structural constraints that limited the yield of superdimeric ACE2 tetrahedral antibody, a series of constructs was generated with the predicted structure shown in part E of FIG. 43 (Table 22). This structure, termed “super-heterodimer”, differs from the “super-homodimer shown in Part C of FIG. 43 by having one pair instead of two pair of dimerizing polypeptides. It was reasoned that the super-heterodimer would have the advantage of greater conformational flexibility by limiting superdimerization to one of the heavy chains. This prediction was borne out; by independently varying the linker length on the H1 and H2 chains, the ACE2 super-heterodimer was obtained in yields as high as 98.8% from culture supernatant (Table 23).

TABLE 22
SEQ IDs Used for the Preparation of Hetero-Superdimeric Tetrahedral Antibodies

| Protein | | Domain Type | | |
|---|---|---|---|---|
| ID | Protein name | D3/D4/D5/D6 | H1 Chain | H2 Chain |
| 5-01 | ACE2FcPGRF-740RQ186/615RQ201 | ACE2 R273Q | SEQ ID NO: 338 | SEQ ID NO: 342 |
| 5-02 | ACE2FcPGRF-740RQ186/615RQ202 | ACE2 R273Q | SEQ ID NO: 338 | SEQ ID NO: 343 |
| 5-03 | ACE2FcPGRF-740RQ186/615RQ208 | ACE2 R273Q | SEQ ID NO: 338 | SEQ ID NO: 344 |
| 5-04 | ACE2FcPGRF-740RQ186/615RQ212 | ACE2 R273Q | SEQ ID NO: 338 | SEQ ID NO: 345 |
| 5-05 | ACE2FcPGRF-740RQ186/615RQ213 | ACE2 R273Q | SEQ ID NO: 338 | SEQ ID NO: 346 |
| 5-06 | ACE2FcPGRF-740RQ186/615RQ216 | ACE2 R273Q | SEQ ID NO: 338 | SEQ ID NO: 347 |
| 5-07 | ACE2FcPGRF-740RQ186/615RQ217 | ACE2 R273Q | SEQ ID NO: 338 | SEQ ID NO: 348 |
| 5-08 | ACE2FcPGRF-740RQ186/615RQ218 | ACE2 R273Q | SEQ ID NO: 338 | SEQ ID NO: 349 |
| 5-09 | ACE2FcPGRF-740RQ186/615RQ224 | ACE2 R273Q | SEQ ID NO: 338 | SEQ ID NO: 350 |
| 5-10 | ACE2FcPGRF-740RQ186/615RQ235 | ACE2 R273Q | SEQ ID NO: 338 | SEQ ID NO: 351 |
| 5-11 | ACE2FcPGRF-740RQ194/615RQ201 | ACE2 R273Q | SEQ ID NO: 339 | SEQ ID NO: 342 |
| 5-12 | ACE2FcPGRF-740RQ194/615RQ202 | ACE2 R273Q | SEQ ID NO: 339 | SEQ ID NO: 343 |
| 5-13 | ACE2FcPGRF-740RQ194/615RQ208 | ACE2 R273Q | SEQ ID NO: 339 | SEQ ID NO: 344 |
| 5-14 | ACE2FcPGRF-740RQ194/615RQ212 | ACE2 R273Q | SEQ ID NO: 339 | SEQ ID NO: 345 |
| 5-15 | ACE2FcPGRF-740RQ194/615RQ213 | ACE2 R273Q | SEQ ID NO: 339 | SEQ ID NO: 346 |
| 5-16 | ACE2FcPGRF-740RQ194/615RQ216 | ACE2 R273Q | SEQ ID NO: 339 | SEQ ID NO: 347 |
| 5-17 | ACE2FcPGRF-740RQ194/615RQ217 | ACE2 R273Q | SEQ ID NO: 339 | SEQ ID NO: 348 |
| 5-18 | ACE2FcPGRF-740RQ194/615RQ218 | ACE2 R273Q | SEQ ID NO: 339 | SEQ ID NO: 349 |
| 5-19 | ACE2FcPGRF-740RQ194/615RQ224 | ACE2 R273Q | SEQ ID NO: 339 | SEQ ID NO: 350 |
| 5-20 | ACE2FcPGRF-740RQ194/615RQ235 | ACE2 R273Q | SEQ ID NO: 339 | SEQ ID NO: 351 |
| 5-21 | ACE2FcPGRF-740RQ201/615RQ201 | ACE2 R273Q | SEQ ID NO: 340 | SEQ ID NO: 342 |
| 5-22 | ACE2FcPGRF-740RQ201/615RQ202 | ACE2 R273Q | SEQ ID NO: 340 | SEQ ID NO: 343 |
| 5-23 | ACE2FcPGRF-740RQ201/615RQ208 | ACE2 R273Q | SEQ ID NO: 340 | SEQ ID NO: 344 |
| 5-24 | ACE2FcPGRF-740RQ201/615RQ212 | ACE2 R273Q | SEQ ID NO: 340 | SEQ ID NO: 345 |
| 5-25 | ACE2FcPGRF-740RQ201/615RQ213 | ACE2 R273Q | SEQ ID NO: 340 | SEQ ID NO: 346 |
| 5-26 | ACE2FcPGRF-740RQ201/615RQ216 | ACE2 R273Q | SEQ ID NO: 340 | SEQ ID NO: 347 |
| 5-27 | ACE2FcPGRF-740RQ201/615RQ217 | ACE2 R273Q | SEQ ID NO: 340 | SEQ ID NO: 348 |
| 5-28 | ACE2FcPGRF-740RQ201/615RQ218 | ACE2 R273Q | SEQ ID NO: 340 | SEQ ID NO: 349 |
| 5-29 | ACE2FcPGRF-740RQ201/615RQ224 | ACE2 R273Q | SEQ ID NO: 340 | SEQ ID NO: 350 |
| 5-30 | ACE2FcPGRF-740RQ201/615RQ235 | ACE2 R273Q | SEQ ID NO: 341 | SEQ ID NO: 351 |
| 5-31 | ACE2FcPGRF-740RQ208/615RQ201 | ACE2 R273Q | SEQ ID NO: 341 | SEQ ID NO: 342 |
| 5-32 | ACE2FcPGRF-740RQ208/615RQ202 | ACE2 R273Q | SEQ ID NO: 341 | SEQ ID NO: 343 |
| 5-33 | ACE2FcPGRF-740RQ208/615RQ208 | ACE2 R273Q | SEQ ID NO: 341 | SEQ ID NO: 344 |
| 5-34 | ACE2FcPGRF-740RQ208/615RQ212 | ACE2 R273Q | SEQ ID NO: 341 | SEQ ID NO: 345 |
| 5-35 | ACE2FcPGRF-740RQ208/615RQ213 | ACE2 R273Q | SEQ ID NO: 341 | SEQ ID NO: 346 |
| 5-36 | ACE2FcPGRF-740RQ208/615RQ216 | ACE2 R273Q | SEQ ID NO: 341 | SEQ ID NO: 347 |
| 5-37 | ACE2FcPGRF-740RQ208/615RQ217 | ACE2 R273Q | SEQ ID NO: 341 | SEQ ID NO: 348 |
| 5-38 | ACE2FcPGRF-740RQ208/615RQ218 | ACE2 R273Q | SEQ ID NO: 341 | SEQ ID NO: 349 |
| 5-39 | ACE2FcPGRF-740RQ208/615RQ224 | ACE2 R273Q | SEQ ID NO: 341 | SEQ ID NO: 350 |
| 5-40 | ACE2FcPGRF-740RQ208/615RQ235 | ACE2 R273Q | SEQ ID NO: 341 | SEQ ID NO: 351 |

TABLE 23

| | | | Dimerizing | | | |
|---|---|---|---|---|---|---|
| | H1 | H2 | Polypeptide | | Main | Retention |
| Protein | Chain | Chain | Pair | HMW | Peak | Time |
| ID | Linker | Linker | D3/D4 | (%) | (%) | (min) |
| 5-01 | 186 | 201 | Collectrin-like | 28.7 | 71.3 | 21.41 |
| 5-02 | 186 | 202 | Collectrin-like | 30.9 | 69.1 | 21.37 |
| 5-03 | 186 | 208 | Collectrin-like | 5.1 | 81.6 | 21.25 |
| 5-04 | 186 | 212 | Collectrin-like | 20.3 | 79.7 | 21.22 |
| 5-05 | 186 | 213 | Collectrin-like | 21.2 | 78.8 | 21.19 |
| 5-06 | 186 | 216 | Collectrin-like | 17.9 | 82.1 | 21.16 |
| 5-07 | 186 | 217 | Collectrin-like | 24.3 | 75.7 | 21.11 |
| 5-08 | 186 | 218 | Collectrin-like | 25.1 | 74.9 | 21.11 |
| 5-09 | 186 | 224 | Collectrin-like | 42.0 | 58.0 | 21.04 |
| 5-10 | 186 | 235 | Collectrin-like | 26.3 | 73.7 | 20.98 |
| 5-11 | 194 | 201 | Collectrin-like | 24.7 | 75.3 | 21.29 |
| 5-12 | 194 | 202 | Collectrin-like | 16.2 | 83.8 | 21.29 |
| 5-13 | 194 | 208 | Collectrin-like | 8.5 | 91.5 | 21.19 |
| 5-14 | 194 | 212 | Collectrin-like | 19.0 | 81.0 | 20.95 |
| 5-15 | 194 | 213 | Collectrin-like | 18.3 | 81.7 | 21.00 |
| 5-16 | 194 | 216 | Collectrin-like | 32.0 | 68.0 | 20.91 |
| 5-17 | 194 | 217 | Collectrin-like | 27.4 | 72.6 | 20.92 |
| 5-18 | 194 | 218 | Collectrin-like | 45.8 | 53.9 | 20.84 |
| 5-19 | 194 | 224 | Collectrin-like | 21.6 | 78.4 | 20.83 |
| 5-20 | 194 | 235 | Collectrin-like | 46.3 | 53.6 | 20.67 |
| 5-21 | 201 | 201 | Collectrin-like | 1.2 | 98.8 | 21.55 |
| 5-22 | 201 | 202 | Collectrin-like | 4.1 | 95.9 | 21.47 |
| 5-23 | 201 | 208 | Collectrin-like | 4.0 | 95.9 | 21.39 |
| 5-24 | 201 | 212 | Collectrin-like | 3.3 | 96.7 | 21.34 |
| 5-25 | 201 | 213 | Collectrin-like | 4.7 | 95.3 | 21.32 |
| 5-26 | 201 | 216 | Collectrin-like | 4.7 | 95.3 | 21.28 |
| 5-27 | 201 | 217 | Collectrin-like | 4.0 | 96.0 | 20.96 |
| 5-28 | 201 | 218 | Collectrin-like | 7.5 | 92.5 | 20.96 |
| 5-29 | 201 | 224 | Collectrin-like | 11.1 | 88.7 | 21.30 |
| 5-30 | 201 | 235 | Collectrin-like | 4.9 | 95.1 | 21.16 |
| 5-31 | 208 | 201 | Collectrin-like | 4.0 | 95.8 | 21.39 |
| 5-32 | 208 | 202 | Collectrin-like | 10.7 | 89.2 | 21.36 |
| 5-33 | 208 | 208 | Collectrin-like | 11.0 | 89.0 | 21.32 |
| 5-34 | 208 | 212 | Collectrin-like | 4.6 | 95.4 | 21.25 |
| 5-35 | 208 | 213 | Collectrin-like | 3.2 | 96.7 | 21.26 |
| 5-36 | 208 | 216 | Collectrin-like | 19.3 | 73.6 | 21.25 |
| 5-37 | 208 | 217 | Collectrin-like | 22.9 | 76.3 | 21.21 |
| 5-38 | 208 | 218 | Collectrin-like | 14.5 | 85.5 | 21.18 |
| 5-39 | 208 | 224 | Collectrin-like | 15.0 | 84.9 | 21.16 |
| 5-40 | 208 | 235 | Collectrin-like | 16.7 | 75.5 | 21.10 |

### Example 9—Viral Neutralizing Activity of ACE2 Super-Heterodimeric Tetrahedral Antibody

[2090] Live virus neutralization studies confirmed that the super-heterodimer retained the exquisite potency of the super-homodimer in neutralizing both the SARS-CoV-2 beta coronavirus and the NL63 alpha coronavirus. (Table 24).

TABLE 24

| | | No. of | | | | | |
|---|---|---|---|---|---|---|---|
| | | Dimerizing | | | | EC50 (nM) | |
| Protein | Tetrahedral | Polypeptide | H | H1 | H2 | SARS- | |
| ID | Antibody Type | Pairs | Chain | Chain | Chain | CoV-2 | NL63 |
| 6-05 | Super-homodimer | 2 | 201 | N/A | N/A | 0.4610 | 10.20 |
| 5-21 | Super-heterodimer | 1 | N/A | 201 | 201 | 0.9421 | 7.688 |
| 5-27 | Super-heterodimer | 1 | N/A | 201 | 217 | 0.9556 | 4.160 |
| 5-28 | Super-heterodimer | 1 | N/A | 201 | 218 | 1.276 | 10.05 |
| 5-34 | Super-heterodimer | 1 | N/A | 208 | 212 | 0.6933 | 3.687 |
| 5-37 | Super-heterodimer | 1 | N/A | 208 | 217 | 0.8348 | 5.400 |

### Example 10—ACE2 Mutants

[2091] In the course of these investigations, the R273Q mutation was evaluated as a means to render ACE2 enzymatically active to avoid possible complications associated with clinical use of the active enzyme in SARS Co—V-2 patients. It was discovered that R273Q had a severe effect on the plasma half-life of ACE2. Accordingly, five new mutations, R273A, R293G, R273C, H378A and E402A, were generated and evaluated in several ACE2 constructs (Tables 25A, 25B and 26A). The effect of the mutations on carboxypeptidase was consistent among different was consistent among the various constructs. It was determined that H378A was the best tolerated with respect to half-life and provided for the greatest reduction in enzyme activity.

[2092] The H378A mutation decreased the level of ACE2 carboxypeptidase activity by 99.95% with angiotensin-II, 99.93% with bradykinin and 99.85% with apelin-13 (in Table 26B).

[2093] Materials: Angiotensin II peptide (AS-20633), Des-Arg9-bradykinin peptide (AS-65642) (AnaSpec, Fremont, CA), Apelin-13 peptide (APEL-003) (CPC Scientific, San Jose, CA). Recombinant human ACE2 (79200) (BioLegend, San Diego, CA) was used as a positive control. Phenylalanine assay kits (ab83376) (Abcam, Cambridge, UK).

[2094] Methods: ACE2 carboxypeptidase activity was quantified using the presence of phenylalanine. The carboxypeptidase reaction was initiated when 0.025 μg (wild-type) or 15 μg (ACE2 mutant) of COVICEPT was added to 0.2 μM angiotensin II, bradykinin or apelin-13 in the presence of the reaction buffer (PBS with 10 μM ZnCl2) at 37° C. Twenty microliter aliquots were taken out from the reaction mixture every 2 minutes up to 20 minutes and heat inactivated at 80° C. for 5 minutes. The amount of phenylalanine in the heat inactivated aliquots was quantified using the phenylalanine assay kit.

TABLE 25A

| Protein | | | |
|---|---|---|---|
| ID | Protein Name | H1 Chain | H2 Chain |
| 10-01 | ACE2FcPGRF-740wt201/615wt201 | SEQ ID NO: 354 | SEQ ID NO: 366 |
| 10-02 | ACE2FcPGRF-740RA201/615RA201 | SEQ ID NO: 355 | SEQ ID NO: 367 |
| 10-03 | ACE2FcPGRF-740RG201/615RG201 | SEQ ID NO: 356 | SEQ ID NO: 368 |
| 10-04 | ACE2FcPGRF-740RV201/615RV201 | SEQ ID NO: 357 | SEQ ID NO: 369 |
| 10-05 | ACE2FcPGRF-740HA201/615HA201 | SEQ ID NO: 358 | SEQ ID NO: 370 |
| 10-06 | ACE2FcPGRF-740EA201/615EA201 | SEQ ID NO: 359 | SEQ ID NO: 371 |
| 10-07 | ACE2FcPGRF-740wt201/615wt208 | SEQ ID NO: 354 | SEQ ID NO: 372 |
| 10-08 | ACE2FcPGRF-740RA201/615RA208 | SEQ ID NO: 355 | SEQ ID NO: 373 |
| 10-09 | ACE2FcPGRF-740RG201/615RG208 | SEQ ID NO: 356 | SEQ ID NO: 374 |
| 10-10 | ACE2FcPGRF-740RV201/615RV208 | SEQ ID NO: 357 | SEQ ID NO: 375 |
| 10-11 | ACE2FcPGRF-740HA201/615HA208 | SEQ ID NO: 358 | SEQ ID NO: 376 |
| 10-12 | ACE2FcPGRF-740EA201/615EA208 | SEQ ID NO: 359 | SEQ ID NO: 377 |
| 10-13 | ACE2FcPGRF-740wt208/615wt201 | SEQ ID NO: 360 | SEQ ID NO: 366 |
| 10-14 | ACE2FcPGRF-740RA208/615RA201 | SEQ ID NO: 361 | SEQ ID NO: 367 |
| 10-15 | ACE2FcPGRF-740RG208/615RG201 | SEQ ID NO: 362 | SEQ ID NO: 368 |
| 10-16 | ACE2FcPGRF-740RV208/615RV201 | SEQ ID NO: 363 | SEQ ID NO: 369 |
| 10-17 | ACE2FcPGRF-740HA208/615HA201 | SEQ ID NO: 364 | SEQ ID NO: 370 |
| 10-18 | ACE2FcPGRF-740EA208/615EA201 | SEQ ID NO: 365 | SEQ ID NO: 371 |
| 10-19 | ACE2FcPGRF-740wt208/615wt212 | SEQ ID NO: 360 | SEQ ID NO: 378 |
| 10-20 | ACE2FcPGRF-740RA208/615RA212 | SEQ ID NO: 361 | SEQ ID NO: 379 |
| 10-21 | ACE2FcPGRF-740RG208/615RG212 | SEQ ID NO: 362 | SEQ ID NO: 380 |
| 10-22 | ACE2FcPGRF-740RV208/615RV212 | SEQ ID NO: 363 | SEQ ID NO: 381 |
| 10-23 | ACE2FcPGRF-740HA208/615HA212 | SEQ ID NO: 364 | SEQ ID NO: 382 |
| 10-24 | ACE2FcPGRF-740EA208/615EA212 | SEQ ID NO: 365 | SEQ ID NO: 383 |
| 10-25 | ACE2FcPGRF-740wt201/615wt201/TMEM27CA | SEQ ID NO: 354 | SEQ ID NO: 384 |
| 10-26 | ACE2FcPGRF-740RA201/615RA201/TMEM27CA | SEQ ID NO: 355 | SEQ ID NO: 385 |
| 10-27 | ACE2FcPGRF-740RG201/615RG201/TMEM27CA | SEQ ID NO: 356 | SEQ ID NO: 386 |
| 10-28 | ACE2FcPGRF-740RV201/615RV201/TMEM27CA | SEQ ID NO: 357 | SEQ ID NO: 387 |
| 10-29 | ACE2FcPGRF-740HA201/615HA201/TMEM27CA | SEQ ID NO: 358 | SEQ ID NO: 388 |
| 10-30 | ACE2FcPGRF-740EA201/615EA201/TMEM27CA | SEQ ID NO: 359 | SEQ ID NO: 389 |
| 10-31 | ACE2FcPGRF-740wt20l/607wt201/TMEM27 | SEQ ID NO: 354 | SEQ ID NO: 390 |
| 10-32 | ACE2FcPGRF-740RA201/607RA201/TMEM27 | SEQ ID NO: 355 | SEQ ID NO: 391 |
| 10-33 | ACE2FcPGRF-740RG201/607RG201/TMEM27 | SEQ ID NO: 356 | SEQ ID NO: 392 |
| 10-34 | ACE2FcPGRF-740RV201/607RV201/TMEM27 | SEQ ID NO: 357 | SEQ ID NO: 393 |
| 10-35 | ACE2FcPGRF-740HA201/607HA201/TMEM27 | SEQ ID NO: 358 | SEQ ID NO: 394 |
| 10-36 | ACE2FcPGRF-740EA201/607EA201/TMEM27 | SEQ ID NO: 359 | SEQ ID NO: 395 |
| 10-37 | ACE2FcPGRF-740wt201/611wt201/TMEM27 | SEQ ID NO: 354 | SEQ ID NO: 396 |
| 10-38 | ACE2FcPGRF-740RA201/611RA201/TMEM27 | SEQ ID NO: 355 | SEQ ID NO: 397 |
| 10-39 | ACE2FcPGRF-740RG201/611RG201/TMEM27 | SEQ ID NO: 356 | SEQ ID NO: 398 |
| 10-40 | ACE2FcPGRF-740RV201/611RV201/TMEM27 | SEQ ID NO: 357 | SEQ ID NO: 399 |
| 10-41 | ACE2FcPGRF-740HA201/611HA201/TMEM27 | SEQ ID NO: 358 | SEQ ID NO: 400 |
| 10-42 | ACE2FcPGRF-740EA201/611EA201/TMEM27 | SEQ ID NO: 359 | SEQ ID NO: 401 |

TABLE 25B

| Protein | | | | |
|---|---|---|---|---|
| ID | Protein Name | H1 Chain | Fc Chain | ACE2 Mutations |
| 10-43 | ACE2FcPGRF-740wt201 | SEQ ID NO: 402 | | |
| 10-44 | ACE2FcPGRF-740RA201 | SEQ ID NO: 403 | | |
| 10-45 | ACE2FcPGRF-740RG201 | SEQ ID NO: 404 | | |
| 10-46 | ACE2FcPGRF-740RV201 | SEQ ID NO: 405 | | |
| 10-47 | ACE2FcPGRF-740HA201 | SEQ ID NO: 406 | | |
| 10-48 | ACE2FcPGRF-740EA201 | SEQ ID NO: 407 | | |
| 10-49 | ACE2FcPGRF-740wt201/313 | SEQ ID NO: 408 | | K31F/N33D/H34S/E35Q |
| 10-50 | ACE2FcPGRF-740RA201/313 | SEQ ID NO: 409 | | K31F/N33D/H34S/E35Q |
| 10-51 | ACE2FcPGRF-740RG201/313 | SEQ ID NO: 410 | | K31F/N33D/H34S/E35Q |
| 10-52 | ACE2FcPGRF-740RV201/313 | SEQ ID NO: 411 | | K31F/N33D/H34S/E35Q |
| 10-53 | ACE2FcPGRF-740HA201/313 | SEQ ID NO: 412 | | K31F/N33D/H34S/E35Q |
| 10-54 | ACE2FcPGRF-740EA201/313 | SEQ ID NO: 413 | | K31F/N33D/H34S/E35Q |
| 10-55 | ACE2c60PGRF-740wt208 | SEQ ID NO: 360 | SEQ ID NO: 420 | |
| 10-56 | ACE2c60PGRF-740RA208 | SEQ ID NO: 361 | SEQ ID NO: 420 | |
| 10-57 | ACE2c60PGRF-740RG208 | SEQ ID NO: 362 | SEQ ID NO: 420 | |
| 10-58 | ACE2c60PGRF-740RV208 | SEQ ID NO: 363 | SEQ ID NO: 420 | |
| 10-59 | ACE2c60PGRF-740HA208 | SEQ ID NO: 364 | SEQ ID NO: 420 | |
| 10-60 | ACE2c60PGRF-740EA208 | SEQ ID NO: 365 | SEQ ID NO: 420 | |
| 10-61 | ACE2c60PGRF-740wt208/313 | SEQ ID NO: 414 | SEQ ID NO: 420 | K31F/N33D/H34S/E35Q |
| 10-62 | ACE2c60PGRF-740RA208/313 | SEQ ID NO: 415 | SEQ ID NO: 420 | K31F/N33D/H34S/E35Q |
| 10-63 | ACE2c60PGRF-740RG208/313 | SEQ ID NO: 416 | SEQ ID NO: 420 | K31F/N33D/H34S/E35Q |
| 10-64 | ACE2c60PGRF-740RV208/313 | SEQ ID NO: 417 | SEQ ID NO: 420 | K31F/N33D/H34S/E35Q |
| 10-65 | ACE2c60PGRF-740HA208/313 | SEQ ID NO: 418 | SEQ ID NO: 420 | K31F/N33D/H34S/E35Q |
| 10-66 | ACE2c60PGRF-740EA208/313 | SEQ ID NO: 419 | SEQ ID NO: 420 | K31F/N33D/H34S/E35Q |

TABLE 26A

| | | | | | Second | Second |
|---|---|---|---|---|---|---|
| | | | First Dimerizing | First Dimerizing | Dimerizing | Dimerizing |
| Protein | Domain | Domain | Polypeptide Pair | Polypeptide | Polypeptide | Polypeptide |
| ID | Type D3/D4 | Type D5/D6 | D3/D4 | Sequence | Pair D5/D6 | Sequence |
| 10-01 | ACE2 wt | ACE2 wt | Collectrin-like | SEQ ID NO: 782 | | |
| 10-02 | ACE2 R273A | ACE2 R273A | Collectrin-like | SEQ ID NO: 782 | | |
| 10-03 | ACE2 R273G | ACE2 R273G | Collectrin-like | SEQ ID NO: 782 | | |
| 10-04 | ACE2 R273V | ACE2 R273V | Collectrin-like | SEQ ID NO: 782 | | |
| 10-05 | ACE2 H378A | ACE2 H378A | Collectrin-like | SEQ ID NO: 782 | | |
| 10-06 | ACE2 E201A | ACE2 E201A | Collectrin-like | SEQ ID NO: 782 | | |
| 10-07 | ACE2 wt | ACE2 wt | Collectrin-like | SEQ ID NO: 782 | | |
| 10-08 | ACE2 R273A | ACE2 R273A | Collectrin-like | SEQ ID NO: 782 | | |
| 10-09 | ACE2 R273G | ACE2 R273G | Collectrin-like | SEQ ID NO: 782 | | |
| 10-10 | ACE2 R273V | ACE2 R273V | Collectrin-like | SEQ ID NO: 782 | | |
| 10-11 | ACE2 H378A | ACE2 H378A | Collectrin-like | SEQ ID NO: 782 | | |
| 10-12 | ACE2 E201A | ACE2 E201A | Collectrin-like | SEQ ID NO: 782 | | |
| 10-13 | ACE2 wt | ACE2 wt | Collectrin-like | SEQ ID NO: 782 | | |
| 10-14 | ACE2 R273A | ACE2 R273A | Collectrin-like | SEQ ID NO: 782 | | |
| 10-15 | ACE2 R273G | ACE2 R273G | Collectrin-like | SEQ ID NO: 782 | | |
| 10-16 | ACE2 R273V | ACE2 R273V | Collectrin-like | SEQ ID NO: 782 | | |
| 10-17 | ACE2 H378A | ACE2 H378A | Collectrin-like | SEQ ID NO: 782 | | |
| 10-18 | ACE2 E201A | ACE2 E201A | Collectrin-like | SEQ ID NO: 782 | | |
| 10-19 | ACE2 wt | ACE2 wt | Collectrin-like | SEQ ID NO: 782 | | |
| 10-20 | ACE2 R273A | ACE2 R273A | Collectrin-like | SEQ ID NO: 782 | | |
| 10-21 | ACE2 R273G | ACE2 R273G | Collectrin-like | SEQ ID NO: 782 | | |
| 10-22 | ACE2 R273V | ACE2 R273V | Collectrin-like | SEQ ID NO: 782 | | |
| 10-23 | ACE2 H378A | ACE2 H378A | Collectrin-like | SEQ ID NO: 782 | | |
| 10-24 | ACE2 E201A | ACE2 E201A | Collectrin-like | SEQ ID NO: 782 | | |
| 10-25 | ACE2 wt | ACE2 wt | Collectrin-like | SEQ ID NO: 782 | Collectrin | SEQ ID NO: 784 |
| 10-26 | ACE2 R273A | ACE2 R273A | Collectrin-like | SEQ ID NO: 782 | Collectrin | SEQ ID NO: 784 |
| 10-27 | ACE2 R273G | ACE2 R273G | Collectrin-like | SEQ ID NO: 782 | Collectrin | SEQ ID NO: 784 |
| 10-28 | ACE2 R273V | ACE2 R273V | Collectrin-like | SEQ ID NO: 782 | Collectrin | SEQ ID NO: 784 |
| 10-29 | ACE2 H378A | ACE2 H378A | Collectrin-like | SEQ ID NO: 782 | Collectrin | SEQ ID NO: 784 |
| 10-30 | ACE2 E201A | ACE2 E201A | Collectrin-like | SEQ ID NO: 782 | Collectrin | SEQ ID NO: 784 |
| 10-31 | ACE2 wt | ACE2 wt | Collectrin-like | SEQ ID NO: 782 | Collectrin | SEQ ID NO: 783 |
| 10-32 | ACE2 R273A | ACE2 R273A | Collectrin-like | SEQ ID NO: 782 | Collectrin | SEQ ID NO: 783 |
| 10-33 | ACE2 R273G | ACE2 R273G | Collectrin-like | SEQ ID NO: 782 | Collectrin | SEQ ID NO: 783 |
| 10-34 | ACE2 R273V | ACE2 R273V | Collectrin-like | SEQ ID NO: 782 | Collectrin | SEQ ID NO: 783 |
| 10-35 | ACE2 H378A | ACE2 H378A | Collectrin-like | SEQ ID NO: 782 | Collectrin | SEQ ID NO: 783 |
| 10-36 | ACE2 E201A | ACE2 E201A | Collectrin-like | SEQ ID NO: 782 | Collectrin | SEQ ID NO: 783 |
| 10-37 | ACE2 wt | ACE2 wt | Collectrin-like | SEQ ID NO: 782 | Collectrin | SEQ ID NO: 786 |
| 10-38 | ACE2 R273A | ACE2 R273A | Collectrin-like | SEQ ID NO: 782 | Collectrin | SEQ ID NO: 786 |
| 10-39 | ACE2 R273G | ACE2 R273G | Collectrin-like | SEQ ID NO: 782 | Collectrin | SEQ ID NO: 786 |
| 10-40 | ACE2 R273V | ACE2 R273V | Collectrin-like | SEQ ID NO: 782 | Collectrin | SEQ ID NO: 786 |
| 10-41 | ACE2 H378A | ACE2 H378A | Collectrin-like | SEQ ID NO: 782 | Collectrin | SEQ ID NO: 786 |
| 10-42 | ACE2 E201A | ACE2 E201A | Collectrin-like | SEQ ID NO: 782 | Collectrin | SEQ ID NO: 786 |
| 10-43 | ACE2 wt | ACE2 wt | Collectrin-like | SEQ ID NO: 782 | Collectrin-like | SEQ ID NO: 782 |
| 10-44 | ACE2 R273A | ACE2 R273A | Collectrin-like | SEQ ID NO: 782 | Collectrin-like | SEQ ID NO: 782 |
| 10-45 | ACE2 R273G | ACE2 R273G | Collectrin-like | SEQ ID NO: 782 | Collectrin-like | SEQ ID NO: 782 |
| 10-46 | ACE2 R273V | ACE2 R273V | Collectrin-like | SEQ ID NO: 782 | Collectrin-like | SEQ ID NO: 782 |
| 10-47 | ACE2 H378A | ACE2 H378A | Collectrin-like | SEQ ID NO: 782 | Collectrin-like | SEQ ID NO: 782 |
| 10-48 | ACE2 E201A | ACE2 E201A | Collectrin-like | SEQ ID NO: 782 | Collectrin-like | SEQ ID NO: 782 |
| 10-49 | ACE2 wt | ACE2 wt | Collectrin-like | SEQ ID NO: 782 | Collectrin-like | SEQ ID NO: 782 |
| 10-50 | ACE2 R273A | ACE2 R273A | Collectrin-like | SEQ ID NO: 782 | Collectrin-like | SEQ ID NO: 782 |
| 10-51 | ACE2 R273G | ACE2 R273G | Collectrin-like | SEQ ID NO: 782 | Collectrin-like | SEQ ID NO: 782 |
| 10-52 | ACE2 R273V | ACE2 R273V | Collectrin-like | SEQ ID NO: 782 | Collectrin-like | SEQ ID NO: 782 |
| 10-53 | ACE2 H378A | ACE2 H378A | Collectrin-like | SEQ ID NO: 782 | Collectrin-like | SEQ ID NO: 782 |
| 10-54 | ACE2 E201A | ACE2 E201A | Collectrin-like | SEQ ID NO: 782 | Collectrin-like | SEQ ID NO: 782 |
| 10-55 | ACE2 wt | ACE2 wt | Collectrin-like | SEQ ID NO: 782 | | |
| 10-56 | ACE2 R273A | ACE2 R273A | Collectrin-like | SEQ ID NO: 782 | | |
| 10-57 | ACE2 R273G | ACE2 R273G | Collectrin-like | SEQ ID NO: 782 | | |
| 10-58 | ACE2 R273V | ACE2 R273V | Collectrin-like | SEQ ID NO: 782 | | |
| 10-59 | ACE2 H378A | ACE2 H378A | Collectrin-like | SEQ ID NO: 782 | | |
| 10-60 | ACE2 E201A | ACE2 E201A | Collectrin-like | SEQ ID NO: 782 | | |
| 10-61 | ACE2 wt | ACE2 wt | Collectrin-like | SEQ ID NO: 782 | | |
| 10-62 | ACE2 R273A | ACE2 R273A | Collectrin-like | SEQ ID NO: 782 | | |
| 10-63 | ACE2 R273G | ACE2 R273G | Collectrin-like | SEQ ID NO: 782 | | |
| 10-64 | ACE2 R273V | ACE2 R273V | Collectrin-like | SEQ ID NO: 782 | | |
| 10-65 | ACE2 H378A | ACE2 H378A | Collectrin-like | SEQ ID NO: 782 | | |
| 10-66 | ACE2 E201A | ACE2 E201A | Collectrin-like | SEQ ID NO: 782 | | |

TABLE 26B

| | Specific Activity (pmol/min/ug) | | | |
|---|---|---|---|---|
| Protein ID | ACE2 | Angiotensin II | Bradykinin | Apelin-13 |
| 13-17 | wt | 1655.2 | 1724.8 | 688 |
| 13-18 | H378A | 0.76 | 1.14 | 1.01 |

### Example 11—SARS-CoV-2 Neutralizing Antibodies

[2095] Biosimilar versions of eight antibodies that have received Emergency Use Authorization or are in late stage trials, REGN10897, REGN10933, Bamlanivimab, Etesevimab, AZD1061, AZD 8895, VIR-7841, and CT-P59, were produced according to Table 27 to evaluate the relative effectiveness of ACE2 superdimeric tetrahedral antibodies against SARS-CoV-2 variants.

TABLE 27

| Protein | Antibody | | Fc Domain | | |
|---|---|---|---|---|---|
| ID | Name | Other Name | Mutations | L Chain | H Chain |
| 12-01 | Imdevimab | REGN10987 | | SEQ ID NO: 423 | SEQ ID NO: 424 |
| 12-02 | Casirivimab | REGN10933 | | SEQ ID NO: 429 | SEQ ID NO: 430 |
| 12-03 | Bamlanivimab | LY-CoV555 | | SEQ ID NO: 441 | SEQ ID NO: 442 |
| 12-04 | Etesevimab | LY-CoV016 | L234A/L235A | SEQ ID NO: 445 | SEQ ID NO: 446 |
| 12-05 | Cilgavimab | AZD1061 | L234F/L235E/P331S | SEQ ID NO: 449 | SEQ ID NO: 450 |
| | | | M252Y/S254T/T256E | | |
| 12-06 | Tixagevimab | AZD8895 | L234F/L235E/P331S | SEQ ID NO: 453 | SEQ ID NO: 454 |
| | | | M252Y/S254T/T256E | | |
| 12-07 | Sotrovimab | VIR-7831 | M428L/N434S | SEQ ID NO: 457 | SEQ ID NO: 458 |
| 12-08 | Regdanvimab | CT-P59 | | SEQ ID NO: 461 | SEQ ID NO: 462 |
| 12-09 | B13A-PG | | L234A/L235A/P329G | SEQ ID NO: 465 | SEQ ID NO: 466 |
| 12-10 | O24A-PG | | L234A/L235A/P329G | SEQ ID NO: 469 | SEQ ID NO: 470 |
| 16-01 | B13A | | | SEQ ID NO: 465 | SEQ ID NO: 554 |
| 16-02 | O24A | | | SEQ ID NO: 469 | SEQ ID NO: 555 |

### Example 12

[2096] To provide proof-of-principle demonstrating tetrahedral antibodies comprising two distinct types of domain that specifically bind two different targets, two series of constructs were generated, a first series with the predicted structure shown in Panel B of FIG. 31, according to Tables 28 and 29, and a second series with the predicted structure shown in Panel C of FIG. 32, according to Tables 30 and 31, then evaluated for their structural and functional bispecificity.

TABLE 28

| Protein | | | | |
|---|---|---|---|---|
| ID | Protein Name | H1 Chain | L2 Chain | H2 Chain |
| 13-01 | ACE2FcPG-740wt201RF/REGN10987 | SEQ ID NO: 471 | SEQ ID NO: 423 | SEQ ID NO: 472 |
| 13-02 | ACE2FcPG-740HA201RF/REGN10987 | SEQ ID NO: 473 | SEQ ID NO: 423 | SEQ ID NO: 472 |
| 13-03 | ACE2FcPG-740wt201RF/REGN10933 | SEQ ID NO: 471 | SEQ ID NO: 429 | SEQ ID NO: 474 |
| 13-04 | ACE2FcPG-740HA201RF/REGN10933 | SEQ ID NO: 473 | SEQ ID NO: 429 | SEQ ID NO: 474 |
| 13-05 | ACE2FcPG-740wt201RF/Bamlanivimab | SEQ ID NO: 471 | SEQ ID NO: 441 | SEQ ID NO: 475 |
| 13-06 | ACE2FcPG-740HA201RF/Bamlanivimab | SEQ ID NO: 473 | SEQ ID NO: 441 | SEQ ID NO: 475 |
| 13-07 | ACE2FcPG-740wt201RF/Etesevimab | SEQ ID NO: 471 | SEQ ID NO: 445 | SEQ ID NO: 476 |
| 13-08 | ACE2FcPG-740HA201RF/Etesevimab | SEQ ID NO: 473 | SEQ ID NO: 445 | SEQ ID NO: 476 |
| 13-09 | ACE2FcFES-740wt201RF/Cilgavimab-YTE | SEQ ID NO: 477 | SEQ ID NO: 449 | SEQ ID NO: 478 |
| 13-10 | ACE2FcFES-740HA201RF/Cilgavimab-YTE | SEQ ID NO: 479 | SEQ ID NO: 449 | SEQ ID NO: 478 |
| 13-11 | ACE2FcFES-740wt201RF/Tixagevimab-YTE | SEQ ID NO: 477 | SEQ ID NO: 453 | SEQ ID NO: 480 |
| 13-12 | ACE2FcFES-740HA201RF/Tixagevimab-YTE | SEQ ID NO: 479 | SEQ ID NO: 453 | SEQ ID NO: 480 |
| 13-13 | ACE2FcPG-740wt201RF/Sotrovimab | SEQ ID NO: 481 | SEQ ID NO: 457 | SEQ ID NO: 482 |
| 13-14 | ACE2FcPG-740HA201RF/Sotrovimab | SEQ ID NO: 483 | SEQ ID NO: 457 | SEQ ID NO: 482 |
| 13-15 | ACE2FcPG-740wt201RF/Regdanvimab | SEQ ID NO: 471 | SEQ ID NO: 461 | SEQ ID NO: 484 |
| 13-16 | ACE2FcPG-740HA201RF/Regdanvimab | SEQ ID NO: 473 | SEQ ID NO: 461 | SEQ ID NO: 484 |
| 13-17 | ACE2FcPG-740wt201RF/B13A | SEQ ID NO: 471 | SEQ ID NO: 465 | SEQ ID NO: 485 |
| 13-18 | ACE2FcPG-740HA201RF/B13A | SEQ ID NO: 473 | SEQ ID NO: 465 | SEQ ID NO: 485 |
| 13-19 | ACE2FcPG-740wt201RF/024A | SEQ ID NO: 471 | SEQ ID NO: 469 | SEQ ID NO: 486 |
| 13-20 | ACE2FcPG-740HA201RF/024A | SEQ ID NO: 473 | SEQ ID NO: 469 | SEQ ID NO: 486 |
| 13-21 | ACE2FcFES-740wt201RF/B13A-YTE | SEQ ID NO: 477 | SEQ ID NO: 465 | SEQ ID NO: 487 |
| 13-22 | ACE2FcFES-740HA201RF/B13A-YTE | SEQ ID NO: 479 | SEQ ID NO: 465 | SEQ ID NO: 487 |
| 13-23 | ACE2FcFES-740wt201RF/O24A-YTE | SEQ ID NO: 477 | SEQ ID NO: 469 | SEQ ID NO: 488 |
| 13-24 | ACE2FcFES-740HA201RF/O24A-YTE | SEQ ID NO: 479 | SEQ ID NO: 469 | SEQ ID NO: 488 |

TABLE 29

| | | | First | First | |
|---|---|---|---|---|---|
| | | | Dimerizing | Dimerizing | |
| Protein | Domain Type | Domain Type | Polypeptide | Polypeptide | Fc Domain Type |
| ID | D3/D4 | D5/D6 | Pair D3/D4 | Sequence | D1/D2 |
| 13-01 | ACE2 wt | REGN10987 | Collectrin-like | SEQ ID NO: 782 | L234A/L235A/P329G |
| 13-02 | ACE2 H378A | REGN10987 | Collectrin-like | SEQ ID NO: 782 | L234A/L235A/P329G |
| 13-03 | ACE2 wt | REGN10933 | Collectrin-like | SEQ ID NO: 782 | L234A/L235A/P329G |
| 13-04 | ACE2 H378A | REGN10933 | Collectrin-like | SEQ ID NO: 782 | L234A/L235A/P329G |
| 13-05 | ACE2 wt | LY-CoV555 | Collectrin-like | SEQ ID NO: 782 | L234A/L235A/P329G |
| 13-06 | ACE2 H378A | LY-CoV555 | Collectrin-like | SEQ ID NO: 782 | L234A/L235A/P329G |
| 13-07 | ACE2 wt | LY-CoV016 | Collectrin-like | SEQ ID NO: 782 | L234A/L235A/P329G |
| 13-08 | ACE2 H378A | LY-CoV016 | Collectrin-like | SEQ ID NO: 782 | L234A/L235A/P329G |
| 13-09 | ACE2 wt | AZD1061 | Collectrin-like | SEQ ID NO: 782 | L234F/L235E/P331S |
| | | | | | M252Y/S254T/T256E |
| 13-10 | ACE2 H378A | AZD1061 | Collectrin-like | SEQ ID NO: 782 | L234F/L235E/P331S |
| | | | | | M252Y/S254T/T256E |
| 13-11 | ACE2 wt | AZD8895 | Collectrin-like | SEQ ID NO: 782 | L234F/L235E/P331S |
| | | | | | M252Y/S254T/T256E |
| 13-12 | ACE2 H378A | AZD8895 | Collectrin-like | SEQ ID NO: 782 | L234F/L235E/P331S |
| | | | | | M252Y/S254T/T256E |
| 13-13 | ACE2 wt | VIR-7831 | Collectrin-like | SEQ ID NO: 782 | L234A/L235A/P329G |
| | | | | | M428L/N434S |
| 13-14 | ACE2 H378A | VIR-7831 | Collectrin-like | SEQ ID NO: 782 | L234A/L235A/P329G |
| | | | | | M428L/N434S |
| 13-15 | ACE2 wt | CT-P59 | Collectrin-like | SEQ ID NO: 782 | L234A/L235A/P329G |
| 13-16 | ACE2 H378A | CT-P59 | Collectrin-like | SEQ ID NO: 782 | L234A/L235A/P329G |
| 13-17 | ACE2 wt | B13A | Collectrin-like | SEQ ID NO: 782 | L234A/L235A/P329G |
| 13-18 | ACE2 H378A | B13A | Collectrin-like | SEQ ID NO: 782 | L234A/L235A/P329G |
| 13-19 | ACE2 wt | O24A | Collectrin-like | SEQ ID NO: 782 | L234A/L235A/P329G |
| 13-20 | ACE2 H378A | O24A | Collectrin-like | SEQ ID NO: 782 | L234A/L235A/P329G |
| 13-21 | ACE2 wt | B13A | Collectrin-like | SEQ ID NO: 782 | L234F/L235E/P331S |
| | | | | | M252Y/S254T/T256E |
| 13-22 | ACE2 H378A | B13A | Collectrin-like | SEQ ID NO: 782 | L234F/L235E/P331S |
| | | | | | M252Y/S254T/T256E |
| 13-23 | ACE2 wt | O24A | Collectrin-like | SEQ ID NO: 782 | L234F/L235E/P331S |
| | | | | | M252Y/S254T/T256E |
| 13-24 | ACE2 H378A | O24A | Collectrin-like | SEQ ID NO: 782 | L234F/L235E/P331S |
| | | | | | M252Y/S254T/T256E |

### Example 13

TABLE 30

| Protein | | | | | |
|---|---|---|---|---|---|
| ID | Protein Name | L1 Chain | H1 Chain | L2 Chain | H2 Chain |
| 14-01 | REGN10987-CLD201RF-N84S/REGN10987 | SEQ ID NO: 423 | SEQ ID NO: 489 | SEQ ID NO: 423 | SEQ ID NO: 472 |
| 14-02 | REGN10987(x)CLD201RF-N84S/REGN10933 | SEQ ID NO: 503 | SEQ ID NO: 490 | SEQ ID NO: 429 | SEQ ID NO: 474 |
| 14-03 | REGN10933-CLD201RF-N84S/REGN10933 | SEQ ID NO: 429 | SEQ ID NO: 491 | SEQ ID NO: 429 | SEQ ID NO: 474 |
| 14-04 | REGN10933(x)CLD201RF-N84S/REGN10987 | SEQ ID NO: 504 | SEQ ID NO: 492 | SEQ ID NO: 423 | SEQ ID NO: 472 |
| 14-05 | Bamlanivimab-CLD201RF/Bamlanivimab | SEQ ID NO: 441 | SEQ ID NO: 493 | SEQ ID NO: 441 | SEQ ID NO: 475 |
| 14-06 | Bamlanivimab(x)CLD201RF/Etesevimab | SEQ ID NO: 505 | SEQ ID NO: 494 | SEQ ID NO: 445 | SEQ ID NO: 476 |
| 14-07 | Etesevimab-CLD201RF-N83S/Etesevimab | SEQ ID NO: 445 | SEQ ID NO: 495 | SEQ ID NO: 445 | SEQ ID NO: 476 |
| 14-08 | Etesevimab(x)CLD201RF-N83S/Bamlanivimab | SEQ ID NO: 506 | SEQ ID NO: 496 | SEQ ID NO: 441 | SEQ ID NO: 475 |
| 14-09 | Cilgavimab-CLD201RF-N86S/Cilgavimab-YTE | SEQ ID NO: 449 | SEQ ID NO: 497 | SEQ ID NO: 449 | SEQ ID NO: 478 |
| 14-10 | Cilgavimab(x)CLD201RF-N86S/Tixagevimab- | SEQ ID NO: 507 | SEQ ID NO: 498 | SEQ ID NO: 453 | SEQ ID NO: 480 |
| | YTE | | | | |
| 14-11 | Tixagevimab-CLD201RF/Tixagevimab | SEQ ID NO: 453 | SEQ ID NO: 499 | SEQ ID NO: 453 | SEQ ID NO: 480 |
| 14-12 | Tixagevimab(x)CLD201RF/Cilgavimab | SEQ ID NO: 508 | SEQ ID NO: 500 | SEQ ID NO: 449 | SEQ ID NO: 478 |
| 14-13 | Sotrovimab-CLD201RF/Sotrovimab | SEQ ID NO: 457 | SEQ ID NO: 501 | SEQ ID NO: 457 | SEQ ID NO: 482 |
| 14-14 | Regdanvimab-CLD201RF/Regdanvimab | SEQ ID NO: 461 | SEQ ID NO: 502 | SEQ ID NO: 461 | SEQ ID NO: 484 |

TABLE 31

| | | Fab Domain | | Fab Domain | |
|---|---|---|---|---|---|
| Protein | Domain Type | Configuration | Domain | Configuration | Fc Domain Type |
| ID | D3/D4 | D3/D4 | Type D5/D6 | D5/D6 | D1/D2 |
| 14-01 | REGN10987 | VL-CL/VH-CH1 | REGN10987 | VL-CL/VH-CH1 | L234A/L235A/P329G |
| 14-02 | REGN10987 | VH-CHl/VL-CL | REGN10933 | VK-CK/VH-CH1 | L234A/L235A/P329G |
| 14-03 | REGN10933 | VK-CK/VH-CH1 | REGN10933 | VK-CK/VH-CH1 | L234A/L235A/P329G |
| 14-04 | REGN10933 | VH-CH1/VK-CK | REGN10987 | VL-CL/VH-CH1 | L234A/L235A/P329G |
| 14-05 | LY-CoV555 | VK-CK/VH-CH1 | LY-CoV555 | VK-CK/VH-CH1 | L234A/L235A/P329G |
| 14-06 | LY-CoV555 | VH-CH1/VK-CK | LY-CoV016 | VK-CK/VH-CH1 | L234A/L235A/P329G |
| 14-07 | LY-CoV016 | VK-CK/VH-CH1 | LY-CoV016 | VK-CK/VH-CH1 | L234A/L235A/P329G |
| 14-08 | LY-CoV016 | VH-CH1/VK-CK | LY-CoV555 | VK-CK/VH-CH1 | L234A/L235A/P329G |
| 14-09 | AZD1061 | VK-CK/VH-CH1 | AZD1061 | VK-CK/VH-CH1 | L234F/L235E/P331S |
| | | | | | M252Y/S254T/T256E |
| 14-10 | AZD1061 | VH-CH1/VK-CK | AZD8895 | VK-CK/VH-CH1 | L234F/L235E/P331S |
| | | | | | M252Y/S254T/T256E |
| 14-11 | AZD8895 | VK-CK/VH-CH1 | AZD8895 | VK-CK/VH-CH1 | L234F/L235E/P331S |
| | | | | | M252Y/S254T/T256E |
| 14-12 | AZD8895 | VH-CH1/VK-CK | AZD1061 | VK-CK/VH-CH1 | L234F/L235E/P331S |
| | | | | | M252Y/S254T/T256E |
| 14-13 | VIR-7831 | VK-CK/VH-CH1 | VIR-7831 | VK-CK/VH-CH1 | L234A/L235A/P329G |
| | | | | | M428L/N434S |
| 14-14 | CT-P59 | VL-CL/VH-CH1 | CT-P59 | VL-CL/VH-CH1 | L234A/L235A/P329G |

### Example 14—Pharmacokinetics

[2097] Pharmacokinetic studies were carried out with two series of constructs designed to evaluate the effect of mutations in the Fc region that affect FcgR and FcRn binding. The first series is described in Tables 28 and 29, The second series is described in Tables 33 and 34.

[2098] Methods: The study was conducted by The Jackson Laboratory, Bar Harbor, ME. 6-8 week old male B6.Cg-Fcgrttm1Dcr Tg(FCGRT)32Dcr/DcrJ mice were homozygous for the human FcRn transgene. Body weights were measured within 1 day of each test article administration. At 0 hours on Day 0, COVICEPT was administered by IV injection at 10 mg/kg in a volume of 5 ml/kg. 25 μL blood samples were collected from each mouse at 5 m, 6 h, id, 4 d, 7 d, 10 d, 14 d, 17 d, 21 d, and 28 d. The blood samples were collected into 1 uL of K₃EDTA, processed to plasma, diluted 1/10 in 50% glycerol in PBS, frozen in specialized 96 well storage pates and stored at −20° C. Plasma samples were assessed by electrochemiluminescent immunoassay (Meso Scale Diagnostics LLC, Rockville, MD) to detect the level of COVICEPT.

[2099] Electrochemiluminescent immunoassay: Wild-type spike protein (LakePharma, Inc., San Carlos, CA) was diluted to 20 nM with PBS and coated on QuickPlex 96-Well plates (Meso Scale Diagnostics) with 25 μL per well. The plates were sealed and incubated overnight at 4° C. The plates were then blocked by PBS—B (PBS with 1% BSA) at room temperature for 30 minutes. The plasma samples were diluted 250- to 4000-fold with PBS—B. Twenty five microliters of the diluted plasma samples were added to the coated MSD plates using Biomek 15 liquid handler (Beckman Coulter Inc., Brea, CA). Plasma samples were incubated with shaking (700 rpm) at room temperature for 60 mins. Twenty five microliters of biotinylated goat anti human-Fab antibody (Abcam), or biotinylated goat Anti-Human ACE-2 detection antibody (R&D Systems) was used as a detection antibody. Detection antibody was incubated with shaking (700 rpm) at room temperature for 60 mins. Twenty five microliters of sulfo-tag streptavidin and Read buffer A (Meso Scale Diagnostics LLC, Rockville, MD) were then added to generate the electrochemiluminescent signal. Data were analyzed with MSD discovery workbench 4.0.13 (Meso Scale Diagnostics LLC, Rockville, MD). Pharmacokinetic analysis was performed using PKSolver22.

TABLE 32A

| Protein ID | Protein Name | Detection | Half-life (days) |
|---|---|---|---|
| 1317 | B13-ACE2 WT | ACE2 | 4.6 |
| | | Fab | 4.9 |
| 1318 | B13-ACE2HA | ACE2 | 5.4 |
| | | Fab | 5.4 |
| 1321 | B13-ACE2 WT_YTE | ACE2 | 9.0 |
| | | Fab | 9.4 |
| 1322 | B13-ACE2 HA_YTE | ACE2 | 7.9 |
| | | Fab | 8.3 |

TABLE 32C

| Protein | Domain Type | Domain Type | FcR Domain Type | FcRn Domain Type | Half-life |
|---|---|---|---|---|---|
| ID | D3/D4 | D5/D6 | D1/D2 | D1/D2 | (days) |
| 15-01 | ACE2 H378A | ACE2 H378A | L234A/L235A/P329G | | 1.3 |
| 15-02 | ACE2 H378A | ACE2 H378A | L234A/L235A/P329G | | 1.1 |
| 15-03 | ACE2 H378A | ACE2 H378A | L234A/L235A/P329G | M252Y/S254T/T256E | 1.7 |
| 15-04 | ACE2 H378A | ACE2 H378A | L234A/L235A/P329G | M252Y/S254T/T256E | 1.1 |
| 15-05 | ACE2 H378A | ACE2 H378A | L234A/L235A/P329G | M428L/N434S | 1.4 |
| 15-06 | ACE2 H378A | ACE2 H378A | L234A/L235A/P329G | M428L/N434S | 1.4 |
| 15-07 | ACE2 H378A | ACE2 H378A | L234A/L235A/P329G | FCΓL309D/Q311H/N434S | 1.1 |
| 15-08 | ACE2 H378A | ACE2 H378A | L234A/L235A/P329G | FCΓL309D/Q311H/N434S | 1.3 |
| 15-09 | ACE2 H378A | B13A | | | 2.8 |
| 15-10 | ACE2 H378A | B13A | L234A/L235A/P329G | | 3.5 |
| 15-11 | ACE2 H378A | B13A | | M252Y/S254T/T256E | 6.2 |
| 15-12 | ACE2 H378A | B13A | L234A/L235A/P329G | M252Y/S254T/T256E | 3.9 |
| 15-13 | ACE2 H378A | B13A | | M428L/N434S | 2.8 |
| 15-14 | ACE2 H378A | B13A | L234A/L235A/P329G | M428L/N434S | 4.5 |
| 15-15 | ACE2 H378A | B13A | | FCΓL309D/Q311H/N434S | 4.4 |
| 15-16 | ACE2 H378A | B13A | L234A/L235A/P329G | FCΓL309D/Q311H/N434S | 6.0 |

### Example 15

[2100] A series of constructs were generated according to Tables 33 and 34 to evaluate the effect of mutations in the Fc region that affect FcgR and FcRn binding and pharmacokinetics.

[2101] The results of the binding measurements are presented in Tables 35A, 35B, 35C, 35D.

[2102] Methods: Surface plasmon resonance capture kinetic experiments were performed on a Carterra LSA instrument purchased from Carterra, Inc. Salt Lake City, UT. COVICEPT and its controls (5 μg/ml) were immobilized on the Carterra CMD-P chip using amine coupling. Recombinant Fc gamma receptors (R&D Systems) were diluted with running buffer (PBS with 0.05% TWEEN) to a concentration of 2000 nM, followed by 7 times 3-fold serial dilution to 0.9 nM. Fc gamma receptors were injected onto the CMD-P chip for 5 minutes during the association phase followed by running buffer injection for another 5 minutes during the dissociation phase. The CMD-P chip was regenerated by flowing Pierce™ IgG Elution Buffer for 1 minute (Thermo Fisher Scientific Inc., Waltham, MA) after each round of Fc-gamma receptors injection. Data were analyzed using the Carterra's Kinetic tool.

TABLE 33

| Protein | | | | |
|---|---|---|---|---|
| ID | Protein Name | Hl Chain | L2 Chain | H2 Chain |
| 15-01 | ACE2FcPG-740HA201/615HA201RF | SEQ ID NO: 509 | | SEQ ID NO: 510 |
| 15-02 | ACE2FcPG-740HA201RF/615HA201 | SEQ ID NO: 473 | | SEQ ID NO: 511 |
| 15-03 | ACE2FcPG-740HA201/615HA201R F-YTE | SEQ ID NO: 512 | | SEQ ID NO: 513 |
| 15-04 | ACE2FcPG-740HA201RF/615HA201-YTE | SEQ ID NO: 514 | | SEQ ID NO: 515 |
| 15-05 | ACE2FcPG-740HA201/615HA201RF-LS | SEQ ID NO: 516 | | SEQ ID NO: 517 |
| 15-06 | ACE2FcPG-740HA201RF/615HA201-LS | SEQ ID NO: 518 | | SEQ ID NO: 519 |
| 15-07 | ACE2FcPG-740HA201/615HA201RF-DHS | SEQ ID NO: 520 | | SEQ ID NO: 521 |
| 15-08 | ACE2FcPG-740HA201RF/615HA201-DHS | SEQ ID NO: 522 | | SEQ ID NO: 523 |
| 15-09 | ACE2Fc-740HA201RF/B13A | SEQ ID NO: 524 | SEQ ID NO: 465 | SEQ ID NO: 525 |
| 15-10 | ACE2FcPG-740HA201RF/B13A | SEQ ID NO: 473 | SEQ ID NO: 465 | SEQ ID NO: 485 |
| 15-11 | ACE2Fc-740HA201RF/B13A-YTE | SEQ ID NO: 526 | SEQ ID NO: 465 | SEQ ID NO: 527 |
| 15-12 | ACE2FcPG-740HA201RF/B13A-YTE | SEQ ID NO: 514 | SEQ ID NO: 465 | SEQ ID NO: 528 |
| 15-13 | ACE2Fc-740HA201RF/B13A-LS | SEQ ID NO: 529 | SEQ ID NO: 465 | SEQ ID NO: 530 |
| 15-14 | ACE2FcPG-740HA201RF/B13A-LS | SEQ ID NO: 518 | SEQ ID NO: 465 | SEQ ID NO: 531 |
| 15-15 | ACE2Fc-740HA201RF/B13A-DHS | SEQ ID NO: 532 | SEQ ID NO: 465 | SEQ ID NO: 533 |
| 15-16 | ACE2FcPG-740HA201RF/B13A-DHS | SEQ ID NO: 522 | SEQ ID NO: 465 | SEQ ID NO: 534 |
| 15-17 | ACE2Fc-740HA201RF/O24A | SEQ ID NO: 524 | SEQ ID NO: 469 | SEQ ID NO: 535 |
| 15-18 | ACE2FcPG-740HA201RF/O24A | SEQ ID NO: 473 | SEQ ID NO: 469 | SEQ ID NO: 486 |
| 15-19 | ACE2Fc-740HA201RF/O24A-YTE | SEQ ID NO: 526 | SEQ ID NO: 469 | SEQ ID NO: 536 |
| 15-20 | ACE2FcPG-740HA201RF/O24A-YTE | SEQ ID NO: 514 | SEQ ID NO: 469 | SEQ ID NO: 537 |
| 15-21 | ACE2Fc-740HA201RF/O24A-LS | SEQ ID NO: 529 | SEQ ID NO: 469 | SEQ ID NO: 538 |
| 15-22 | ACE2FcPG-740HA201RF/O24A-LS | SEQ ID NO: 518 | SEQ ID NO: 469 | SEQ ID NO: 539 |
| 15-23 | ACE2Fc-740HA201RF/O24A-DHS | SEQ ID NO: 532 | SEQ ID NO: 469 | SEQ ID NO: 540 |
| 15-24 | ACE2FcPG-740HA201RF/O24A-DHS | SEQ ID NO: 522 | SEQ ID NO: 469 | SEQ ID NO: 541 |
| 15-49 | ACE2Fc-740HA201/615HA201RF | SEQ ID NO: 542 | | SEQ ID NO: 543 |
| 15-50 | ACE2Fc-740HA201RF/615HA201 | SEQ ID NO: 524 | | SEQ ID NO: 544 |
| 15-51 | ACE2Fc-740HA201/615HA201RF-YTE | SEQ ID NO: 545 | | SEQ ID NO: 546 |
| 15-52 | ACE2Fc-740HA201RF/615HA201-YTE | SEQ ID NO: 526 | | SEQ ID NO: 547 |
| 15-53 | ACE2Fc-740HA201/615HA201RF-LS | SEQ ID NO: 548 | | SEQ ID NO: 549 |
| 15-54 | ACE2Fc-740HA201RF/615HA201-LS | SEQ ID NO: 529 | | SEQ ID NO: 550 |
| 15-55 | ACE2Fc-740HA201/615HA201RF-DHS | SEQ ID NO: 551 | | SEQ ID NO: 552 |
| 15-56 | ACE2Fc-740HA201RF/615HA201-DHS | SEQ ID NO: 532 | | SEQ ID NO: 553 |

TABLE 34

| | | | | | Fc Domain Type | |
|---|---|---|---|---|---|---|
| | | | | | Protein A | |
| | | | | | D1/D2 | |
| Protein | Domain Type | Domain Type | FcR Domain Type | FcRn Domain Type | H1 | H2 |
| ID | D3/D4 | D5/D6 | D1/D2 | D1/D2 | Chain | Chain |
| 15-01 | ACE2 H378A | ACE2 H378A | L234A/L235A/P329G | | HY | RF |
| 15-02 | ACE2 H378A | ACE2 H378A | L234A/L235A/P329G | | RF | HY |
| 15-03 | ACE2 H378A | ACE2 H378A | L234A/L235A/P329G | M252Y/S254T/T256E | HY | RF |
| 15-04 | ACE2 H378A | ACE2 H378A | L234A/L235A/P329G | M252Y/S254T/T256E | RF | HY |
| 15-05 | ACE2 H378A | ACE2 H378A | L234A/L235A/P329G | M428L/N434S | HY | RF |
| 15-06 | ACE2 H378A | ACE2 H378A | L234A/L235A/P329G | M428L/N434S | RF | HY |
| 15-07 | ACE2 H378A | ACE2 H378A | L234A/L235A/P329G | FCΓL309D/Q311H/N434S | HY | RF |
| 15-08 | ACE2 H378A | ACE2 H378A | L234A/L235A/P329G | FCΓL309D/Q311H/N434S | RF | HY |
| 15-09 | ACE2 H378A | B13A | | | RF | HY |
| 15-10 | ACE2 H378A | B13A | L234A/L235A/P329G | | RF | HY |
| 15-11 | ACE2 H378A | B13A | | M252Y/S254T/T256E | RF | HY |
| 15-12 | ACE2 H378A | B13A | L234A/L235A/P329G | M252Y/S254T/T256E | RF | HY |
| 15-13 | ACE2 H378A | B13A | | M428L/N434S | RF | HY |
| 15-14 | ACE2 H378A | B13A | L234A/L235A/P329G | M428L/N434S | RF | HY |
| 15-15 | ACE2 H378A | B13A | | FCTL309D/Q311H/N434S | RF | HY |
| 15-16 | ACE2 H378A | B13A | L234A/L235A/P329G | FCTL309D/Q311H/N434S | RF | HY |
| 15-17 | ACE2 H378A | O24A | | | RF | HY |
| 15-18 | ACE2 H378A | O24A | L234A/L235A/P329G | | RF | HY |
| 15-19 | ACE2 H378A | O24A | | M252Y/S254T/T256E | RF | HY |
| 15-20 | ACE2 H378A | O24A | L234A/L235A/P329G | M252Y/S254T/T256E | RF | HY |
| 15-21 | ACE2 H378A | O24A | | M428L/N434S | RF | HY |
| 15-22 | ACE2 H378A | O24A | L234A/L235A/P329G | M428L/N434S | RF | HY |
| 15-23 | ACE2 H378A | O24A | | FCΓL309D/Q311H/N434S | RF | HY |
| 15-24 | ACE2 H378A | O24A | L234A/L235A/P329G | FCΓL309D/Q311H/N434S | RF | HY |
| 15-49 | ACE2 H378A | ACE2 H378A | | | HY | RF |
| 15-50 | ACE2 H378A | ACE2 H378A | | | RF | HY |
| 15-51 | ACE2 H378A | ACE2 H378A | | M252Y/S254T/T256E | HY | RF |
| 15-52 | ACE2 H378A | ACE2 H378A | | M252Y/S254T/T256E | RF | HY |
| 15-53 | ACE2 H378A | ACE2 H378A | | M428L/N434S | HY | RF |
| 15-54 | ACE2 H378A | ACE2 H378A | | M428L/N434S | RF | HY |
| 15-55 | ACE2 H378A | ACE2 H378A | | FCΓL309D/Q311H/N434S | HY | RF |
| 15-56 | ACE2 H378A | ACE2 H378A | | FCΓL309D/Q311H/N434S | RF | HY |

TABLE 35A

| Protein | FcR Domain Type | FcRn Domain Type | FcgRI_CD64 | | | |
|---|---|---|---|---|---|---|
| ID | D1/D2 | D1/D2 | ka (M − 1 s − 1) | kd (s − 1) | KD (M) | Rmax (RU) |
| 15-01 | L234A/L235A/P329G | | NB | NB | NB | NB |
| 15-02 | L234A/L235A/P329G | | NB | NB | NB | NB |
| 15-03 | L234A/L235A/P329G | M252Y/S254T/T256E | NB | NB | NB | NB |
| 15-04 | L234A/L235A/P329G | M252Y/S254T/T256E | NB | NB | NB | NB |
| 15-05 | L234A/L235A/P329G | M428L/N434S | NB | NB | NB | NB |
| 15-06 | L234A/L235A/P329G | M428L/N434S | NB | NB | NB | NB |
| 15-07 | L234A/L235A/P329G | L309D/Q311H/N434S | NB | NB | NB | NB |
| 15-08 | L234A/L235A/P329G | L309D/Q311H/N434S | NB | NB | NB | NB |
| 15-09 | | | 9.71E+05 | 7.44E−04 | 7.67E−10 | 3.61E+01 |
| 15-10 | L234A/L235A/P329G | | NB | NB | NB | NB |
| 15-11 | | M252Y/S254T/T256E | 7.62E+05 | 1.20E−03 | 1.57E−09 | 3.64E+01 |
| 15-12 | L234A/L235A/P329G | M252Y/S254T/T256E | NB | NB | NB | NB |
| 15-13 | | M428L/N434S | 8.29E+05 | 5.83E−04 | 7.02E−10 | 5.34E+01 |
| 15-14 | L234A/L235A/P329G | M428L/N434S | NB | NB | NB | NB |
| 15-15 | | L309D/Q311H/N434S | 7.40E+05 | 7.25E−04 | 9.80E−10 | 6.05E+01 |
| 15-16 | L234A/L235A/P329G | L309D/Q311H/N434S | NB | NB | NB | NB |
| 15-17 | | | 6.94E+05 | 7.16E−04 | 1.03E−09 | 4.37E+01 |
| 15-18 | L234A/L235A/P329G | | NB | NB | NB | NB |
| 15-19 | | M252Y/S254T/T256E | 7.07E+05 | 1.57E−03 | 2.22E−09 | 2.90E+01 |
| 15-20 | L234A/L235A/P329G | M252Y/S254T/T256E | NB | NB | NB | NB |
| 15-21 | | M428L/N434S | 8.87E+05 | 6.72E−04 | 7.58E−10 | 2.97E+01 |
| 15-22 | L234A/L235A/P329G | M428L/N434S | NB | NB | NB | NB |
| 15-23 | | L309D/Q311H/N434S | 9.08E+05 | 6.81E−04 | 7.50E−10 | 3.84E+01 |
| 15-24 | L234A/L235A/P329G | L309D/Q311H/N434S | NB | NB | NB | NB |
| 15-49 | | | 9.04E+05 | 7.02E−04 | 7.76E−10 | 4.87E+01 |
| 15-50 | | | 1.01E+06 | 7.62E−04 | 7.52E−10 | 3.05E+01 |
| 15-51 | | M252Y/S254T/T256E | 9.34E+05 | 1.10E−03 | 1.18E−09 | 2.28E+01 |
| 15-52 | | M252Y/S254T/T256E | 8.54E+05 | 1.17E−03 | 1.37E−09 | 2.69E+01 |
| 15-53 | | M428L/N434S | 9.99E+05 | 6.98E−04 | 6.98E−10 | 2.21E+01 |
| 15-54 | | M428L/N434S | NB | NB | NB | NB |
| 15-56 | | L309D/Q311H/N434S | 7.74E+05 | 9.16E−04 | 1.18E−09 | 3.76E+01 |

TABLE 35B

| Protein | FcR Domain Type | FcRn Domain Type | FcgRIIa (131 R)_CD 32a 131 R | | | |
|---|---|---|---|---|---|---|
| ID | D1/D2 | D1/D2 | ka (M − 1 s − 1) | kd (s − 1) | KD (M) | Rmax (RU) |
| 15-01 | L234A/L235A/P329G | | NB | NB | NB | NB |
| 15-02 | L234A/L235A/P329G | | NB | NB | NB | NB |
| 15-03 | L234A/L235A/P329G | M252Y/S254T/T256E | NB | NB | NB | NB |
| 15-04 | L234A/L235A/P329G | M252Y/S254T/T256E | NB | NB | NB | NB |
| 15-05 | L234A/L235A/P329G | M428L/N434S | NB | NB | NB | NB |
| 15-06 | L234A/L235A/P329G | M428L/N434S | NB | NB | NB | NB |
| 15-07 | L234A/L235A/P329G | L309D/Q311H/N434S | NB | NB | NB | NB |
| 15-08 | L234A/L235A/P329G | L309D/Q311H/N434S | NB | NB | NB | NB |
| 15-09 | | | 1.56E+06 | 3.97E−02 | 2.55E−08 | 3.33E+01 |
| 15-10 | L234A/L235A/P329G | | NB | NB | NB | NB |
| 15-11 | | M252Y/S254T/T256E | 7.26E+05 | 1.12E−01 | 1.54E−07 | 2.79E+01 |
| 15-12 | L234A/L235A/P329G | M252Y/S254T/T256E | NB | NB | NB | NB |
| 15-13 | | M428L/N434S | 1.37E+06 | 1.98E−02 | 1.44E−08 | 4.03E+01 |
| 15-14 | L234A/L235A/P329G | M428L/N434S | NB | NB | NB | NB |
| 15-15 | | L309D/Q311H/N434S | 9.86E+05 | 2.31E−02 | 2.34E−08 | 4.57E+01 |
| 15-16 | L234A/L235A/P329G | L309D/Q311H/N434S | NB | NB | NB | NB |
| 15-17 | | | 8.83E+05 | 4.35E−02 | 4.93E−08 | 1.37E+01 |
| 15-18 | L234A/L235A/P329G | | NB | NB | NB | NB |
| 15-19 | | M252Y/S254T/T256E | 7.19E+05 | 1.98E−01 | 2.76E−07 | 1.65E+01 |
| 15-20 | L234A/L235A/P329G | M252Y/S254T/T256E | NB | NB | NB | NB |
| 15-21 | | M428L/N434S | 1.55E+06 | 7.79E−02 | 5.03E−08 | 2.06E+01 |
| 15-22 | L234A/L235A/P329G | M428L/N434S | NB | NB | NB | NB |
| 15-23 | | L309D/Q311H/N434S | 1.66E+06 | 8.06E−02 | 4.86E−08 | 1.98E+01 |
| 15-24 | L234A/L235A/P329G | L309D/Q311H/N434S | NB | NB | NB | NB |
| 15-49 | | | 1.32E+06 | 3.65E−02 | 2.76E−08 | 3.33E+01 |
| 15-50 | | | 2.03E+06 | 7.99E−02 | 3.94E−08 | 1.91E+01 |
| 15-51 | | M252Y/S254T/T256E | NB | NB | NB | NB |
| 15-52 | | M252Y/S254T/T256E | 1.14E+06 | 2.08E−01 | 1.82E−07 | 1.67E+01 |
| 15-53 | | M428L/N434S | NB | NB | NB | NB |
| 15-54 | | M428L/N434S | NB | NB | NB | NB |
| 15-56 | | L309D/Q311H/N434S | 1.13E+06 | 6.80E−02 | 6.00E−08 | 2.08E+01 |

TABLE 35C

| Protein | FcR Domain Type | FcRn Domain Type | FcgRIIb/c_CD32b/c | | | |
|---|---|---|---|---|---|---|
| ID | D1/D2 | D1/D2 | ka (M − 1 s − 1) | kd (s − 1) | KD (M) | Rmax (RU) |
| 15-01 | L234A/L235A/P329G | | NB | NB | NB | NB |
| 15-02 | L234A/L235A/P329G | | NB | NB | NB | NB |
| 15-03 | L234A/L235A/P329G | M252Y/S254T/T256E | NB | NB | NB | NB |
| 15-04 | L234A/L235A/P329G | M252Y/S254T/T256E | NB | NB | NB | NB |
| 15-05 | L234A/L235A/P329G | M428L/N434S | NB | NB | NB | NB |
| 15-06 | L234A/L235A/P329G | M428L/N434S | NB | NB | NB | NB |
| 15-07 | L234A/L235A/P329G | L309D/Q311H/N434S | NB | NB | NB | NB |
| 15-08 | L234A/L235A/P329G | L309D/Q311H/N434S | NB | NB | NB | NB |
| 15-09 | | | 1.75E+06 | 2.87E−01 | 1.64E−07 | 2.27E+01 |
| 15-10 | L234A/L235A/P329G | | NB | NB | NB | NB |
| 15-11 | | M252Y/S254T/T256E | NB | NB | NB | NB |
| 15-12 | L234A/L235A/P329G | M252Y/S254T/T256E | NB | NB | NB | NB |
| 15-13 | | M428L/N434S | 1.63E+06 | 2.16E−01 | 1.32E−07 | 3.42E+01 |
| 15-14 | L234A/L235A/P329G | M428L/N434S | NB | NB | NB | NB |
| 15-15 | | L309D/Q311H/N434S | 1.26E+06 | 1.99E−01 | 1.57E−07 | 3.67E+01 |
| 15-16 | L234A/L235A/P329G | L309D/Q311H/N434S | NB | NB | NB | NB |
| 15-17 | | | NB | NB | NB | NB |
| 15-18 | L234A/L235A/P329G | | NB | NB | NB | NB |
| 15-19 | | M252Y/S254T/T256E | NB | NB | NB | NB |
| 15-20 | L234A/L235A/P329G | M252Y/S254T/T256E | NB | NB | NB | NB |
| 15-21 | | M428L/N434S | 1.55E+06 | 3.46E−01 | 2.23E−07 | 1.62E+01 |
| 15-22 | L234A/L235A/P329G | M428L/N434S | NB | NB | NB | NB |
| 15-23 | | L309D/Q311H/N434S | NB | NB | NB | NB |
| 15-24 | L234A/L235A/P329G | L309D/Q311H/N434S | NB | NB | NB | NB |
| 15-49 | | | 1.65E+06 | 2.89E−01 | 1.75E−07 | 2.27E+01 |
| 15-50 | | | NB | NB | NB | NB |
| 15-51 | | M252Y/S254T/T256E | NB | NB | NB | NB |
| 15-52 | | M252Y/S254T/T256E | NB | NB | NB | NB |
| 15-53 | | M428L/N434S | NB | NB | NB | NB |
| 15-54 | | M428L/N434S | NB | NB | NB | NB |
| 15-56 | | L309D/Q311H/N434S | NB | NB | NB | NB |

TABLE 35D

| Protein | FcR Domain Type | FcRn Domain Type | FcgRIIIa 158 F _ CD 16 a 158 F | | | |
|---|---|---|---|---|---|---|
| ID | D1/D2 | D1/D2 | ka (M − 1 s − 1) | kd (s − 1) | KD (M) | Rmax (RU) |
| 15-01 | L234A/L235A/P329G | | NB | NB | NB | NB |
| 15-02 | L234A/L235A/P329G | | NB | NB | NB | NB |
| 15-03 | L234A/L235A/P329G | M252Y/S254T/T256E | NB | NB | NB | NB |
| 15-04 | L234A/L235A/P329G | M252Y/S254T/T256E | NB | NB | NB | NB |
| 15-05 | L234A/L235A/P329G | M428L/N434S | NB | NB | NB | NB |
| 15-06 | L234A/L235A/P329G | M428L/N434S | NB | NB | NB | NB |
| 15-07 | L234A/L235A/P329G | L309D/Q311H/N434S | NB | NB | NB | NB |
| 15-08 | L234A/L235A/P329G | L309D/Q311H/N434S | NB | NB | NB | NB |
| 15-09 | | | 6.98E+04 | 1.13E−01 | 1.61E−06 | 4.14E+01 |
| 15-10 | L234A/L235A/P329G | | NB | NB | NB | NB |
| 15-11 | | M252Y/S254T/T256E | NB | NB | NB | NB |
| 15-12 | L234A/L235A/P329G | M252Y/S254T/T256E | NB | NB | NB | NB |
| 15-13 | | M428L/N434S | 5.92E+04 | 4.97E−02 | 8.40E−07 | 4.41E+01 |
| 15-14 | L234A/L235A/P329G | M428L/N434S | NB | NB | NB | NB |
| 15-15 | | L309D/Q311H/N434S | 6.04E+04 | 6.92E−02 | 1.15E−06 | 4.81E+01 |
| 15-16 | L234A/L235A/P329G | L309D/Q311H/N434S | NB | NB | NB | NB |
| 15-17 | | | NB | NB | NB | NB |
| 15-18 | L234A/L235A/P329G | | NB | NB | NB | NB |
| 15-19 | | M252Y/S254T/T256E | NB | NB | NB | NB |
| 15-20 | L234A/L235A/P329G | M252Y/S254T/T256E | NB | NB | NB | NB |
| 15-21 | | M428L/N434S | NB | NB | NB | NB |
| 15-22 | L234A/L235A/P329G | M428L/N434S | NB | NB | NB | NB |
| 15-23 | | L309D/Q311H/N434S | NB | NB | NB | NB |
| 15-24 | L234A/L235A/P329G | L309D/Q311H/N434S | NB | NB | NB | NB |
| 15-49 | | | 8.90E+04 | 1.04E−01 | 1.17E−06 | 3.38E+01 |
| 15-50 | | | NB | NB | NB | NB |
| 15-51 | | M252Y/S254T/T256E | NB | NB | NB | NB |
| 15-52 | | M252Y/S254T/T256E | NB | NB | NB | NB |
| 15-53 | | M428L/N434S | NB | NB | NB | NB |
| 15-54 | | M428L/N434S | NB | NB | NB | NB |
| 15-56 | | L309D/Q311H/N434S | NB | NB | NB | NB |

TABLE 35E

| Protein | FcR Domain Type | FcRn Domain Type | FcgRIIb/c_CD32b/c FcgRIIIa 158 V _ CD 16 a 158 V | | | |
|---|---|---|---|---|---|---|
| ID | D1/D2 | D1/D2 | ka (M − 1 s − 1) | kd (s − 1) | KD (M) | Rmax (RU) |
| 15-01 | L234A/L235A/P329G | | NB | NB | NB | NB |
| 15-02 | L234A/L235A/P329G | | NB | NB | NB | NB |
| 15-03 | L234A/L235A/P329G | M252Y/S254T/T256E | NB | NB | NB | NB |
| 15-04 | L234A/L235A/P329G | M252Y/S254T/T256E | NB | NB | NB | NB |
| 15-05 | L234A/L235A/P329G | M428L/N434S | NB | NB | NB | NB |
| 15-06 | L234A/L235A/P329G | M428L/N434S | NB | NB | NB | NB |
| 15-07 | L234A/L235A/P329G | L309D/Q311H/N434S | NB | NB | NB | NB |
| 15-08 | L234A/L235A/P329G | L309D/Q311H/N434S | NB | NB | NB | NB |
| 15-09 | | | 1.05E+05 | 3.33E−02 | 3.16E−07 | 3.79E+01 |
| 15-10 | L234A/L235A/P329G | | NB | NB | NB | NB |
| 15-11 | | M252Y/S254T/T256E | NB | NB | NB | NB |
| 15-12 | L234A/L235A/P329G | M252Y/S254T/T256E | NB | NB | NB | NB |
| 15-13 | | M428L/N434S | 9.51E+04 | 2.02E−02 | 2.13E−07 | 4.58E+01 |
| 15-14 | L234A/L235A/P329G | M428L/N434S | NB | NB | NB | NB |
| 15-15 | | L309D/Q311H/N434S | 8.55E+04 | 2.52E−02 | 2.95E−07 | 5.12E+01 |
| 15-16 | L234A/L235A/P329G | L309D/Q311H/N434S | NB | NB | NB | NB |
| 15-17 | | | NB | NB | NB | NB |
| 15-18 | L234A/L235A/P329G | | NB | NB | NB | NB |
| 15-19 | | M252Y/S254T/T256E | NB | NB | NB | NB |
| 15-20 | L234A/L235A/P329G | M252Y/S254T/T256E | NB | NB | NB | NB |
| 15-21 | | M428L/N434S | 1.78E+05 | 3.90E−02 | 2.19E−07 | 2.00E+01 |
| 15-22 | L234A/L235A/P329G | M428L/N434S | NB | NB | NB | NB |
| 15-23 | | L309D/Q311H/N434S | NB | NB | NB | NB |
| 15-24 | L234A/L235A/P329G | L309D/Q311H/N434S | NB | NB | NB | NB |
| 15-49 | | | 1.70E+05 | 3.62E−02 | 2.13E−07 | 3.40E+01 |
| 15-50 | | | NB | NB | NB | NB |
| 15-51 | | M252Y/S254T/T256E | NB | NB | NB | NB |
| 15-52 | | M252Y/S254T/T256E | NB | NB | NB | NB |
| 15-53 | | M428L/N434S | NB | NB | NB | NB |
| 15-54 | | M428L/N434S | NB | NB | NB | NB |
| 15-56 | | L309D/Q311H/N434S | NB | NB | NB | NB |

### Example 16—SARS-CoV-2 Variant Neutralization Studies

[2103] Tetrahedral antibody constructs 15-15 and 15-16 (ACE2-B13A), 15-23 and 15-24 (ACE2-024), 15-07 and 15-53 (ACE2-ACE2), and 10-61 and 10-65 (ACE2 core dimer as shown in FIG. 43) were evaluated for activity against a range of antibody-resistant variants of SARS-CoV-2 using a pseudovirus neutralization assay (Integral Molecular, Philadelphia, PA). The 10-61 and 10-65 constructs incorporated the 313 affinity enhancing mutations described in Glasgow et al. PNAS 117:28046-28055 (2020)). Each construct was evaluated against eleven SARS-CoV-2 variants and one SARS-CoV-1 strain, and compared side-by-side with the parent antibodies B13A and 024, and biosimilar versions of eight antibodies that have received Emergency Use Authorization (EUA) by the U.S. Food and Drug Administration (FDA) or are in late-stage clinical trials: REGN10897, REGN10933, Bamlanivimab, Etesevimab, AZD1061, AZD 8895, VIR-7841, and CT-P59.

[2104] The SARS-CoV-2 variants tested were D614G B.1 (RVP-702), Californian B.1.427/B.1.429 (RVP-713), Indian B.1.617.2 (RVP-763), South African B.1.351 (RVP-707), South African A B.1.351 (RVP-724), N439K (RVP-703), Brazilian P.1 (RVP-708), Nigerian/European B.1.525 (RVP-723), New York B.1.526 (RVP-726), UK B.1.1.7 (RVP-706, and UK B.1.1.7 with E484K (RVP-717). The SARS-CoV-1 variant tested was Urbani (RVP-801). The Integral Molecular catalog numbers are indicated in parentheses.

[2105] The results are shown in FIGS. 48A-48P. Notably, the tetrahedral antibody constructs HB1515 and HB1516 were effective against all eleven SARS-CoV-2 variants as well as SARS-CoV-1. By contrast, significant viral resistance was observed for all ten antibodies with at least two of the SARS-CoV-2 variants. In addition, HB1515 and HB1516 were at least as potent as all ten of the antibodies tested (with the exception of CT-P59 against the D614G variant).

[2106] Methods: SARS-CoV-2 pseudovirus neutralization assay. The neutralization assay was carried out according to the manufacturers' protocols. In brief, serially diluted antibodies were incubated with pseudotyped SARS-CoV-2-Renilla Luciferase for 1 hr. at 37° C. At least nine concentrations were tested for each antibody. Pseudovirus in culture media without antibody was used as a negative control to determine 100% infectivity. The mixtures were then incubated with 293T-hsACE2 cells at 2.5×10e5 cells/ml in the 96-well plates. Infection took place over approximately 72 hrs. at 37° C. with 5% CO2. The luciferase signal was measured using the Renilla-Glo luciferase assay system (Promega, Cat #E2710) with the luminometer set at 1 ms integration time. The obtained relative luminescence signals (RLU) from the negative control wells were normalized and used to calculate the neutralization percentage for each concentration. These data were processed by Prism 9 (GraphPad) to fit a 4PL curve and calculate the log IC50.

### Example 17—Efficacy of Tetrahedral Antibody HB1516 in the Hamster Covid-19 Model

[2107] A leading animal model for the study of SARS-CoV-2 utilizes Golden Syrian Hamsters to study the pathogenicity and test therapeutics or vaccines. Prior studies using this model have found that SARS-CoV-2 infection of hamsters results in mild to moderate clinical signs (rapid breathing, weight loss, high titers of virus in the upper and lower respiratory tract and histological changes in the lungs) showing similar infectivity and pathology characteristics between hamsters and humans. HB1516 (protein 15-16) was evaluated in a prophylactic version of this model to determine its efficacy in protecting against challenge using the South African variant of SARS-CoV-2 and compared with REGN-CoV-2, a neutralizing antibody cocktail (Regeneron, Tarrytown, N.Y.) consisting of REGN10987 (protein 12-01) and REGN10933 (protein 12-01), which has received an Emergency Use Authorization (EUA) by the U.S. Food and Drug Administration (FDA) and previously demonstrated efficacy in the hamsters (Baum et al, Science 370, 1110-1115 (2020)).

[2108] Materials. The South African variant of SARS-CoV-2 virus used for infection was sourced from BEI Resources, American Type Culture Collection (Manassas, VA): Catalog No. NR-54974 (hCoV-19/South Africa/KRISP-K005325/2020). This SARS-CoV-2 variant has the following amino acid mutations in its spike (S) protein with reference to the sequence of the Wuhan-1 isolate (NCBI Reference Sequence: NC_045512.2): L18F, D80A, D215A, L242/A243/L244 deletion, K417N, E484K N501Y, D614G, A701V. The biosimilar versions of REGN10987 and REGN10933 used in this study were produced at Lakepharma Inc. (Belmont, CA).

[2109] Methods. The study was conducted at BIOQUAL, Inc. (Rockville, MD). A total of 24 male golden hamsters 6-8 weeks old were assigned to four groups (n=6). Animals were treated with the appropriate material for their group on study day minus one (−1) via the intraperitoneal (IP) route. Test articles were prepared in Dulbecco's Phosphate-Buffered Saline (ATCC No. 30-2020) and administered at the following concentrations: HB1516 (25 mg/kg), REGN10933 (25 mg/kg), and REGN-CoV-2 (25 mg/kg each of REGN10987 and REGN10933).

[2110] On study day 0, animals were bled pre-challenge, followed by intranasal challenge with the South Africa SARS-CoV-2 strain. Animals were observed twice daily in the post-challenge phase and their weights were collected daily.

[2111] Results. As shown in FIG. 49, the PBS negative control group lost weight steadily following infection and by day 7 had lost approximately 18% of their starting weight. The HB1516 treated group maintained their weight throughout the study and by day 7 had gained approximately 3% of their starting weight (HB1516 vs. PBS control: p value <0.0001), comparable to results for the REGN-CoV-2 treated group (HB1516 vs. REGN-CoV: p value 0.9019). By contrast, the REGN10933 treated group had lost about 7% of their weight through day 5.

### Example 18—Tetrahedral Antibodies Comprising Fab Domains of Two Distinct Binding Specificities for SARS-CoV-2 Spike Protein

[2112] To provide proof-of-principle demonstrating tetrahedral antibodies comprising two distinct types of Fab domain that specifically bind two different targets, two series of constructs were generated with the predicted structure shown in Panel C of FIG. 32, according to Table 36, then evaluated for their structural and functional bispecificity. The first series of constructs employed VH and VL regions from REGN10987 (SEQ ID NOs: 421-422) and REGN10933 (SEQ ID NOs: 423-424); the second series of constructs employed VH and VL regions from B13A (SEQ ID NOs: 463-464) and 024A (SEQ ID NOs: 467-468) (Tables 36 and 37).

[2113] To optimize correct VH/VL pairing and to minimize VH/VL mispairing, V region exchange was combined with electrostatic steering (Table 38). Three sets of electrostatically matched mutations were employed. In each series of constructs V region exchange was evaluated in both orientations, e.g., REGN10987/REGN10933 and REGN10933/REGN10987. In each orientation the V regions of the D5/D6 domains were exchanged. Heterodimerization of the H1 and H2 chains was achieved using the Knob-into-Hole approach (knob: T366W/S354C, hole: T366/L368A/Y407V/Y349C). To further facilitate purification of the correctly paired product by Protein A chromatography, either of the H1 or the H2 chain incorporated the H435R/Y436F substitution (Table 37).

[2114] The constructs were evaluated for structural bispecificity by intact mass spectrometry. Following removal of N-glycan and O-glycan using Protein Deglycosylation Mix II (NEB, Ipswich, MA), samples were analyzed under non-reducing, denaturing conditions by LS/MS on a Maxis II UHR QTOF instrument following size-exclusion chromatography (Bruker, Billerica, MA). One to five ug of each sample was injected at a flowrate of 20 uL in a mobile phase consisting of a 10 min gradient of water with 180 mM ammonium acetate at room temperature. A full scan MS acquisition method was used with a mass resolution of 10,000.

[2115] Following deconvolution, the intensity of the signal was determined for the correctly VH/VL paired tetrahedral antibody (L1L2H1H2) and the two mispaired side-products (L1L1H1H2, L2L2H1H2). Results were obtained for 16 of the constructs (FIG. 50A-50C). No significant mispairing was detected for the H1/H2 chains. The percentage of the main product and side products was calculated and normalized to the total yield of the correct and incorrect products (Table 39). The yield of the correctly paired VH/VL construct (L1L2H1H2) ranged from 98.0 to 99.7%; the yield of the correctly paired VH/VL for four of the constructs was greater than 99.5%.

TABLE 36

| Protein ID | L1 Chain | H1 Chain | L2 Chain | H2 Chain |
|---|---|---|---|---|
| 17-01 | SEQ ID NO: 576 | SEQ ID NO: 556 | SEQ ID NO: 577 | SEQ ID NO: 557 |
| 17-02 | SEQ ID NO: 578 | SEQ ID NO: 558 | SEQ ID NO: 579 | SEQ ID NO: 559 |
| 17-03 | SEQ ID NO: 578 | SEQ ID NO: 558 | SEQ ID NO: 580 | SEQ ID NO: 560 |
| 17-04 | SEQ ID NO: 581 | SEQ ID NO: 561 | SEQ ID NO: 582 | SEQ ID NO: 562 |
| 17-05 | SEQ ID NO: 583 | SEQ ID NO: 563 | SEQ ID NO: 584 | SEQ ID NO: 564 |
| 17-06 | SEQ ID NO: 583 | SEQ ID NO: 563 | SEQ ID NO: 585 | SEQ ID NO: 565 |
| 17-07 | SEQ ID NO: 586 | SEQ ID NO: 556 | SEQ ID NO: 577 | SEQ ID NO: 557 |
| 17-08 | SEQ ID NO: 587 | SEQ ID NO: 558 | SEQ ID NO: 579 | SEQ ID NO: 559 |
| 17-09 | SEQ ID NO: 587 | SEQ ID NO: 558 | SEQ ID NO: 580 | SEQ ID NO: 560 |
| 17-10 | SEQ ID NO: 581 | SEQ ID NO: 561 | SEQ ID NO: 588 | SEQ ID NO: 562 |
| 17-11 | SEQ ID NO: 583 | SEQ ID NO: 563 | SEQ ID NO: 589 | SEQ ID NO: 564 |
| 17-12 | SEQ ID NO: 583 | SEQ ID NO: 563 | SEQ ID NO: 590 | SEQ ID NO: 565 |
| 17-13 | SEQ ID NO: 576 | SEQ ID NO: 566 | SEQ ID NO: 577 | SEQ ID NO: 567 |
| 17-14 | SEQ ID NO: 578 | SEQ ID NO: 568 | SEQ ID NO: 579 | SEQ ID NO: 569 |
| 17-15 | SEQ ID NO: 578 | SEQ ID NO: 568 | SEQ ID NO: 580 | SEQ ID NO: 570 |
| 17-16 | SEQ ID NO: 581 | SEQ ID NO: 571 | SEQ ID NO: 582 | SEQ ID NO: 572 |
| 17-17 | SEQ ID NO: 583 | SEQ ID NO: 573 | SEQ ID NO: 584 | SEQ ID NO: 574 |
| 17-18 | SEQ ID NO: 583 | SEQ ID NO: 573 | SEQ ID NO: 585 | SEQ ID NO: 575 |
| 17-19 | SEQ ID NO: 586 | SEQ ID NO: 566 | SEQ ID NO: 577 | SEQ ID NO: 567 |
| 17-20 | SEQ ID NO: 587 | SEQ ID NO: 568 | SEQ ID NO: 579 | SEQ ID NO: 569 |
| 17-21 | SEQ ID NO: 587 | SEQ ID NO: 568 | SEQ ID NO: 580 | SEQ ID NO: 570 |
| 17-22 | SEQ ID NO: 581 | SEQ ID NO: 571 | SEQ ID NO: 588 | SEQ ID NO: 572 |
| 17-23 | SEQ ID NO: 583 | SEQ ID NO: 573 | SEQ ID NO: 589 | SEQ ID NO: 574 |
| 17-24 | SEQ ID NO: 583 | SEQ ID NO: 573 | SEQ ID NO: 590 | SEQ ID NO: 575 |
| 17-25 | SEQ ID NO: 631 | SEQ ID NO: 591 | SEQ ID NO: 632 | SEQ ID NO: 592 |
| 17-26 | SEQ ID NO: 633 | SEQ ID NO: 593 | SEQ ID NO: 634 | SEQ ID NO: 594 |
| 17-27 | SEQ ID NO: 633 | SEQ ID NO: 593 | SEQ ID NO: 635 | SEQ ID NO: 595 |
| 17-28 | SEQ ID NO: 631 | SEQ ID NO: 596 | SEQ ID NO: 632 | SEQ ID NO: 597 |
| 17-29 | SEQ ID NO: 633 | SEQ ID NO: 598 | SEQ ID NO: 634 | SEQ ID NO: 599 |
| 17-30 | SEQ ID NO: 633 | SEQ ID NO: 598 | SEQ ID NO: 635 | SEQ ID NO: 600 |
| 17-31 | SEQ ID NO: 636 | SEQ ID NO: 601 | SEQ ID NO: 637 | SEQ ID NO: 602 |
| 17-32 | SEQ ID NO: 638 | SEQ ID NO: 603 | SEQ ID NO: 639 | SEQ ID NO: 604 |
| 17-33 | SEQ ID NO: 638 | SEQ ID NO: 603 | SEQ ID NO: 640 | SEQ ID NO: 605 |
| 17-34 | SEQ ID NO: 636 | SEQ ID NO: 606 | SEQ ID NO: 637 | SEQ ID NO: 607 |
| 17-35 | SEQ ID NO: 638 | SEQ ID NO: 608 | SEQ ID NO: 639 | SEQ ID NO: 609 |
| 17-36 | SEQ ID NO: 638 | SEQ ID NO: 608 | SEQ ID NO: 640 | SEQ ID NO: 610 |
| 17-37 | SEQ ID NO: 631 | SEQ ID NO: 611 | SEQ ID NO: 632 | SEQ ID NO: 612 |
| 17-38 | SEQ ID NO: 633 | SEQ ID NO: 613 | SEQ ID NO: 634 | SEQ ID NO: 614 |
| 17-39 | SEQ ID NO: 633 | SEQ ID NO: 613 | SEQ ID NO: 635 | SEQ ID NO: 615 |
| 17-40 | SEQ ID NO: 631 | SEQ ID NO: 616 | SEQ ID NO: 632 | SEQ ID NO: 617 |
| 17-41 | SEQ ID NO: 633 | SEQ ID NO: 618 | SEQ ID NO: 634 | SEQ ID NO: 619 |
| 17-42 | SEQ ID NO: 633 | SEQ ID NO: 618 | SEQ ID NO: 635 | SEQ ID NO: 620 |
| 17-43 | SEQ ID NO: 636 | SEQ ID NO: 621 | SEQ ID NO: 637 | SEQ ID NO: 622 |
| 17-44 | SEQ ID NO: 638 | SEQ ID NO: 623 | SEQ ID NO: 639 | SEQ ID NO: 624 |
| 17-45 | SEQ ID NO: 638 | SEQ ID NO: 623 | SEQ ID NO: 640 | SEQ ID NO: 625 |
| 17-46 | SEQ ID NO: 636 | SEQ ID NO: 626 | SEQ ID NO: 637 | SEQ ID NO: 627 |
| 17-47 | SEQ ID NO: 638 | SEQ ID NO: 628 | SEQ ID NO: 639 | SEQ ID NO: 629 |
| 17-48 | SEQ ID NO: 638 | SEQ ID NO: 628 | SEQ ID NO: 640 | SEQ ID NO: 630 |

TABLE 37

| | D1-Fc | | | | | | | D2-Fc | | |
|---|---|---|---|---|---|---|---|---|---|---|
| Protein ID | FcRn | H1 | H2 | D5-Fab | D4-Fab | D3-Fab | D6-Fab | FcRn | H1 | H2 |
| 17-01 | DHS | RF | HY | REGN10933 | REGN10987 | REGN10987 | REGN10933 | DHS | RF | HY |
| 17-02 | DHS | RF | HY | REGN10933 | REGN10987 | REGN10987 | REGN10933 | DHS | RF | HY |
| 17-03 | DHS | RF | HY | REGN10933 | REGN10987 | REGN10987 | REGN10933 | DHS | RF | HY |
| 17-04 | DHS | RF | HY | REGN10987 | REGN10933 | REGN10933 | REGN10987 | DHS | RF | HY |
| 17-05 | DHS | RF | HY | REGN10987 | REGN10933 | REGN10933 | REGN10987 | DHS | RF | HY |
| 17-06 | DHS | RF | HY | REGN10987 | REGN10933 | REGN10933 | REGN10987 | DHS | RF | HY |
| 17-07 | DHS | RF | HY | REGN10933 | REGN10987 | REGN10987 | REGN10933 | DHS | RF | HY |
| 17-08 | DHS | RF | HY | REGN10933 | REGN10987 | REGN10987 | REGN10933 | DHS | RF | HY |
| 17-09 | DHS | RF | HY | REGN10933 | REGN10987 | REGN10987 | REGN10933 | DHS | RF | HY |
| 17-10 | DHS | RF | HY | REGN10987 | REGN10933 | REGN10933 | REGN10987 | DHS | RF | HY |
| 17-11 | DHS | RF | HY | REGN10987 | REGN10933 | REGN10933 | REGN10987 | DHS | RF | HY |
| 17-12 | DHS | RF | HY | REGN10987 | REGN10933 | REGN10933 | REGN10987 | DHS | RF | HY |
| 17-13 | DHS | HY | RF | REGN10933 | REGN10987 | REGN10987 | REGN10933 | DHS | HY | RF |
| 17-14 | DHS | HY | RF | REGN10933 | REGN10987 | REGN10987 | REGN10933 | DHS | HY | RF |
| 17-15 | DHS | HY | RF | REGN10933 | REGN10987 | REGN10987 | REGN10933 | DHS | HY | RF |
| 17-16 | DHS | HY | RF | REGN10987 | REGN10933 | REGN10933 | REGN10987 | DHS | HY | RF |
| 17-17 | DHS | HY | RF | REGN10987 | REGN10933 | REGN10933 | REGN10987 | DHS | HY | RF |
| 17-18 | DHS | HY | RF | REGN10987 | REGN10933 | REGN10933 | REGN10987 | DHS | HY | RF |
| 17-19 | DHS | HY | RF | REGN10933 | REGN10987 | REGN10987 | REGN10933 | DHS | HY | RF |
| 17-20 | DHS | HY | RF | REGN10933 | REGN10987 | REGN10987 | REGN10933 | DHS | HY | RF |
| 17-21 | DHS | HY | RF | REGN10933 | REGN10987 | REGN10987 | REGN10933 | DHS | HY | RF |
| 17-22 | DHS | HY | RF | REGN10987 | REGN10933 | REGN10933 | REGN10987 | DHS | HY | RF |
| 17-23 | DHS | HY | RF | REGN10987 | REGN10933 | REGN10933 | REGN10987 | DHS | HY | RF |
| 17-24 | DHS | HY | RF | REGN10987 | REGN10933 | REGN10933 | REGN10987 | DHS | HY | RF |
| 17-25 | wt | RF | HY | O24A | B13A | B13A | O24A | wt | RF | HY |
| 17-26 | wt | RF | HY | O24A | B13A | B13A | O24A | wt | RF | HY |
| 17-27 | wt | RF | HY | O24A | B13A | B13A | O24A | wt | RF | HY |
| 17-28 | DHS | RF | HY | O24A | B13A | B13A | O24A | DHS | RF | HY |
| 17-29 | DHS | RF | HY | O24A | B13A | B13A | O24A | DHS | RF | HY |
| 17-30 | DHS | RF | HY | O24A | B13A | B13A | O24A | DHS | RF | HY |
| 17-31 | wt | RF | HY | B13A | O24A | O24A | B13A | wt | RF | HY |
| 17-32 | wt | RF | HY | B13A | O24A | O24A | B13A | wt | RF | HY |
| 17-33 | wt | RF | HY | B13A | O24A | O24A | B13A | wt | RF | HY |
| 17-34 | DHS | RF | HY | B13A | O24A | O24A | B13A | DHS | RF | HY |
| 17-35 | DHS | RF | HY | B13A | O24A | O24A | B13A | DHS | RF | HY |
| 17-36 | DHS | RF | HY | B13A | O24A | O24A | B13A | DHS | RF | HY |
| 17-37 | wt | HY | RF | O24A | B13A | B13A | O24A | wt | HY | RF |
| 17-38 | wt | HY | RF | O24A | B13A | B13A | O24A | wt | HY | RF |
| 17-39 | wt | HY | RF | O24A | B13A | B13A | O24A | wt | HY | RF |
| 17-40 | DHS | HY | RF | O24A | B13A | B13A | O24A | DHS | HY | RF |
| 17-41 | DHS | HY | RF | O24A | B13A | B13A | O24A | DHS | HY | RF |
| 17-42 | DHS | HY | RF | O24A | B13A | B13A | O24A | DHS | HY | RF |
| 17-43 | wt | HY | RF | B13A | O24A | O24A | B13A | wt | HY | RF |
| 17-44 | wt | HY | RF | B13A | O24A | O24A | B13A | wt | HY | RF |
| 17-45 | wt | HY | RF | B13A | O24A | O24A | B13A | wt | HY | RF |
| 17-46 | DHS | HY | RF | B13A | O24A | O24A | B13A | DHS | HY | RF |
| 17-47 | DHS | HY | RF | B13A | O24A | O24A | B13A | DHS | HY | RF |
| 17-48 | DHS | HY | RF | B13A | O24A | O24A | B13A | DHS | HY | RF |

TABLE 38

| | L1 Chain | | H1 Chain | | L2 Chain | | H2 Chain | |
|---|---|---|---|---|---|---|---|---|
| | V region | Amino acid | V region | Amino acid | V region | Amino acid | V region | Amino acid |
| Protein ID | type | Substitutions | Type | Substitutions | Type | Substitutions | Type | Substitutions |
| 17-01 | VL-CL | E123R/Q124K | VH-CH1 | K147E/K213E | VH-CK | | VK-CH1 | |
| 17-02 | VL-CL | Q38E/V133K | VH-CH1 | Q39K/S183E | VH-CK | Q39K/V133E | VK-CH1 | Q38E/S183K |
| 17-03 | VL-CL | Q38E/V133K | VH-CH1 | Q39K/S183E | VH-CK | Q39E/V133E | VK-CH1 | Q38K/S183K |
| 17-04 | VK-CK | E123R/Q124K | VH-CH1 | K147E/K213E | VH-CL | | VL-CH1 | |
| 17-05 | VK-CK | Q38E/V133K | VH-CH1 | Q39K/S183E | VH-CL | Q39K/V133E | VL-CH1 | Q38E/S183K |
| 17-06 | VK-CK | Q38E/V133K | VH-CH1 | Q39K/S183E | VH-CL | Q39E/V133E | VL-CH1 | Q38K/S183K |
| 17-07 | VL-CK | E123R/Q124K | VH-CH1 | K147E/K213E | VH-CK | | VK-CH1 | |
| 17-08 | VL-CK | Q38E/V133K | VH-CH1 | Q39K/S183E | VH-CK | Q39K/V133E | VK-CH1 | Q38E/S183K |
| 17-09 | VL-CK | Q38E/V133K | VH-CH1 | Q39K/S183E | VH-CK | Q39E/V133E | VK-CH1 | Q38K/S183K |
| 17-10 | VK-CK | E123R/Q124K | VH-CH1 | K147E/K213E | VH-CK | | VL-CH1 | |
| 17-11 | VK-CK | Q38E/V133K | VH-CH1 | Q39K/S183E | VH-CK | Q39K/V133E | VL-CH1 | Q38E/S183K |
| 17-12 | VK-CK | Q38E/V133K | VH-CH1 | Q39K/S183E | VH-CK | Q39E/V133E | VL-CH1 | Q38K/S183K |
| 17-13 | VL-CL | E123R/Q124K | VH-CH1 | K147E/K213E | VH-CK | | VK-CH1 | |
| 17-14 | VL-CL | Q38E/V133K | VH-CH1 | Q39K/S183E | VH-CK | Q39K/V133E | VK-CH1 | Q38E/S183K |
| 17-15 | VL-CL | Q38E/V133K | VH-CH1 | Q39K/S183E | VH-CK | Q39E/V133E | VK-CH1 | Q38K/S183K |
| 17-16 | VK-CK | E123R/Q124K | VH-CH1 | K147E/K213E | VH-CL | | VL-CH1 | |
| 17-17 | VK-CK | Q38E/V133K | VH-CH1 | Q39K/S183E | VH-CL | Q39K/V133E | VL-CH1 | Q38E/S183K |
| 17-18 | VK-CK | Q38E/V133K | VH-CH1 | Q39K/S183E | VH-CL | Q39E/V133E | VL-CH1 | Q38K/S183K |
| 17-19 | VL-CK | E123R/Q124K | VH-CH1 | K147E/K213E | VH-CK | | VK-CH1 | |
| 17-20 | VL-CK | Q38E/V133K | VH-CH1 | Q39K/S183E | VH-CK | Q39K/V133E | VK-CH1 | Q38E/S183K |
| 17-21 | VL-CK | Q38E/V133K | VH-CH1 | Q39K/S183E | VH-CK | Q39E/V133E | VK-CH1 | Q38K/S183K |
| 17-22 | VK-CK | E123R/Q124K | VH-CH1 | K147E/K213E | VH-CK | | VL-CH1 | |
| 17-23 | VK-CK | Q38E/V133K | VH-CH1 | Q39K/S183E | VH-CK | Q39K/V133E | VL-CH1 | Q38E/S183K |
| 17-24 | VK-CK | Q38E/V133K | VH-CH1 | Q39K/S183E | VH-CK | Q39E/V133E | VL-CH1 | Q38K/S183K |
| 17-25 | VK-CK | E123R/Q124K | VH-CH1 | K147E/K213E | VH-CK | | VK-CH1 | |
| 17-26 | VK-CK | Q38E/V133K | VH-CH1 | Q39K/S183E | VH-CK | Q39K/V133E | VK-CH1 | Q38E/S183K |
| 17-27 | VK-CK | Q38E/V133K | VH-CH1 | Q39K/S183E | VH-CK | Q39E/V133E | VK-CH1 | Q38K/S183K |
| 17-28 | VK-CK | E123R/Q124K | VH-CH1 | K147E/K213E | VH-CK | | VK-CH1 | |
| 17-29 | VK-CK | Q38E/V133K | VH-CH1 | Q39K/S183E | VH-CK | Q39K/V133E | VK-CH1 | Q38E/S183K |
| 17-30 | VK-CK | Q38E/V133K | VH-CH1 | Q39K/S183E | VH-CK | Q39E/V133E | VK-CH1 | Q38K/S183K |
| 17-31 | VK-CK | E123R/Q124K | VH-CH1 | K147E/K213E | VH-CK | | VK-CH1 | |
| 17-32 | VK-CK | Q38E/V133K | VH-CH1 | Q39K/S183E | VH-CK | Q39K/V133E | VK-CH1 | Q38E/S183K |
| 17-33 | VK-CK | Q38E/V133K | VH-CH1 | Q39K/S183E | VH-CK | Q39E/V133E | VK-CH1 | Q38K/S183K |
| 17-34 | VK-CK | E123R/Q124K | VH-CH1 | K147E/K213E | VH-CK | | VK-CH1 | |
| 17-35 | VK-CK | Q38E/V133K | VH-CH1 | Q39K/S183E | VH-CK | Q39K/V133E | VK-CH1 | Q38E/S183K |
| 17-36 | VK-CK | Q38E/V133K | VH-CH1 | Q39K/S183E | VH-CK | Q39E/V133E | VK-CH1 | Q38K/S183K |
| 17-37 | VK-CK | E123R/Q124K | VH-CH1 | K147E/K213E | VH-CK | | VK-CH1 | |
| 17-38 | VK-CK | Q38E/V133K | VH-CH1 | Q39K/S183E | VH-CK | Q39K/V133E | VK-CH1 | Q38E/S183K |
| 17-39 | VK-CK | Q38E/V133K | VH-CH1 | Q39K/S183E | VH-CK | Q39E/V133E | VK-CH1 | Q38K/S183K |
| 17-40 | VK-CK | E123R/Q124K | VH-CH1 | K147E/K213E | VH-CK | | VK-CH1 | |
| 17-41 | VK-CK | Q38E/V133K | VH-CH1 | Q39K/S183E | VH-CK | Q39K/V133E | VK-CH1 | Q38E/S183K |
| 17-42 | VK-CK | Q38E/V133K | VH-CH1 | Q39K/S183E | VH-CK | Q39E/V133E | VK-CH1 | Q38K/S183K |
| 17-43 | VK-CK | E123R/Q124K | VH-CH1 | K147E/K213E | VH-CK | | VK-CH1 | |
| 17-44 | VK-CK | Q38E/V133K | VH-CH1 | Q39K/S183E | VH-CK | Q39K/V133E | VK-CH1 | Q38E/S183K |
| 17-45 | VK-CK | Q38E/V133K | VH-CH1 | Q39K/S183E | VH-CK | Q39E/V133E | VK-CH1 | Q38K/S183K |
| 17-46 | VK-CK | E123R/Q124K | VH-CH1 | K147E/K213E | VH-CK | | VK-CH1 | |
| 17-47 | VK-CK | Q38E/V133K | VH-CH1 | Q39K/S183E | VH-CK | Q39K/V133E | VK-CH1 | Q38E/S183K |
| 17-48 | VK-CK | Q38E/V133K | VH-CH1 | Q39K/S183E | VH-CK | Q39E/V133E | VK-CH1 | Q38K/S183K |

TABLE 39

| Protein | L1L1H1H2 | L1L2H1H2 | L2L2H1H2 | | Theoretical Average Intact Mass, Da | | |
|---|---|---|---|---|---|---|---|
| ID | (%) | (%) | (%) | Delta, Da | L1L1H1H2 | L1L2H1H2 | L2L2H1H2 |
| 17-01 | 0.2 | 99.7 | 0.1 | 2027 | 160023 | 162050 | 164077 |
| 17-02 | 0.4 | 99.6 | 0.0 | 2053 | 160113 | 162166 | 164220 |
| 17-03 | 0.8 | 99.2 | 0.0 | 2054 | 160112 | 162166 | 164221 |
| 17-04 | 0.0 | 98.0 | 2.0 | 1021 | 161042 | 162063 | 163084 |
| 17-07 | 0.0 | 99.6 | 0.4 | 1498 | 161082 | 162580 | 164077 |
| 17-08 | 0.3 | 98.6 | 1.1 | 1525 | 161170 | 162695 | 163220 |
| 17-09 | 0.9 | 98.4 | 0.7 | 1526 | 161169 | 162695 | 164221 |
| 17-10 | 0.3 | 98.6 | 1.1 | 1481 | 161042 | 162523 | 164003 |
| 17-11 | 0.3 | 99.1 | 0.5 | 1535 | 161130 | 162665 | 164200 |
| 17-12 | 0.3 | 98.9 | 0.8 | 1536 | 161129 | 162655 | 164200 |
| 17-19 | 0.5 | 99.2 | 0.3 | 1498 | 161082 | 162580 | 164077 |
| 17-20 | 0.2 | 99.3 | 0.5 | 1525 | 161170 | 162695 | 164220 |
| 17-21 | 0.3 | 99.5 | 0.2 | 1526 | 161169 | 162695 | 164221 |
| 17-22 | 0.4 | 99.0 | 0.6 | 1481 | 161042 | 162523 | 164003 |
| 17-23 | 0.3 | 98.5 | 1.2 | 1535 | 161130 | 162665 | 164200 |
| 17-24 | 0.4 | 98.9 | 0.7 | 1536 | 161129 | 162665 | 164200 |

### Example 19—Neutralization of SARS-CoV-2 Pseudovirus by Bispecific Tetrahedral Antibodies

[2116] The tetrahedral antibody constructs of Example 18 were evaluated for their functional bispecificity using a SARS-CoV-2 pseudovirus neutralization assay (Integral Molecular, Philadelphia, PA) as described in Example 18. Each construct was evaluated against two SARS-CoV-2 variants: an N439L variant highly resistant to REGN10987 (genotype N439K, D614G; Catalog #RVP-703,) and a South African A3 B.1.351 variant highly resistant to REGN10933 (genotype L18F, D80A, D215G, AL242/L243/L244, R246I, K417N, N501Y, E484K, A701V; Catalog #RVP-724). The activity each of the bispecific constructs was directly compared with the parent antibodies REGN10987 and REN10933 as well as REGN-CoV-2, a 1:1 cocktail of REGN10987 and REGN10933. The biosimilar versions of REGN10987, REGN10933 and REGN-CoV-2 used in this study were produced at Lakepharma Inc. (Belmont, CA).

[2117] Results were obtained for 18 of the constructs (FIG. 51A-51C, Table 40). With respect to the control constructs, REGN10987 was approximately 1,000-fold less potent than REGN10933 against the N439K variant, and REGN10933 was approximately 3,000-fold less potent than REGN10987 against the South African variant. The REGN-CoV-2 cocktail was approximately 1.5-fold more potent than REGN10933 against the N439 variant and approximately equal in potency to REGB10987 against the South African variant. All 18 of the tetravalent, bispecific tetrahedral antibody constructs potently neutralized both the N439K and South African variants; 15 of the 18 bispecific constructs were at least as potent as the REGN-CoV-2 cocktail against the N43K variant, and 14 of the 18 bispecific constructs were approximately two- to three-fold more potent than the REGN-CoV-2 cocktail against the South African variant.

TABLE 40

| | EC50 (pM) Neutralization | | | | | |
|---|---|---|---|---|---|---|
| | | South Africa | | | | |
| Protein ID | N439K | B.1.351 | D5-Fab | D4-Fab | D3-Fab | D6-Fab |
| REGN10987 | 2,256.46 | 2.48 | | | | |
| REGN10987 | 2,216.82 | 2.37 | | | | |
| REGN10933 | 2.09 | 7,776.27 | | | | |
| REGN10933 | 1.80 | 8,548.99 | | | | |
| REGN-CoV2 | 1.18 | 1.87 | | | | |
| REGN-CoV2 | 1.44 | 2.91 | | | | |
| 17-01 | 1.10 | 0.82 | REGN10933 | REGN10987 | REGN10987 | REGN10933 |
| 17-02 | 1.08 | 1.19 | REGN10933 | REGN10987 | REGN10987 | REGN10933 |
| 17-03 | 1.25 | 1.29 | REGN10933 | REGN10987 | REGN10987 | REGN10933 |
| 17-04 | 0.87 | 1.25 | REGN10987 | REGN10933 | REGN10933 | REGN10987 |
| 17-05 | 1.88 | 3.88 | REGN10987 | REGN10933 | REGN10933 | REGN10987 |
| 17-06 | 2.51 | 5.81 | REGN10987 | REGN10933 | REGN10933 | REGN10987 |
| 17-07 | 0.92 | 0.84 | REGN10933 | REGN10987 | REGN10987 | REGN10933 |
| 17-08 | 1.03 | 0.97 | REGN10933 | REGN10987 | REGN10987 | REGN10933 |
| 17-09 | 1.16 | 1.59 | REGN10933 | REGN10987 | REGN10987 | REGN10933 |
| 17-10 | 0.96 | 0.75 | REGN10987 | REGN10933 | REGN10933 | REGN10987 |
| 17-11 | 0.92 | 0.90 | REGN10987 | REGN10933 | REGN10933 | REGN10987 |
| 17-12 | 2.22 | 2.53 | REGN10987 | REGN10933 | REGN10933 | REGN10987 |
| 17-19 | 1.11 | 0.86 | REGN10933 | REGN10987 | REGN10987 | REGN10933 |
| 17-20 | 1.43 | 0.98 | REGN10933 | REGN10987 | REGN10987 | REGN10933 |
| 17-21 | 1.07 | 1.24 | REGN10933 | REGN10987 | REGN10987 | REGN10933 |
| 17-22 | 0.94 | 0.90 | REGN10987 | REGN10933 | REGN10933 | REGN10987 |
| 17-23 | 0.88 | 0.98 | REGN10987 | REGN10933 | REGN10933 | REGN10987 |
| 17-24 | 1.11 | 0.96 | REGN10987 | REGN10933 | REGN10933 | REGN10987 |

### Example 20—Tetravalent, Bispecific Tetrahedral Antibodies Comprising Two Distinct Fabs that Specifically Bind CD38, BCMA, CD16 or CD3

[2118] The exceptional activity of tetravalent, bispecific tetrahedral antibodies against SARS-CoV-2 suggests their broad applicability in other fields such as cancer in which there is intense interest among investigators in the potential of multispecific targeting agents. Accordingly, three series of constructs were generated with the predicted structures shown in panel D of FIG. 31, panel C of FIG. 32, and panel D of FIG. 34, then evaluated for their bispecificity.

[2119] The first series of constructs employed VH and VL regions from daratumumab (Da), an FDA-approved anti-CD38 antibody used to target and treat multiple myeloma (SEQ ID Nos 641, 686), HA9, an anti-CD16 antibody that specifically targets and engages Natural Killer (NK) cells (SEQ ID Nos 648, 688), and SP34, an anti-CD3 antibody that specifically targets and engages T cells (SEQ ID Nos 657, 697). The second series of constructs additionally employed VH and VL regions from 4C8, an anti-BCMA antibody that targets myeloma cells and certain other cell types (SEQ ID Nos 663, 700). The third series of constructs additionally employed VH and VL regions from B34, an anti-BCMA antibody that targets myeloma cells and certain other cell types (SEQ ID Nos 676, 703) (Tables 41, 42, 43).

[2120] To optimize correct VH/VL pairing and to minimize VH/VL mispairing, V region exchange was combined with electrostatic steering as described in Example 18 (Table 44). Additionally, to further facilitate purification of the correctly paired product by Protein A chromatography, in some constructs, particularly those having the predicted structures shown in FIG. 31, Panel D and FIG. 32 Panel C, the H1 chain incorporated the H435R/Y436F substitution while the H2 chain had the H435/Y436 wild-type sequence. In other constructs, particularly those having the predicted structure shown in FIG. 34, Panel D, the H1 and H2 chains incorporated the H435R/Y436F substitution while the Fc chain had the H435/Y436 wild-type sequence (Table 42).

[2121] The constructs were evaluated for structural bispecificity by intact mass spectrometry, following removal of N-glycan and O-glycan, as described in Example 18. Results were obtained for 18 of the constructs (Table 45). No significant mispairing was detected for the H1/H2 chains. The percentage of the main product and side products was calculated and normalized to the total yield of the correct and incorrect products (Table 45). The yield of the correctly paired VH/VL construct (L1L2H1H2) ranged from 94.6 to 98.2% when daratumumab was combined with HA9, 94.3 to 97.7% when 4C8 was combined with HA9, and 96.8 to 99.5% when 4C8 was combined with daratumumab. For constructs 18-30, 18-31 and 18-32, two bispecific products were detected by LC/MS as expected for the predicted structure shown in FIG. 34, Panel D, and consistent with the denaturing conditions of the LC/MS method that was employed. The first structure corresponds to the D2/D4/D6 portion of the tetrahedral antibody; the second structure corresponds to the D1/D3 portion of the tetrahedral antibody. The yield of the correctly paired VH/VL construct contained within the D2/D4/D6 portion (L1L2H1H2) ranged from 97.1 to 99.5%; the yield of the correctly paired VH/VL construct contained within the D1/D3 portion (L1H1Fc) ranged from 99.4 to 99.8%.

TABLE 41

| Protein | | | | | |
|---|---|---|---|---|---|
| ID | L1 Chain | H1 Chain | L2 Chain | H2 Chain | Fc Chain |
| 18-01 | SEQ ID NO: 686 | SEQ ID NO: 641 | | | |
| 18-02 | SEQ ID NO: 686 | SEQ ID NO: 642 | | | |
| 18-03 | SEQ ID NO: 686 | SEQ ID NO: 643 | SEQ ID NO: 686 | SEQ ID NO: 644 | |
| 18-04 | SEQ ID NO: 686 | SEQ ID NO: 645 | SEQ ID NO: 686 | SEQ ID NO: 646 | |
| 18-05 | SEQ ID NO: 687 | SEQ ID NO: 647 | SEQ ID NO: 688 | SEQ ID NO: 648 | |
| 18-06 | SEQ ID NO: 689 | SEQ ID NO: 649 | SEQ ID NO: 690 | SEQ ID NO: 650 | |
| 18-07 | SEQ ID NO: 689 | SEQ ID NO: 649 | SEQ ID NO: 691 | SEQ ID NO: 651 | |
| 18-08 | SEQ ID NO: 692 | SEQ ID NO: 652 | SEQ ID NO: 693 | SEQ ID NO: 653 | |
| 18-09 | SEQ ID NO: 694 | SEQ ID NO: 654 | SEQ ID NO: 695 | SEQ ID NO: 655 | |
| 18-10 | SEQ ID NO: 694 | SEQ ID NO: 654 | SEQ ID NO: 696 | SEQ ID NO: 656 | |
| 18-11 | SEQ ID NO: 687 | SEQ ID NO: 647 | SEQ ID NO: 697 | SEQ ID NO: 657 | |
| 18-12 | SEQ ID NO: 689 | SEQ ID NO: 649 | SEQ ID NO: 698 | SEQ ID NO: 658 | |
| 18-13 | SEQ ID NO: 689 | SEQ ID NO: 649 | SEQ ID NO: 699 | SEQ ID NO: 659 | |
| 18-14 | SEQ ID NO: 687 | SEQ ID NO: 647 | SEQ ID NO: 697 | SEQ ID NO: 660 | SEQ ID NO: 706 |
| 18-15 | SEQ ID NO: 689 | SEQ ID NO: 649 | SEQ ID NO: 698 | SEQ ID NO: 661 | SEQ ID NO: 706 |
| 18-16 | SEQ ID NO: 689 | SEQ ID NO: 649 | SEQ ID NO: 699 | SEQ ID NO: 662 | SEQ ID NO: 706 |
| 18-17 | SEQ ID NO: 700 | SEQ ID NO: 663 | | | |
| 18-18 | SEQ ID NO: 700 | SEQ ID NO: 664 | | | |
| 18-19 | SEQ ID NO: 700 | SEQ ID NO: 665 | SEQ ID NO: 700 | SEQ ID NO: 666 | |
| 18-20 | SEQ ID NO: 700 | SEQ ID NO: 667 | SEQ ID NO: 700 | SEQ ID NO: 668 | |
| 18-21 | SEQ ID NO: 701 | SEQ ID NO: 669 | SEQ ID NO: 688 | SEQ ID NO: 648 | |
| 18-22 | SEQ ID NO: 702 | SEQ ID NO: 670 | SEQ ID NO: 690 | SEQ ID NO: 650 | |
| 18-23 | SEQ ID NO: 702 | SEQ ID NO: 670 | SEQ ID NO: 691 | SEQ ID NO: 651 | |
| 18-24 | SEQ ID NO: 701 | SEQ ID NO: 671 | SEQ ID NO: 693 | SEQ ID NO: 672 | |
| 18-25 | SEQ ID NO: 702 | SEQ ID NO: 673 | SEQ ID NO: 695 | SEQ ID NO: 674 | |
| 18-26 | SEQ ID NO: 702 | SEQ ID NO: 673 | SEQ ID NO: 696 | SEQ ID NO: 675 | |
| 18-27 | SEQ ID NO: 701 | SEQ ID NO: 669 | SEQ ID NO: 693 | SEQ ID NO: 653 | |
| 18-28 | SEQ ID NO: 702 | SEQ ID NO: 670 | SEQ ID NO: 695 | SEQ ID NO: 655 | |
| 18-29 | SEQ ID NO: 702 | SEQ ID NO: 670 | SEQ ID NO: 696 | SEQ ID NO: 656 | |
| 18-30 | SEQ ID NO: 701 | SEQ ID NO: 669 | SEQ ID NO: 693 | SEQ ID NO: 653 | SEQ ID NO: 706 |
| 18-31 | SEQ ID NO: 702 | SEQ ID NO: 670 | SEQ ID NO: 695 | SEQ ID NO: 655 | SEQ ID NO: 706 |
| 18-32 | SEQ ID NO: 702 | SEQ ID NO: 670 | SEQ ID NO: 696 | SEQ ID NO: 656 | SEQ ID NO: 706 |
| 18-33 | SEQ ID NO: 701 | SEQ ID NO: 669 | SEQ ID NO: 697 | SEQ ID NO: 657 | |
| 18-34 | SEQ ID NO: 702 | SEQ ID NO: 670 | SEQ ID NO: 698 | SEQ ID NO: 658 | |
| 18-35 | SEQ ID NO: 702 | SEQ ID NO: 670 | SEQ ID NO: 699 | SEQ ID NO: 659 | |
| 18-36 | SEQ ID NO: 701 | SEQ ID NO: 669 | SEQ ID NO: 697 | SEQ ID NO: 660 | SEQ ID NO: 706 |
| 18-37 | SEQ ID NO: 702 | SEQ ID NO: 670 | SEQ ID NO: 698 | SEQ ID NO: 661 | SEQ ID NO: 706 |
| 18-38 | SEQ ID NO: 702 | SEQ ID NO: 670 | SEQ ID NO: 699 | SEQ ID NO: 662 | SEQ ID NO: 706 |
| 18-39 | SEQ ID NO: 703 | SEQ ID NO: 676 | | | |
| 18-40 | SEQ ID NO: 703 | SEQ ID NO: 677 | | | |
| 18-41 | SEQ ID NO: 703 | SEQ ID NO: 678 | SEQ ID NO: 703 | SEQ ID NO: 679 | |
| 18-42 | SEQ ID NO: 703 | SEQ ID NO: 680 | SEQ ID NO: 703 | SEQ ID NO: 681 | |
| 18-43 | SEQ ID NO: 704 | SEQ ID NO: 682 | SEQ ID NO: 688 | SEQ ID NO: 648 | |
| 18-44 | SEQ ID NO: 705 | SEQ ID NO: 683 | SEQ ID NO: 690 | SEQ ID NO: 650 | |
| 18-45 | SEQ ID NO: 705 | SEQ ID NO: 683 | SEQ ID NO: 691 | SEQ ID NO: 651 | |
| 18-46 | SEQ ID NO: 704 | SEQ ID NO: 684 | SEQ ID NO: 693 | SEQ ID NO: 672 | |
| 18-47 | SEQ ID NO: 705 | SEQ ID NO: 685 | SEQ ID NO: 695 | SEQ ID NO: 674 | |
| 18-48 | SEQ ID NO: 705 | SEQ ID NO: 685 | SEQ ID NO: 696 | SEQ ID NO: 675 | |
| 18-49 | SEQ ID NO: 704 | SEQ ID NO: 682 | SEQ ID NO: 693 | SEQ ID NO: 653 | |
| 18-50 | SEQ ID NO: 705 | SEQ ID NO: 683 | SEQ ID NO: 695 | SEQ ID NO: 655 | |
| 18-51 | SEQ ID NO: 705 | SEQ ID NO: 683 | SEQ ID NO: 696 | SEQ ID NO: 656 | |
| 18-52 | SEQ ID NO: 704 | SEQ ID NO: 682 | SEQ ID NO: 693 | SEQ ID NO: 653 | SEQ ID NO: 706 |
| 18-53 | SEQ ID NO: 705 | SEQ ID NO: 683 | SEQ ID NO: 695 | SEQ ID NO: 655 | SEQ ID NO: 706 |
| 18-54 | SEQ ID NO: 705 | SEQ ID NO: 683 | SEQ ID NO: 696 | SEQ ID NO: 656 | SEQ ID NO: 706 |
| 18-55 | SEQ ID NO: 704 | SEQ ID NO: 682 | SEQ ID NO: 697 | SEQ ID NO: 657 | |
| 18-56 | SEQ ID NO: 705 | SEQ ID NO: 683 | SEQ ID NO: 698 | SEQ ID NO: 658 | |
| 18-57 | SEQ ID NO: 705 | SEQ ID NO: 683 | SEQ ID NO: 699 | SEQ ID NO: 659 | |
| 18-58 | SEQ ID NO: 704 | SEQ ID NO: 682 | SEQ ID NO: 697 | SEQ ID NO: 660 | SEQ ID NO: 706 |
| 18-59 | SEQ ID NO: 705 | SEQ ID NO: 683 | SEQ ID NO: 698 | SEQ ID NO: 661 | SEQ ID NO: 706 |
| 18-60 | SEQ ID NO: 705 | SEQ ID NO: 683 | SEQ ID NO: 699 | SEQ ID NO: 662 | SEQ ID NO: 706 |

TABLE 42

| Protein | D1-Fc | | | D5 | D4 | D3 | D6 | D2-Fc | | |
|---|---|---|---|---|---|---|---|---|---|---|
| ID | Fc Receptor binding | H1 | H2 | Fab | Fab | Fab | Fab | Fc Receptor binding | H1 | H2 |
| 18-01 | wt | | | | | | | | | |
| 18-02 | L234A/L235A/P329G | | | | | | | | | |
| 18-03 | wt | RF | HY | Da | Da | Da | Da | wt | RF | HY |
| 18-04 | L234A/L235A/P329G | RF | HY | Da | Da | Da | Da | L234A/L235A/P329G | RF | HY |
| 18-05 | L234A/L235A/P329G | RF | HY | HA9 | Da | Da | HA9 | L234A/L235A/P329G | RF | HY |
| 18-06 | L234A/L235A/P329G | RF | HY | HA9 | Da | Da | HA9 | L234A/L235A/P329G | RF | HY |
| 18-07 | L234A/L235A/P329G | RF | HY | HA9 | Da | Da | HA9 | L234A/L235A/P329G | RF | HY |
| 18-08 | L234A/L235A/P329G | RF | HY | Da | HA9 | HA9 | Da | L234A/L235A/P329G | RF | HY |
| 18-09 | L234A/L235A/P329G | RF | HY | Da | HA9 | HA9 | Da | L234A/L235A/P329G | RF | HY |
| 18-10 | L234A/L235A/P329G | RF | HY | Da | HA9 | HA9 | Da | L234A/L235A/P329G | RF | HY |
| 18-11 | L234A/L235A/P329G | RF | HY | SP34 | Da | Da | SP34 | L234A/L235A/P329G | RF | HY |
| 18-12 | L234A/L235A/P329G | RF | HY | SP34 | Da | Da | SP34 | L234A/L235A/P329G | RF | HY |
| 18-13 | L234A/L235A/P329G | RF | HY | SP34 | Da | Da | SP34 | L234A/L235A/P329G | RF | HY |
| 18-14 | L234A/L235A/P329G | RF | HY | | Da | Da | SP34 | L234A/L235A/P329G | RF | RF |
| 18-15 | L234A/L235A/P329G | RF | HY | | Da | Da | SP34 | L234A/L235A/P329G | RF | RF |
| 18-16 | L234A/L235A/P329G | RF | HY | | Da | Da | SP34 | L234A/L235A/P329G | RF | RF |
| 18-17 | wt | | | | | | | | | |
| 18-18 | S239D/I332E | | | | | | | | | |
| 18-19 | wt | RF | HY | 4C8 | 4C8 | 4C8 | 4C8 | wt | RF | HY |
| 18-20 | S239D/I332E | RF | HY | 4C8 | 4C8 | 4C8 | 4C8 | S239D/I332E | RF | HY |
| 18-21 | L234A/L235A/P329G | RF | HY | HA9 | 4C8 | 4C8 | HA9 | L234A/L235A/P329G | RF | HY |
| 18-22 | L234A/L235A/P329G | RF | HY | HA9 | 4C8 | 4C8 | HA9 | L234A/L235A/P329G | RF | HY |
| 18-23 | L234A/L235A/P329G | RF | HY | HA9 | 4C8 | 4C8 | HA9 | L234A/L235A/P329G | RF | HY |
| 18-24 | wt | RF | HY | Da | 4C8 | 4C8 | Da | wt | RF | HY |
| 18-25 | wt | RF | HY | Da | 4C8 | 4C8 | Da | wt | RF | HY |
| 18-26 | wt | RF | HY | Da | 4C8 | 4C8 | Da | wt | RF | HY |
| 18-27 | L234A/L235A/P329G | RF | HY | Da | 4C8 | 4C8 | Da | L234A/L235A/P329G | RF | HY |
| 18-28 | L234A/L235A/P329G | RF | HY | Da | 4C8 | 4C8 | Da | L234A/L235A/P329G | RF | HY |
| 18-29 | L234A/L235A/P329G | RF | HY | Da | 4C8 | 4C8 | Da | L234A/L235A/P329G | RF | HY |
| 18-30 | L234A/L235A/P329G | RF | HY | | 4C8 | 4C8 | Da | L234A/L235A/P329G | RF | RF |
| 18-31 | L234A/L235A/P329G | RF | HY | | 4C8 | 4C8 | Da | L234A/L235A/P329G | RF | RF |
| 18-32 | L234A/L235A/P329G | RF | HY | | 4C8 | 4C8 | Da | L234A/L235A/P329G | RF | RF |
| 18-33 | L234A/L235A/P329G | RF | HY | SP34 | 4C8 | 4C8 | SP34 | L234A/L235A/P329G | RF | HY |
| 18-34 | L234A/L235A/P329G | RF | HY | SP34 | 4C8 | 4C8 | SP34 | L234A/L235A/P329G | RF | HY |
| 18-35 | L234A/L235A/P329G | RF | HY | SP34 | 4C8 | 4C8 | SP34 | L234A/L235A/P329G | RF | HY |
| 18-36 | L234A/L235A/P329G | RF | HY | | 4C8 | 4C8 | SP34 | L234A/L235A/P329G | RF | RF |
| 18-37 | L234A/L235A/P329G | RF | HY | | 4C8 | 4C8 | SP34 | L234A/L235A/P329G | RF | RF |
| 18-38 | L234A/L235A/P329G | RF | HY | | 4C8 | 4C8 | SP34 | L234A/L235A/P329G | RF | RF |
| 18-39 | wt | | | | | | | | | |
| 18-40 | S239D/I332E | | | | | | | | | |
| 18-41 | wt | RF | HY | B34 | B34 | B34 | B34 | wt | RF | HY |
| 18-42 | S239D/I332E | RF | HY | B34 | B34 | B34 | B34 | S239D/I332E | RF | HY |
| 18-43 | L234A/L235A/P329G | RF | HY | HA9 | B34 | B34 | HA9 | L234A/L235A/P329G | RF | HY |
| 18-44 | L234A/L235A/P329G | RF | HY | HA9 | B34 | B34 | HA9 | L234A/L235A/P329G | RF | HY |
| 18-45 | L234A/L235A/P329G | RF | HY | HA9 | B34 | B34 | HA9 | L234A/L235A/P329G | RF | HY |
| 18-46 | wt | RF | HY | Da | B34 | B34 | Da | wt | RF | HY |
| 18-47 | wt | RF | HY | Da | B34 | B34 | Da | wt | RF | HY |
| 18-48 | wt | RF | HY | Da | B34 | B34 | Da | wt | RF | HY |
| 18-49 | L234A/L235A/P329G | RF | HY | Da | B34 | B34 | Da | L234A/L235A/P329G | RF | HY |
| 18-50 | L234A/L235A/P329G | RF | HY | Da | B34 | B34 | Da | L234A/L235A/P329G | RF | HY |
| 18-51 | L234A/L235A/P329G | RF | HY | Da | B34 | B34 | Da | L234A/L235A/P329G | RF | HY |
| 18-52 | L234A/L235A/P329G | RF | HY | | B34 | B34 | Da | L234A/L235A/P329G | RF | RF |
| 18-53 | L234A/L235A/P329G | RF | HY | | B34 | B34 | Da | L234A/L235A/P329G | RF | RF |
| 18-54 | L234A/L235A/P329G | RF | HY | | B34 | B34 | Da | L234A/L235A/P329G | RF | RF |
| 18-55 | L234A/L235A/P329G | RF | HY | SP34 | B34 | B34 | SP34 | L234A/L235A/P329G | RF | HY |
| 18-56 | L234A/L235A/P329G | RF | HY | SP34 | B34 | B34 | SP34 | L234A/L235A/P329G | RF | HY |
| 18-57 | L234A/L235A/P329G | RF | HY | SP34 | B34 | B34 | SP34 | L234A/L235A/P329G | RF | HY |
| 18-58 | L234A/L235A/P329G | RF | HY | | B34 | B34 | SP34 | L234A/L235A/P329G | RF | RF |
| 18-59 | L234A/L235A/P329G | RF | HY | | B34 | B34 | SP34 | L234A/L235A/P329G | RF | RF |
| 18-60 | L234A/L235A/P329G | RF | HY | | B34 | B34 | SP34 | L234A/L235A/P329G | RF | RF |

TABLE 43

| Protein ID | D1 Target | D5 Target | D4 Target | D3 Target | D6 Target | D2-Fc | Other |
|---|---|---|---|---|---|---|---|
| 18-01 | FcγR | | | | | | α-CD38 mAb |
| 18-02 | Fc silent | | | | | | α-CD38 mAb |
| 18-03 | FcγR | CD38 | CD38 | CD38 | CD38 | FcgR | |
| 18-04 | Fc silent | CD38 | CD38 | CD38 | CD38 | Fc silent | |
| 18-05 | Fc silent | CD16 | CD38 | CD38 | CD16 | Fc silent | |
| 18-06 | Fc silent | CD16 | CD38 | CD38 | CD16 | Fc silent | |
| 18-07 | Fc silent | CD16 | CD38 | CD38 | CD16 | Fc silent | |
| 18-08 | Fc silent | CD38 | CD16 | CD16 | CD38 | Fc silent | |
| 18-09 | Fc silent | CD38 | CD16 | CD16 | CD38 | Fc silent | |
| 18-10 | Fc silent | CD38 | CD16 | CD16 | CD38 | Fc silent | |
| 18-11 | Fc silent | CD3 | CD38 | CD38 | CD3 | Fc silent | |
| 18-12 | Fc silent | CD3 | CD38 | CD38 | CD3 | Fc silent | |
| 18-13 | Fc silent | CD3 | CD38 | CD38 | CD3 | Fc silent | |
| 18-14 | Fc silent | | CD38 | CD38 | CD3 | Fc silent | |
| 18-15 | Fc silent | | CD38 | CD38 | CD3 | Fc silent | |
| 18-16 | Fc silent | | CD38 | CD38 | CD3 | Fc silent | |
| 18-17 | FcγR | | | | | | α-BCMA mAb |
| 18-18 | FcγR-high | | | | | | α-BCMA mAb |
| 18-19 | FcγR | BCMA | BCMA | BCMA | BCMA | FcgR | |
| 18-20 | FcγR-high | BCMA | BCMA | BCMA | BCMA | FcgR-high | |
| 18-21 | Fc silent | CD16 | BCMA | BCMA | CD16 | Fc silent | |
| 18-22 | Fc silent | CD16 | BCMA | BCMA | CD16 | Fc silent | |
| 18-23 | Fc silent | CD16 | BCMA | BCMA | CD16 | Fc silent | |
| 18-24 | FcγR | CD38 | BCMA | BCMA | CD38 | FcγR | |
| 18-25 | FcγR | CD38 | BCMA | BCMA | CD38 | FcγR | |
| 18-26 | FcγR | CD38 | BCMA | BCMA | CD38 | FcγR | |
| 18-27 | Fc silent | CD38 | BCMA | BCMA | CD38 | Fc silent | |
| 18-28 | Fc silent | CD38 | BCMA | BCMA | CD38 | Fc silent | |
| 18-29 | Fc silent | CD38 | BCMA | BCMA | CD38 | Fc silent | |
| 18-30 | Fc silent | | BCMA | BCMA | CD38 | Fc silent | |
| 18-31 | Fc silent | | BCMA | BCMA | CD38 | Fc silent | |
| 18-32 | Fc silent | | BCMA | BCMA | CD38 | Fc silent | |
| 18-33 | Fc silent | CD3 | BCMA | BCMA | CD3 | Fc silent | |
| 18-34 | Fc silent | CD3 | BCMA | BCMA | CD3 | Fc silent | |
| 18-35 | Fc silent | CD3 | BCMA | BCMA | CD3 | Fc silent | |
| 18-36 | Fc silent | | BCMA | BCMA | CD3 | Fc silent | |
| 18-37 | Fc silent | | BCMA | BCMA | CD3 | Fc silent | |
| 18-38 | Fc silent | | BCMA | BCMA | CD3 | Fc silent | |
| 18-39 | FcγR | | | | | | α-BCMA mAb |
| 18-40 | FcγR-high | | | | | | α-BCMA mAb |
| 18-41 | FcγR | BCMA | BCMA | BCMA | BCMA | FcgR | |
| 18-42 | FcγR-high | BCMA | BCMA | BCMA | BCMA | FcgR-high | |
| 18-43 | Fc silent | CD16 | BCMA | BCMA | CD16 | Fc silent | |
| 18-44 | Fc silent | CD16 | BCMA | BCMA | CD16 | Fc silent | |
| 18-45 | Fc silent | CD16 | BCMA | BCMA | CD16 | Fc silent | |
| 18-46 | FcγR | CD38 | BCMA | BCMA | CD38 | FcγR | |
| 18-47 | FcγR | CD38 | BCMA | BCMA | CD38 | FcγR | |
| 18-48 | FcγR | CD38 | BCMA | BCMA | CD38 | FcγR | |
| 18-49 | Fc silent | CD38 | BCMA | BCMA | CD38 | Fc silent | |
| 18-50 | Fc silent | CD38 | BCMA | BCMA | CD38 | Fc silent | |
| 18-51 | Fc silent | CD38 | BCMA | BCMA | CD38 | Fc silent | |
| 18-52 | Fc silent | | BCMA | BCMA | CD38 | Fc silent | |
| 18-53 | Fc silent | | BCMA | BCMA | CD38 | Fc silent | |
| 18-54 | Fc silent | | BCMA | BCMA | CD38 | Fc silent | |
| 18-55 | Fc silent | CD3 | BCMA | BCMA | CD3 | Fc silent | |
| 18-56 | Fc silent | CD3 | BCMA | BCMA | CD3 | Fc silent | |
| 18-57 | Fc silent | CD3 | BCMA | BCMA | CD3 | Fc silent | |
| 18-58 | Fc silent | | BCMA | BCMA | CD3 | Fc silent | |
| 18-59 | Fc silent | | BCMA | BCMA | CD3 | Fc silent | |
| 18-60 | Fc silent | | BCMA | BCMA | CD3 | Fc silent | |

TABLE 44

| | L1 Chain | | H1 Chain | | L2 Chain | | H2 Chain | |
|---|---|---|---|---|---|---|---|---|
| | V region | Amino acid | V region | Amino acid | V region | Amino acid | V region | Amino acid |
| Protein ID | type | Substitutions | Type | Substitutions | Type | Substitutions | Type | Substitutions |
| 18-01 | VK-CK | | VH-CH1 | | | | | |
| 18-02 | VK-CK | | VH-CH1 | | | | | |
| 18-03 | VK-CK | | VH-CH1 | | VK-CK | | VH-CH1 | |
| 18-04 | VK-CK | | VH-CH1 | | VK-CK | | VH-CH1 | |
| 18-05 | VK-CK | E123R/Q124K | VH-CH1 | K147E/K213E | VH-CK | | VK-CH1 | |
| 18-06 | VK-CK | Q38E/V133K | VH-CH1 | Q39K/S183E | VH-CK | Q39K/V133E | VK-CH1 | Q38E/S183K |
| 18-07 | VK-CK | Q38E/V133K | VH-CH1 | Q39K/S183E | VH-CK | Q39E/V133E | VK-CH1 | Q38K/S183K |
| 18-08 | VK-CK | E123R/Q124K | VH-CH1 | K147E/K213E | VH-CK | | VK-CH1 | |
| 18-09 | VK-CK | Q38E/V133K | VH-CH1 | Q39K/S183E | VH-CK | Q39K/V133E | VK-CH1 | Q38E/S183K |
| 18-10 | VK-CK | Q38E/V133K | VH-CH1 | Q39K/S183E | VH-CK | Q39E/V133E | VK-CH1 | Q38K/S183K |
| 18-11 | VK-CK | E123R/Q124K | VH-CH1 | K147E/K213E | VH-CK | | VK-CH1 | |
| 18-12 | VK-CK | Q38E/V133K | VH-CH1 | Q39K/S183E | VH-CK | Q39K/V133E | VK-CH1 | Q38E/S183K |
| 18-13 | VK-CK | Q38E/V133K | VH-CH1 | Q39K/S183E | VH-CK | Q39E/V133E | VK-CH1 | Q38K/S183K |
| 18-14 | VK-CK | E123R/Q124K | VH-CH1 | K147E/K213E | VH-CK | | VK-CH1 | |
| 18-15 | VK-CK | Q38E/V133K | VH-CH1 | Q39K/S183E | VH-CK | Q39K/V133E | VK-CH1 | Q38E/S183K |
| 18-16 | VK-CK | Q38E/V133K | VH-CH1 | Q39K/S183E | VH-CK | Q39E/V133E | VK-CH1 | Q38K/S183K |
| 18-17 | VK-CK | | VH-CH1 | | | | | |
| 18-18 | VK-CK | | VH-CH1 | | | | | |
| 18-19 | VK-CK | | VH-CH1 | | VK-CK | | VH-CH1 | |
| 18-20 | VK-CK | | VH-CH1 | | VK-CK | | VH-CH1 | |
| 18-21 | VK-CK | E123R/Q124K | VH-CH1 | K147E/K213E | VH-CK | | VK-CH1 | |
| 18-22 | VK-CK | Q38E/V133K | VH-CH1 | Q39K/S183E | VH-CK | Q39K/V133E | VK-CH1 | Q38E/S183K |
| 18-23 | VK-CK | Q38E/V133K | VH-CH1 | Q39K/S183E | VH-CK | Q39E/V133E | VK-CH1 | Q38K/S183K |
| 18-24 | VK-CK | E123R/Q124K | VH-CH1 | K147E/K213E | VH-CK | | VK-CH1 | |
| 18-25 | VK-CK | Q38E/V133K | VH-CH1 | Q39K/S183E | VH-CK | Q39K/V133E | VK-CH1 | Q38E/S183K |
| 18-26 | VK-CK | Q38E/V133K | VH-CH1 | Q39K/S183E | VH-CK | Q39E/V133E | VK-CH1 | Q38K/S183K |
| 18-27 | VK-CK | E123R/Q124K | VH-CH1 | K147E/K213E | VH-CK | | VK-CH1 | |
| 18-28 | VK-CK | Q38E/V133K | VH-CH1 | Q39K/S183E | VH-CK | Q39K/V133E | VK-CH1 | Q38E/S183K |
| 18-29 | VK-CK | Q38E/V133K | VH-CH1 | Q39K/S183E | VH-CK | Q39E/V133E | VK-CH1 | Q38K/S183K |
| 18-30 | VK-CK | E123R/Q124K | VH-CH1 | K147E/K213E | VH-CK | | VK-CH1 | |
| 18-31 | VK-CK | Q38E/V133K | VH-CH1 | Q39K/S183E | VH-CK | Q39K/V133E | VK-CH1 | Q38E/S183K |
| 18-32 | VK-CK | Q38E/V133K | VH-CH1 | Q39K/S183E | VH-CK | Q39E/V133E | VK-CH1 | Q38K/S183K |
| 18-33 | VK-CK | E123R/Q124K | VH-CH1 | K147E/K213E | VH-CK | | VK-CH1 | |
| 18-34 | VK-CK | Q38E/V133K | VH-CH1 | Q39K/S183E | VH-CK | Q39K/V133E | VK-CH1 | Q38E/S183K |
| 18-35 | VK-CK | Q38E/V133K | VH-CH1 | Q39K/S183E | VH-CK | Q39E/V133E | VK-CH1 | Q38K/S183K |
| 18-36 | VK-CK | E123R/Q124K | VH-CH1 | K147E/K213E | VH-CK | | VK-CH1 | |
| 18-37 | VK-CK | Q38E/V133K | VH-CH1 | Q39K/S183E | VH-CK | Q39K/V133E | VK-CH1 | Q38E/S183K |
| 18-38 | VK-CK | Q38E/V133K | VH-CH1 | Q39K/S183E | VH-CK | Q39E/V133E | VK-CH1 | Q38K/S183K |
| 18-39 | VK-CK | | VH-CH1 | | | | | |
| 18-40 | VK-CK | | VH-CH1 | | | | | |
| 18-41 | VK-CK | | VH-CH1 | | VK-CK | | VH-CH1 | |
| 18-42 | VK-CK | | VH-CH1 | | VK-CK | | VH-CH1 | |
| 18-43 | VK-CK | E123R/Q124K | VH-CH1 | K147E/K213E | VK-CK | | VK-CH1 | |
| 18-44 | VK-CK | Q38E/V133K | VH-CH1 | Q39K/S183E | VH-CK | Q39K/V133E | VK-CH1 | Q38E/S183K |
| 18-45 | VK-CK | Q38E/V133K | VH-CH1 | Q39K/S183E | VH-CK | Q39E/V133E | VK-CH1 | Q38K/S183K |
| 18-46 | VK-CK | E123R/Q124K | VH-CH1 | K147E/K213E | VH-CK | | VK-CH1 | |
| 18-47 | VK-CK | Q38E/V133K | VH-CH1 | Q39K/S183E | VH-CK | Q39K/V133E | VK-CH1 | Q38E/S183K |
| 18-48 | VK-CK | Q38E/V133K | VH-CH1 | Q39K/S183E | VH-CK | Q39E/V133E | VK-CH1 | Q38K/S183K |
| 18-49 | VK-CK | E123R/Q124K | VH-CH1 | K147E/K213E | VH-CK | | VK-CH1 | |
| 18-50 | VK-CK | Q38E/V133K | VH-CH1 | Q39K/S183E | VH-CK | Q39K/V133E | VK-CH1 | Q38E/S183K |
| 18-51 | VK-CK | Q38E/V133K | VH-CH1 | Q39K/S183E | VH-CK | Q39E/V133E | VK-CH1 | Q38K/S183K |
| 18-52 | VK-CK | E123R/Q124K | VH-CH1 | K147E/K213E | VH-CK | | VK-CH1 | |
| 18-53 | VK-CK | Q38E/V133K | VH-CH1 | Q39K/S183E | VH-CK | Q39K/V133E | VK-CH1 | Q38E/S183K |
| 18-54 | VK-CK | Q38E/V133K | VH-CH1 | Q39K/S183E | VH-CK | Q39E/V133E | VK-CH1 | Q38K/S183K |
| 18-55 | VK-CK | E123R/Q124K | VH-CH1 | K147E/K213E | VH-CK | | VK-CH1 | |
| 18-56 | VK-CK | Q38E/V133K | VH-CH1 | Q39K/S183E | VH-CK | Q39K/V133E | VK-CH1 | Q38E/S183K |
| 18-57 | VK-CK | Q38E/V133K | VH-CH1 | Q39K/S183E | VH-CK | Q39E/V133E | VK-CH1 | Q38K/S183K |
| 18-58 | VK-CK | E123R/Q124K | VH-CH1 | K147E/K213E | VH-CK | | VK-CH1 | |
| 18-59 | VK-CK | Q38E/V133K | VH-CH1 | Q39K/S183E | VH-CK | Q39K/V133E | VK-CH1 | Q38E/S183K |
| 18-60 | VK-CK | Q38E/V133K | VH-CH1 | Q39K/S183E | VH-CK | Q39E/V133E | VK-CH1 | Q38K/S183K |

TABLE 45

| Protein | L1L1H1H2 | L1L2H1H2 | L2L2H1H2 | Delta, | Theoretical Average Intact Mass, Da | | | | |
|---|---|---|---|---|---|---|---|---|---|
| ID | (%) | (%) | (%) | Da | L1L1H1H2 | L1L2H1H2 | L2L2H1H2 | L1H1Fc | L2H1Fc |
| 18-05 | 0.4% | 95.8% | *3.8% | 1048 | 161216 | 162264 | 163312 | | |
| 18-06 | 0.4% | 95.3% | *4.3% | 1075 | 161304 | 162379 | 163455 | | |
| 18-07 | 0.4% | 94.6% | *5.0% | 1076 | 161303 | 162379 | 163455 | | |
| 18-08 | 0.3% | 97.9% | 1.8% | 1200 | 161064 | 162264 | 163465 | | |
| 18-09 | 0.2% | 98.2% | 1.6% | 1228 | 161099 | 162327 | 163554 | | |
| 18-10 | 0.6% | 97.9% | 1.4% | 1228 | 161151 | 162379 | 163608 | | |
| 18-21 | 0.8% | 94.3% | *4.9% | 976 | 161150 | 162126 | 163102 | | |
| 18-22 | 1.3% | 97.7% | 1.0% | 1132 | 161238 | 162370 | 163503 | | |
| 18-23 | 0.5% | 96.7% | 2.8% | 1133 | 161237 | 162370 | 163503 | | |
| 18-24 | 0.7% | 97.3% | 2.0% | 1447 | 161210 | 162656 | 164103 | | |
| 18-25 | 0.7% | 97.8% | 1.5% | 1474 | 161298 | 162771 | 164245 | | |
| 18-26 | 0.9% | 98.7% | 0.4% | 1475 | 161297 | 162771 | 164246 | | |
| 18-27 | 0.6% | 96.8% | 2.6% | 1475 | 160961 | 162408 | 163854 | | |
| 18-28 | 1.0% | 96.8% | 2.2% | 1474 | 161049 | 162523 | 163997 | | |
| 18-29 | 0.5% | 98.0% | 1.5% | 1475 | 161048 | 162523 | 163998 | | |
| 18-30 | 0.0% | 97.1% | 2.9% | 1447 | 188158 | 189605 | 191051 | 99.4% | 0.6% |
| 18-31 | 0.0% | 98.3% | 1.7% | 1474 | 188249 | 189723 | 191197 | 99.8% | 0.2% |
| 18-32 | 0.0% | 99.5% | 0.5% | 1475 | 188248 | 189723 | 191198 | 99.7% | 0.3% |

### Example 21—Pentavalent/Hexavalent, Trispecific Tetrahedral Antibodies Comprising Two Distinct Fabs that Specifically Bind CD19, CD20 and the 4-1BB Receptor

[2122] Tetrahedral antibodies offer a unique opportunity to exploit the contribution of dimensionality in creating multivalent, multispecific targeting agents for the treatment of cancer and other disease. Accordingly, a series of constructs was generated with the predicted structures shown in panel C of FIG. 40, thus enabling the evaluation and application of their trispecificity.

[2123] This series of trispecific constructs employed VH and VL regions from FMC63, an FDA-approved anti-CD19 antibody used in the form of a chimeric antigen receptor (CAR-T) to treat B cell cancer (SEQ ID Nos 734, 708), and rituximab, an FDA-approved standalone anti-CD20 antibody used to treat B cell cancer and inflammatory disease (SEQ ID Nos 739, 713). Additionally, this series of trispecific constructs employed a single chain 4-1BB ligand (SEQ ID No 844) (Tables 46, 47, 48), and optionally employ a single chain OX40 ligand (SEQ ID No 845), or single chain GITR ligand (SEQ ID No 846). The targeting CD19 and CD20 by a single therapeutic agent offers a significant opportunity in the treatment and prevention of resistance and remission in B cell cancer, while the simultaneous delivery of 4-1BBL, OX40L or GITRL offers a significant opportunity to activate NK cells and T cells in the vicinity of the cancer.

[2124] To optimize correct VH/VL pairing and to minimize VH/VL mispairing, V region exchange was combined with electrostatic steering as described in Example 18 (Table 49). Additionally, to further facilitate purification of the correctly paired product by Protein A chromatography, the H1 chain incorporated the H435R/Y436F substitution. The constructs are then evaluated for their structural trispecificity by intact mass spectrometry, following removal of N-glycan and O-glycan, as described in Example 18. These constructs and those of Example 20 are further evaluated for their functional bi- and trispecificity using a variety of in vitro and in vivo cancer cell targeting and cytotoxicity models that are well known to one skilled in the art.

TABLE 46

| Protein ID | L1 Chain | H1 Chain | L2 Chain | H2 Chain |
|---|---|---|---|---|
| 19-01 | SEQ ID NO: 733 | SEQ ID NO: 707 | SEQ ID NO: 734 | SEQ ID NO: 708 |
| 19-02 | SEQ ID NO: 735 | SEQ ID NO: 709 | SEQ ID NO: 736 | SEQ ID NO: 710 |
| 19-03 | SEQ ID NO: 735 | SEQ ID NO: 709 | SEQ ID NO: 737 | SEQ ID NO: 711 |
| 19-04 | SEQ ID NO: 738 | SEQ ID NO: 712 | SEQ ID NO: 739 | SEQ ID NO: 713 |
| 19-05 | SEQ ID NO: 740 | SEQ ID NO: 714 | SEQ ID NO: 741 | SEQ ID NO: 715 |
| 19-06 | SEQ ID NO: 740 | SEQ ID NO: 714 | SEQ ID NO: 742 | SEQ ID NO: 716 |
| 19-07 | SEQ ID NO: 733 | SEQ ID NO: 707 | SEQ ID NO: 734 | SEQ ID NO: 717 |
| 19-08 | SEQ ID NO: 735 | SEQ ID NO: 709 | SEQ ID NO: 736 | SEQ ID NO: 718 |
| 19-09 | SEQ ID NO: 735 | SEQ ID NO: 709 | SEQ ID NO: 737 | SEQ ID NO: 719 |
| 19-10 | SEQ ID NO: 738 | SEQ ID NO: 712 | SEQ ID NO: 739 | SEQ ID NO: 720 |
| 19-11 | SEQ ID NO: 740 | SEQ ID NO: 714 | SEQ ID NO: 741 | SEQ ID NO: 721 |
| 19-12 | SEQ ID NO: 740 | SEQ ID NO: 714 | SEQ ID NO: 742 | SEQ ID NO: 722 |
| 19-13 | SEQ ID NO: 733 | SEQ ID NO: 723 | SEQ ID NO: 734 | SEQ ID NO: 724 |
| 19-14 | SEQ ID NO: 735 | SEQ ID NO: 725 | SEQ ID NO: 736 | SEQ ID NO: 726 |
| 19-15 | SEQ ID NO: 735 | SEQ ID NO: 725 | SEQ ID NO: 737 | SEQ ID NO: 727 |
| 19-16 | SEQ ID NO: 738 | SEQ ID NO: 728 | SEQ ID NO: 739 | SEQ ID NO: 729 |
| 19-17 | SEQ ID NO: 740 | SEQ ID NO: 730 | SEQ ID NO: 741 | SEQ ID NO: 731 |
| 19-18 | SEQ ID NO: 740 | SEQ ID NO: 730 | SEQ ID NO: 742 | SEQ ID NO: 732 |

TABLE 47

| Protein | | | | | | | | |
|---|---|---|---|---|---|---|---|---|
| ID | D1-Fc | D7 | D5-Fab | D4-Fab | D3-Fab | D6-Fab | D8 | D2-Fc |
| 19-01 | | | FMC63 | Rituximab | Rituximab | FMC63 | | |
| 19-02 | | | FMC63 | Rituximab | Rituximab | FMC63 | | |
| 19-03 | | | FMC63 | Rituximab | Rituximab | FMC63 | | |
| 19-04 | | | Rituximab | FMC63 | FMC63 | Rituximab | | |
| 19-05 | | | Rituximab | FMC63 | FMC63 | Rituximab | | |
| 19-06 | | | Rituximab | FMC63 | FMC63 | Rituximab | | |
| 19-07 | | 4-1BBL | FMC63 | Rituximab | Rituximab | FMC63 | 4-1BBL | |
| 19-08 | | 4-1BBL | FMC63 | Rituximab | Rituximab | FMC63 | 4-1BBL | |
| 19-09 | | 4-1BBL | FMC63 | Rituximab | Rituximab | FMC63 | 4-1BBL | |
| 19-10 | | 4-1BBL | Rituximab | FMC63 | FMC63 | Rituximab | 4-1BBL | |
| 19-11 | | 4-1BBL | Rituximab | FMC63 | FMC63 | Rituximab | 4-1BBL | |
| 19-12 | | 4-1BBL | Rituximab | FMC63 | FMC63 | Rituximab | 4-1BBL | |
| 19-13 | L234A/L235A/P329G | 4-1BBL | FMC63 | Rituximab | Rituximab | FMC63 | 4-1BBL | L234A/L235A/P329G |
| 19-14 | L234A/L235A/P329G | 4-1BBL | FMC63 | Rituximab | Rituximab | FMC63 | 4-1BBL | L234A/L235A/P329G |
| 19-15 | L234A/L235A/P329G | 4-1BBL | FMC63 | Rituximab | Rituximab | FMC63 | 4-1BBL | L234A/L235A/P329G |
| 19-16 | L234A/L235A/P329G | 4-1BBL | Rituximab | FMC63 | FMC63 | Rituximab | 4-1BBL | L234A/L235A/P329G |
| 19-17 | L234A/L235A/P329G | 4-1BBL | Rituximab | FMC63 | FMC63 | Rituximab | 4-1BBL | L234A/L235A/P329G |
| 19-18 | L234A/L235A/P329G | 4-1BBL | Rituximab | FMC63 | FMC63 | Rituximab | 4-1BBL | L234A/L235A/P329G |

TABLE 48

| Protein ID | D1 Target | D7 Target | D5 Target | D4 Target | D3 Target | D6 Target | D8 Target | D2 Target |
|---|---|---|---|---|---|---|---|---|
| 19-01 | FcgR | | CD19 | CD20 | CD20 | CD19 | | FcgR |
| 19-02 | FcgR | | CD19 | CD20 | CD20 | CD19 | | FcgR |
| 19-03 | FcgR | | CD19 | CD20 | CD20 | CD19 | | FcgR |
| 19-04 | FcgR | | CD20 | CD19 | CD19 | CD20 | | FcgR |
| 19-05 | FcgR | | CD20 | CD19 | CD19 | CD20 | | FcgR |
| 19-06 | FcgR | | CD20 | CD19 | CD19 | CD20 | | FcgR |
| 19-07 | FcgR | 4-1BBR | CD19 | CD20 | CD20 | CD19 | 4-1BBR | FcgR |
| 19-08 | FcgR | 4-1BBR | CD19 | CD20 | CD20 | CD19 | 4-1BBR | FcgR |
| 19-09 | FcgR | 4-1BBR | CD19 | CD20 | CD20 | CD19 | 4-1BBR | FcgR |
| 19-10 | FcgR | 4-1BBR | CD20 | CD19 | CD19 | CD20 | 4-1BBR | FcgR |
| 19-11 | FcgR | 4-1BBR | CD20 | CD19 | CD19 | CD20 | 4-1BBR | FcgR |
| 19-12 | FcgR | 4-1BBR | CD20 | CD19 | CD19 | CD20 | 4-1BBR | FcgR |
| 19-13 | Fc silent | 4-1BBR | CD19 | CD20 | CD20 | CD19 | 4-1BBR | Fc silent |
| 19-14 | Fc silent | 4-1BBR | CD19 | CD20 | CD20 | CD19 | 4-1BBR | Fc silent |
| 19-15 | Fc silent | 4-1BBR | CD19 | CD20 | CD20 | CD19 | 4-1BBR | Fc silent |
| 19-16 | Fc silent | 4-1BBR | CD20 | CD19 | CD19 | CD20 | 4-1BBR | Fc silent |
| 19-17 | Fc silent | 4-1BBR | CD20 | CD19 | CD19 | CD20 | 4-1BBR | Fc silent |
| 19-18 | Fc silent | 4-1BBR | CD20 | CD19 | CD19 | CD20 | 4-1BBR | Fc silent |

TABLE 49

| | L1 Chain | | H1 Chain | | L2 Chain | | H2 Chain | |
|---|---|---|---|---|---|---|---|---|
| Protein | V region | Amino acid | V region | Amino acid | V region | Amino acid | V region | Amino acid |
| ID | type | Substitutions | Type | Substitutions | Type | Substitutions | Type | Substitutions |
| 19-01 | VK-CK | E123R/Q124K | VH-CH1 | K147E/K213E | VH-CK | | VK-CH1 | |
| 19-02 | VK-CK | Q38E/V133K | VH-CH1 | Q39K/S183E | VH-CK | Q39K/V133E | VK-CH1 | Q38E/S183K |
| 19-03 | VK-CK | Q38E/V133K | VH-CH1 | Q39K/S183E | VH-CK | Q39E/V133E | VK-CH1 | Q38K/S183K |
| 19-04 | VK-CK | E123R/Q124K | VH-CH1 | K147E/K213E | VH-CK | | VK-CH1 | |
| 19-05 | VK-CK | Q38E/V133K | VH-CH1 | Q39K/S183E | VH-CK | Q39K/V133E | VK-CH1 | Q38E/S183K |
| 19-06 | VK-CK | Q38E/V133K | VH-CH1 | Q39K/S183E | VH-CK | Q39E/V133E | VK-CH1 | Q38K/S183K |
| 19-07 | VK-CK | E123R/Q124K | VH-CH1 | K147E/K213E | VH-CK | | VK-CH1 | |
| 19-08 | VK-CK | Q38E/V133K | VH-CH1 | Q39K/S183E | VH-CK | Q39K/V133E | VK-CH1 | Q38E/S183K |
| 19-09 | VK-CK | Q38E/V133K | VH-CH1 | Q39K/S183E | VH-CK | Q39E/V133E | VK-CH1 | Q38K/S183K |
| 19-10 | VK-CK | E123R/Q124K | VH-CH1 | K147E/K213E | VH-CK | | VK-CH1 | |
| 19-11 | VK-CK | Q38E/V133K | VH-CH1 | Q39K/S183E | VH-CK | Q39K/V133E | VK-CH1 | Q38E/S183K |
| 19-12 | VK-CK | Q38E/V133K | VH-CH1 | Q39K/S183E | VH-CK | Q39E/V133E | VK-CH1 | Q38K/S183K |
| 19-13 | VK-CK | E123R/Q124K | VH-CH1 | K147E/K213E | VH-CK | | VK-CH1 | |
| 19-14 | VK-CK | Q38E/V133K | VH-CH1 | Q39K/S183E | VH-CK | Q39K/V133E | VK-CH1 | Q38E/S183K |
| 19-15 | VK-CK | Q38E/V133K | VH-CH1 | Q39K/S183E | VH-CK | Q39E/V133E | VK-CH1 | Q38K/S183K |
| 19-16 | VK-CK | E123R/Q124K | VH-CH1 | K147E/K213E | VH-CK | | VK-CH1 | |
| 19-17 | VK-CK | Q38E/V133K | VH-CH1 | Q39K/S183E | VH-CK | Q39K/V133E | VK-CH1 | Q38E/S183K |
| 19-18 | VK-CK | Q38E/V133K | VH-CH1 | Q39K/S183E | VH-CK | Q39E/V133E | VK-CH1 | Q38K/S183K |

### Example 22—Trivalent/Tetravalent, Bispecific Tetrahedral Antibodies Comprising Two Distinct Fabs that Specifically Bind CD3 and Either CD19 or CD20

[2125] Tetrahedral antibodies incorporating an anti-CD3 domain were designed, expressed, and evaluated for their ability to co-engage T cells and disease target cells for the treatment of cancer and other disease. This series of bispecific constructs employ VH and VL regions from rituximab (anti-CD20), FMC63 (anti-CD19), or obinutuzumab (anti-CD20) to engage target cells, together with VH and VL regions from SP34 (anti-CD3) to engage T cells (Tables 50, 51). Two tetrahedral antibody configurations were employed (Table 52). In the first configuration, the disease targeting Fab domain (anti-CD19 or anti-CD20) is placed in D3/D4 (bivalent), the T cell engaging Fab domain is placed in D6 (monovalent) and/or D5/D6 (bivalent), and D1/D2 are Fc domains. In the second configuration, the disease targeting Fab domain (anti-CD19 or anti-CD20) is placed in D3/D4 (bivalent), the T cell engaging Fab domain is placed in D2 (monovalent), and D1 is an Fc domain. To optimize correct VH/VL pairing and to minimize VH/VL mispairing, V region exchange was combined with three different sets of charge pairs to ensure correct pairing of heavy and light chain V regions (Table 53). Additionally, to further facilitate purification of the correctly paired product by Protein A chromatography, for bivalent CD3, the H1 chain incorporated the H435R/Y436F substitution (for bivalent CD3); for monovalent CD3, both the H1 and H2 chains incorporated the H435R/Y436F substitution. The constructs are then evaluated for their structural bispecificity by intact mass spectrometry as described in Example 18, and for their functional bispecificity using a variety of in vitro binding assays, cytotoxicity assays, and cytokine induction and release assays, and in vivo cancer efficacy models, known to one skilled in the art.

TABLE 50

| Protein | | | | | | |
|---|---|---|---|---|---|---|
| ID | H1 Chain | H2 Chain | L1 Chain | L2 Chain | Fc Chain | H3 Chain |
| 20-01 | SEQ ID NO: 4658 | SEQ ID NO: 4659 | SEQ ID NO: 4685 | SEQ ID NO: 4686 | SEQ ID NO: 4694 | |
| 20-02 | SEQ ID NO: 4660 | SEQ ID NO: 4661 | SEQ ID NO: 4687 | SEQ ID NO: 4688 | SEQ ID NO: 4694 | |
| 20-03 | SEQ ID NO: 4660 | SEQ ID NO: 4662 | SEQ ID NO: 4687 | SEQ ID NO: 4689 | SEQ ID NO: 4694 | |
| 20-04 | SEQ ID NO: 4658 | SEQ ID NO: 4659 | SEQ ID NO: 4685 | SEQ ID NO: 4686 | | SEQ ID NO: 4663 |
| 20-05 | SEQ ID NO: 4660 | SEQ ID NO: 4661 | SEQ ID NO: 4687 | SEQ ID NO: 4688 | | SEQ ID NO: 4664 |
| 20-06 | SEQ ID NO: 4660 | SEQ ID NO: 4662 | SEQ ID NO: 4687 | SEQ ID NO: 4689 | | SEQ ID NO: 4664 |
| 20-07 | SEQ ID NO: 4658 | SEQ ID NO: 4665 | SEQ ID NO: 4685 | SEQ ID NO: 4686 | SEQ ID NO: 4694 | |
| 20-08 | SEQ ID NO: 4660 | SEQ ID NO: 4666 | SEQ ID NO: 4687 | SEQ ID NO: 4688 | SEQ ID NO: 4694 | |
| 20-09 | SEQ ID NO: 4660 | SEQ ID NO: 4667 | SEQ ID NO: 4687 | SEQ ID NO: 4689 | SEQ ID NO: 4694 | |
| 20-10 | SEQ ID NO: 4658 | SEQ ID NO: 4665 | SEQ ID NO: 4685 | SEQ ID NO: 4686 | | SEQ ID NO: 4663 |
| 20-11 | SEQ ID NO: 4660 | SEQ ID NO: 4666 | SEQ ID NO: 4687 | SEQ ID NO: 4688 | | SEQ ID NO: 4664 |
| 20-12 | SEQ ID NO: 4660 | SEQ ID NO: 4667 | SEQ ID NO: 4687 | SEQ ID NO: 4689 | | SEQ ID NO: 4664 |
| 20-13 | SEQ ID NO: 4668 | SEQ ID NO: 4659 | SEQ ID NO: 4690 | SEQ ID NO: 4686 | SEQ ID NO: 4694 | |
| 20-14 | SEQ ID NO: 4669 | SEQ ID NO: 4661 | SEQ ID NO: 4691 | SEQ ID NO: 4688 | SEQ ID NO: 4694 | |
| 20-15 | SEQ ID NO: 4669 | SEQ ID NO: 4662 | SEQ ID NO: 4691 | SEQ ID NO: 4689 | SEQ ID NO: 4694 | |
| 20-16 | SEQ ID NO: 4668 | SEQ ID NO: 4659 | SEQ ID NO: 4690 | SEQ ID NO: 4686 | | SEQ ID NO: 4670 |
| 20-17 | SEQ ID NO: 4669 | SEQ ID NO: 4661 | SEQ ID NO: 4691 | SEQ ID NO: 4688 | | SEQ ID NO: 4671 |
| 20-18 | SEQ ID NO: 4669 | SEQ ID NO: 4662 | SEQ ID NO: 4691 | SEQ ID NO: 4689 | | SEQ ID NO: 4671 |
| 20-19 | SEQ ID NO: 4668 | SEQ ID NO: 4672 | SEQ ID NO: 4690 | SEQ ID NO: 4686 | SEQ ID NO: 4694 | |
| 20-20 | SEQ ID NO: 4669 | SEQ ID NO: 4673 | SEQ ID NO: 4691 | SEQ ID NO: 4688 | SEQ ID NO: 4694 | |
| 20-21 | SEQ ID NO: 4669 | SEQ ID NO: 4674 | SEQ ID NO: 4691 | SEQ ID NO: 4689 | SEQ ID NO: 4694 | |
| 20-22 | SEQ ID NO: 4668 | SEQ ID NO: 4672 | SEQ ID NO: 4690 | SEQ ID NO: 4686 | | SEQ ID NO: 4670 |
| 20-23 | SEQ ID NO: 4669 | SEQ ID NO: 4673 | SEQ ID NO: 4691 | SEQ ID NO: 4688 | | SEQ ID NO: 4671 |
| 20-24 | SEQ ID NO: 4669 | SEQ ID NO: 4674 | SEQ ID NO: 4691 | SEQ ID NO: 4689 | | SEQ ID NO: 4671 |
| 20-25 | SEQ ID NO: 4675 | SEQ ID NO: 4659 | SEQ ID NO: 4692 | SEQ ID NO: 4686 | SEQ ID NO: 4694 | |
| 20-26 | SEQ ID NO: 4676 | SEQ ID NO: 4661 | SEQ ID NO: 4693 | SEQ ID NO: 4688 | SEQ ID NO: 4694 | |
| 20-27 | SEQ ID NO: 4676 | SEQ ID NO: 4662 | SEQ ID NO: 4693 | SEQ ID NO: 4689 | SEQ ID NO: 4694 | |
| 20-28 | SEQ ID NO: 4675 | SEQ ID NO: 4659 | SEQ ID NO: 4692 | SEQ ID NO: 4686 | | SEQ ID NO: 4677 |
| 20-29 | SEQ ID NO: 4676 | SEQ ID NO: 4661 | SEQ ID NO: 4693 | SEQ ID NO: 4688 | | SEQ ID NO: 4678 |
| 20-30 | SEQ ID NO: 4676 | SEQ ID NO: 4662 | SEQ ID NO: 4693 | SEQ ID NO: 4689 | | SEQ ID NO: 4678 |
| 20-31 | SEQ ID NO: 4675 | SEQ ID NO: 4679 | SEQ ID NO: 4692 | SEQ ID NO: 4686 | SEQ ID NO: 4694 | |
| 20-32 | SEQ ID NO: 4676 | SEQ ID NO: 4680 | SEQ ID NO: 4693 | SEQ ID NO: 4688 | SEQ ID NO: 4694 | |
| 20-33 | SEQ ID NO: 4676 | SEQ ID NO: 4681 | SEQ ID NO: 4693 | SEQ ID NO: 4689 | SEQ ID NO: 4694 | |
| 20-34 | SEQ ID NO: 4675 | SEQ ID NO: 4679 | SEQ ID NO: 4692 | SEQ ID NO: 4686 | | SEQ ID NO: 4677 |
| 20-35 | SEQ ID NO: 4676 | SEQ ID NO: 4680 | SEQ ID NO: 4693 | SEQ ID NO: 4688 | | SEQ ID NO: 4678 |
| 20-36 | SEQ ID NO: 4676 | SEQ ID NO: 4681 | SEQ ID NO: 4693 | SEQ ID NO: 4689 | | SEQ ID NO: 4678 |
| 20-37 | SEQ ID NO: 4658 | SEQ ID NO: 4682 | SEQ ID NO: 4685 | SEQ ID NO: 4686 | | |
| 20-38 | SEQ ID NO: 4660 | SEQ ID NO: 4683 | SEQ ID NO: 4687 | SEQ ID NO: 4688 | | |
| 20-39 | SEQ ID NO: 4660 | SEQ ID NO: 4684 | SEQ ID NO: 4687 | SEQ ID NO: 4689 | | |
| 20-40 | SEQ ID NO: 4668 | SEQ ID NO: 4682 | SEQ ID NO: 4690 | SEQ ID NO: 4686 | | |
| 20-41 | SEQ ID NO: 4669 | SEQ ID NO: 4683 | SEQ ID NO: 4691 | SEQ ID NO: 4688 | | |
| 20-42 | SEQ ID NO: 4669 | SEQ ID NO: 4684 | SEQ ID NO: 4691 | SEQ ID NO: 4689 | | |
| 20-43 | SEQ ID NO: 4675 | SEQ ID NO: 4682 | SEQ ID NO: 4692 | SEQ ID NO: 4686 | | |
| 20-44 | SEQ ID NO: 4676 | SEQ ID NO: 4683 | SEQ ID NO: 4693 | SEQ ID NO: 4688 | | |
| 20-45 | SEQ ID NO: 4676 | SEQ ID NO: 4684 | SEQ ID NO: 4693 | SEQ ID NO: 4689 | | |

TABLE 51

| Protein | | | | | | | |
|---|---|---|---|---|---|---|---|
| ID | D1-Fc | D5-Fab | D4-Fab | D3-Fab | D6-Fab | D2-Fab | D2-Fc |
| 20-01 | L234A/L235A/P329G | | Rituximab | Rituximab | SP34 | | L234A/L235A/P329G |
| 20-02 | L234A/L235A/P329G | | Rituximab | Rituximab | SP34 | | L234A/L235A/P329G |
| 20-03 | L234A/L235A/P329G | | Rituximab | Rituximab | SP34 | | L234A/L235A/P329G |
| 20-04 | L234A/L235A/P329G | Rituximab | Rituximab | Rituximab | SP34 | | L234A/L235A/P329G |
| 20-05 | L234A/L235A/P329G | Rituximab | Rituximab | Rituximab | SP34 | | L234A/L235A/P329G |
| 20-06 | L234A/L235A/P329G | Rituximab | Rituximab | Rituximab | SP34 | | L234A/L235A/P329G |
| 20-07 | L234A/L235A/P329G | | Rituximab | Rituximab | | SP34 | |
| 20-08 | L234A/L235A/P329G | | Rituximab | Rituximab | | SP34 | |
| 20-09 | L234A/L235A/P329G | | Rituximab | Rituximab | | SP34 | |
| 20-10 | L234A/L235A/P329G | Rituximab | Rituximab | Rituximab | | SP34 | |
| 20-11 | L234A/L235A/P329G | Rituximab | Rituximab | Rituximab | | SP34 | |
| 20-12 | L234A/L235A/P329G | Rituximab | Rituximab | Rituximab | | SP34 | |
| 20-13 | L234A/L235A/P329G | | FMC63 | FMC63 | SP34 | | L234A/L235A/P329G |
| 20-14 | L234A/L235A/P329G | | FMC63 | FMC63 | SP34 | | L234A/L235A/P329G |
| 20-15 | L234A/L235A/P329G | | FMC63 | FMC63 | SP34 | | L234A/L235A/P329G |
| 20-16 | L234A/L235A/P329G | FMC63 | FMC63 | FMC63 | SP34 | | L234A/L235A/P329G |
| 20-17 | L234A/L235A/P329G | FMC63 | FMC63 | FMC63 | SP34 | | L234A/L235A/P329G |
| 20-18 | L234A/L235A/P329G | FMC63 | FMC63 | FMC63 | SP34 | | L234A/L235A/P329G |
| 20-19 | L234A/L235A/P329G | | FMC63 | FMC63 | | SP34 | |
| 20-20 | L234A/L235A/P329G | | FMC63 | FMC63 | | SP34 | |
| 20-21 | L234A/L235A/P329G | | FMC63 | FMC63 | | SP34 | |
| 20-22 | L234A/L235A/P329G | FMC63 | FMC63 | FMC63 | | SP34 | |
| 20-23 | L234A/L235A/P329G | FMC63 | FMC63 | FMC63 | | SP34 | |
| 20-24 | L234A/L235A/P329G | FMC63 | FMC63 | FMC63 | | SP34 | |
| 20-25 | L234A/L235A/P329G | | Obinutuzumab | Obinutuzumab | SP34 | | L234A/L235A/P329G |
| 20-26 | L234A/L235A/P329G | | Obinutuzumab | Obinutuzumab | SP34 | | L234A/L235A/P329G |
| 20-27 | L234A/L235A/P329G | | Obinutuzumab | Obinutuzumab | SP34 | | L234A/L235A/P329G |
| 20-28 | L234A/L235A/P329G | Obinutuzumab | Obinutuzumab | Obinutuzumab | SP34 | | L234A/L235A/P329G |
| 20-29 | L234A/L235A/P329G | Obinutuzumab | Obinutuzumab | Obinutuzumab | SP34 | | L234A/L235A/P329G |
| 20-30 | L234A/L235A/P329G | Obinutuzumab | Obinutuzumab | Obinutuzumab | SP34 | | L234A/L235A/P329G |
| 20-31 | L234A/L235A/P329G | | Obinutuzumab | Obinutuzumab | | SP34 | |
| 20-32 | L234A/L235A/P329G | | Obinutuzumab | Obinutuzumab | | SP34 | |
| 20-33 | L234A/L235A/P329G | | Obinutuzumab | Obinutuzumab | | SP34 | |
| 20-34 | L234A/L235A/P329G | Obinutuzumab | Obinutuzumab | Obinutuzumab | | SP34 | |
| 20-35 | L234A/L235A/P329G | Obinutuzumab | Obinutuzumab | Obinutuzumab | | SP34 | |
| 20-36 | L234A/L235A/P329G | Obinutuzumab | Obinutuzumab | Obinutuzumab | | SP34 | |
| 20-37 | L234A/L235A/P329G | SP34 | Rituximab | Rituximab | SP34 | | L234A/L235A/P329G |
| 20-38 | L234A/L235A/P329G | SP34 | Rituximab | Rituximab | SP34 | | L234A/L235A/P329G |
| 20-39 | L234A/L235A/P329G | SP34 | Rituximab | Rituximab | SP34 | | L234A/L235A/P329G |
| 20-40 | L234A/L235A/P329G | SP34 | FMC63 | FMC63 | SP34 | | L234A/L235A/P329G |
| 20-41 | L234A/L235A/P329G | SP34 | FMC63 | FMC63 | SP34 | | L234A/L235A/P329G |
| 20-42 | L234A/L235A/P329G | SP34 | FMC63 | FMC63 | SP34 | | L234A/L235A/P329G |
| 20-43 | L234A/L235A/P329G | SP34 | Obinutuzumab | Obinutuzumab | SP34 | | L234A/L235A/P329G |
| 20-44 | L234A/L235A/P329G | SP34 | Obinutuzumab | Obinutuzumab | SP34 | | L234A/L235A/P329G |
| 20-45 | L234A/L235A/P329G | SP34 | Obinutuzumab | Obinutuzumab | SP34 | | L234A/L235A/P329G |

TABLE 52

| Protein | D1-Fc | D5-Fab | D4-Fab | D3-Fab | D6-Fab | D2-Fab | D2-Fc |
|---|---|---|---|---|---|---|---|
| ID | Specificity | Specificity | Specificity | Specificity | Specificity | Specificity | Specificity |
| 20-01 | FcgR silent | | CD20 | CD20 | CD3 | | FcgR silent |
| 20-02 | FcgR silent | | CD20 | CD20 | CD3 | | FcgR silent |
| 20-03 | FcgR silent | | CD20 | CD20 | CD3 | | FcgR silent |
| 20-04 | FcgR silent | CD20 | CD20 | CD20 | CD3 | | FcgR silent |
| 20-05 | FcgR silent | CD20 | CD20 | CD20 | CD3 | | FcgR silent |
| 20-06 | FcgR silent | CD20 | CD20 | CD20 | CD3 | | FcgR silent |
| 20-07 | FcgR silent | | CD20 | CD20 | | CD3 | |
| 20-08 | FcgR silent | | CD20 | CD20 | | CD3 | |
| 20-09 | FcgR silent | | CD20 | CD20 | | CD3 | |
| 20-10 | FcgR silent | CD20 | CD20 | CD20 | | CD3 | |
| 20-11 | FcgR silent | CD20 | CD20 | CD20 | | CD3 | |
| 20-12 | FcgR silent | CD20 | CD20 | CD20 | | CD3 | |
| 20-13 | FcgR silent | | CD19 | CD19 | | CD3 | FcgR silent |
| 20-14 | FcgR silent | | CD19 | CD19 | CD3 | | FcgR silent |
| 20-15 | FcgR silent | | CD19 | CD19 | CD3 | | FcgR silent |
| 20-16 | FcgR silent | CD19 | CD19 | CD19 | CD3 | | FcgR silent |
| 20-17 | FcgR silent | CD19 | CD19 | CD19 | CD3 | | FcgR silent |
| 20-18 | FcgR silent | CD19 | CD19 | CD19 | CD3 | | FcgR silent |
| 20-19 | FcgR silent | | CD19 | CD19 | | CD3 | |
| 20-20 | FcgR silent | | CD19 | CD19 | | CD3 | |
| 20-21 | FcgR silent | | CD19 | CD19 | | CD3 | |
| 20-22 | FcgR silent | CD19 | CD19 | CD19 | | CD3 | |
| 20-23 | FcgR silent | CD19 | CD19 | CD19 | | CD3 | |
| 20-24 | FcgR silent | CD19 | CD19 | CD19 | | CD3 | |
| 20-25 | FcgR silent | | CD20 | CD20 | CD3 | | FcgR silent |
| 20-26 | FcgR silent | | CD20 | CD20 | CD3 | | FcgR silent |
| 20-27 | FcgR silent | | CD20 | CD20 | CD3 | | FcgR silent |
| 20-28 | FcgR silent | CD20 | CD20 | CD20 | CD3 | | FcgR silent |
| 20-29 | FcgR silent | CD20 | CD20 | CD20 | CD3 | | FcgR silent |
| 20-30 | FcgR silent | CD20 | CD20 | CD20 | CD3 | | FcgR silent |
| 20-31 | FcgR silent | | CD20 | CD20 | | CD3 | |
| 20-32 | FcgR silent | | CD20 | CD20 | | CD3 | |
| 20-33 | FcgR silent | | CD20 | CD20 | | CD3 | |
| 20-34 | FcgR silent | CD20 | CD20 | CD20 | | CD3 | |
| 20-35 | FcgR silent | CD20 | CD20 | CD20 | | CD3 | |
| 20-36 | FcgR silent | CD20 | CD20 | CD20 | | CD3 | |
| 20-37 | FcgR silent | CD3 | CD20 | CD20 | CD3 | | FcgR silent |
| 20-38 | FcgR silent | CD3 | CD20 | CD20 | CD3 | | FcgR silent |
| 20-39 | FcgR silent | CD3 | CD20 | CD20 | CD3 | | FcgR silent |
| 20-40 | FcgR silent | CD3 | CD19 | CD19 | CD3 | | FcgR silent |
| 20-41 | FcgR silent | CD3 | CD19 | CD19 | CD3 | | FcgR silent |
| 20-42 | FcgR silent | CD3 | CD19 | CD19 | CD3 | | FcgR silent |
| 20-43 | FcgR silent | CD3 | CD20 | CD20 | CD3 | | FcgR silent |
| 20-44 | FcgR silent | CD3 | CD20 | CD20 | CD3 | | FcgR silent |
| 20-45 | FcgR silent | CD3 | CD20 | CD20 | CD3 | | FcgR silent |

TABLE 53

| | H1/H3 Chain | | H2 Chain | | L1 Chain | | L2 Chain | |
|---|---|---|---|---|---|---|---|---|
| Protein | V region | Amino acid | V region | Amino acid | V region | Amino acid | V region | Amino acid |
| ID | type | Substitutions | Type | Substitutions | Type | Substitutions | Type | Substitutions |
| 20-01 | VH-CH1 | K147E/K213E | VK-CH1 | | VK-CK | E123R/Q124K | VH-CK | |
| | | (H1 only) | | | | | | |
| 20-02 | VH-CH1 | Q39K/S183E | VK-CH1 | Q38E/S183K | VK-CK | Q38E/V133K | VH-CK | Q39K/V133E |
| | | (H1 only) | | | | | | |
| 20-03 | VH-CH1 | Q39K/S183E | VK-CH1 | Q38K/S183K | VK-CK | Q38E/V133K | VH-CK | Q39E/V133E |
| | | (H1 only) | | | | | | |
| 20-04 | VH-CH1 | K147E/K213E | VK-CH1 | | VK-CK | E123R/Q124K | VH-CK | |
| 20-05 | VH-CH1 | Q39K/S183E | VK-CH1 | Q38E/S183K | VK-CK | Q38E/V133K | VH-CK | Q39K/V133E |
| 20-06 | VH-CH1 | Q39K/S183E | VK-CH1 | Q38K/S183K | VK-CK | Q38E/V133K | VH-CK | Q39E/V133E |
| 20-07 | VH-CH1 | K147E/K213E | VH-CH1 | K147E/K213E | VK-CK | E123R/Q124K | VH-CK | |
| | | (H1 only) | VK-CH1 | | | | | |
| 20-08 | VH-CH1 | Q39K/S183E | VH-CH1 | Q39K/S183E | VK-CK | Q38E/V133K | VH-CK | Q39K/V133E |
| | | (H1 only) | VK-CH1 | Q38E/S183K | | | | |
| 20-09 | VH-CH1 | Q39K/S183E | VH-CH1 | Q39K/S183E | VK-CK | Q38E/V133K | VH-CK | Q39E/V133E |
| | | (H1 only) | VK-CH1 | Q38K/S183K | | | | |
| 20-10 | VH-CH1 | K147E/K213E | VH-CH1 | K147E/K213E | VK-CK | E123R/Q124K | VH-CK | |
| | | | VK-CH1 | | | | | |
| 20-11 | VH-CH1 | Q39K/S183E | VH-CH1 | Q39K/S183E | VK-CK | Q38E/V133K | VH-CK | Q39K/V133E |
| | | | VK-CH1 | Q38E/S183K | | | | |
| 20-12 | VH-CH1 | Q39K/S183E | VH-CH1 | Q39K/S183E | VK-CK | Q38E/V133K | VH-CK | Q39E/V133E |
| | | | VK-CH1 | Q38K/S183K | | | | |
| 20-13 | VH-CH1 | K147E/K213E | VK-CH1 | | VK-CK | E123R/Q124K | VH-CK | |
| | | (H1 only) | | | | | | |
| 20-14 | VH-CH1 | Q39K/S183E | VK-CH1 | Q38E/S183K | VK-CK | Q38E/V133K | VH-CK | Q39K/V133E |
| | | (H1 only) | | | | | | |
| 20-15 | VH-CH1 | Q39K/S183E | VK-CH1 | Q38K/S183K | VK-CK | Q38E/V133K | VH-CK | Q39E/V133E |
| | | (H1 only) | | | | | | |
| 20-16 | VH-CH1 | K147E/K213E | VK-CH1 | | VK-CK | E123R/Q124K | VH-CK | |
| 20-17 | VH-CH1 | Q39K/S183E | VK-CH1 | Q38E/S183K | VK-CK | Q38E/V133K | VH-CK | Q39K/V133E |
| 20-18 | VH-CH1 | Q39K/S183E | VK-CH1 | Q38K/S183K | VK-CK | Q38E/V133K | VH-CK | Q39E/V133E |
| 20-19 | VH-CH1 | K147E/K213E | VH-CH1 | K147E/K213E | VK-CK | E123R/Q124K | VH-CK | |
| | | (H1 only) | VK-CH1 | | | | | |
| 20-20 | VH-CH1 | Q39K/S183E | VH-CH1 | Q39K/S183E | VK-CK | Q38E/V133K | VH-CK | Q39K/V133E |
| | | (H1 only) | VK-CH1 | Q38E/S183K | | | | |
| 20-21 | VH-CH1 | Q39K/S183E | VH-CH1 | Q39K/S183E | VK-CK | Q38E/V133K | VH-CK | Q39E/V133E |
| | | (H1 only) | VK-CH1 | Q38K/S183K | | | | |
| 20-22 | VH-CH1 | K147E/K213E | VH-CH1 | K147E/K213E | VK-CK | E123R/Q124K | VH-CK | |
| | | | VK-CH1 | | | | | |
| 20-23 | VH-CH1 | Q39K/S183E | VH-CH1 | Q39K/S183E | VK-CK | Q38E/V133K | VH-CK | Q39K/V133E |
| | | | VK-CH1 | Q38E/S183K | | | | |
| 20-24 | VH-CH1 | Q39K/S183E | VH-CH1 | Q39K/S183E | VK-CK | Q38E/V133K | VH-CK | Q39E/V133E |
| | | | VK-CH1 | Q38K/S183K | | | | |
| 20-25 | VH-CH1 | K147E/K213E | VK-CH1 | | VK-CK | E123R/Q124K | VH-CK | |
| | | (H1 only) | | | | | | |
| 20-26 | VH-CH1 | Q39K/S183E | VK-CH1 | Q38E/S183K | VK-CK | Q38E/V133K | VH-CK | Q39K/V133E |
| | | (H1 only) | | | | | | |
| 20-27 | VH-CH1 | Q39K/S183E | VK-CH1 | Q38K/S183K | VK-CK | Q38E/V133K | VH-CK | Q39E/V133E |
| | | (H1 only) | | | | | | |
| 20-28 | VH-CH1 | K147E/K213E | VK-CH1 | | VK-CK | E123R/Q124K | VH-CK | |
| 20-29 | VH-CH1 | Q39K/S183E | VK-CH1 | Q38E/S183K | VK-CK | Q38E/V133K | VH-CK | Q39K/V133E |
| 20-30 | VH-CH1 | Q39K/S183E | VK-CH1 | Q38K/S183K | VK-CK | Q38E/V133K | VH-CK | Q39E/V133E |
| 20-31 | VH-CH1 | K147E/K213E | VH-CH1 | K147E/K213E | VK-CK | E123R/Q124K | VH-CK | |
| | | (H1 only) | VK-CH1 | | | | | |
| 20-32 | VH-CH1 | Q39K/S183E | VH-CH1 | Q39K/S183E | VK-CK | Q38E/V133K | VH-CK | Q39K/V133E |
| | | (H1 only) | VK-CH1 | Q38E/S183K | | | | |
| 20-33 | VH-CH1 | Q39K/S183E | VH-CH1 | Q39K/S183E | VK-CK | Q38E/V133K | VH-CK | Q39E/V133E |
| | | (H1 only) | VK-CH1 | Q38K/S183K | | | | |
| 20-34 | VH-CH1 | K147E/K213E | VH-CH1 | K147E/K213E | VK-CK | E123R/Q124K | VH-CK | |
| | | | VK-CH1 | | | | | |
| 20-35 | VH-CH1 | Q39K/S183E | VH-CH1 | Q39K/S183E | VK-CK | Q38E/V133K | VH-CK | Q39K/V133E |
| | | | VK-CH1 | Q38E/S183K | | | | |
| 20-36 | VH-CH1 | Q39K/S183E | VH-CH1 | Q39K/S183E | VK-CK | Q38E/V133K | VH-CK | Q39E/V133E |
| | | | VK-CH1 | Q38K/S183K | | | | |
| 20-37 | VH-CH1 | K147E/K213E | VK-CH1 | | VK-CK | E123R/Q124K | VH-CK | |
| | | (H1 only) | | | | | | |
| 20-38 | VH-CH1 | Q39K/S183E | VK-CH1 | Q38E/S183K | VK-CK | Q38E/V133K | VH-CK | Q39K/V133E |
| | | (H1 only) | | | | | | |
| 20-39 | VH-CH1 | Q39K/S183E | VK-CH1 | Q38K/S183K | VK-CK | Q38E/V133K | VH-CK | Q39E/V133E |
| | | (H1 only) | | | | | | |
| 20-40 | VH-CH1 | K147E/K213E | VK-CH1 | | VK-CK | E123R/Q124K | VH-CK | |
| | | (H1 only) | | | | | | |
| 20-41 | VH-CH1 | Q39K/S183E | VK-CH1 | Q38E/S183K | VK-CK | Q38E/V133K | VH-CK | Q39K/V133E |
| | | (H1 only) | | | | | | |
| 20-42 | VH-CH1 | Q39K/S183E | VK-CH1 | Q38K/S183K | VK-CK | Q38E/V133K | VH-CK | Q39E/V133E |
| | | (H1 only) | | | | | | |
| 20-43 | VH-CH1 | K147E/K213E | VK-CH1 | | VK-CK | E123R/Q124K | VH-CK | |
| | | (H1 only) | | | | | | |
| 20-44 | VH-CH1 | Q39K/S183E | VK-CH1 | Q38E/S183K | VK-CK | Q38E/V133K | VH-CK | Q39K/V133E |
| | | (H1 only) | | | | | | |
| 20-45 | VH-CH1 | Q39K/S183E | VK-CH1 | Q38K/S183K | VK-CK | Q38E/V133K | VH-CK | Q39E/V133E |
| | | (H1 only) | | | | | | |

### Example 23—Tetravalent, Bispecific Tetrahedral Antibodies Comprising Two Distinct Fabs that Specifically Bind CD19 and CD20, and Two Fe Domains with FcgR Enhancing Mutations

[2126] Tetrahedral antibodies were designed, expressed, and evaluated for their ability to co-engage NK cells and disease target cells for the treatment of B cell cancer and other B cell disease, particularly resistant and recurrent disease. This series of bispecific constructs employ VH and VL regions from rituximab (anti-CD20) and FMC63 (anti-CD19), or rituximab and either FMC60 or FMC59, two different humanized versions of FMC63. (Tables 54, 55). Two distinct configurations of the anti-CD20 and anti-CD19 Fabs were evaluated (Table 56). In the first, the anti-CD20 and anti-CD19 Fabs are placed in D3/D4 and D5/D6, respectively; in the second, the anti-CD20 and anti-CD19 Fabs are placed in D5/D6 and D3/D4, respectively. Additionally, the D1/D2 Fc domains were alternatively wild-type with respect to FcgR binding sequences or comprised the FcgR enhancing mutations S239D/I332E. Three distinct configurations of the FcgR enhancing mutations were evaluated (Tables 55, 56). In the first, the H1 and H2 chains each comprised the S239D and I332E mutations (symmetric configuration). In the second, the H1 chain comprised the S239D mutation and the H2 chain comprised the I332E mutation (asymmetric configuration). In the third, the H1 chain comprised the I332E mutation and the H2 chain comprised the S239D mutation (asymmetric configuration). To optimize correct VH/VL pairing and to minimize VH/VL mispairing, V region exchange was combined with four different sets of charge pairs to ensure correct pairing of heavy and light chain V regions (Table 57). Additionally, to further facilitate purification of the correctly paired product by Protein A chromatography, the H1 chain incorporated the H435R/Y436F substitution. The constructs are then evaluated for their structural bispecificity by intact mass spectrometry as described in Example 18, and for their functional bispecificity using a variety of in vitro binding assays, cytotoxicity assays, and cytokine induction and release assays, and in vivo cancer efficacy models, known to one skilled in the art.

TABLE 54

| Protein | | | | | |
|---|---|---|---|---|---|
| ID | H1 Chain | H2 Chain | L1 Chain | L2 Chain | Fe Chain |
| 21-01 | SEQ ID NO: 4701 | SEQ ID NO: 4702 | SEQ ID NO: 4801 | SEQ ID NO: 4802 | |
| 21-02 | SEQ ID NO: 4703 | SEQ ID NO: 4704 | SEQ ID NO: 4803 | SEQ ID NO: 4804 | |
| 21-03 | SEQ ID NO: 4703 | SEQ ID NO: 4705 | SEQ ID NO: 4803 | SEQ ID NO: 4805 | |
| 21-04 | SEQ ID NO: 4706 | SEQ ID NO: 4707 | SEQ ID NO: 4806 | SEQ ID NO: 4807 | |
| 21-05 | SEQ ID NO: 4708 | SEQ ID NO: 4709 | SEQ ID NO: 4808 | SEQ ID NO: 4809 | |
| 21-06 | SEQ ID NO: 4708 | SEQ ID NO: 4710 | SEQ ID NO: 4808 | SEQ ID NO: 4810 | |
| 21-07 | SEQ ID NO: 4711 | SEQ ID NO: 4712 | SEQ ID NO: 4801 | SEQ ID NO: 4802 | |
| 21-08 | SEQ ID NO: 4713 | SEQ ID NO: 4714 | SEQ ID NO: 4803 | SEQ ID NO: 4804 | |
| 21-09 | SEQ ID NO: 4713 | SEQ ID NO: 4715 | SEQ ID NO: 4803 | SEQ ID NO: 4805 | |
| 21-10 | SEQ ID NO: 4716 | SEQ ID NO: 4717 | SEQ ID NO: 4806 | SEQ ID NO: 4807 | |
| 21-11 | SEQ ID NO: 4718 | SEQ ID NO: 4719 | SEQ ID NO: 4808 | SEQ ID NO: 4809 | |
| 21-12 | SEQ ID NO: 4718 | SEQ ID NO: 4720 | SEQ ID NO: 4808 | SEQ ID NO: 4810 | |
| 21-13 | SEQ ID NO: 4721 | SEQ ID NO: 4722 | SEQ ID NO: 4801 | SEQ ID NO: 4802 | |
| 21-14 | SEQ ID NO: 4723 | SEQ ID NO: 4724 | SEQ ID NO: 4803 | SEQ ID NO: 4804 | |
| 21-15 | SEQ ID NO: 4723 | SEQ ID NO: 4725 | SEQ ID NO: 4803 | SEQ ID NO: 4805 | |
| 21-16 | SEQ ID NO: 4726 | SEQ ID NO: 4727 | SEQ ID NO: 4806 | SEQ ID NO: 4807 | |
| 21-17 | SEQ ID NO: 4728 | SEQ ID NO: 4729 | SEQ ID NO: 4808 | SEQ ID NO: 4809 | |
| 21-18 | SEQ ID NO: 4728 | SEQ ID NO: 4730 | SEQ ID NO: 4808 | SEQ ID NO: 4810 | |
| 21-19 | SEQ ID NO: 4731 | | SEQ ID NO: 4811 | | |
| 21-20 | SEQ ID NO: 4732 | | SEQ ID NO: 4811 | | |
| 21-21 | SEQ ID NO: 4733 | SEQ ID NO: 4734 | SEQ ID NO: 4811 | | |
| 21-22 | SEQ ID NO: 4735 | SEQ ID NO: 4736 | SEQ ID NO: 4811 | | |
| 21-23 | SEQ ID NO: 4737 | SEQ ID NO: 4738 | SEQ ID NO: 4811 | | |
| 21-24 | SEQ ID NO: 4739 | SEQ ID NO: 4740 | SEQ ID NO: 4811 | | |
| 21-25 | SEQ ID NO: 4741 | | SEQ ID NO: 4812 | | |
| 21-26 | SEQ ID NO: 4742 | | SEQ ID NO: 4812 | | |
| 21-27 | SEQ ID NO: 4743 | SEQ ID NO: 4744 | SEQ ID NO: 4812 | | |
| 21-28 | SEQ ID NO: 4745 | SEQ ID NO: 4746 | SEQ ID NO: 4812 | | |
| 21-29 | SEQ ID NO: 4747 | SEQ ID NO: 4748 | SEQ ID NO: 4812 | | |
| 21-30 | SEQ ID NO: 4749 | SEQ ID NO: 4750 | SEQ ID NO: 4812 | | |
| 21-31 | SEQ ID NO: 4695 | SEQ ID NO: 4751 | SEQ ID NO: 4803 | SEQ ID NO: 4813 | |
| 21-32 | SEQ ID NO: 4695 | SEQ ID NO: 4752 | SEQ ID NO: 4803 | SEQ ID NO: 4814 | |
| 21-33 | SEQ ID NO: 4753 | SEQ ID NO: 4751 | SEQ ID NO: 4815 | SEQ ID NO: 4813 | |
| 21-34 | SEQ ID NO: 4753 | SEQ ID NO: 4752 | SEQ ID NO: 4815 | SEQ ID NO: 4814 | |
| 21-35 | SEQ ID NO: 4754 | SEQ ID NO: 4699 | SEQ ID NO: 4816 | SEQ ID NO: 4809 | |
| 21-36 | SEQ ID NO: 4754 | SEQ ID NO: 4700 | SEQ ID NO: 4816 | SEQ ID NO: 4810 | |
| 21-37 | SEQ ID NO: 4755 | SEQ ID NO: 4699 | SEQ ID NO: 4817 | SEQ ID NO: 4809 | |
| 21-38 | SEQ ID NO: 4755 | SEQ ID NO: 4700 | SEQ ID NO: 4817 | SEQ ID NO: 4810 | |
| 21-39 | SEQ ID NO: 4756 | SEQ ID NO: 4757 | SEQ ID NO: 4803 | SEQ ID NO: 4813 | |
| 21-40 | SEQ ID NO: 4756 | SEQ ID NO: 4758 | SEQ ID NO: 4803 | SEQ ID NO: 4814 | |
| 21-41 | SEQ ID NO: 4759 | SEQ ID NO: 4757 | SEQ ID NO: 4815 | SEQ ID NO: 4813 | |
| 21-42 | SEQ ID NO: 4759 | SEQ ID NO: 4758 | SEQ ID NO: 4815 | SEQ ID NO: 4814 | |
| 21-43 | SEQ ID NO: 4760 | SEQ ID NO: 4761 | SEQ ID NO: 4816 | SEQ ID NO: 4809 | |
| 21-44 | SEQ ID NO: 4760 | SEQ ID NO: 4762 | SEQ ID NO: 4816 | SEQ ID NO: 4810 | |
| 21-45 | SEQ ID NO: 4763 | SEQ ID NO: 4761 | SEQ ID NO: 4817 | SEQ ID NO: 4809 | |
| 21-46 | SEQ ID NO: 4763 | SEQ ID NO: 4762 | SEQ ID NO: 4817 | SEQ ID NO: 4810 | |
| 21-47 | SEQ ID NO: 4764 | SEQ ID NO: 4765 | SEQ ID NO: 4803 | SEQ ID NO: 4813 | |
| 21-48 | SEQ ID NO: 4764 | SEQ ID NO: 4766 | SEQ ID NO: 4803 | SEQ ID NO: 4814 | |
| 21-49 | SEQ ID NO: 4767 | SEQ ID NO: 4765 | SEQ ID NO: 4815 | SEQ ID NO: 4813 | |
| 21-50 | SEQ ID NO: 4767 | SEQ ID NO: 4766 | SEQ ID NO: 4815 | SEQ ID NO: 4814 | |
| 21-51 | SEQ ID NO: 4768 | SEQ ID NO: 4769 | SEQ ID NO: 4816 | SEQ ID NO: 4809 | |
| 21-52 | SEQ ID NO: 4768 | SEQ ID NO: 4770 | SEQ ID NO: 4816 | SEQ ID NO: 4810 | |
| 21-53 | SEQ ID NO: 4771 | SEQ ID NO: 4769 | SEQ ID NO: 4817 | SEQ ID NO: 4809 | |
| 21-54 | SEQ ID NO: 4771 | SEQ ID NO: 4770 | SEQ ID NO: 4817 | SEQ ID NO: 4810 | |
| 21-55 | SEQ ID NO: 4723 | SEQ ID NO: 4772 | SEQ ID NO: 4803 | SEQ ID NO: 4813 | |
| 21-56 | SEQ ID NO: 4723 | SEQ ID NO: 4773 | SEQ ID NO: 4803 | SEQ ID NO: 4814 | |
| 21-57 | SEQ ID NO: 4774 | SEQ ID NO: 4772 | SEQ ID NO: 4815 | SEQ ID NO: 4813 | |
| 21-58 | SEQ ID NO: 4774 | SEQ ID NO: 4773 | SEQ ID NO: 4815 | SEQ ID NO: 4814 | |
| 21-59 | SEQ ID NO: 4775 | SEQ ID NO: 4729 | SEQ ID NO: 4816 | SEQ ID NO: 4809 | |
| 21-60 | SEQ ID NO: 4775 | SEQ ID NO: 4730 | SEQ ID NO: 4816 | SEQ ID NO: 4810 | |
| 21-61 | SEQ ID NO: 4776 | SEQ ID NO: 4729 | SEQ ID NO: 4817 | SEQ ID NO: 4809 | |
| 21-62 | SEQ ID NO: 4776 | SEQ ID NO: 4730 | SEQ ID NO: 4817 | SEQ ID NO: 4810 | |
| 21-63 | SEQ ID NO: 4777 | | SEQ ID NO: 4818 | | |
| 21-64 | SEQ ID NO: 4778 | | SEQ ID NO: 4818 | | |
| 21-65 | SEQ ID NO: 4779 | SEQ ID NO: 4780 | SEQ ID NO: 4818 | | |
| 21-66 | SEQ ID NO: 4781 | SEQ ID NO: 4782 | SEQ ID NO: 4818 | | |
| 21-67 | SEQ ID NO: 4783 | SEQ ID NO: 4784 | SEQ ID NO: 4818 | | |
| 21-68 | SEQ ID NO: 4785 | SEQ ID NO: 4786 | SEQ ID NO: 4818 | | |
| 21-69 | SEQ ID NO: 4695 | SEQ ID NO: 4787 | SEQ ID NO: 4803 | SEQ ID NO: 4813 | |
| 21-70 | SEQ ID NO: 4695 | SEQ ID NO: 4788 | SEQ ID NO: 4803 | SEQ ID NO: 4814 | |
| 21-71 | SEQ ID NO: 4753 | SEQ ID NO: 4787 | SEQ ID NO: 4815 | SEQ ID NO: 4813 | |
| 21-72 | SEQ ID NO: 4753 | SEQ ID NO: 4788 | SEQ ID NO: 4815 | SEQ ID NO: 4814 | |
| 21-73 | SEQ ID NO: 4754 | SEQ ID NO: 4699 | SEQ ID NO: 4819 | SEQ ID NO: 4809 | |
| 21-74 | SEQ ID NO: 4754 | SEQ ID NO: 4700 | SEQ ID NO: 4819 | SEQ ID NO: 4810 | |
| 21-75 | SEQ ID NO: 4755 | SEQ ID NO: 4699 | SEQ ID NO: 4820 | SEQ ID NO: 4809 | |
| 21-76 | SEQ ID NO: 4755 | SEQ ID NO: 4700 | SEQ ID NO: 4820 | SEQ ID NO: 4810 | |
| 21-77 | SEQ ID NO: 4756 | SEQ ID NO: 4789 | SEQ ID NO: 4803 | SEQ ID NO: 4813 | |
| 21-78 | SEQ ID NO: 4756 | SEQ ID NO: 4790 | SEQ ID NO: 4803 | SEQ ID NO: 4814 | |
| 21-79 | SEQ ID NO: 4759 | SEQ ID NO: 4789 | SEQ ID NO: 4815 | SEQ ID NO: 4813 | |
| 21-80 | SEQ ID NO: 4759 | SEQ ID NO: 4790 | SEQ ID NO: 4815 | SEQ ID NO: 4814 | |
| 21-81 | SEQ ID NO: 4760 | SEQ ID NO: 4761 | SEQ ID NO: 4819 | SEQ ID NO: 4809 | |
| 21-82 | SEQ ID NO: 4760 | SEQ ID NO: 4762 | SEQ ID NO: 4819 | SEQ ID NO: 4810 | |
| 21-83 | SEQ ID NO: 4763 | SEQ ID NO: 4761 | SEQ ID NO: 4820 | SEQ ID NO: 4809 | |
| 21-84 | SEQ ID NO: 4763 | SEQ ID NO: 4762 | SEQ ID NO: 4820 | SEQ ID NO: 4810 | |
| 21-85 | SEQ ID NO: 4764 | SEQ ID NO: 4791 | SEQ ID NO: 4803 | SEQ ID NO: 4813 | |
| 21-86 | SEQ ID NO: 4764 | SEQ ID NO: 4792 | SEQ ID NO: 4803 | SEQ ID NO: 4814 | |
| 21-87 | SEQ ID NO: 4767 | SEQ ID NO: 4791 | SEQ ID NO: 4815 | SEQ ID NO: 4813 | |
| 21-88 | SEQ ID NO: 4767 | SEQ ID NO: 4792 | SEQ ID NO: 4815 | SEQ ID NO: 4814 | |
| 21-89 | SEQ ID NO: 4768 | SEQ ID NO: 4769 | SEQ ID NO: 4819 | SEQ ID NO: 4809 | |
| 21-90 | SEQ ID NO: 4768 | SEQ ID NO: 4770 | SEQ ID NO: 4819 | SEQ ID NO: 4810 | |
| 21-91 | SEQ ID NO: 4771 | SEQ ID NO: 4769 | SEQ ID NO: 4820 | SEQ ID NO: 4809 | |
| 21-92 | SEQ ID NO: 4771 | SEQ ID NO: 4770 | SEQ ID NO: 4820 | SEQ ID NO: 4810 | |
| 21-93 | SEQ ID NO: 4723 | SEQ ID NO: 4793 | SEQ ID NO: 4803 | SEQ ID NO: 4813 | |
| 21-94 | SEQ ID NO: 4723 | SEQ ID NO: 4794 | SEQ ID NO: 4803 | SEQ ID NO: 4814 | |
| 21-95 | SEQ ID NO: 4774 | SEQ ID NO: 4793 | SEQ ID NO: 4815 | SEQ ID NO: 4813 | |
| 21-96 | SEQ ID NO: 4774 | SEQ ID NO: 4794 | SEQ ID NO: 4815 | SEQ ID NO: 4814 | |
| 21-97 | SEQ ID NO: 4775 | SEQ ID NO: 4729 | SEQ ID NO: 4819 | SEQ ID NO: 4809 | |
| 21-98 | SEQ ID NO: 4775 | SEQ ID NO: 4730 | SEQ ID NO: 4819 | SEQ ID NO: 4810 | |
| 21-99 | SEQ ID NO: 4776 | SEQ ID NO: 4729 | SEQ ID NO: 4820 | SEQ ID NO: 4809 | |
| 21-100 | SEQ ID NO: 4776 | SEQ ID NO: 4730 | SEQ ID NO: 4820 | SEQ ID NO: 4810 | |
| 21-101 | SEQ ID NO: 4777 | | SEQ ID NO: 4821 | | |
| 21-102 | SEQ ID NO: 4778 | | SEQ ID NO: 4821 | | |
| 21-103 | SEQ ID NO: 4779 | SEQ ID NO: 4780 | SEQ ID NO: 4821 | | |
| 21-104 | SEQ ID NO: 4781 | SEQ ID NO: 4782 | SEQ ID NO: 4821 | | |
| 21-105 | SEQ ID NO: 4783 | SEQ ID NO: 4784 | SEQ ID NO: 4821 | | |
| 21-106 | SEQ ID NO: 4785 | SEQ ID NO: 4786 | SEQ ID NO: 4821 | | |
| 21-107 | SEQ ID NO: 4695 | SEQ ID NO: 4799 | SEQ ID NO: 4803 | SEQ ID NO: 4826 | |
| 21-108 | SEQ ID NO: 4695 | SEQ ID NO: 4800 | SEQ ID NO: 4803 | SEQ ID NO: 4827 | |
| 21-109 | SEQ ID NO: 4698 | SEQ ID NO: 4799 | SEQ ID NO: 4808 | SEQ ID NO: 4826 | |
| 21-110 | SEQ ID NO: 4698 | SEQ ID NO: 4800 | SEQ ID NO: 4808 | SEQ ID NO: 4827 | |
| 21-111 | SEQ ID NO: 4795 | SEQ ID NO: 4699 | SEQ ID NO: 4822 | SEQ ID NO: 4809 | |
| 21-112 | SEQ ID NO: 4795 | SEQ ID NO: 4700 | SEQ ID NO: 4822 | SEQ ID NO: 4810 | |
| 21-113 | SEQ ID NO: 4795 | SEQ ID NO: 4696 | SEQ ID NO: 4822 | SEQ ID NO: 4804 | |
| 21-114 | SEQ ID NO: 4795 | SEQ ID NO: 4697 | SEQ ID NO: 4822 | SEQ ID NO: 4805 | |
| 21-115 | SEQ ID NO: 4695 | SEQ ID NO: 4796 | SEQ ID NO: 4803 | SEQ ID NO: 4823 | |
| 21-116 | SEQ ID NO: 4695 | SEQ ID NO: 4797 | SEQ ID NO: 4803 | SEQ ID NO: 4824 | |
| 21-117 | SEQ ID NO: 4698 | SEQ ID NO: 4796 | SEQ ID NO: 4808 | SEQ ID NO: 4823 | |
| 21-118 | SEQ ID NO: 4698 | SEQ ID NO: 4797 | SEQ ID NO: 4808 | SEQ ID NO: 4824 | |
| 21-119 | SEQ ID NO: 4798 | SEQ ID NO: 4699 | SEQ ID NO: 4825 | SEQ ID NO: 4809 | |
| 21-120 | SEQ ID NO: 4798 | SEQ ID NO: 4700 | SEQ ID NO: 4825 | SEQ ID NO: 4810 | |
| 21-121 | SEQ ID NO: 4798 | SEQ ID NO: 4696 | SEQ ID NO: 4825 | SEQ ID NO: 4804 | |
| 21-122 | SEQ ID NO: 4798 | SEQ ID NO: 4697 | SEQ ID NO: 4825 | SEQ ID NO: 4805 | |
| 21-123 | SEQ ID NO: 4733 | | SEQ ID NO: 4811 | | SEQ ID NO: 4828 |
| 21-124 | SEQ ID NO: 4743 | | SEQ ID NO: 4812 | | SEQ ID NO: 4828 |
| 21-125 | SEQ ID NO: 4779 | | SEQ ID NO: 4818 | | SEQ ID NO: 4828 |
| 21-126 | SEQ ID NO: 4779 | | SEQ ID NO: 4821 | | SEQ ID NO: 4828 |
| 21-127 | SEQ ID NO: 4739 | | SEQ ID NO: 4811 | | SEQ ID NO: 4829 |
| 21-128 | SEQ ID NO: 4749 | | SEQ ID NO: 4812 | | SEQ ID NO: 4829 |
| 21-129 | SEQ ID NO: 4785 | | SEQ ID NO: 4818 | | SEQ ID NO: 4829 |
| 21-130 | SEQ ID NO: 4785 | | SEQ ID NO: 4821 | | SEQ ID NO: 4829 |

TABLE 55

| Protein | | | | | | | |
|---|---|---|---|---|---|---|---|
| ID | D1-Fc | D5-Fab | D4-Fab | D3-Fab | D6-Fab | D2-Fc | Other |
| 21-01 | S239D (H1), I332E (H2) | FMC63 | Rituximab | Rituximab | FMC63 | S239D (H1), I332E (H2) | |
| 21-02 | S239D (H1), I332E (H2) | FMC63 | Rituximab | Rituximab | FMC63 | S239D (H1), I332E (H2) | |
| 21-03 | S239D (H1), I332E (H2) | FMC63 | Rituximab | Rituximab | FMC63 | S239D (H1), I332E (H2) | |
| 21-04 | S239D (H1), I332E (H2) | Rituximab | FMC63 | FMC63 | Rituximab | S239D (H1), I332E (H2) | |
| 21-05 | S239D (H1), I332E (H2) | Rituximab | FMC63 | FMC63 | Rituximab | S239D (H1), I332E (H2) | |
| 21-06 | S239D (H1), I332E (H2) | Rituximab | FMC63 | FMC63 | Rituximab | S239D (H1), I332E (H2) | |
| 21-07 | I332E (H1), S239D (H2) | FMC63 | Rituximab | Rituximab | FMC63 | I332E (H1), S239D (H2) | |
| 21-08 | I332E (H1), S239D (H2) | FMC63 | Rituximab | Rituximab | FMC63 | I332E (H1), S239D (H2) | |
| 21-09 | I332E (H1), S239D (H2) | FMC63 | Rituximab | Rituximab | FMC63 | I332E (H1), S239D (H2) | |
| 21-10 | I332E (H1), S239D (H2) | Rituximab | FMC63 | FMC63 | Rituximab | I332E (H1), S239D (H2) | |
| 21-11 | I332E (H1), S239D (H2) | Rituximab | FMC63 | FMC63 | Rituximab | I332E (H1), S239D (H2) | |
| 21-12 | I332E (H1), S239D (H2) | Rituximab | FMC63 | FMC63 | Rituximab | I332E (H1), S239D (H2) | |
| 21-13 | S239D/I332E (H1, H2) | FMC63 | Rituximab | Rituximab | FMC63 | S239D/I332E (H1, H2) | |
| 21-14 | S239D/I332E (H1, H2) | FMC63 | Rituximab | Rituximab | FMC63 | S239D/I332E (H1, H2) | |
| 21-15 | S239D/I332E (H1, H2) | FMC63 | Rituximab | Rituximab | FMC63 | S239D/I332E (H1, H2) | |
| 21-16 | S239D/I332E (H1, H2) | Rituximab | FMC63 | FMC63 | Rituximab | S239D/I332E (H1, H2) | |
| 21-17 | S239D/I332E (H1, H2) | Rituximab | FMC63 | FMC63 | Rituximab | S239D/I332E (H1, H2) | |
| 21-18 | S239D/I332E (H1, H2) | Rituximab | FMC63 | FMC63 | Rituximab | S239D/I332E (H1, H2) | |
| 21-19 | | | | | | | mAb |
| 21-20 | | | | | | | mAb |
| 21-21 | wild-type | Rituximab | Rituximab | Rituximab | Rituximab | wild-type | |
| 21-22 | S239D (H1), I332E (H2) | Rituximab | Rituximab | Rituximab | Rituximab | S239D (H1), I332E (H2) | |
| 21-23 | I332E (H1), S239D (H2) | Rituximab | Rituximab | Rituximab | Rituximab | I332E (H1), S239D (H2) | |
| 21-24 | S239D/I332E (H1, H2) | Rituximab | Rituximab | Rituximab | Rituximab | S239D/I332E (H1, H2) | |
| 21-25 | | | | | | | mAb |
| 21-26 | | | | | | | mAb |
| 21-27 | wild-type | FMC63 | FMC63 | FMC63 | FMC63 | wild-type | |
| 21-28 | S239D (H1), I332E (H2) | FMC63 | FMC63 | FMC63 | FMC63 | S239D (H1), I332E (H2) | |
| 21-29 | I332E (H1), S239D (H2) | FMC63 | FMC63 | FMC63 | FMC63 | I332E (H1), S239D (H2) | |
| 21-30 | S239D/I332E (H1, H2) | FMC63 | FMC63 | FMC63 | FMC63 | S239D/I332E (H1, H2) | |
| 21-31 | wild-type | FMC60 | Rituximab | Rituximab | FMC60 | wild-type | |
| 21-32 | wild-type | FMC60 | Rituximab | Rituximab | FMC60 | wild-type | |
| 21-33 | wild-type | FMC60 | Rituximab | Rituximab | FMC60 | wild-type | |
| 21-34 | wild-type | FMC60 | Rituximab | Rituximab | FMC60 | wild-type | |
| 21-35 | wild-type | Rituximab | FMC60 | FMC60 | Rituximab | wild-type | |
| 21-36 | wild-type | Rituximab | FMC60 | FMC60 | Rituximab | wild-type | |
| 21-37 | wild-type | Rituximab | FMC60 | FMC60 | Rituximab | wild-type | |
| 21-38 | wild-type | Rituximab | FMC60 | FMC60 | Rituximab | wild-type | |
| 21-39 | S239D (H1), I332E (H2) | FMC60 | Rituximab | Rituximab | FMC60 | S239D (H1), I332E (H2) | |
| 21-40 | S239D (H1), I332E (H2) | FMC60 | Rituximab | Rituximab | FMC60 | S239D (H1), I332E (H2) | |
| 21-41 | S239D (H1), I332E (H2) | FMC60 | Rituximab | Rituximab | FMC60 | S239D (H1), I332E (H2) | |
| 21-42 | S239D (H1), I332E (H2) | FMC60 | Rituximab | Rituximab | FMC60 | S239D (H1), I332E (H2) | |
| 21-43 | S239D (H1), I332E (H2) | Rituximab | FMC60 | FMC60 | Rituximab | S239D (H1), I332E (H2) | |
| 21-44 | S239D (H1), I332E (H2) | Rituximab | FMC60 | FMC60 | Rituximab | S239D (H1), I332E (H2) | |
| 21-45 | S239D (H1), I332E (H2) | Rituximab | FMC60 | FMC60 | Rituximab | S239D (H1), I332E (H2) | |
| 21-46 | S239D (H1), I332E (H2) | Rituximab | FMC60 | FMC60 | Rituximab | S239D (H1), I332E (H2) | |
| 21-47 | I332E (H1), S239D (H2) | FMC60 | Rituximab | Rituximab | FMC60 | I332E (H1), S239D (H2) | |
| 21-48 | I332E (H1), S239D (H2) | FMC60 | Rituximab | Rituximab | FMC60 | I332E (H1), S239D (H2) | |
| 21-49 | I332E (H1), S239D (H2) | FMC60 | Rituximab | Rituximab | FMC60 | I332E (H1), S239D (H2) | |
| 21-50 | I332E (H1), S239D (H2) | FMC60 | Rituximab | Rituximab | FMC60 | I332E (H1), S239D (H2) | |
| 21-51 | I332E (H1), S239D (H2) | Rituximab | FMC60 | FMC60 | Rituximab | I332E (H1), S239D (H2) | |
| 21-52 | I332E (H1), S239D (H2) | Rituximab | FMC60 | FMC60 | Rituximab | I332E (H1), S239D (H2) | |
| 21-53 | I332E (H1), S239D (H2) | Rituximab | FMC60 | FMC60 | Rituximab | I332E (H1), S239D (H2) | |
| 21-54 | I332E (H1), S239D (H2) | Rituximab | FMC60 | FMC60 | Rituximab | I332E (H1), S239D (H2) | |
| 21-55 | S239D/I332E (H1, H2) | FMC60 | Rituximab | Rituximab | FMC60 | S239D/I332E (H1, H2) | |
| 21-56 | S239D/I332E (H1, H2) | FMC60 | Rituximab | Rituximab | FMC60 | S239D/I332E (H1, H2) | |
| 21-57 | S239D/I332E (H1, H2) | FMC60 | Rituximab | Rituximab | FMC60 | S239D/I332E (H1, H2) | |
| 21-58 | S239D/I332E (H1, H2) | FMC60 | Rituximab | Rituximab | FMC60 | S239D/I332E (H1, H2) | |
| 21-59 | S239D/I332E (H1, H2) | Rituximab | FMC60 | FMC60 | Rituximab | S239D/I332E (H1, H2) | |
| 21-60 | S239D/I332E (H1, H2) | Rituximab | FMC60 | FMC60 | Rituximab | S239D/I332E (H1, H2) | |
| 21-61 | S239D/I332E (H1, H2) | Rituximab | FMC60 | FMC60 | Rituximab | S239D/I332E (H1, H2) | |
| 21-62 | S239D/I332E (H1, H2) | Rituximab | FMC60 | FMC60 | Rituximab | S239D/I332E (H1, H2) | |
| 21-63 | | | | | | | mAb |
| 21-64 | | | | | | | mAb |
| 21-65 | wild-type | FMC60 | FMC60 | FMC60 | FMC60 | wild-type | |
| 21-66 | S239D (H1), I332E (H2) | FMC60 | FMC60 | FMC60 | FMC60 | S239D (H1), I332E (H2) | |
| 21-67 | I332E (H1), S239D (H2) | FMC60 | FMC60 | FMC60 | FMC60 | I332E (H1), S239D (H2) | |
| 21-68 | S239D/I332E (H1, H2) | FMC60 | FMC60 | FMC60 | FMC60 | S239D/I332E (H1, H2) | |
| 21-69 | wild-type | FMC59 | Rituximab | Rituximab | FMC59 | wild-type | |
| 21-70 | wild-type | FMC59 | Rituximab | Rituximab | FMC59 | wild-type | |
| 21-71 | wild-type | FMC59 | Rituximab | Rituximab | FMC59 | wild-type | |
| 21-72 | wild-type | FMC59 | Rituximab | Rituximab | FMC59 | wild-type | |
| 21-73 | wild-type | Rituximab | FMC59 | FMC59 | Rituximab | wild-type | |
| 21-74 | wild-type | Rituximab | FMC59 | FMC59 | Rituximab | wild-type | |
| 21-75 | wild-type | Rituximab | FMC59 | FMC59 | Rituximab | wild-type | |
| 21-76 | wild-type | Rituximab | FMC59 | FMC59 | Rituximab | wild-type | |
| 21-77 | S239D (H1), I332E (H2) | FMC59 | Rituximab | Rituximab | FMC59 | S239D (H1), I332E (H2) | |
| 21-78 | S239D (H1), I332E (H2) | FMC59 | Rituximab | Rituximab | FMC59 | S239D (H1), I332E (H2) | |
| 21-79 | S239D (H1), I332E (H2) | FMC59 | Rituximab | Rituximab | FMC59 | S239D (H1), I332E (H2) | |
| 21-80 | S239D (H1), I332E (H2) | FMC59 | Rituximab | Rituximab | FMC59 | S239D (H1), I332E (H2) | |
| 21-81 | S239D (H1), I332E (H2) | Rituximab | FMC59 | FMC59 | Rituximab | S239D (H1), I332E (H2) | |
| 21-82 | S239D (H1), I332E (H2) | Rituximab | FMC59 | FMC59 | Rituximab | S239D (H1), I332E (H2) | |
| 21-83 | S239D (H1), I332E (H2) | Rituximab | FMC59 | FMC59 | Rituximab | S239D (H1), I332E (H2) | |
| 21-84 | S239D (H1), I332E (H2) | Rituximab | FMC59 | FMC59 | Rituximab | S239D (H1), I332E (H2) | |
| 21-85 | I332E (H1), S239D (H2) | FMC59 | Rituximab | Rituximab | FMC59 | I332E (H1), S239D (H2) | |
| 21-86 | I332E (H1), S239D (H2) | FMC59 | Rituximab | Rituximab | FMC59 | I332E (H1), S239D (H2) | |
| 21-87 | I332E (H1), S239D (H2) | FMC59 | Rituximab | Rituximab | FMC59 | I332E (H1), S239D (H2) | |
| 21-88 | I332E (H1), S239D (H2) | FMC59 | Rituximab | Rituximab | FMC59 | I332E (H1), S239D (H2) | |
| 21-89 | I332E (H1), S239D (H2) | Rituximab | FMC59 | FMC59 | Rituximab | I332E (H1), S239D (H2) | |
| 21-90 | I332E (H1), S239D (H2) | Rituximab | FMC59 | FMC59 | Rituximab | I332E (H1), S239D (H2) | |
| 21-91 | I332E (H1), S239D (H2) | Rituximab | FMC59 | FMC59 | Rituximab | I332E (H1), S239D (H2) | |
| 21-92 | I332E (H1), S239D (H2) | Rituximab | FMC59 | FMC59 | Rituximab | I332E (H1), S239D (H2) | |
| 21-93 | S239D/I332E (H1, H2) | FMC59 | Rituximab | Rituximab | FMC59 | S239D/I332E (H1, H2) | |
| 21-94 | S239D/I332E (H1, H2) | FMC59 | Rituximab | Rituximab | FMC59 | S239D/I332E (H1, H2) | |
| 21-95 | S239D/I332E (H1, H2) | FMC59 | Rituximab | Rituximab | FMC59 | S239D/I332E (H1, H2) | |
| 21-96 | S239D/I332E (H1, H2) | FMC59 | Rituximab | Rituximab | FMC59 | S239D/I332E (H1, H2) | |
| 21-97 | S239D/I332E (H1, H2) | Rituximab | FMC59 | FMC59 | Rituximab | S239D/I332E (H1, H2) | |
| 21-98 | S239D/I332E (H1, H2) | Rituximab | FMC59 | FMC59 | Rituximab | S239D/I332E (H1, H2) | |
| 21-99 | S239D/I332E (H1, H2) | Rituximab | FMC59 | FMC59 | Rituximab | S239D/I332E (H1, H2) | |
| 21-100 | S239D/I332E (H1, H2) | Rituximab | FMC59 | FMC59 | Rituximab | S239D/I332E (H1, H2) | |
| 21-101 | | | | | | | mAb |
| 21-102 | | | | | | | mAb |
| 21-103 | wild-type | FMC59 | FMC59 | FMC59 | FMC59 | wild-type | |
| 21-104 | S239D (H1), I332E (H2) | FMC59 | FMC59 | FMC59 | FMC59 | S239D (H1), I332E (H2) | |
| 21-105 | I332E (H1), S239D (H2) | FMC59 | FMC59 | FMC59 | FMC59 | I332E (H1), S239D (H2) | |
| 21-106 | S239D/I332E (H1, H2) | FMC59 | FMC59 | FMC59 | FMC59 | S239D/I332E (H1, H2) | |
| 21-107 | wild-type | B13 | Rituximab | Rituximab | B13 | wild-type | |
| 21-108 | wild-type | B13 | Rituximab | Rituximab | B13 | wild-type | |
| 21-109 | wild-type | B13 | FMC63 | FMC63 | B13 | wild-type | |
| 21-110 | wild-type | B13 | FMC63 | FMC63 | B13 | wild-type | |
| 21-111 | wild-type | Rituximab | B13 | B13 | Rituximab | wild-type | |
| 21-112 | wild-type | Rituximab | B13 | B13 | Rituximab | wild-type | |
| 21-113 | wild-type | FMC63 | B13 | B13 | FMC63 | wild-type | |
| 21-114 | wild-type | FMC63 | B13 | B13 | FMC63 | wild-type | |
| 21-115 | wild-type | O24 | Rituximab | Rituximab | O24 | wild-type | |
| 21-116 | wild-type | O24 | Rituximab | Rituximab | O24 | wild-type | |
| 21-117 | wild-type | O24 | FMC63 | FMC63 | O24 | wild-type | |
| 21-118 | wild-type | O24 | FMC63 | FMC63 | O24 | wild-type | |
| 21-119 | wild-type | Rituximab | O24 | O24 | Rituximab | wild-type | |
| 21-120 | wild-type | Rituximab | O24 | O24 | Rituximab | wild-type | |
| 21-121 | wild-type | FMC63 | O24 | O24 | FMC63 | wild-type | |
| 21-122 | wild-type | FMC63 | O24 | O24 | FMC63 | wild-type | |
| 21-123 | wild-type | | Rituximab | Rituximab | | wild-type | |
| 21-124 | wild-type | | FMC63 | FMC63 | | wild-type | |
| 21-125 | wild-type | | FMC60 | FMC60 | | wild-type | |
| 21-126 | wild-type | | FMC59 | FMC59 | | wild-type | |
| 21-127 | S239D/I332E (H1, H2) | | Rituximab | Rituximab | | S239D/I332E (H1, H2) | |
| 21-128 | S239D/I332E (H1, H2) | | FMC63 | FMC63 | | S239D/I332E (H1, H2) | |
| 21-129 | S239D/I332E (H1, H2) | | FMC60 | FMC60 | | S239D/I332E (H1, H2) | |
| 21-130 | S239D/I332E (H1, H2) | | FMC59 | FMC59 | | S239D/I332E (H1, H2) | |

TABLE 56

| Protein | | D5-Fab | D4-Fab | D3-Fab | D6-Fab | D2-Fc | |
|---|---|---|---|---|---|---|---|
| ID | D1-Fc Specificity | Specificity | Specificity | Specificity | Specificity | Specificity | Other |
| 21-01 | FcgR enhanced (asymmetric) | CD19 | CD20 | CD20 | CD19 | FcgR enhanced (asymmetric) | |
| 21-02 | FcgR enhanced (asymmetric) | CD19 | CD20 | CD20 | CD19 | FcgR enhanced (asymmetric) | |
| 21-03 | FcgR enhanced (asymmetric) | CD19 | CD20 | CD20 | CD19 | FcgR enhanced (asymmetric) | |
| 21-04 | FcgR enhanced (asymmetric) | CD20 | CD19 | CD19 | CD20 | FcgR enhanced (asymmetric) | |
| 21-05 | FcgR enhanced (asymmetric) | CD20 | CD19 | CD19 | CD20 | FcgR enhanced (asymmetric) | |
| 21-06 | FcgR enhanced (asymmetric) | CD20 | CD19 | CD19 | CD20 | FcgR enhanced (asymmetric) | |
| 21-07 | FcgR enhanced (asymmetric) | CD19 | CD20 | CD20 | CD19 | FcgR enhanced (asymmetric) | |
| 21-08 | FcgR enhanced (asymmetric) | CD19 | CD20 | CD20 | CD19 | FcgR enhanced (asymmetric) | |
| 21-09 | FcgR enhanced (asymmetric) | CD19 | CD20 | CD20 | CD19 | FcgR enhanced (asymmetric) | |
| 21-10 | FcgR enhanced (asymmetric) | CD20 | CD19 | CD19 | CD20 | FcgR enhanced (asymmetric) | |
| 21-11 | FcgR enhanced (asymmetric) | CD20 | CD19 | CD19 | CD20 | FcgR enhanced (asymmetric) | |
| 21-12 | FcgR enhanced (asymmetric) | CD20 | CD19 | CD19 | CD20 | FcgR enhanced (asymmetric) | |
| 21-13 | FcgR enhanced (symmetric) | CD19 | CD20 | CD20 | CD19 | FcgR enhanced (symmetric) | |
| 21-14 | FcgR enhanced (symmetric) | CD19 | CD20 | CD20 | CD19 | FcgR enhanced (symmetric) | |
| 21-15 | FcgR enhanced (symmetric) | CD19 | CD20 | CD20 | CD19 | FcgR enhanced (symmetric) | |
| 21-16 | FcgR enhanced (symmetric) | CD20 | CD19 | CD19 | CD20 | FcgR enhanced (symmetric) | |
| 21-17 | FcgR enhanced (symmetric) | CD20 | CD19 | CD19 | CD20 | FcgR enhanced (symmetric) | |
| 21-18 | FcgR enhanced (symmetric) | CD20 | CD19 | CD19 | CD20 | FcgR enhanced (symmetric) | |
| 21-19 | | | | | | | mAb |
| 21-20 | | | | | | | mAb |
| 21-21 | FcgR wild-type | CD20 | CD20 | CD20 | CD20 | FcgR wild-type | |
| 21-22 | FcgR enhanced (asymmetric) | CD20 | CD20 | CD20 | CD20 | FcgR enhanced (asymmetric) | |
| 21-23 | FcgR enhanced (asymmetric) | CD20 | CD20 | CD20 | CD20 | FcgR enhanced (asymmetric) | |
| 21-24 | FcgR enhanced (symmetric) | CD20 | CD20 | CD20 | CD20 | FcgR enhanced (symmetric) | |
| 21-25 | | | | | | | mAb |
| 21-26 | | | | | | | mAb |
| 21-27 | FcgR wild-type | CD19 | CD19 | CD19 | CD19 | FcgR wild-type | |
| 21-28 | FcgR enhanced (asymmetric) | CD19 | CD19 | CD19 | CD19 | FcgR enhanced (asymmetric) | |
| 21-29 | FcgR enhanced (asymmetric) | CD19 | CD19 | CD19 | CD19 | FcgR enhanced (asymmetric) | |
| 21-30 | FcgR enhanced (symmetric) | CD19 | CD19 | CD19 | CD19 | FcgR enhanced (symmetric) | |
| 21-31 | FcgR wild-type | CD19 | CD20 | CD20 | CD19 | FcgR wild-type | |
| 21-32 | FcgR wild-type | CD19 | CD20 | CD20 | CD19 | FcgR wild-type | |
| 21-33 | FcgR wild-type | CD19 | CD20 | CD20 | CD19 | FcgR wild-type | |
| 21-34 | FcgR wild-type | CD19 | CD20 | CD20 | CD19 | FcgR wild-type | |
| 21-35 | FcgR wild-type | CD20 | CD19 | CD19 | CD20 | FcgR wild-type | |
| 21-36 | FcgR wild-type | CD20 | CD19 | CD19 | CD20 | FcgR wild-type | |
| 21-37 | FcgR wild-type | CD20 | CD19 | CD19 | CD20 | FcgR wild-type | |
| 21-38 | FcgR wild-type | CD20 | CD19 | CD19 | CD20 | FcgR wild-type | |
| 21-39 | FcgR enhanced (asymmetric) | CD19 | CD20 | CD20 | CD19 | FcgR enhanced (asymmetric) | |
| 21-40 | FcgR enhanced (asymmetric) | CD19 | CD20 | CD20 | CD19 | FcgR enhanced (asymmetric) | |
| 21-41 | FcgR enhanced (asymmetric) | CD19 | CD20 | CD20 | CD19 | FcgR enhanced (asymmetric) | |
| 21-42 | FcgR enhanced (asymmetric) | CD19 | CD20 | CD20 | CD19 | FcgR enhanced (asymmetric) | |
| 21-43 | FcgR enhanced (asymmetric) | CD20 | CD19 | CD19 | CD20 | FcgR enhanced (asymmetric) | |
| 21-44 | FcgR enhanced (asymmetric) | CD20 | CD19 | CD19 | CD20 | FcgR enhanced (asymmetric) | |
| 21-45 | FcgR enhanced (asymmetric) | CD20 | CD19 | CD19 | CD20 | FcgR enhanced (asymmetric) | |
| 21-46 | FcgR enhanced (asymmetric) | CD20 | CD19 | CD19 | CD20 | FcgR enhanced (asymmetric) | |
| 21-47 | FcgR enhanced (asymmetric) | CD19 | CD20 | CD20 | CD19 | FcgR enhanced (asymmetric) | |
| 21-48 | FcgR enhanced (asymmetric) | CD19 | CD20 | CD20 | CD19 | FcgR enhanced (asymmetric) | |
| 21-49 | FcgR enhanced (asymmetric) | CD19 | CD20 | CD20 | CD19 | FcgR enhanced (asymmetric) | |
| 21-50 | FcgR enhanced (asymmetric) | CD19 | CD20 | CD20 | CD19 | FcgR enhanced (asymmetric) | |
| 21-51 | FcgR enhanced (asymmetric) | CD20 | CD19 | CD19 | CD20 | FcgR enhanced (asymmetric) | |
| 21-52 | FcgR enhanced (asymmetric) | CD20 | CD19 | CD19 | CD20 | FcgR enhanced (asymmetric) | |
| 21-53 | FcgR enhanced (asymmetric) | CD20 | CD19 | CD19 | CD20 | FcgR enhanced (asymmetric) | |
| 21-54 | FcgR enhanced (asymmetric) | CD20 | CD19 | CD19 | CD20 | FcgR enhanced (asymmetric) | |
| 21-55 | FcgR enhanced (symmetric) | CD19 | CD20 | CD20 | CD19 | FcgR enhanced (symmetric) | |
| 21-56 | FcgR enhanced (symmetric) | CD19 | CD20 | CD20 | CD19 | FcgR enhanced (symmetric) | |
| 21-57 | FcgR enhanced (symmetric) | CD19 | CD20 | CD20 | CD19 | FcgR enhanced (symmetric) | |
| 21-58 | FcgR enhanced (symmetric) | CD19 | CD20 | CD20 | CD19 | FcgR enhanced (symmetric) | |
| 21-59 | FcgR enhanced (symmetric) | CD20 | CD19 | CD19 | CD20 | FcgR enhanced (symmetric) | |
| 21-60 | FcgR enhanced (symmetric) | CD20 | CD19 | CD19 | CD20 | FcgR enhanced (symmetric) | |
| 21-61 | FcgR enhanced (symmetric) | CD20 | CD19 | CD19 | CD20 | FcgR enhanced (symmetric) | |
| 21-62 | FcgR enhanced (symmetric) | CD20 | CD19 | CD19 | CD20 | FcgR enhanced (symmetric) | |
| 21-63 | | | | | | | mAb |
| 21-64 | | | | | | | mAb |
| 21-65 | FcgR wild-type | CD19 | CD19 | CD19 | CD19 | FcgR wild-type | |
| 21-66 | FcgR enhanced (asymmetric) | CD19 | CD19 | CD19 | CD19 | FcgR enhanced (asymmetric) | |
| 21-67 | FcgR enhanced (asymmetric) | CD19 | CD19 | CD19 | CD19 | FcgR enhanced (asymmetric) | |
| 21-68 | FcgR enhanced (symmetric) | CD19 | CD19 | CD19 | CD19 | FcgR enhanced (symmetric) | |
| 21-69 | FcgR wild-type | CD19 | CD19 | CD19 | CD19 | FcgR wild-type | |
| 21-70 | FcgR wild-type | CD19 | CD19 | CD19 | CD19 | FcgR wild-type | |
| 21-71 | FcgR wild-type | CD19 | CD19 | CD19 | CD19 | FcgR wild-type | |
| 21-72 | FcgR wild-type | CD19 | CD19 | CD19 | CD19 | FcgR wild-type | |
| 21-73 | FcgR wild-type | CD20 | CD19 | CD19 | CD20 | FcgR wild-type | |
| 21-74 | FcgR wild-type | CD20 | CD19 | CD19 | CD20 | FcgR wild-type | |
| 21-75 | FcgR wild-type | CD20 | CD19 | CD19 | CD20 | FcgR wild-type | |
| 21-76 | FcgR wild-type | CD20 | CD19 | CD19 | CD20 | FcgR wild-type | |
| 21-77 | FcgR enhanced (asymmetric) | CD19 | CD20 | CD20 | CD20 | FcgR enhanced (asymmetric) | |
| 21-78 | FcgR enhanced (asymmetric) | CD19 | CD20 | CD20 | CD19 | FcgR enhanced (asymmetric) | |
| 21-79 | FcgR enhanced (asymmetric) | CD19 | CD20 | CD20 | CD19 | FcgR enhanced (asymmetric) | |
| 21-80 | FcgR enhanced (asymmetric) | CD19 | CD20 | CD20 | CD19 | FcgR enhanced (asymmetric) | |
| 21-81 | FcgR enhanced (asymmetric) | CD20 | CD19 | CD19 | CD20 | FcgR enhanced (asymmetric) | |
| 21-82 | FcgR enhanced (asymmetric) | CD20 | CD19 | CD19 | CD20 | FcgR enhanced (asymmetric) | |
| 21-83 | FcgR enhanced (asymmetric) | CD20 | CD19 | CD19 | CD20 | FcgR enhanced (asymmetric) | |
| 21-84 | FcgR enhanced (asymmetric) | CD20 | CD19 | CD19 | CD20 | FcgR enhanced (asymmetric) | |
| 21-85 | FcgR enhanced (asymmetric) | CD19 | CD20 | CD20 | CD19 | FcgR enhanced (asymmetric) | |
| 21-86 | FcgR enhanced (asymmetric) | CD19 | CD20 | CD20 | CD19 | FcgR enhanced (asymmetric) | |
| 21-87 | FcgR enhanced (asymmetric) | CD19 | CD20 | CD20 | CD19 | FcgR enhanced (asymmetric) | |
| 21-88 | FcgR enhanced (asymmetric) | CD19 | CD20 | CD20 | CD19 | FcgR enhanced (asymmetric) | |
| 21-89 | FcgR enhanced (asymmetric) | CD20 | CD19 | CD19 | CD20 | FcgR enhanced (asymmetric) | |
| 21-90 | FcgR enhanced (asymmetric) | CD20 | CD19 | CD19 | CD20 | FcgR enhanced (asymmetric) | |
| 21-91 | FcgR enhanced (asymmetric) | CD20 | CD19 | CD19 | CD20 | FcgR enhanced (asymmetric) | |
| 21-92 | FcgR enhanced (asymmetric) | CD20 | CD19 | CD19 | CD20 | FcgR enhanced (asymmetric) | |
| 21-93 | FcgR enhanced (symmetric) | CD19 | CD20 | CD20 | CD19 | FcgR enhanced (symmetric) | |
| 21-94 | FcgR enhanced (symmetric) | CD19 | CD20 | CD20 | CD19 | FcgR enhanced (symmetric) | |
| 21-95 | FcgR enhanced (symmetric) | CD19 | CD20 | CD20 | CD19 | FcgR enhanced (symmetric) | |
| 21-96 | FcgR enhanced (symmetric) | CD19 | CD20 | CD20 | CD19 | FcgR enhanced (symmetric) | |
| 21-97 | FcgR enhanced (symmetric) | CD20 | CD19 | CD19 | CD20 | FcgR enhanced (symmetric) | |
| 21-98 | FcgR enhanced (symmetric) | CD20 | CD19 | CD19 | CD20 | FcgR enhanced (symmetric) | |
| 21-99 | FcgR enhanced (symmetric) | CD20 | CD19 | CD19 | CD20 | FcgR enhanced (symmetric) | |
| 21-100 | FcgR enhanced (symmetric) | CD20 | CD19 | CD19 | CD20 | FcgR enhanced (symmetric) | |
| 21-101 | | | | | | | mAb |
| 21-102 | | | | | | | mAb |
| 21-103 | FcgR wild-type | CD19 | CD19 | CD19 | CD19 | FcgR wild-type | |
| 21-104 | FcgR enhanced (asymmetric) | CD19 | CD19 | CD19 | CD19 | FcgR enhanced (asymmetric) | |
| 21-105 | FcgR enhanced (asymmetric) | CD19 | CD19 | CD19 | CD19 | FcgR enhanced (asymmetric) | |
| 21-106 | FcgR enhanced (symmetric) | CD19 | CD19 | CD19 | CD19 | FcgR enhanced (symmetric) | |
| 21-107 | FcgR wild-type | SARS-CoV-2 | CD20 | CD20 | SARS-CoV-2 | FcgR wild-type | |
| 21-108 | FcgR wild-type | SARS-CoV-2 | CD20 | CD20 | SARS-CoV-2 | FcgR wild-type | |
| 21-109 | FcgR wild-type | SARS-CoV-2 | CD19 | CD19 | SARS-CoV-2 | FcgR wild-type | |
| 21-110 | FcgR wild-type | SARS-CoV-2 | CD19 | CD19 | SARS-CoV-2 | FcgR wild-type | |
| 21-111 | FcgR wild-type | CD20 | SARS-CoV-2 | SARS-CoV-2 | CD20 | FcgR wild-type | |
| 21-112 | FcgR wild-type | CD20 | SARS-CoV-2 | SARS-CoV-2 | CD20 | FcgR wild-type | |
| 21-113 | FcgR wild-type | CD19 | SARS-CoV-2 | SARS-CoV-2 | CD19 | FcgR wild-type | |
| 21-114 | FcgR wild-type | CD19 | SARS-CoV-2 | SARS-CoV-2 | CD19 | FcgR wild-type | |
| 21-115 | FcgR wild-type | SARS-CoV-2 | CD20 | CD20 | SARS-CoV-2 | FcgR wild-type | |
| 21-116 | FcgR wild-type | SARS-CoV-2 | CD20 | CD20 | SARS-CoV-2 | FcgR wild-type | |
| 21-117 | FcgR wild-type | SARS-CoV-2 | CD19 | CD19 | SARS-CoV-2 | FcgR wild-type | |
| 21-118 | FcgR wild-type | SARS-CoV-2 | CD19 | CD19 | SARS-CoV-2 | FcgR wild-type | |
| 21-119 | FcgR wild-type | CD20 | SARS-CoV-2 | SARS-CoV-2 | CD20 | FcgR wild-type | |
| 21-120 | FcgR wild-type | CD20 | SARS-CoV-2 | SARS-CoV-2 | CD20 | FcgR wild-type | |
| 21-121 | FcgR wild-type | CD19 | SARS-CoV-2 | SARS-CoV-2 | CD19 | FcgR wild-type | |
| 21-122 | FcgR wild-type | CD19 | SARS-CoV-2 | SARS-CoV-2 | CD19 | FcgR wild-type | |
| 21-123 | FcgR wild-type | | CD20 | CD20 | | FcgR wild-type | |
| 21-124 | FcgR wild-type | | CD19 | CD19 | | FcgR wild-type | |
| 21-125 | FcgR wild-type | | CD19 | CD19 | | FcgR wild-type | |
| 21-126 | FcgR wild-type | | CD19 | CD19 | | FcgR wild-type | |
| 21-127 | FcgR enhanced (symmetric) | | CD20 | CD20 | | FcgR enhanced (symmetric) | |
| 21-128 | FcgR enhanced (symmetric) | | CD19 | CD19 | | FcgR enhanced (symmetric) | |
| 21-129 | FcgR enhanced (symmetric) | | CD19 | CD19 | | FcgR enhanced (symmetric) | |
| 21-130 | FcgR enhanced (symmetric) | | CD19 | CD19 | | FcgR enhanced (symmetric) | |

TABLE 57

| | H1 Chain | | H2 Chain | | L1 Chain | | L2 Chain | | |
|---|---|---|---|---|---|---|---|---|---|
| Protein | V region | Amino acid | V region | Amino acid | V region | Amino acid | V region | Amino acid | |
| ID | type | Substitutions | Type | Substitutions | Type | Substitutions | Type | Substitutions | Other |
| 21-01 | VH-CH1 | K147E/K213E | VK-CH1 | | VK-CK | E123R/Q124K | VH-CK | | |
| 21-02 | VH-CH1 | Q39K/S183E | VK-CH1 | Q38E/S183K | VK-CK | Q38E/V133K | VH-CK | Q39K/V133E | |
| 21-03 | VH-CH1 | Q39K/S183E | VK-CH1 | Q38K/S183K | VK-CK | Q38E/V133K | VH-CK | Q39E/V133E | |
| 21-04 | VH-CH1 | K147E/K213E | VK-CH1 | | VK-CK | E123R/Q124K | VH-CK | | |
| 21-05 | VH-CH1 | Q39K/S183E | VK-CH1 | Q38E/S183K | VK-CK | Q38E/V133K | VH-CK | Q39K/V133E | |
| 21-06 | VH-CH1 | Q39K/S183E | VK-CH1 | Q38K/S183K | VK-CK | Q38E/V133K | VH-CK | Q39E/V133E | |
| 21-07 | VH-CH1 | K147E/K213E | VK-CH1 | | VK-CK | E123R/Q124K | VH-CK | | |
| 21-08 | VH-CH1 | Q39K/S183E | VK-CH1 | Q38E/S183K | VK-CK | Q38E/V133K | VH-CK | Q39K/V133E | |
| 21-09 | VH-CH1 | Q39K/S183E | VK-CH1 | Q38K/S183K | VK-CK | Q38E/V133K | VH-CK | Q39E/V133E | |
| 21-10 | VH-CH1 | K147E/K213E | VK-CH1 | | VK-CK | E123R/Q124K | VH-CK | | |
| 21-11 | VH-CH1 | Q39K/S183E | VK-CH1 | Q38E/S183K | VK-CK | Q38E/V133K | VH-CK | Q39K/V133E | |
| 21-12 | VH-CH1 | Q39K/S183E | VK-CH1 | Q38K/S183K | VK-CK | Q38E/V133K | VH-CK | Q39E/V133E | |
| 21-13 | VH-CH1 | K147E/K213E | VK-CH1 | | VK-CK | E123R/Q124K | VH-CK | | |
| 21-14 | VH-CH1 | Q39K/S183E | VK-CH1 | Q38E/S183K | VK-CK | Q38E/V133K | VH-CK | Q39K/V133E | |
| 21-15 | VH-CH1 | Q39K/S183E | VK-CH1 | Q38K/S183K | VK-CK | Q38E/V133K | VH-CK | Q39E/V133E | |
| 21-16 | VH-CH1 | K147E/K213E | VK-CH1 | | VK-CK | E123R/Q124K | VH-CK | | |
| 21-17 | VH-CH1 | Q39K/S183E | VK-CH1 | Q38E/S183K | VK-CK | Q38E/V133K | VH-CK | Q39K/V133E | |
| 21-18 | VH-CH1 | Q39K/S183E | VK-CH1 | Q38K/S183K | VK-CK | Q38E/V133K | VH-CK | Q39E/V133E | |
| 21-19 | | | | | | | | | mAb |
| 21-20 | | | | | | | | | mAb |
| 21-21 | VH-CH1 | | VH-CH1 | | VK-CK | | | | |
| 21-22 | VH-CH1 | | VH-CH1 | | VK-CK | | | | |
| 21-23 | VH-CH1 | | VH-CH1 | | VK-CK | | | | |
| 21-24 | VH-CH1 | | VH-CH1 | | VK-CK | | | | |
| 21-25 | | | | | | | | | mAb |
| 21-26 | | | | | | | | | mAb |
| 21-27 | VH-CH1 | | VH-CH1 | | VK-CK | | | | |
| 21-28 | VH-CH1 | | VH-CH1 | | VK-CK | | | | |
| 21-29 | VH-CH1 | | VH-CH1 | | VK-CK | | | | |
| 21-30 | VH-CH1 | | VH-CH1 | | VK-CK | | | | |
| 21-31 | VH-CH1 | Q39K/S183E | VK-CH1 | Q38E/S183K | VK-CK | Q38E/V133K | VH-CK | Q39K/V133E | |
| 21-32 | VH-CH1 | Q39K/S183E | VK-CH1 | Q38K/S183K | VK-CK | Q38E/V133K | VH-CK | Q39E/V133E | |
| 21-33 | VH-CH1 | Q39E/S183E | VK-CH1 | Q38E/S183K | VK-CK | Q38K/V133K | VH-CK | Q39K/V133E | |
| 21-34 | VH-CH1 | Q39E/S183E | VK-CH1 | Q38K/S183K | VK-CK | Q38K/V133K | VH-CK | Q39E/V133E | |
| 21-35 | VH-CH1 | Q39K/S183E | VK-CH1 | Q38E/S183K | VK-CK | Q38E/V133K | VH-CK | Q39K/V133E | |
| 21-36 | VH-CH1 | Q39K/S183E | VK-CH1 | Q38K/S183K | VK-CK | Q38E/V133K | VH-CK | Q39E/V133E | |
| 21-37 | VH-CH1 | Q39E/S183E | VK-CH1 | Q38E/S183K | VK-CK | Q38K/V133K | VH-CK | Q39K/V133E | |
| 21-38 | VH-CH1 | Q39E/S183E | VK-CH1 | Q38K/S183K | VK-CK | Q38K/V133K | VH-CK | Q39E/V133E | |
| 21-39 | VH-CH1 | Q39K/S183E | VK-CH1 | Q38E/S183K | VK-CK | Q38E/V133K | VH-CK | Q39K/V133E | |
| 21-40 | VH-CH1 | Q39K/S183E | VK-CH1 | Q38K/S183K | VK-CK | Q38E/V133K | VH-CK | Q39E/V133E | |
| 21-41 | VH-CH1 | Q39E/S183E | VK-CH1 | Q38E/S183K | VK-CK | Q38K/V133K | VH-CK | Q39K/V133E | |
| 21-42 | VH-CH1 | Q39E/S183E | VK-CH1 | Q38K/S183K | VK-CK | Q38K/V133K | VH-CK | Q39E/V133E | |
| 21-43 | VH-CH1 | Q39K/S183E | VK-CH1 | Q38E/S183K | VK-CK | Q38E/V133K | VH-CK | Q39K/V133E | |
| 21-44 | VH-CH1 | Q39K/S183E | VK-CH1 | Q38K/S183K | VK-CK | Q38E/V133K | VH-CK | Q39E/V133E | |
| 21-45 | VH-CH1 | Q39E/S183E | VK-CH1 | Q38E/S183K | VK-CK | Q38K/V133K | VH-CK | Q39K/V133E | |
| 21-46 | VH-CH1 | Q39E/S183E | VK-CH1 | Q38K/S183K | VK-CK | Q38K/V133K | VH-CK | Q39E/V133E | |
| 21-47 | VH-CH1 | Q39K/S183E | VK-CH1 | Q38E/S183K | VK-CK | Q38E/V133K | VH-CK | Q39K/V133E | |
| 21-48 | VH-CH1 | Q39K/S183E | VK-CH1 | Q38K/S183K | VK-CK | Q38E/V133K | VH-CK | Q39E/V133E | |
| 21-49 | VH-CH1 | Q39E/S183E | VK-CH1 | Q38E/S183K | VK-CK | Q38K/V133K | VH-CK | Q39K/V133E | |
| 21-50 | VH-CH1 | Q39E/S183E | VK-CH1 | Q38K/S183K | VK-CK | Q38K/V133K | VH-CK | Q39E/V133E | |
| 21-51 | VH-CH1 | Q39K/S183E | VK-CH1 | Q38E/S183K | VK-CK | Q38E/V133K | VH-CK | Q39K/V133E | |
| 21-52 | VH-CH1 | Q39K/S183E | VK-CH1 | Q38K/S183K | VK-CK | Q38E/V133K | VH-CK | Q39E/V133E | |
| 21-53 | VH-CH1 | Q39E/S183E | VK-CH1 | Q38E/S183K | VK-CK | Q38K/V133K | VH-CK | Q39K/V133E | |
| 21-54 | VH-CH1 | Q39E/S183E | VK-CH1 | Q38K/S183K | VK-CK | Q38K/V133K | VH-CK | Q39E/V133E | |
| 21-55 | VH-CH1 | Q39K/S183E | VK-CH1 | Q38E/S183K | VK-CK | Q38E/V133K | VH-CK | Q39K/V133E | |
| 21-56 | VH-CH1 | Q39K/S183E | VK-CH1 | Q38K/S183K | VK-CK | Q38E/V133K | VH-CK | Q39E/V133E | |
| 21-57 | VH-CH1 | Q39E/S183E | VK-CH1 | Q38E/S183K | VK-CK | Q38K/V133K | VH-CK | Q39K/V133E | |
| 21-58 | VH-CH1 | Q39E/S183E | VK-CH1 | Q38K/S183K | VK-CK | Q38K/V133K | VH-CK | Q39E/V133E | |
| 21-59 | VH-CH1 | Q39K/S183E | VK-CH1 | Q38E/S183K | VK-CK | Q38E/V133K | VH-CK | Q39K/V133E | |
| 21-60 | VH-CH1 | Q39K/S183E | VK-CH1 | Q38K/S183K | VK-CK | Q38E/V133K | VH-CK | Q39E/V133E | |
| 21-61 | VH-CH1 | Q39E/S183E | VK-CH1 | Q38E/S183K | VK-CK | Q38K/V133K | VH-CK | Q39K/V133E | |
| 21-62 | VH-CH1 | Q39E/S183E | VK-CH1 | Q38K/S183K | VK-CK | Q38K/V133K | VH-CK | Q39E/V133E | |
| 21-63 | | | | | | | | | mAb |
| 21-64 | | | | | | | | | mAb |
| 21-65 | VH-CH1 | | VH-CH1 | | VK-CK | | | | |
| 21-66 | VH-CH1 | | VH-CH1 | | VK-CK | | | | |
| 21-67 | VH-CH1 | | VH-CH1 | | VK-CK | | | | |
| 21-68 | VH-CH1 | | VH-CH1 | | VK-CK | | | | |
| 21-69 | VH-CH1 | Q39K/S183E | VK-CH1 | Q38E/S183K | VK-CK | Q38E/V133K | VH-CK | Q39K/V133E | |
| 21-70 | VH-CH1 | Q39K/S183E | VK-CH1 | Q38K/S183K | VK-CK | Q38E/V133K | VH-CK | Q39E/V133E | |
| 21-71 | VH-CH1 | Q39E/S183E | VK-CH1 | Q38E/S183K | VK-CK | Q38K/V133K | VH-CK | Q39K/V133E | |
| 21-72 | VH-CH1 | Q39E/S183E | VK-CH1 | Q38K/S183K | VK-CK | Q38K/V133K | VH-CK | Q39E/V133E | |
| 21-73 | VH-CH1 | Q39K/S183E | VK-CH1 | Q38E/S183K | VK-CK | Q38E/V133K | VH-CK | Q39K/V133E | |
| 21-74 | VH-CH1 | Q39K/S183E | VK-CH1 | Q38K/S183K | VK-CK | Q38E/V133K | VH-CK | Q39E/V133E | |
| 21-75 | VH-CH1 | Q39E/S183E | VK-CH1 | Q38E/S183K | VK-CK | Q38K/V133K | VH-CK | Q39K/V133E | |
| 21-76 | VH-CH1 | Q39E/S183E | VK-CH1 | Q38K/S183K | VK-CK | Q38K/V133K | VH-CK | Q39E/V133E | |
| 21-77 | VH-CH1 | Q39K/S183E | VK-CH1 | Q38E/S183K | VK-CK | Q38E/V133K | VH-CK | Q39K/V133E | |
| 21-78 | VH-CH1 | Q39K/S183E | VK-CH1 | Q38K/S183K | VK-CK | Q38E/V133K | VH-CK | Q39E/V133E | |
| 21-79 | VH-CH1 | Q39E/S183E | VK-CH1 | Q38E/S183K | VK-CK | Q38K/V133K | VH-CK | Q39K/V133E | |
| 21-80 | VH-CH1 | Q39E/S183E | VK-CH1 | Q38K/S183K | VK-CK | Q38K/V133K | VH-CK | Q39E/V133E | |
| 21-81 | VH-CH1 | Q39K/S183E | VK-CH1 | Q38E/S183K | VK-CK | Q38E/V133K | VH-CK | Q39K/V133E | |
| 21-82 | VH-CH1 | Q39K/S183E | VK-CH1 | Q38K/S183K | VK-CK | Q38E/V133K | VH-CK | Q39E/V133E | |
| 21-83 | VH-CH1 | Q39E/S183E | VK-CH1 | Q38E/S183K | VK-CK | Q38K/V133K | VH-CK | Q39K/V133E | |
| 21-84 | VH-CH1 | Q39E/S183E | VK-CH1 | Q38K/S183K | VK-CK | Q38K/V133K | VH-CK | Q39E/V133E | |
| 21-85 | VH-CH1 | Q39K/S183E | VK-CH1 | Q38E/S183K | VK-CK | Q38E/V133K | VH-CK | Q39K/V133E | |
| 21-86 | VH-CH1 | Q39K/S183E | VK-CH1 | Q38K/S183K | VK-CK | Q38E/V133K | VH-CK | Q39E/V133E | |
| 21-87 | VH-CH1 | Q39E/S183E | VK-CH1 | Q38E/S183K | VK-CK | Q38K/V133K | VH-CK | Q39K/V133E | |
| 21-88 | VH-CH1 | Q39E/S183E | VK-CH1 | Q38K/S183K | VK-CK | Q38K/V133K | VH-CK | Q39E/V133E | |
| 21-89 | VH-CH1 | Q39K/S183E | VK-CH1 | Q38E/S183K | VK-CK | Q38E/V133K | VH-CK | Q39K/V133E | |
| 21-90 | VH-CH1 | Q39K/S183E | VK-CH1 | Q38K/S183K | VK-CK | Q38E/V133K | VH-CK | Q39E/V133E | |
| 21-91 | VH-CH1 | Q39E/S183E | VK-CH1 | Q38E/S183K | VK-CK | Q38K/V133K | VH-CK | Q39K/V133E | |
| 21-92 | VH-CH1 | Q39E/S183E | VK-CH1 | Q38K/S183K | VK-CK | Q38K/V133K | VH-CK | Q39E/V133E | |
| 21-93 | VH-CH1 | Q39K/S183E | VK-CH1 | Q38E/S183K | VK-CK | Q38E/V133K | VH-CK | Q39K/V133E | |
| 21-94 | VH-CH1 | Q39K/S183E | VK-CH1 | Q38K/S183K | VK-CK | Q38E/V133K | VH-CK | Q39E/V133E | |
| 21-95 | VH-CH1 | Q39E/S183E | VK-CH1 | Q38E/S183K | VK-CK | Q38K/V133K | VH-CK | Q39K/V133E | |
| 21-96 | VH-CH1 | Q39E/S183E | VK-CH1 | Q38K/S183K | VK-CK | Q38K/V133K | VH-CK | Q39E/V133E | |
| 21-97 | VH-CH1 | Q39K/S183E | VK-CH1 | Q38E/S183K | VK-CK | Q38E/V133K | VH-CK | Q39K/V133E | |
| 21-98 | VH-CH1 | Q39K/S183E | VK-CH1 | Q38K/S183K | VK-CK | Q38E/V133K | VH-CK | Q39E/V133E | |
| 21-99 | VH-CH1 | Q39E/S183E | VK-CH1 | Q38E/S183K | VK-CK | Q38K/V133K | VH-CK | Q39K/V133E | |
| 21-100 | VH-CH1 | Q39E/S183E | VK-CH1 | Q38K/S183K | VK-CK | Q38K/V133K | VH-CK | Q39E/V133E | |
| 21-101 | | | | | | | | | mAb |
| 21-102 | | | | | | | | | mAb |
| 21-103 | VH-CH1 | | VH-CH1 | | VK-CK | | | | |
| 21-104 | VH-CH1 | | VH-CH1 | | VK-CK | | | | |
| 21-105 | VH-CH1 | | VH-CH1 | | VK-CK | | | | |
| 21-106 | VH-CH1 | | VH-CH1 | | VK-CK | | | | |
| 21-107 | VH-CH1 | Q39K/S183E | VK-CH1 | Q38E/S183K | VK-CK | Q38E/V133K | VH-CK | Q39K/V133E | |
| 21-108 | VH-CH1 | Q39K/S183E | VK-CH1 | Q38K/S183K | VK-CK | Q38E/V133K | VH-CK | Q39E/V133E | |
| 21-109 | VH-CH1 | Q39K/S183E | VK-CH1 | Q38E/S183K | VK-CK | Q38E/V133K | VH-CK | Q39K/V133E | |
| 21-110 | VH-CH1 | Q39K/S183E | VK-CH1 | Q38K/S183K | VK-CK | Q38E/V133K | VH-CK | Q39E/V133E | |
| 21-111 | VH-CH1 | Q39K/S183E | VK-CH1 | Q38E/S183K | VK-CK | Q38E/V133K | VH-CK | Q39K/V133E | |
| 21-112 | VH-CH1 | Q39K/S183E | VK-CH1 | Q38K/S183K | VK-CK | Q38E/V133K | VH-CK | Q39E/V133E | |
| 21-113 | VH-CH1 | Q39K/S183E | VK-CH1 | Q38E/S183K | VK-CK | Q38E/V133K | VH-CK | Q39K/V133E | |
| 21-114 | VH-CH1 | Q39K/S183E | VK-CH1 | Q38K/S183K | VK-CK | Q38E/V133K | VH-CK | Q39E/V133E | |
| 21-115 | VH-CH1 | Q39K/S183E | VK-CH1 | Q38E/S183K | VK-CK | Q38E/V133K | VH-CK | Q39K/V133E | |
| 21-116 | VH-CH1 | Q39K/S183E | VK-CH1 | Q38K/S183K | VK-CK | Q38E/V133K | VH-CK | Q39E/V133E | |
| 21-117 | VH-CH1 | Q39K/S183E | VK-CH1 | Q38E/S183K | VK-CK | Q38E/V133K | VH-CK | Q39K/V133E | |
| 21-118 | VH-CH1 | Q39K/S183E | VK-CH1 | Q38K/S183K | VK-CK | Q38E/V133K | VH-CK | Q39E/V133E | |
| 21-119 | VH-CH1 | Q39K/S183E | VK-CH1 | Q38E/S183K | VK-CK | Q38E/V133K | VH-CK | Q39K/V133E | |
| 21-120 | VH-CH1 | Q39K/S183E | VK-CH1 | Q38K/S183K | VK-CK | Q38E/V133K | VH-CK | Q39E/V133E | |
| 21-121 | VH-CH1 | Q39K/S183E | VK-CH1 | Q38E/S183K | VK-CK | Q38E/V133K | VH-CK | Q39K/V133E | |
| 21-122 | VH-CH1 | Q39K/S183E | VK-CH1 | Q38K/S183K | VK-CK | Q38E/V133K | VH-CK | Q39E/V133E | |
| 21-123 | VH-CH1 | | | | VK-CK | | | | Fc |
| | | | | | | | | | chain |
| 21-124 | VH-CH1 | | | | VK-CK | | | | Fc |
| | | | | | | | | | chain |
| 21-125 | VH-CH1 | | | | VK-CK | | | | Fc |
| | | | | | | | | | chain |
| 21-126 | VH-CH1 | | | | VK-CK | | | | Fc |
| | | | | | | | | | chain |
| 21-127 | VH-CH1 | | | | VK-CK | | | | Fc |
| | | | | | | | | | chain |
| 21-128 | VH-CH1 | | | | VK-CK | | | | Fc |
| | | | | | | | | | chain |
| 21-129 | VH-CH1 | | | | VK-CK | | | | Fc |
| | | | | | | | | | chain |
| 21-130 | VH-CH1 | | | | VK-CK | | | | Fc |
| | | | | | | | | | chain |

### Example 24—Production of Control Antibodies and Fe Fusion Proteins

[2127] Twenty-six antibodies and Fc fusion proteins are produced according to Table 58 to evaluate their relative effectiveness to tetrahedral antibodies.

TABLE 58

| Protein | | | | | | |
|---|---|---|---|---|---|---|
| ID | Antibody Name | Target | H1 Chain | H2 Chain | L1 Chain | L2 Chain |
| 22-01 | Adintrevimab | SARS-CoV-2 | SEQ ID NO: 4830 | | SEQ ID NO: 4849 | |
| 22-02 | Tafasitamab-cxix | CD19 | SEQ ID NO: 4831 | | SEQ ID NO: 4850 | |
| 22-03 | M971 | CD22 | SEQ ID NO: 4832 | | SEQ ID NO: 4851 | |
| 22-04 | M971/SIDE | CD22 | SEQ ID NO: 4833 | | SEQ ID NO: 4851 | |
| 22-05 | Ofatumumab | CD20 | SEQ ID NO: 4834 | | SEQ ID NO: 4852 | |
| 22-06 | Ocrelizumab | CD20 | SEQ ID NO: 4835 | | SEQ ID NO: 4853 | |
| 22-07 | Mosunetuzumab | CD20/CD3 | SEQ ID NO: 4836 | SEQ ID NO: 4837 | SEQ ID NO: 4854 | SEQ ID NO: 4855 |
| 22-08 | Etanercept | TNF-α | SEQ ID NO: 4838 | | | |
| 22-09 | Adalimumab | TNF-α | SEQ ID NO: 4839 | | SEQ ID NO: 4856 | |
| 22-10 | Vedolizumab | α4β7 | SEQ ID NO: 4840 | | SEQ ID NO: 4857 | |
| 22-11 | Ustekinumab | IL-12/23 | SEQ ID NO: 4841 | | SEQ ID NO: 4858 | |
| 22-12 | Secukinumab | IL-17A | SEQ ID NO: 4842 | | SEQ ID NO: 4859 | |
| 22-13 | Pembrolizumab | PD-1 | SEQ ID NO: 4843 | | SEQ ID NO: 4860 | |
| 22-14 | Ipilimumab | CTLA-4 | SEQ ID NO: 4844 | | SEQ ID NO: 4861 | |
| 22-15 | 388D4-3 | PD-1 | SEQ ID NO: 4845 | | SEQ ID NO: 4862 | |
| 22-16 | 244C8-2 | PD-1 | SEQ ID NO: 4846 | | SEQ ID NO: 4863 | |
| 22-17 | Atezolizumab | PD-L1 | SEQ ID NO: 4847 | | SEQ ID NO: 4864 | |
| 22-18 | B6055 | PD-L1 | SEQ ID NO: 4848 | | SEQ ID NO: 4865 | |
| 22-19 | Trastuzumab | ERBB2 | SEQ ID NO: 5091 | | SEQ ID NO: 5099 | |
| 22-20 | Cetuximab | EGFR | SEQ ID NO: 5092 | | SEQ ID NO: 5100 | |
| 22-21 | Pertuzumab | ERBB2 | SEQ ID NO: 5093 | | SEQ ID NO: 5101 | |
| 22-22 | Cergutuzumab | CEACAM5 | SEQ ID NO: 5094 | | SEQ ID NO: 5102 | |
| 22-23 | Bevacizumab | VEGF-A | SEQ ID NO: 5095 | | SEQ ID NO: 5103 | |
| 22-24 | Ramucirumab | VEGFR2 | SEQ ID NO: 5096 | | SEQ ID NO: 5104 | |
| 22-25 | Ontorpacept | CD47 | SEQ ID NO: 5097 | | | |
| 22-26 | Efmarodocokin alfa | IL-22R | SEQ ID NO: 5098 | | | |

### Example 25—Tetravalent, Bispecific Tetrahedral Antibodies Comprising Two Distinct Fabs or Cytokine Receptors that Specifically Bind Pro-Inflammatory Cytokines and Integrins

[2128] Tetrahedral antibodies were designed, expressed, and evaluated for their ability to neutralize pro-inflammatory cytokines and adhesion molecules for the treatment of inflammation and autoimmune disease. This series of bispecific constructs employ VH and VL regions from adalimumab (anti-TNFα), ustekinumab (anti-IL-12/23), secukinumab (anti-L1-17A) and vedolizumab (anti-α4b7 integrin), and portions of the TNFR1B receptor extracellular domain (Tables 59, 60). Two distinct configurations were evaluated (Table 61). In the first configuration, a first type of Fab is placed in D3/D4, and a second type of Fab is placed in D5/D6. The various Fab pairings are adalimumab/ustekinumab, adalimumab/secukinumab, ustekinumab/secukinumab and adalimumab/vedolizumab, each placed in either orientation with respect to D3/D4 and D5/D6. In the second configuration, the TNFR1B receptor extracellular domain is placed in D3/D4, and a Fab-Fc fusion, Fab/c, is placed in D1/D2. The various pairings are TNFR1B/adalimumab-Fab/c, TNFR1B/secukinumab-Fab/c, TNFR1B/secukinumab-Fab/c and TNFR1B/vedolizumab-Fab/c. To optimize correct VH/VL pairing and to minimize VH/VL mispairing, V region exchange is combined with four different sets of charge pairs to ensure correct pairing of heavy and light chain V regions (Table 62). Additionally, to further facilitate purification of the correctly paired product by Protein A chromatography, the H1 chain incorporates the H435R/Y436F substitution. The constructs are then evaluated for their structural bispecificity by intact mass spectrometry as described in Example 18, and for their functional bispecificity using a variety of in vitro binding assays, cytokine neutralization assays, adhesion inhibition assays, and in vivo inflammatory and autoimmune disease efficacy models, known to one skilled in the art.

TABLE 59

| Protein | | | | | |
|---|---|---|---|---|---|
| ID | H1 Chain | H2 Chain | L1 Chain | L2 Chain | Fc chain |
| 23-01 | SEQ ID NO: 4866 | SEQ ID NO: 4867 | SEQ ID NO: 4894 | SEQ ID NO: 4895 | |
| 23-02 | SEQ ID NO: 4866 | SEQ ID NO: 4868 | SEQ ID NO: 4894 | SEQ ID NO: 4896 | |
| 23-03 | SEQ ID NO: 4869 | SEQ ID NO: 4867 | SEQ ID NO: 4897 | SEQ ID NO: 4895 | |
| 23-04 | SEQ ID NO: 4869 | SEQ ID NO: 4868 | SEQ ID NO: 4897 | SEQ ID NO: 4896 | |
| 23-05 | SEQ ID NO: 4870 | SEQ ID NO: 4871 | SEQ ID NO: 4898 | SEQ ID NO: 4899 | |
| 23-06 | SEQ ID NO: 4870 | SEQ ID NO: 4872 | SEQ ID NO: 4898 | SEQ ID NO: 4900 | |
| 23-07 | SEQ ID NO: 4873 | SEQ ID NO: 4871 | SEQ ID NO: 4901 | SEQ ID NO: 4899 | |
| 23-08 | SEQ ID NO: 4873 | SEQ ID NO: 4872 | SEQ ID NO: 4901 | SEQ ID NO: 4900 | |
| 23-09 | SEQ ID NO: 4866 | SEQ ID NO: 4874 | SEQ ID NO: 4894 | SEQ ID NO: 4902 | |
| 23-10 | SEQ ID NO: 4866 | SEQ ID NO: 4875 | SEQ ID NO: 4894 | SEQ ID NO: 4903 | |
| 23-11 | SEQ ID NO: 4869 | SEQ ID NO: 4874 | SEQ ID NO: 4897 | SEQ ID NO: 4902 | |
| 23-12 | SEQ ID NO: 4869 | SEQ ID NO: 4875 | SEQ ID NO: 4897 | SEQ ID NO: 4903 | |
| 23-13 | SEQ ID NO: 4876 | SEQ ID NO: 4871 | SEQ ID NO: 4904 | SEQ ID NO: 4899 | |
| 23-14 | SEQ ID NO: 4876 | SEQ ID NO: 4872 | SEQ ID NO: 4904 | SEQ ID NO: 4900 | |
| 23-15 | SEQ ID NO: 4877 | SEQ ID NO: 4871 | SEQ ID NO: 4905 | SEQ ID NO: 4899 | |
| 23-16 | SEQ ID NO: 4877 | SEQ ID NO: 4872 | SEQ ID NO: 4905 | SEQ ID NO: 4900 | |
| 23-17 | SEQ ID NO: 4870 | SEQ ID NO: 4874 | SEQ ID NO: 4898 | SEQ ID NO: 4902 | |
| 23-18 | SEQ ID NO: 4870 | SEQ ID NO: 4875 | SEQ ID NO: 4898 | SEQ ID NO: 4903 | |
| 23-19 | SEQ ID NO: 4873 | SEQ ID NO: 4874 | SEQ ID NO: 4901 | SEQ ID NO: 4902 | |
| 23-20 | SEQ ID NO: 4873 | SEQ ID NO: 4875 | SEQ ID NO: 4901 | SEQ ID NO: 4903 | |
| 23-21 | SEQ ID NO: 4876 | SEQ ID NO: 4867 | SEQ ID NO: 4904 | SEQ ID NO: 4895 | |
| 23-22 | SEQ ID NO: 4876 | SEQ ID NO: 4868 | SEQ ID NO: 4904 | SEQ ID NO: 4896 | |
| 23-23 | SEQ ID NO: 4877 | SEQ ID NO: 4867 | SEQ ID NO: 4905 | SEQ ID NO: 4895 | |
| 23-24 | SEQ ID NO: 4877 | SEQ ID NO: 4868 | SEQ ID NO: 4905 | SEQ ID NO: 4896 | |
| 23-25 | SEQ ID NO: 4878 | SEQ ID NO: 4879 | SEQ ID NO: 4894 | SEQ ID NO: 4906 | |
| 23-26 | SEQ ID NO: 4878 | SEQ ID NO: 4880 | SEQ ID NO: 4894 | SEQ ID NO: 4907 | |
| 23-27 | SEQ ID NO: 4881 | SEQ ID NO: 4879 | SEQ ID NO: 4897 | SEQ ID NO: 4906 | |
| 23-28 | SEQ ID NO: 4881 | SEQ ID NO: 4880 | SEQ ID NO: 4897 | SEQ ID NO: 4907 | |
| 23-29 | SEQ ID NO: 4882 | SEQ ID NO: 4883 | SEQ ID NO: 4908 | SEQ ID NO: 4899 | |
| 23-30 | SEQ ID NO: 4882 | SEQ ID NO: 4884 | SEQ ID NO: 4908 | SEQ ID NO: 4900 | |
| 23-31 | SEQ ID NO: 4885 | SEQ ID NO: 4883 | SEQ ID NO: 4909 | SEQ ID NO: 4899 | |
| 23-32 | SEQ ID NO: 4885 | SEQ ID NO: 4884 | SEQ ID NO: 4909 | SEQ ID NO: 4900 | |
| 23-33 | SEQ ID NO: 4886 | | SEQ ID NO: 4910 | | SEQ ID NO: 4918 |
| 23-34 | SEQ ID NO: 4887 | | SEQ ID NO: 4911 | | SEQ ID NO: 4918 |
| 23-35 | SEQ ID NO: 4888 | | SEQ ID NO: 4912 | | SEQ ID NO: 4918 |
| 23-36 | SEQ ID NO: 4889 | | SEQ ID NO: 4913 | | SEQ ID NO: 4918 |
| 23-37 | SEQ ID NO: 4890 | | SEQ ID NO: 4914 | | SEQ ID NO: 4918 |
| 23-38 | SEQ ID NO: 4891 | | SEQ ID NO: 4915 | | SEQ ID NO: 4918 |
| 23-39 | SEQ ID NO: 4892 | | SEQ ID NO: 4916 | | SEQ ID NO: 4919 |
| 23-40 | SEQ ID NO: 4893 | | SEQ ID NO: 4917 | | SEQ ID NO: 4919 |

TABLE 60

| Protein | | | | | | | | |
|---|---|---|---|---|---|---|---|---|
| ID | D1-Fc | D1-Fab/c | D5-Fab | D4-Fab | D3-Fab | D6-Fab | D2-Fab/c | D2-Fc |
| 23-01 | wild-type | | Ustekinum | Adalimum | Adalimum | Ustekinum | | wild-type |
| 23-02 | wild-type | | Ustekinum | Adalimum | Adalimum | Ustekinum | | wild-type |
| 23-03 | wild-type | | Ustekinum | Adalimum | Adalimum | Ustekinum | | wild-type |
| 23-04 | wild-type | | Ustekinum | Adalimum | Adalimum | Ustekinum | | wild-type |
| 23-05 | wild-type | | Adalimum | Ustekinum | Ustekinum | Adalimum | | wild-type |
| 23-06 | wild-type | | Adalimum | Ustekinum | Ustekinum | Adalimum | | wild-type |
| 23-07 | wild-type | | Adalimum | Ustekinum | Ustekinum | Adalimum | | wild-type |
| 23-08 | wild-type | | Adalimum | Ustekinum | Ustekinum | Adalimum | | wild-type |
| 23-09 | wild-type | | Secukinum | Adalimum | Adalimum | Secukinum | | wild-type |
| 23-10 | wild-type | | Secukinum | Adalimum | Adalimum | Secukinum | | wild-type |
| 23-11 | wild-type | | Secukinum | Adalimum | Adalimum | Secukinum | | wild-type |
| 23-12 | wild-type | | Secukinum | Adalimum | Adalimum | Secukinum | | wild-type |
| 23-13 | wild-type | | Adalimum | Secukinum | Secukinum | Adalimum | | wild-type |
| 23-14 | wild-type | | Adalimum | Secukinum | Secukinum | Adalimum | | wild-type |
| 23-15 | wild-type | | Adalimum | Secukinum | Secukinum | Adalimum | | wild-type |
| 23-16 | wild-type | | Adalimum | Secukinum | Secukinum | Adalimum | | wild-type |
| 23-17 | wild-type | | Secukinum | Ustekinum | Ustekinum | Secukinum | | wild-type |
| 23-18 | wild-type | | Secukinum | Ustekinum | Ustekinum | Secukinum | | wild-type |
| 23-19 | wild-type | | Secukinum | Ustekinum | Ustekinum | Secukinum | | wild-type |
| 23-20 | wild-type | | Secukinum | Ustekinum | Ustekinum | Secukinum | | wild-type |
| 23-21 | wild-type | | Ustekinum | Secukinum | Secukinum | Ustekinum | | wild-type |
| 23-22 | wild-type | | Ustekinum | Secukinum | Secukinum | Ustekinum | | wild-type |
| 23-23 | wild-type | | Ustekinum | Secukinum | Secukinum | Ustekinum | | wild-type |
| 23-24 | wild-type | | Ustekinum | Secukinum | Secukinum | Ustekinum | | wild-type |
| 23-25 | L234A/L235A | | Vedolizum | Adalimum | Adalimum | Vedolizum | | L234A/L235A |
| 23-26 | L234A/L235A | | Vedolizum | Adalimum | Adalimum | Vedolizum | | L234A/L235A |
| 23-27 | L234A/L235A | | Vedolizum | Adalimum | Adalimum | Vedolizum | | L234A/L235A |
| 23-28 | L234A/L235A | | Vedolizum | Adalimum | Adalimum | Vedolizum | | L234A/L235A |
| 23-29 | L234A/L235A | | Adalimum | Vedolizum | Vedolizum | Adalimum | | L234A/L235A |
| 23-30 | L234A/L235A | | Adalimum | Vedolizum | Vedolizum | Adalimum | | L234A/L235A |
| 23-31 | L234A/L235A | | Adalimum | Vedolizum | Vedolizum | Adalimum | | L234A/L235A |
| 23-32 | L234A/L235A | | Adalimum | Vedolizum | Vedolizum | Adalimum | | L234A/L235A |
| 23-33 | wild-type | Adalimum | | Etanercept | Etanercept | | Adalimum | wild-type |
| 23-34 | wild-type | Adalimum | | Etanercept | Etanercept | | Adalimum | wild-type |
| 23-35 | wild-type | Ustekinum | | Etanercept | Etanercept | | Ustekinum | wild-type |
| 23-36 | wild-type | Ustekinum | | Etanercept | Etanercept | | Ustekinum | wild-type |
| 23-37 | wild-type | Secukinum | | Etanercept | Etanercept | | Secukinum | wild-type |
| 23-38 | wild-type | Secukinum | | Etanercept | Etanercept | | Secukinum | wild-type |
| 23-39 | L234A/L235A | Vedolizum | | Etanercept | Etanercept | | Vedolizum | L234A/L235A |
| 23-40 | L234A/L235A | Vedolizum | | Etanercept | Etanercept | | Vedolizum | L234A/L235A |

TABLE 61

| Protein | D1-Fc | D1-Fab/c | D5-Fab | D4 | D3 | D6-Fab | D2-Fab/c | D2-Fc |
|---|---|---|---|---|---|---|---|---|
| ID | Specificity | Specificity | Specificity | Specificity | Specificity | Specificity | Specificity | Specificity |
| 23-01 | FcgR | | IL-12/23 | TNFα | TNFα | IL-12/23 | | FcgR |
| 23-02 | FcgR | | IL-12/23 | TNFα | TNFα | IL-12/23 | | FcgR |
| 23-03 | FcgR | | IL-12/23 | TNFα | TNFα | IL-12/23 | | FcgR |
| 23-04 | FcgR | | IL-12/23 | TNFα | TNFα | IL-12/23 | | FcgR |
| 23-05 | FcgR | | TNFα | IL-12/23 | IL-12/23 | TNFα | | FcgR |
| 23-06 | FcgR | | TNFα | IL-12/23 | IL-12/23 | TNFα | | FcgR |
| 23-07 | FcgR | | TNFα | IL-12/23 | IL-12/23 | TNFα | | FcgR |
| 23-08 | FcgR | | TNFα | IL-12/23 | IL-12/23 | TNFα | | FcgR |
| 23-09 | FcgR | | IL-17A | TNFα | TNFα | IL-17A | | FcgR |
| 23-10 | FcgR | | IL-17A | TNFα | TNFα | IL-17A | | FcgR |
| 23-11 | FcgR | | IL-17A | TNFα | TNFα | IL-17A | | FcgR |
| 23-12 | FcgR | | IL-17A | TNFα | TNFα | IL-17A | | FcgR |
| 23-13 | FcgR | | TNFα | IL-17A | IL-17A | TNFα | | FcgR |
| 23-14 | FcgR | | TNFα | IL-17A | IL-17A | TNFα | | FcgR |
| 23-15 | FcgR | | TNFα | IL-17A | IL-17A | TNFα | | FcgR |
| 23-16 | FcgR | | TNFα | IL-17A | IL-17A | TNFα | | FcgR |
| 23-17 | FcgR | | IL-17A | IL-12/23 | IL-12/23 | IL-17A | | FcgR |
| 23-18 | FcgR | | IL-17A | IL-12/23 | IL-12/23 | IL-17A | | FcgR |
| 23-19 | FcgR | | IL-17A | IL-12/23 | IL-12/23 | IL-17A | | FcgR |
| 23-20 | FcgR | | IL-17A | IL-12/23 | IL-12/23 | IL-17A | | FcgR |
| 23-21 | FcgR | | IL-12/23 | IL-17A | IL-17A | IL-12/23 | | FcgR |
| 23-22 | FcgR | | IL-12/23 | IL-17A | IL-17A | IL-12/23 | | FcgR |
| 23-23 | FcgR | | IL-12/23 | IL-17A | IL-17A | IL-12/23 | | FcgR |
| 23-24 | FcgR | | IL-12/23 | IL-17A | IL-17A | IL-12/23 | | FcgR |
| 23-25 | FcgR silent | | α4β7 | TNFα | TNFα | α4β7 | | FcgR silent |
| 23-26 | FcgR silent | | α4β7 | TNFα | TNFα | α4β7 | | FcgR silent |
| 23-27 | FcgR silent | | α4β7 | TNFα | TNFα | α4β7 | | FcgR silent |
| 23-28 | FcgR silent | | α4β7 | TNFα | TNFα | α4β7 | | FcgR silent |
| 23-29 | FcgR silent | | TNFα | α4β7 | α4β7 | TNFα | | FcgR silent |
| 23-30 | FcgR silent | | TNFα | α4β7 | α4β7 | TNFα | | FcgR silent |
| 23-31 | FcgR silent | | TNFα | α4β7 | α4β7 | TNFα | | FcgR silent |
| 23-32 | FcgR silent | | TNFα | α4β7 | α4β7 | TNFα | | FcgR silent |
| 23-33 | FcgR | TNFα | | TNFα | TNFα | | TNFα | FcgR |
| 23-34 | FcgR | TNFα | | TNFα | TNFα | | TNFα | FcgR |
| 23-35 | FcgR | IL-12/23 | | TNFα | TNFα | | IL-12/23 | FcgR |
| 23-36 | FcgR | IL-12/23 | | TNFα | TNFα | | IL-12/23 | FcgR |
| 23-37 | FcgR | IL-17A | | TNFα | TNFα | | IL-17A | FcgR |
| 23-38 | FcgR | IL-17A | | TNFα | TNFα | | IL-17A | FcgR |
| 23-39 | FcgR silent | α4β7 | | TNFα | TNFα | | α4β7 | FcgR silent |
| 23-40 | FcgR silent | α4β7 | | TNFα | TNFα | | α4β7 | FcgR silent |

TABLE 62

| | H1 Chain | | H2 Chain | | L1 Chain | | L2 Chain | |
|---|---|---|---|---|---|---|---|---|
| Protein | V region | Amino acid | V region | Amino acid | V region | Amino acid | V region | Amino acid |
| ID | type | Substitutions | Type | Substitutions | Type | Substitutions | Type | Substitutions |
| 23-01 | VH-CH1 | Q39K/S183E | VK-CH1 | Q38E/S183K | VK-CK | Q38E/V133K | VH-CK | Q39K/V133E |
| 23-02 | VH-CH1 | Q39K/S183E | VK-CH1 | Q38K/S183K | VK-CK | Q38E/V133K | VH-CK | Q39E/V133E |
| 23-03 | VH-CH1 | Q39E/S183E | VK-CH1 | Q38E/S183K | VK-CK | Q38K/V133K | VH-CK | Q39K/V133E |
| 23-04 | VH-CH1 | Q39E/S183E | VK-CH1 | Q38K/S183K | VK-CK | Q38K/V133K | VH-CK | Q39E/V133E |
| 23-05 | VH-CH1 | Q39K/S183E | VK-CH1 | Q38E/S183K | VK-CK | Q38E/V133K | VH-CK | Q39K/V133E |
| 23-06 | VH-CH1 | Q39K/S183E | VK-CH1 | Q38K/S183K | VK-CK | Q38E/V133K | VH-CK | Q39E/V133E |
| 23-07 | VH-CH1 | Q39E/S183E | VK-CH1 | Q38E/S183K | VK-CK | Q38K/V133K | VH-CK | Q39K/V133E |
| 23-08 | VH-CH1 | Q39E/S183E | VK-CH1 | Q38K/S183K | VK-CK | Q38K/V133K | VH-CK | Q39E/V133E |
| 23-09 | VH-CH1 | Q39K/S183E | VK-CH1 | Q38E/S183K | VK-CK | Q38E/V133K | VH-CK | Q39K/V133E |
| 23-10 | VH-CH1 | Q39K/S183E | VK-CH1 | Q38K/S183K | VK-CK | Q38E/V133K | VH-CK | Q39E/V133E |
| 23-11 | VH-CH1 | Q39E/S183E | VK-CH1 | Q38E/S183K | VK-CK | Q38K/V133K | VH-CK | Q39K/V133E |
| 23-12 | VH-CH1 | Q39E/S183E | VK-CH1 | Q38K/S183K | VK-CK | Q38K/V133K | VH-CK | Q39E/V133E |
| 23-13 | VH-CH1 | Q39K/S183E | VK-CH1 | Q38E/S183K | VK-CK | Q38E/V133K | VH-CK | Q39K/V133E |
| 23-14 | VH-CH1 | Q39K/S183E | VK-CH1 | Q38K/S183K | VK-CK | Q38E/V133K | VH-CK | Q39E/V133E |
| 23-15 | VH-CH1 | Q39E/S183E | VK-CH1 | Q38E/S183K | VK-CK | Q38K/V133K | VH-CK | Q39K/V133E |
| 23-16 | VH-CH1 | Q39E/S183E | VK-CH1 | Q38K/S183K | VK-CK | Q38K/V133K | VH-CK | Q39E/V133E |
| 23-17 | VH-CH1 | Q39K/S183E | VK-CH1 | Q38E/S183K | VK-CK | Q38E/V133K | VH-CK | Q39K/V133E |
| 23-18 | VH-CH1 | Q39K/S183E | VK-CH1 | Q38K/S183K | VK-CK | Q38E/V133K | VH-CK | Q39E/V133E |
| 23-19 | VH-CH1 | Q39E/S183E | VK-CH1 | Q38E/S183K | VK-CK | Q38K/V133K | VH-CK | Q39K/V133E |
| 23-20 | VH-CH1 | Q39E/S183E | VK-CH1 | Q38K/S183K | VK-CK | Q38K/V133K | VH-CK | Q39E/V133E |
| 23-21 | VH-CH1 | Q39K/S183E | VK-CH1 | Q38E/S183K | VK-CK | Q38E/V133K | VH-CK | Q39K/V133E |
| 23-22 | VH-CH1 | Q39K/S183E | VK-CH1 | Q38K/S183K | VK-CK | Q38E/V133K | VH-CK | Q39E/V133E |
| 23-23 | VH-CH1 | Q39E/S183E | VK-CH1 | Q38E/S183K | VK-CK | Q38K/V133K | VH-CK | Q39K/V133E |
| 23-24 | VH-CH1 | Q39E/S183E | VK-CH1 | Q38K/S183K | VK-CK | Q38K/V133K | VH-CK | Q39E/V133E |
| 23-25 | VH-CH1 | Q39K/S183E | VK-CH1 | Q38E/S183K | VK-CK | Q38E/V133K | VH-CK | Q39K/V133E |
| 23-26 | VH-CH1 | Q39K/S183E | VK-CH1 | Q38K/S183K | VK-CK | Q38E/V133K | VH-CK | Q39E/V133E |
| 23-27 | VH-CH1 | Q39E/S183E | VK-CH1 | Q38E/S183K | VK-CK | Q38K/V133K | VH-CK | Q39K/V133E |
| 23-28 | VH-CH1 | Q39E/S183E | VK-CH1 | Q38K/S183K | VK-CK | Q38K/V133K | VH-CK | Q39E/V133E |
| 23-29 | VH-CH1 | Q39K/S183E | VK-CH1 | Q38E/S183K | VK-CK | Q38E/V133K | VH-CK | Q39K/V133E |
| 23-30 | VH-CH1 | Q39K/S183E | VK-CH1 | Q38K/S183K | VK-CK | Q38E/V133K | VH-CK | Q39E/V133E |
| 23-31 | VH-CH1 | Q39E/S183E | VK-CH1 | Q38E/S183K | VK-CK | Q38K/V133K | VH-CK | Q39K/V133E |
| 23-32 | VH-CH1 | Q39E/S183E | VK-CH1 | Q38K/S183K | VK-CK | Q38K/V133K | VH-CK | Q39E/V133E |
| 23-33 | VH-CH1 | | | | VK-CK | | | |
| 23-34 | VK-CH1 | | | | VH-CK | | | |
| 23-35 | VH-CH1 | | | | VK-CK | | | |
| 23-36 | VK-CH1 | | | | VH-CK | | | |
| 23-37 | VH-CH1 | | | | VK-CK | | | |
| 23-38 | VK-CH1 | | | | VH-CK | | | |
| 23-39 | VH-CH1 | | | | VK-CK | | | |
| 23-40 | VK-CH1 | | | | VH-CK | | | |

### Example 26—Trivalent/Tetravalent, Bispecific Tetrahedral Antibodies Comprising Two Distinct Fabs that Specifically Bind PD-1 and CTLA-4, or PD-1 Biparatopically

[2129] Tetrahedral antibodies were designed, expressed, and evaluated for their ability to act as checkpoint inhibitors for the treatment of cancer and other disease. This series of bispecific constructs employ VH and VL regions from pembrolizumab (anti-PD-1), ipilimumab (anti-CTLA-4), 388D4 (anti-PD-1) and 244C8 (anti-PD-1) (Tables 63, 64). The epitope recognized by 388D4, an orthostatic inhibitor of PD-1, overlaps with that of pembrolizumab, while the epitope recognized by 244C8, an allosteric inhibitor of PD-1, is at a distinct site. The various Fab pairings are pembrolizumab/ipilimumab, 388D4/ipilimumab, and 388D4/244C8, each placed in either orientation with respect to D3/D4 and D5/D6. Two tetrahedral antibody configurations were employed (Table 65). In the first configuration, the anti-PD-1 Fab domain is placed in either of D3/D4 or D5/D6 (bivalent), and the CTLA-4 targeting Fab domain or second anti-PD-L1 Fab domain is placed in the other of D5/D6 or D3/D4 (bivalent). In the second configuration, the anti-PD-1 Fab domain is placed in D3/D4 (bivalent) and the CTLA-4 targeting Fab domain is placed in D6 (monovalent). To optimize correct VH/VL pairing and to minimize VH/VL mispairing, V region exchange is combined with four different sets of charge pairs to ensure correct pairing of heavy and light chain V regions (Table 66). Additionally, to further facilitate purification of the correctly paired product by Protein A chromatography, the H1 chain incorporates the H435R/Y436F substitution. The constructs are then evaluated for their structural bispecificity by intact mass spectrometry as described in Example 18, and for their functional bispecificity using a variety of in vitro binding assays, checkpoint inhibition assays, and in vivo cancer and related disease efficacy models, known to one skilled in the art.

TABLE 63

| Protein | | | | | |
|---|---|---|---|---|---|
| ID | H1 Chain | H2 Chain | L1 Chain | L2 Chain | Fc chain |
| 24-01 | SEQ ID NO: 4920 | SEQ ID NO: 4921 | SEQ ID NO: 4938 | SEQ ID NO: 4939 | |
| 24-02 | SEQ ID NO: 4920 | SEQ ID NO: 4922 | SEQ ID NO: 4938 | SEQ ID NO: 4940 | |
| 24-03 | SEQ ID NO: 4923 | SEQ ID NO: 4921 | SEQ ID NO: 4941 | SEQ ID NO: 4939 | |
| 24-04 | SEQ ID NO: 4923 | SEQ ID NO: 4922 | SEQ ID NO: 4941 | SEQ ID NO: 4940 | |
| 24-05 | SEQ ID NO: 4920 | SEQ ID NO: 4924 | SEQ ID NO: 4938 | SEQ ID NO: 4939 | SEQ ID NO: 4954 |
| 24-06 | SEQ ID NO: 4920 | SEQ ID NO: 4925 | SEQ ID NO: 4938 | SEQ ID NO: 4940 | SEQ ID NO: 4954 |
| 24-07 | SEQ ID NO: 4923 | SEQ ID NO: 4924 | SEQ ID NO: 4941 | SEQ ID NO: 4939 | SEQ ID NO: 4954 |
| 24-08 | SEQ ID NO: 4923 | SEQ ID NO: 4925 | SEQ ID NO: 4941 | SEQ ID NO: 4940 | SEQ ID NO: 4954 |
| 24-09 | SEQ ID NO: 4926 | SEQ ID NO: 4927 | SEQ ID NO: 4942 | SEQ ID NO: 4943 | |
| 24-10 | SEQ ID NO: 4926 | SEQ ID NO: 4928 | SEQ ID NO: 4942 | SEQ ID NO: 4944 | |
| 24-11 | SEQ ID NO: 4929 | SEQ ID NO: 4927 | SEQ ID NO: 4945 | SEQ ID NO: 4943 | |
| 24-12 | SEQ ID NO: 4929 | SEQ ID NO: 4928 | SEQ ID NO: 4945 | SEQ ID NO: 4944 | |
| 24-13 | SEQ ID NO: 4930 | SEQ ID NO: 4921 | SEQ ID NO: 4946 | SEQ ID NO: 4939 | |
| 24-14 | SEQ ID NO: 4930 | SEQ ID NO: 4922 | SEQ ID NO: 4946 | SEQ ID NO: 4940 | |
| 24-15 | SEQ ID NO: 4931 | SEQ ID NO: 4921 | SEQ ID NO: 4947 | SEQ ID NO: 4939 | |
| 24-16 | SEQ ID NO: 4931 | SEQ ID NO: 4922 | SEQ ID NO: 4947 | SEQ ID NO: 4940 | |
| 24-17 | SEQ ID NO: 4930 | SEQ ID NO: 4924 | SEQ ID NO: 4946 | SEQ ID NO: 4939 | SEQ ID NO: 4954 |
| 24-18 | SEQ ID NO: 4930 | SEQ ID NO: 4925 | SEQ ID NO: 4946 | SEQ ID NO: 4940 | SEQ ID NO: 4954 |
| 24-19 | SEQ ID NO: 4931 | SEQ ID NO: 4924 | SEQ ID NO: 4947 | SEQ ID NO: 4939 | SEQ ID NO: 4954 |
| 24-20 | SEQ ID NO: 4931 | SEQ ID NO: 4925 | SEQ ID NO: 4947 | SEQ ID NO: 4940 | SEQ ID NO: 4954 |
| 24-21 | SEQ ID NO: 4926 | SEQ ID NO: 4932 | SEQ ID NO: 4942 | SEQ ID NO: 4948 | |
| 24-22 | SEQ ID NO: 4926 | SEQ ID NO: 4933 | SEQ ID NO: 4942 | SEQ ID NO: 4949 | |
| 24-23 | SEQ ID NO: 4929 | SEQ ID NO: 4932 | SEQ ID NO: 4945 | SEQ ID NO: 4948 | |
| 24-24 | SEQ ID NO: 4929 | SEQ ID NO: 4933 | SEQ ID NO: 4945 | SEQ ID NO: 4949 | |
| 24-25 | SEQ ID NO: 4930 | SEQ ID NO: 4934 | SEQ ID NO: 4946 | SEQ ID NO: 4950 | |
| 24-26 | SEQ ID NO: 4930 | SEQ ID NO: 4935 | SEQ ID NO: 4946 | SEQ ID NO: 4951 | |
| 24-27 | SEQ ID NO: 4931 | SEQ ID NO: 4934 | SEQ ID NO: 4947 | SEQ ID NO: 4950 | |
| 24-28 | SEQ ID NO: 4931 | SEQ ID NO: 4935 | SEQ ID NO: 4947 | SEQ ID NO: 4951 | |
| 24-29 | SEQ ID NO: 4936 | SEQ ID NO: 4932 | SEQ ID NO: 4952 | SEQ ID NO: 4948 | |
| 24-30 | SEQ ID NO: 4936 | SEQ ID NO: 4933 | SEQ ID NO: 4952 | SEQ ID NO: 4949 | |
| 24-31 | SEQ ID NO: 4937 | SEQ ID NO: 4932 | SEQ ID NO: 4953 | SEQ ID NO: 4948 | |
| 24-32 | SEQ ID NO: 4937 | SEQ ID NO: 4933 | SEQ ID NO: 4953 | SEQ ID NO: 4949 | |

TABLE 64

| Protein | | | | | | |
|---|---|---|---|---|---|---|
| ID | D1-Fc | D5-Fab | D4-Fab | D3-Fab | D6-Fab | D2-Fc |
| 24-01 | L234A/L235A/P329G | Ipilimumab | Pembrolizumab | Pembrolizumab | Ipilimumab | L234A/L235A/P329G |
| 24-02 | L234A/L235A/P329G | Ipilimumab | Pembrolizumab | Pembrolizumab | Ipilimumab | L234A/L235A/P329G |
| 24-03 | L234A/L235A/P329G | Ipilimumab | Pembrolizumab | Pembrolizumab | Ipilimumab | L234A/L235A/P329G |
| 24-04 | L234A/L235A/P329G | Ipilimumab | Pembrolizumab | Pembrolizumab | Ipilimumab | L234A/L235A/P329G |
| 24-05 | L234A/L235A/P329G | | Pembrolizumab | Pembrolizumab | Ipilimumab | L234A/L235A/P329G |
| 24-06 | L234A/L235A/P329G | | Pembrolizumab | Pembrolizumab | Ipilimumab | L234A/L235A/P329G |
| 24-07 | L234A/L235A/P329G | | Pembrolizumab | Pembrolizumab | Ipilimumab | L234A/L235A/P329G |
| 24-08 | L234A/L235A/P329G | | Pembrolizumab | Pembrolizumab | Ipilimumab | L234A/L235A/P329G |
| 24-09 | L234A/L235A/P329G | Pembrolizumab | Ipilimumab | Ipilimumab | Pembrolizumab | L234A/L235A/P329G |
| 24-10 | L234A/L235A/P329G | Pembrolizumab | Ipilimumab | Ipilimumab | Pembrolizumab | L234A/L235A/P329G |
| 24-11 | L234A/L235A/P329G | Pembrolizumab | Ipilimumab | Ipilimumab | Pembrolizumab | L234A/L235A/P329G |
| 24-12 | L234A/L235A/P329G | Pembrolizumab | Ipilimumab | Ipilimumab | Pembrolizumab | L234A/L235A/P329G |
| 24-13 | L234A/L235A/P329G | Ipilimumab | 388D4 | 388D4 | Ipilimumab | L234A/L235A/P329G |
| 24-14 | L234A/L235A/P329G | Ipilimumab | 388D4 | 388D4 | Ipilimumab | L234A/L235A/P329G |
| 24-15 | L234A/L235A/P329G | Ipilimumab | 388D4 | 388D4 | Ipilimumab | L234A/L235A/P329G |
| 24-16 | L234A/L235A/P329G | Ipilimumab | 388D4 | 388D4 | Ipilimumab | L234A/L235A/P329G |
| 24-17 | L234A/L235A/P329G | | 388D4 | 388D4 | Ipilimumab | L234A/L235A/P329G |
| 24-18 | L234A/L235A/P329G | | 388D4 | 388D4 | Ipilimumab | L234A/L235A/P329G |
| 24-19 | L234A/L235A/P329G | | 388D4 | 388D4 | Ipilimumab | L234A/L235A/P329G |
| 24-20 | L234A/L235A/P329G | | 388D4 | 388D4 | Ipilimumab | L234A/L235A/P329G |
| 24-21 | L234A/L235A/P329G | 388D4 | Ipilimumab | Ipilimumab | 388D4 | L234A/L235A/P329G |
| 24-22 | L234A/L235A/P329G | 388D4 | Ipilimumab | Ipilimumab | 388D4 | L234A/L235A/P329G |
| 24-23 | L234A/L235A/P329G | 388D4 | Ipilimumab | Ipilimumab | 388D4 | L234A/L235A/P329G |
| 24-24 | L234A/L235A/P329G | 388D4 | Ipilimumab | Ipilimumab | 388D4 | L234A/L235A/P329G |
| 24-25 | L234A/L235A/P329G | 244C8 | 388D4 | 388D4 | 244C8 | L234A/L235A/P329G |
| 24-26 | L234A/L235A/P329G | 244C8 | 388D4 | 388D4 | 244C8 | L234A/L235A/P329G |
| 24-27 | L234A/L235A/P329G | 244C8 | 388D4 | 388D4 | 244C8 | L234A/L235A/P329G |
| 24-28 | L234A/L235A/P329G | 244C8 | 388D4 | 388D4 | 244C8 | L234A/L235A/P329G |
| 24-29 | L234A/L235A/P329G | 388D4 | 244C8 | 244C8 | 388D4 | L234A/L235A/P329G |
| 24-30 | L234A/L235A/P329G | 388D4 | 244C8 | 244C8 | 388D4 | L234A/L235A/P329G |
| 24-31 | L234A/L235A/P329G | 388D4 | 244C8 | 244C8 | 388D4 | L234A/L235A/P329G |
| 24-32 | L234A/L235A/P329G | 388D4 | 244C8 | 244C8 | 388D4 | L234A/L235A/P329G |

TABLE 65

| Protein | D1-Fc | D5-Fab | D4-Fab | D3-Fab | D6-Fab | D2-Fc |
|---|---|---|---|---|---|---|
| ID | Specificity | Specificity | Specificity | Specificity | Specificity | Specificity |
| 24-01 | FcgR silent | CTLA-4 | PD-1 | PD-1 | CTLA-4 | FcgR silent |
| 24-02 | FcgR silent | CTLA-4 | PD-1 | PD-1 | CTLA-4 | FcgR silent |
| 24-03 | FcgR silent | CTLA-4 | PD-1 | PD-1 | CTLA-4 | FcgR silent |
| 24-04 | FcgR silent | CTLA-4 | PD-1 | PD-1 | CTLA-4 | FcgR silent |
| 24-05 | FcgR silent | | PD-1 | PD-1 | CTLA-4 | FcgR silent |
| 24-06 | FcgR silent | | PD-1 | PD-1 | CTLA-4 | FcgR silent |
| 24-07 | FcgR silent | | PD-1 | PD-1 | CTLA-4 | FcgR silent |
| 24-08 | FcgR silent | | PD-1 | PD-1 | CTLA-4 | FcgR silent |
| 24-09 | FcgR silent | PD-1 | CTLA-4 | CTLA-4 | PD-1 | FcgR silent |
| 24-10 | FcgR silent | PD-1 | CTLA-4 | CTLA-4 | PD-1 | FcgR silent |
| 24-11 | FcgR silent | PD-1 | CTLA-4 | CTLA-4 | PD-1 | FcgR silent |
| 24-12 | FcgR silent | PD-1 | CTLA-4 | CTLA-4 | PD-1 | FcgR silent |
| 24-13 | FcgR silent | CTLA-4 | PD-1 | PD-1 | CTLA-4 | FcgR silent |
| 24-14 | FcgR silent | CTLA-4 | PD-1 | PD-1 | CTLA-4 | FcgR silent |
| 24-15 | FcgR silent | CTLA-4 | PD-1 | PD-1 | CTLA-4 | FcgR silent |
| 24-16 | FcgR silent | CTLA-4 | PD-1 | PD-1 | CTLA-4 | FcgR silent |
| 24-17 | FcgR silent | | PD-1 | PD-1 | CTLA-4 | FcgR silent |
| 24-18 | FcgR silent | | PD-1 | PD-1 | CTLA-4 | FcgR silent |
| 24-19 | FcgR silent | | PD-1 | PD-1 | CTLA-4 | FcgR silent |
| 24-20 | FcgR silent | | PD-1 | PD-1 | CTLA-4 | FcgR silent |
| 24-21 | FcgR silent | PD-1 | CTLA-4 | CTLA-4 | PD-1 | FcgR silent |
| 24-22 | FcgR silent | PD-1 | CTLA-4 | CTLA-4 | PD-1 | FcgR silent |
| 24-23 | FcgR silent | PD-1 | CTLA-4 | CTLA-4 | PD-1 | FcgR silent |
| 24-24 | FcgR silent | PD-1 | CTLA-4 | CTLA-4 | PD-1 | FcgR silent |
| 24-25 | FcgR silent | PD-1 (allosteric) | PD-1 | PD-1 | PD-1 (allosteric) | FcgR silent |
| 24-26 | FcgR silent | PD-1 (allosteric) | PD-1 | PD-1 | PD-1 (allosteric) | FcgR silent |
| 24-27 | FcgR silent | PD-1 (allosteric) | PD-1 | PD-1 | PD-1 (allosteric) | FcgR silent |
| 24-28 | FcgR silent | PD-1 (allosteric) | PD-1 | PD-1 | PD-1 (allosteric) | FcgR silent |
| 24-29 | FcgR silent | PD-1 | PD-1 (allosteric) | PD-1 (allosteric) | PD-1 | FcgR silent |
| 24-30 | FcgR silent | PD-1 | PD-1 (allosteric) | PD-1 (allosteric) | PD-1 | FcgR silent |
| 24-31 | FcgR silent | PD-1 | PD-1 (allosteric) | PD-1 (allosteric) | PD-1 | FcgR silent |
| 24-32 | FcgR silent | PD-1 | PD-1 (allosteric) | PD-1 (allosteric) | PD-1 | FcgR silent |

TABLE 66

| | H1 Chain | | H2 Chain | | L1 Chain | | L2 Chain | |
|---|---|---|---|---|---|---|---|---|
| Protein | V region | Amino acid | V region | Amino acid | V region | Amino acid | V region | Amino acid |
| ID | type | Substitutions | Type | Substitutions | Type | Substitutions | Type | Substitutions |
| 24-01 | VH-CH1 | Q39K/S183E | VK-CH1 | Q38E/S183K | VK-CK | Q38E/V133K | VH-CK | Q39K/V133E |
| 24-02 | VH-CH2 | Q39K/S183E | VK-CH1 | Q38K/S183K | VK-CK | Q38E/V133K | VH-CK | Q39E/V133E |
| 24-03 | VH-CH1 | Q39E/S183E | VK-CH1 | Q38E/S183K | VK-CK | Q38K/V133K | VH-CK | Q39K/V133E |
| 24-04 | VH-CH1 | Q39E/S183E | VK-CH1 | Q38K/S183K | VK-CK | Q38K/V133K | VH-CK | Q39E/V133E |
| 24-05 | VH-CH1 | Q39K/S183E | VK-CH1 | Q38E/S183K | VK-CK | Q38E/V133K | VH-CK | Q39K/V133E |
| 24-06 | VH-CH1 | Q39K/S183E | VK-CH1 | Q38K/S183K | VK-CK | Q38E/V133K | VH-CK | Q39E/V133E |
| 24-07 | VH-CH1 | Q39E/S183E | VK-CH1 | Q38E/S183K | VK-CK | Q38K/V133K | VH-CK | Q39K/V133E |
| 24-08 | VH-CH1 | Q39E/S183E | VK-CH1 | Q38K/S183K | VK-CK | Q38K/V133K | VH-CK | Q39E/V133E |
| 24-09 | VH-CH1 | Q39K/S183E | VK-CH1 | Q38E/S183K | VK-CK | Q38E/V133K | VH-CK | Q39K/V133E |
| 24-10 | VH-CH1 | Q39K/S183E | VK-CH1 | Q38K/S183K | VK-CK | Q38E/V133K | VH-CK | Q39E/V133E |
| 24-11 | VH-CH1 | Q39E/S183E | VK-CH1 | Q38E/S183K | VK-CK | Q38K/V133K | VH-CK | Q39K/V133E |
| 24-12 | VH-CH1 | Q39E/S183E | VK-CH1 | Q38K/S183K | VK-CK | Q38K/V133K | VH-CK | Q39E/V133E |
| 24-13 | VH-CH1 | Q39K/S183E | VK-CH1 | Q38E/S183K | VK-CK | Q38E/V133K | VH-CK | Q39K/V133E |
| 24-14 | VH-CH1 | Q39K/S183E | VK-CH1 | Q38K/S183K | VK-CK | Q38E/V133K | VH-CK | Q39E/V133E |
| 24-15 | VH-CH1 | Q39E/S183E | VK-CH1 | Q38E/S183K | VK-CK | Q38K/V133K | VH-CK | Q39K/V133E |
| 24-16 | VH-CH1 | Q39E/S183E | VK-CH1 | Q38K/S183K | VK-CK | Q38K/V133K | VH-CK | Q39E/V133E |
| 24-17 | VH-CH1 | Q39K/S183E | VK-CH1 | Q38E/S183K | VK-CK | Q38E/V133K | VH-CK | Q39K/V133E |
| 24-18 | VH-CH1 | Q39K/S183E | VK-CH1 | Q38K/S183K | VK-CK | Q38E/V133K | VH-CK | Q39E/V133E |
| 24-19 | VH-CH1 | Q39E/S183E | VK-CH1 | Q38E/S183K | VK-CK | Q38K/V133K | VH-CK | Q39K/V133E |
| 24-20 | VH-CH1 | Q39E/S183E | VK-CH1 | Q38K/S183K | VK-CK | Q38K/V133K | VH-CK | Q39E/V133E |
| 24-21 | VH-CH1 | Q39K/S183E | VK-CH1 | Q38E/S183K | VK-CK | Q38E/V133K | VH-CK | Q39K/V133E |
| 24-22 | VH-CH1 | Q39K/S183E | VK-CH1 | Q38K/S183K | VK-CK | Q38E/V133K | VH-CK | Q39E/V133E |
| 24-23 | VH-CH1 | Q39E/S183E | VK-CH1 | Q38E/S183K | VK-CK | Q38K/V133K | VH-CK | Q39K/V133E |
| 24-24 | VH-CH1 | Q39E/S183E | VK-CH1 | Q38K/S183K | VK-CK | Q38K/V133K | VH-CK | Q39E/V133E |
| 24-25 | VH-CH1 | Q39K/S183E | VK-CH1 | Q38E/S183K | VK-CK | Q38E/V133K | VH-CK | Q39K/V133E |
| 24-26 | VH-CH1 | Q39K/S183E | VK-CH1 | Q38K/S183K | VK-CK | Q38E/V133K | VH-CK | Q39E/V133E |
| 24-27 | VH-CH1 | Q39E/S183E | VK-CH1 | Q38E/S183K | VK-CK | Q38K/V133K | VH-CK | Q39K/V133E |
| 24-28 | VH-CH1 | Q39E/S183E | VK-CH1 | Q38K/S183K | VK-CK | Q38K/V133K | VH-CK | Q39E/V133E |
| 24-29 | VH-CH1 | Q39K/S183E | VK-CH1 | Q38E/S183K | VK-CK | Q38E/V133K | VH-CK | Q39K/V133E |
| 24-30 | VH-CH1 | Q39K/S183E | VK-CH1 | Q38K/S183K | VK-CK | Q38E/V133K | VH-CK | Q39E/V133E |
| 24-31 | VH-CH1 | Q39E/S183E | VK-CH1 | Q38E/S183K | VK-CK | Q38K/V133K | VH-CK | Q39K/V133E |
| 24-32 | VH-CH1 | Q39E/S183E | VK-CH1 | Q38K/S183K | VK-CK | Q38K/V133K | VH-CK | Q39E/V133E |

### Example 27—Tetravalent, Bispecific Tetrahedral Antibodies Comprising Two Distinct Fabs that Specifically Bind PD-1 and PD-L1

[2130] Tetrahedral antibodies were designed, expressed, and evaluated for their ability to act as checkpoint inhibitors for the treatment of cancer and other disease. This series of bispecific constructs employ VH and VL regions from pembrolizumab (anti-PD-1), 388D4 (anti-PD-1), atezolizumab (anti-PD-L1), and B6055 (anti-PD-L1) (Tables 67, 68). The various Fab pairings are pembrolizumab/atezolizumab, 388D4/atezolizumab, pembrolizumab/B6055, and 388D4/B6055 (all anti-PD-1/anti-PD-L1), each placed in either orientation with respect to D3/D4 and D5/D6 (Table 69). To optimize correct VH/VL pairing and to minimize VH/VL mispairing, V region exchange is combined with four different sets of charge pairs to ensure correct pairing of heavy and light chain V regions (Table 70). Additionally, to further facilitate purification of the correctly paired product by Protein A chromatography, the H1 chain incorporates the H435R/Y436F substitution. The constructs are then evaluated for their structural bispecificity by intact mass spectrometry as described in Example 18, and for their functional bispecificity using a variety of in vitro binding assays, cytotoxicity assays, and cytokine induction and release assays, and in vivo cancer efficacy models, known to one skilled in the art.

TABLE 67

| Protein ID | H1 Chain | H2 Chain | L1 Chain | L2 Chain |
|---|---|---|---|---|
| 25-01 | SEQ ID NO: 4955 | SEQ ID NO: 4956 | SEQ ID NO: 4971 | SEQ ID NO: 4972 |
| 25-02 | SEQ ID NO: 4955 | SEQ ID NO: 4957 | SEQ ID NO: 4971 | SEQ ID NO: 4973 |
| 25-03 | SEQ ID NO: 4958 | SEQ ID NO: 4956 | SEQ ID NO: 4974 | SEQ ID NO: 4972 |
| 25-04 | SEQ ID NO: 4958 | SEQ ID NO: 4957 | SEQ ID NO: 4974 | SEQ ID NO: 4973 |
| 25-05 | SEQ ID NO: 4959 | SEQ ID NO: 4960 | SEQ ID NO: 4975 | SEQ ID NO: 4976 |
| 25-06 | SEQ ID NO: 4959 | SEQ ID NO: 4961 | SEQ ID NO: 4975 | SEQ ID NO: 4977 |
| 25-07 | SEQ ID NO: 4962 | SEQ ID NO: 4960 | SEQ ID NO: 4978 | SEQ ID NO: 4976 |
| 25-08 | SEQ ID NO: 4962 | SEQ ID NO: 4961 | SEQ ID NO: 4978 | SEQ ID NO: 4977 |
| 25-09 | SEQ ID NO: 4963 | SEQ ID NO: 4956 | SEQ ID NO: 4979 | SEQ ID NO: 4972 |
| 25-10 | SEQ ID NO: 4963 | SEQ ID NO: 4957 | SEQ ID NO: 4979 | SEQ ID NO: 4973 |
| 25-11 | SEQ ID NO: 4964 | SEQ ID NO: 4956 | SEQ ID NO: 4980 | SEQ ID NO: 4972 |
| 25-12 | SEQ ID NO: 4964 | SEQ ID NO: 4957 | SEQ ID NO: 4980 | SEQ ID NO: 4973 |
| 25-13 | SEQ ID NO: 4959 | SEQ ID NO: 4965 | SEQ ID NO: 4975 | SEQ ID NO: 4981 |
| 25-14 | SEQ ID NO: 4959 | SEQ ID NO: 4966 | SEQ ID NO: 4975 | SEQ ID NO: 4982 |
| 25-15 | SEQ ID NO: 4962 | SEQ ID NO: 4965 | SEQ ID NO: 4978 | SEQ ID NO: 4981 |
| 25-16 | SEQ ID NO: 4962 | SEQ ID NO: 4966 | SEQ ID NO: 4978 | SEQ ID NO: 4982 |
| 25-17 | SEQ ID NO: 4955 | SEQ ID NO: 4967 | SEQ ID NO: 4971 | SEQ ID NO: 4983 |
| 25-18 | SEQ ID NO: 4955 | SEQ ID NO: 4968 | SEQ ID NO: 4971 | SEQ ID NO: 4984 |
| 25-19 | SEQ ID NO: 4958 | SEQ ID NO: 4967 | SEQ ID NO: 4974 | SEQ ID NO: 4983 |
| 25-20 | SEQ ID NO: 4958 | SEQ ID NO: 4968 | SEQ ID NO: 4974 | SEQ ID NO: 4984 |
| 25-21 | SEQ ID NO: 4969 | SEQ ID NO: 4960 | SEQ ID NO: 4985 | SEQ ID NO: 4976 |
| 25-22 | SEQ ID NO: 4969 | SEQ ID NO: 4961 | SEQ ID NO: 4985 | SEQ ID NO: 4977 |
| 25-23 | SEQ ID NO: 4970 | SEQ ID NO: 4960 | SEQ ID NO: 4986 | SEQ ID NO: 4976 |
| 25-24 | SEQ ID NO: 4970 | SEQ ID NO: 4961 | SEQ ID NO: 4986 | SEQ ID NO: 4977 |
| 25-25 | SEQ ID NO: 4963 | SEQ ID NO: 4967 | SEQ ID NO: 4979 | SEQ ID NO: 4983 |
| 25-26 | SEQ ID NO: 4963 | SEQ ID NO: 4968 | SEQ ID NO: 4979 | SEQ ID NO: 4984 |
| 25-27 | SEQ ID NO: 4964 | SEQ ID NO: 4967 | SEQ ID NO: 4980 | SEQ ID NO: 4983 |
| 25-28 | SEQ ID NO: 4964 | SEQ ID NO: 4968 | SEQ ID NO: 4980 | SEQ ID NO: 4984 |
| 25-29 | SEQ ID NO: 4969 | SEQ ID NO: 4965 | SEQ ID NO: 4985 | SEQ ID NO: 4981 |
| 25-30 | SEQ ID NO: 4969 | SEQ ID NO: 4966 | SEQ ID NO: 4985 | SEQ ID NO: 4982 |
| 25-31 | SEQ ID NO: 4970 | SEQ ID NO: 4965 | SEQ ID NO: 4986 | SEQ ID NO: 4981 |
| 25-32 | SEQ ID NO: 4970 | SEQ ID NO: 4966 | SEQ ID NO: 4986 | SEQ ID NO: 4982 |

TABLE 68

| Protein | | | | | | |
|---|---|---|---|---|---|---|
| ID | D1-Fc | D5-Fab | D4-Fab | D3-Fab | D6-Fab | D2-Fc |
| 25-01 | L234A/L235A/P329 | Atezolizumab | Pembrolizuma | Pembrolizuma | Atezolizumab | L234A/L235A/P329 |
| 25-02 | L234A/L235A/P329 | Atezolizumab | Pembrolizuma | Pembrolizuma | Atezolizumab | L234A/L235A/P329 |
| 25-03 | L234A/L235A/P329 | Atezolizumab | Pembrolizuma | Pembrolizuma | Atezolizumab | L234A/L235A/P329 |
| 25-04 | L234A/L235A/P329 | Atezolizumab | Pembrolizuma | Pembrolizuma | Atezolizumab | L234A/L235A/P329 |
| 25-05 | L234A/L235A/P329 | Pembrolizuma | Atezolizumab | Atezolizumab | Pembrolizuma | L234A/L235A/P329 |
| 25-06 | L234A/L235A/P329 | Pembrolizuma | Atezolizumab | Atezolizumab | Pembrolizuma | L234A/L235A/P329 |
| 25-07 | L234A/L235A/P329 | Pembrolizuma | Atezolizumab | Atezolizumab | Pembrolizuma | L234A/L235A/P329 |
| 25-08 | L234A/L235A/P329 | Pembrolizuma | Atezolizumab | Atezolizumab | Pembrolizuma | L234A/L235A/P329 |
| 25-09 | L234A/L235A/P329 | Atezolizumab | 388D4 | 388D4 | Atezolizumab | L234A/L235A/P329 |
| 25-10 | L234A/L235A/P329 | Atezolizumab | 388D4 | 388D4 | Atezolizumab | L234A/L235A/P329 |
| 25-11 | L234A/L235A/P329 | Atezolizumab | 388D4 | 388D4 | Atezolizumab | L234A/L235A/P329 |
| 25-12 | L234A/L235A/P329 | Atezolizumab | 388D4 | 388D4 | Atezolizumab | L234A/L235A/P329 |
| 25-13 | L234A/L235A/P329 | 388D4 | Atezolizumab | Atezolizumab | 388D4 | L234A/L235A/P329 |
| 25-14 | L234A/L235A/P329 | 388D4 | Atezolizumab | Atezolizumab | 388D4 | L234A/L235A/P329 |
| 25-15 | L234A/L235A/P329 | 388D4 | Atezolizumab | Atezolizumab | 388D4 | L234A/L235A/P329 |
| 25-16 | L234A/L235A/P329 | 388D4 | Atezolizumab | Atezolizumab | 388D4 | L234A/L235A/P329 |
| 25-17 | L234A/L235A/P329 | B6055 | Pembrolizuma | Pembrolizuma | B6055 | L234A/L235A/P329 |
| 25-18 | L234A/L235A/P329 | B6055 | Pembrolizuma | Pembrolizuma | B6055 | L234A/L235A/P329 |
| 25-19 | L234A/L235A/P329 | B6055 | Pembrolizuma | Pembrolizuma | B6055 | L234A/L235A/P329 |
| 25-20 | L234A/L235A/P329 | B6055 | Pembrolizuma | Pembrolizuma | B6055 | L234A/L235A/P329 |
| 25-21 | L234A/L235A/P329 | Pembrolizuma | B6055 | B6055 | Pembrolizuma | L234A/L235A/P329 |
| 25-22 | L234A/L235A/P329 | Pembrolizuma | B6055 | B6055 | Pembrolizuma | L234A/L235A/P329 |
| 25-23 | L234A/L235A/P329 | Pembrolizuma | B6055 | B6055 | Pembrolizuma | L234A/L235A/P329 |
| 25-24 | L234A/L235A/P329 | Pembrolizuma | B6055 | B6055 | Pembrolizuma | L234A/L235A/P329 |
| 25-25 | L234A/L235A/P329 | B6055 | 388D4 | 388D4 | B6055 | L234A/L235A/P329 |
| 25-26 | L234A/L235A/P329 | B6055 | 388D4 | 388D4 | B6055 | L234A/L235A/P329 |
| 25-27 | L234A/L235A/P329 | B6055 | 388D4 | 388D4 | B6055 | L234A/L235A/P329 |
| 25-28 | L234A/L235A/P329 | B6055 | 388D4 | 388D4 | B6055 | L234A/L235A/P329 |
| 25-29 | L234A/L235A/P329 | 388D4 | B6055 | B6055 | 388D4 | L234A/L235A/P329 |
| 25-30 | L234A/L235A/P329 | 388D4 | B6055 | B6055 | 388D4 | L234A/L235A/P329 |
| 25-31 | L234A/L235A/P329 | 388D4 | B6055 | B6055 | 388D4 | L234A/L235A/P329 |
| 25-32 | L234A/L235A/P329 | 388D4 | B6055 | B6055 | 388D4 | L234A/L235A/P329 |

TABLE 69

| Pro- | | D5-Fab | D4-Fab | D3-Fab | D6-Fab | |
|---|---|---|---|---|---|---|
| tein | D1-Fc | Speci- | Speci- | Speci- | Speci- | D2-Fc |
| ID | Specificity | ficity | ficity | ficity | ficity | Specificity |
| 25-01 | FcgR silent | PD-L1 | PD-1 | PD-1 | PD-L1 | FcgR silent |
| 25-02 | FcgR silent | PD-L1 | PD-1 | PD-1 | PD-L1 | FcgR silent |
| 25-03 | FcgR silent | PD-L1 | PD-1 | PD-1 | PD-L1 | FcgR silent |
| 25-04 | FcgR silent | PD-L1 | PD-1 | PD-1 | PD-L1 | FcgR silent |
| 25-05 | FcgR silent | PD-1 | PD-L1 | PD-L1 | PD-1 | FcgR silent |
| 25-06 | FcgR silent | PD-1 | PD-L1 | PD-L1 | PD-1 | FcgR silent |
| 25-07 | FcgR silent | PD-1 | PD-L1 | PD-L1 | PD-1 | FcgR silent |
| 25-08 | FcgR silent | PD-1 | PD-L1 | PD-L1 | PD-1 | FcgR silent |
| 25-09 | FcgR silent | PD-L1 | PD-1 | PD-1 | PD-L1 | FcgR silent |
| 25-10 | FcgR silent | PD-L1 | PD-1 | PD-1 | PD-L1 | FcgR silent |
| 25-11 | FcgR silent | PD-L1 | PD-1 | PD-1 | PD-L1 | FcgR silent |
| 25-12 | FcgR silent | PD-L1 | PD-1 | PD-1 | PD-L1 | FcgR silent |
| 25-13 | FcgR silent | PD-1 | PD-L1 | PD-L1 | PD-1 | FcgR silent |
| 25-14 | FcgR silent | PD-1 | PD-L1 | PD-L1 | PD-1 | FcgR silent |
| 25-15 | FcgR silent | PD-1 | PD-L1 | PD-L1 | PD-1 | FcgR silent |
| 25-16 | FcgR silent | PD-1 | PD-L1 | PD-L1 | PD-1 | FcgR silent |
| 25-17 | FcgR silent | PD-L1 | PD-1 | PD-1 | PD-L1 | FcgR silent |
| 25-18 | FcgR silent | PD-L1 | PD-1 | PD-1 | PD-L1 | FcgR silent |
| 25-19 | FcgR silent | PD-L1 | PD-1 | PD-1 | PD-L1 | FcgR silent |
| 25-20 | FcgR silent | PD-L1 | PD-1 | PD-1 | PD-L1 | FcgR silent |
| 25-21 | FcgR silent | PD-1 | PD-L1 | PD-L1 | PD-1 | FcgR silent |
| 25-22 | FcgR silent | PD-1 | PD-L1 | PD-L1 | PD-1 | FcgR silent |
| 25-23 | FcgR silent | PD-1 | PD-L1 | PD-L1 | PD-1 | FcgR silent |
| 25-24 | FcgR silent | PD-1 | PD-L1 | PD-L1 | PD-1 | FcgR silent |
| 25-25 | FcgR silent | PD-L1 | PD-1 | PD-1 | PD-L1 | FcgR silent |
| 25-26 | FcgR silent | PD-L1 | PD-1 | PD-1 | PD-L1 | FcgR silent |
| 25-27 | FcgR silent | PD-L1 | PD-1 | PD-1 | PD-L1 | FcgR silent |
| 25-28 | FcgR silent | PD-L1 | PD-1 | PD-1 | PD-L1 | FcgR silent |
| 25-29 | FcgR silent | PD-1 | PD-L1 | PD-L1 | PD-1 | FcgR silent |
| 25-30 | FcgR silent | PD-1 | PD-L1 | PD-L1 | PD-1 | FcgR silent |
| 25-31 | FcgR silent | PD-1 | PD-L1 | PD-L1 | PD-1 | FcgR silent |
| 25-32 | FcgR silent | PD-1 | PD-L1 | PD-L1 | PD-1 | FcgR silent |

TABLE 70

| | H1 Chain | | H2 Chain | | L1 Chain | | L2 Chain | |
|---|---|---|---|---|---|---|---|---|
| Protein | V region | Amino acid | V region | Amino acid | V region | Amino acid | V region | Amino acid |
| ID | type | Substitutions | Type | Substitutions | Type | Substitutions | Type | Substitutions |
| 25-01 | VH-CH1 | Q39K/S183E | VK-CH1 | Q38E/S183K | VK-CK | Q38E/V133K | VH-CK | Q39K/V133E |
| 25-02 | VH-CH1 | Q39K/S183E | VK-CH1 | Q38K/S183K | VK-CK | Q38E/V133K | VH-CK | Q39E/V133E |
| 25-03 | VH-CH1 | Q39E/S183E | VK-CH1 | Q38E/S183K | VK-CK | Q38K/V133K | VH-CK | Q39K/V133E |
| 25-04 | VH-CH1 | Q39E/S183E | VK-CH1 | Q38K/S183K | VK-CK | Q38K/V133K | VH-CK | Q39E/V133E |
| 25-05 | VH-CH1 | Q39K/S183E | VK-CH1 | Q38E/S183K | VK-CK | Q38E/V133K | VH-CK | Q39K/V133E |
| 25-06 | VH-CH1 | Q39K/S183E | VK-CH1 | Q38K/S183K | VK-CK | Q38E/V133K | VH-CK | Q39E/V133E |
| 25-07 | VH-CH1 | Q39E/S183E | VK-CH1 | Q38E/S183K | VK-CK | Q38K/V133K | VH-CK | Q39K/V133E |
| 25-08 | VH-CH1 | Q39E/S183E | VK-CH1 | Q38K/S183K | VK-CK | Q38K/V133K | VH-CK | Q39E/V133E |
| 25-09 | VH-CH1 | Q39K/S183E | VK-CH1 | Q38E/S183K | VK-CK | Q38E/V133K | VH-CK | Q39K/V133E |
| 25-10 | VH-CH1 | Q39K/S183E | VK-CH1 | Q38K/S183K | VK-CK | Q38E/V133K | VH-CK | Q39E/V133E |
| 25-11 | VH-CH1 | Q39E/S183E | VK-CH1 | Q38E/S183K | VK-CK | Q38K/V133K | VH-CK | Q39K/V133E |
| 25-12 | VH-CH1 | Q39E/S183E | VK-CH1 | Q38K/S183K | VK-CK | Q38K/V133K | VH-CK | Q39E/V133E |
| 25-13 | VH-CH1 | Q39K/S183E | VK-CH1 | Q38E/S183K | VK-CK | Q38E/V133K | VH-CK | Q39K/V133E |
| 25-14 | VH-CH1 | Q39K/S183E | VK-CH1 | Q38K/S183K | VK-CK | Q38E/V133K | VH-CK | Q39E/V133E |
| 25-15 | VH-CH1 | Q39E/S183E | VK-CH1 | Q38E/S183K | VK-CK | Q38K/V133K | VH-CK | Q39K/V133E |
| 25-16 | VH-CH1 | Q39E/S183E | VK-CH1 | Q38K/S183K | VK-CK | Q38K/V133K | VH-CK | Q39E/V133E |
| 25-17 | VH-CH1 | Q39K/S183E | VK-CH1 | Q38E/S183K | VK-CK | Q38E/V133K | VH-CK | Q39K/V133E |
| 25-18 | VH-CH1 | Q39K/S183E | VK-CH1 | Q38K/S183K | VK-CK | Q38E/V133K | VH-CK | Q39E/V133E |
| 25-19 | VH-CH1 | Q39E/S183E | VK-CH1 | Q38E/S183K | VK-CK | Q38K/V133K | VH-CK | Q39K/V133E |
| 25-20 | VH-CH1 | Q39E/S183E | VK-CH1 | Q38K/S183K | VK-CK | Q38K/V133K | VH-CK | Q39E/V133E |
| 25-21 | VH-CH1 | Q39K/S183E | VK-CH1 | Q38E/S183K | VK-CK | Q38E/V133K | VH-CK | Q39K/V133E |
| 25-22 | VH-CH1 | Q39K/S183E | VK-CH1 | Q38K/S183K | VK-CK | Q38E/V133K | VH-CK | Q39E/V133E |
| 25-23 | VH-CH1 | Q39E/S183E | VK-CH1 | Q38E/S183K | VK-CK | Q38K/V133K | VH-CK | Q39K/V133E |
| 25-24 | VH-CH1 | Q39E/S183E | VK-CH1 | Q38K/S183K | VK-CK | Q38K/V133K | VH-CK | Q39E/V133E |
| 25-25 | VH-CH1 | Q39K/S183E | VK-CH1 | Q38E/S183K | VK-CK | Q38E/V133K | VH-CK | Q39K/V133E |
| 25-26 | VH-CH1 | Q39K/S183E | VK-CH1 | Q38K/S183K | VK-CK | Q38E/V133K | VH-CK | Q39E/V133E |
| 25-27 | VH-CH1 | Q39E/S183E | VK-CH1 | Q38E/S183K | VK-CK | Q38K/V133K | VH-CK | Q39K/V133E |
| 25-28 | VH-CH1 | Q39E/S183E | VK-CH1 | Q38K/S183K | VK-CK | Q38K/V133K | VH-CK | Q39E/V133E |
| 25-29 | VH-CH1 | Q39K/S183E | VK-CH1 | Q38E/S183K | VK-CK | Q38E/V133K | VH-CK | Q39K/V133E |
| 25-30 | VH-CH1 | Q39K/S183E | VK-CH1 | Q38K/S183K | VK-CK | Q38E/V133K | VH-CK | Q39E/V133E |
| 25-31 | VH-CH1 | Q39E/S183E | VK-CH1 | Q38E/S183K | VK-CK | Q38K/V133K | VH-CK | Q39K/V133E |
| 25-32 | VH-CH1 | Q39E/S183E | VK-CH1 | Q38K/S183K | VK-CK | Q38K/V133K | VH-CK | Q39E/V133E |

### Example 28—Tetravalent, Bispecific Tetrahedral Antibodies Comprising Two Distinct Fabs that Specifically Bind ERBB2, EGFR, PD-1, and/or PD-L1

[2131] Tetrahedral antibodies were designed, expressed, and evaluated for their ability to act as tumor-targeted checkpoint inhibitors for the treatment of cancer and other disease. This series of bispecific constructs employ VH and VL regions from trastuzumab (anti-ERBB2), pertuzumab (anti-ERBB2), cetuximab (anti-EGFR), 388D4 (anti-PD-1), and B6055 (anti-PD-L1) (Tables 71, 72). The various tumor-targeted checkpoint inhibitor Fab pairings are trastuzumab/388D4, cetuximab/388D4, trastuzumab/B6055, and cetuximab/B6055, each placed in either orientation with respect to D3/D4 and D5/D6 (Table 73). In addition, several tumor-specific Fab pairings are evaluated: trastuzumab/pertuzumab, cetuximab/pertuzumab, and trastuzumab/cetuximab, each placed in either orientation with respect to D3/D4 and D5/D6 (Table 73). To optimize correct VH/VL pairing and to minimize VH/VL mispairing, V region exchange is combined with four different sets of charge pairs to ensure correct pairing of heavy and light chain V regions (Table 74). Additionally, to further facilitate purification of the correctly paired product by Protein A chromatography, the H1 chain incorporates the H435R/Y436F substitution. The constructs are then evaluated for their structural bispecificity by intact mass spectrometry as described in Example 18, and for their functional bispecificity using a variety of in vitro binding assays, checkpoint inhibition assays, cytotoxicity assays, and cytokine induction and release assays, and in vivo cancer efficacy models, known to one skilled in the art.

TABLE 71

| Protein ID | H1 Chain | H2 Chain | L1 Chain | L2 Chain |
|---|---|---|---|---|
| 26-01 | SEQ ID NO: 4987 | SEQ ID NO: 4988 | SEQ ID NO: 5015 | SEQ ID NO: 5016 |
| 26-02 | SEQ ID NO: 4987 | SEQ ID NO: 4989 | SEQ ID NO: 5015 | SEQ ID NO: 5017 |
| 26-03 | SEQ ID NO: 4990 | SEQ ID NO: 4988 | SEQ ID NO: 5018 | SEQ ID NO: 5016 |
| 26-04 | SEQ ID NO: 4990 | SEQ ID NO: 4989 | SEQ ID NO: 5018 | SEQ ID NO: 5017 |
| 26-05 | SEQ ID NO: 4991 | SEQ ID NO: 4992 | SEQ ID NO: 5019 | SEQ ID NO: 5020 |
| 26-06 | SEQ ID NO: 4991 | SEQ ID NO: 4993 | SEQ ID NO: 5019 | SEQ ID NO: 5021 |
| 26-07 | SEQ ID NO: 4994 | SEQ ID NO: 4992 | SEQ ID NO: 5022 | SEQ ID NO: 5020 |
| 26-08 | SEQ ID NO: 4994 | SEQ ID NO: 4993 | SEQ ID NO: 5022 | SEQ ID NO: 5021 |
| 26-09 | SEQ ID NO: 4995 | SEQ ID NO: 4988 | SEQ ID NO: 5023 | SEQ ID NO: 5016 |
| 26-10 | SEQ ID NO: 4995 | SEQ ID NO: 4989 | SEQ ID NO: 5023 | SEQ ID NO: 5017 |
| 26-11 | SEQ ID NO: 4996 | SEQ ID NO: 4988 | SEQ ID NO: 5024 | SEQ ID NO: 5016 |
| 26-12 | SEQ ID NO: 4996 | SEQ ID NO: 4989 | SEQ ID NO: 5024 | SEQ ID NO: 5017 |
| 26-13 | SEQ ID NO: 4991 | SEQ ID NO: 4997 | SEQ ID NO: 5019 | SEQ ID NO: 5025 |
| 26-14 | SEQ ID NO: 4991 | SEQ ID NO: 4998 | SEQ ID NO: 5019 | SEQ ID NO: 5026 |
| 26-15 | SEQ ID NO: 4994 | SEQ ID NO: 4997 | SEQ ID NO: 5022 | SEQ ID NO: 5025 |
| 26-16 | SEQ ID NO: 4994 | SEQ ID NO: 4998 | SEQ ID NO: 5022 | SEQ ID NO: 5026 |
| 26-17 | SEQ ID NO: 4999 | SEQ ID NO: 5000 | SEQ ID NO: 5015 | SEQ ID NO: 5027 |
| 26-18 | SEQ ID NO: 4999 | SEQ ID NO: 5001 | SEQ ID NO: 5015 | SEQ ID NO: 5028 |
| 26-19 | SEQ ID NO: 5002 | SEQ ID NO: 5000 | SEQ ID NO: 5018 | SEQ ID NO: 5027 |
| 26-20 | SEQ ID NO: 5002 | SEQ ID NO: 5001 | SEQ ID NO: 5018 | SEQ ID NO: 5028 |
| 26-21 | SEQ ID NO: 5003 | SEQ ID NO: 5004 | SEQ ID NO: 5029 | SEQ ID NO: 5020 |
| 26-22 | SEQ ID NO: 5003 | SEQ ID NO: 5005 | SEQ ID NO: 5029 | SEQ ID NO: 5021 |
| 26-23 | SEQ ID NO: 5006 | SEQ ID NO: 5004 | SEQ ID NO: 5030 | SEQ ID NO: 5020 |
| 26-24 | SEQ ID NO: 5006 | SEQ ID NO: 5005 | SEQ ID NO: 5030 | SEQ ID NO: 5021 |
| 26-25 | SEQ ID NO: 5007 | SEQ ID NO: 5000 | SEQ ID NO: 5023 | SEQ ID NO: 5027 |
| 26-26 | SEQ ID NO: 5007 | SEQ ID NO: 5001 | SEQ ID NO: 5023 | SEQ ID NO: 5028 |
| 26-27 | SEQ ID NO: 5008 | SEQ ID NO: 5000 | SEQ ID NO: 5024 | SEQ ID NO: 5027 |
| 26-28 | SEQ ID NO: 5008 | SEQ ID NO: 5001 | SEQ ID NO: 5024 | SEQ ID NO: 5028 |
| 26-29 | SEQ ID NO: 5003 | SEQ ID NO: 5009 | SEQ ID NO: 5029 | SEQ ID NO: 5025 |
| 26-30 | SEQ ID NO: 5003 | SEQ ID NO: 5010 | SEQ ID NO: 5029 | SEQ ID NO: 5026 |
| 26-31 | SEQ ID NO: 5006 | SEQ ID NO: 5009 | SEQ ID NO: 5030 | SEQ ID NO: 5025 |
| 26-32 | SEQ ID NO: 5006 | SEQ ID NO: 5010 | SEQ ID NO: 5030 | SEQ ID NO: 5026 |
| 26-33 | SEQ ID NO: 4999 | SEQ ID NO: 5011 | SEQ ID NO: 5015 | SEQ ID NO: 5031 |
| 26-34 | SEQ ID NO: 4999 | SEQ ID NO: 5012 | SEQ ID NO: 5015 | SEQ ID NO: 5032 |
| 26-35 | SEQ ID NO: 5002 | SEQ ID NO: 5011 | SEQ ID NO: 5018 | SEQ ID NO: 5031 |
| 26-36 | SEQ ID NO: 5002 | SEQ ID NO: 5012 | SEQ ID NO: 5018 | SEQ ID NO: 5032 |
| 26-37 | SEQ ID NO: 5013 | SEQ ID NO: 5004 | SEQ ID NO: 5033 | SEQ ID NO: 5020 |
| 26-38 | SEQ ID NO: 5013 | SEQ ID NO: 5005 | SEQ ID NO: 5033 | SEQ ID NO: 5021 |
| 26-39 | SEQ ID NO: 5014 | SEQ ID NO: 5004 | SEQ ID NO: 5034 | SEQ ID NO: 5020 |
| 26-40 | SEQ ID NO: 5014 | SEQ ID NO: 5005 | SEQ ID NO: 5034 | SEQ ID NO: 5021 |
| 26-41 | SEQ ID NO: 5007 | SEQ ID NO: 5011 | SEQ ID NO: 5023 | SEQ ID NO: 5031 |
| 26-42 | SEQ ID NO: 5007 | SEQ ID NO: 5012 | SEQ ID NO: 5023 | SEQ ID NO: 5032 |
| 26-43 | SEQ ID NO: 5008 | SEQ ID NO: 5011 | SEQ ID NO: 5024 | SEQ ID NO: 5031 |
| 26-44 | SEQ ID NO: 5008 | SEQ ID NO: 5012 | SEQ ID NO: 5024 | SEQ ID NO: 5032 |
| 26-45 | SEQ ID NO: 5013 | SEQ ID NO: 5009 | SEQ ID NO: 5033 | SEQ ID NO: 5025 |
| 26-46 | SEQ ID NO: 5013 | SEQ ID NO: 5010 | SEQ ID NO: 5033 | SEQ ID NO: 5026 |
| 26-47 | SEQ ID NO: 5014 | SEQ ID NO: 5009 | SEQ ID NO: 5034 | SEQ ID NO: 5025 |
| 26-48 | SEQ ID NO: 5014 | SEQ ID NO: 5010 | SEQ ID NO: 5034 | SEQ ID NO: 5026 |
| 26-49 | SEQ ID NO: 4987 | SEQ ID NO: 4997 | SEQ ID NO: 5015 | SEQ ID NO: 5025 |
| 26-50 | SEQ ID NO: 4987 | SEQ ID NO: 4998 | SEQ ID NO: 5015 | SEQ ID NO: 5026 |
| 26-51 | SEQ ID NO: 4990 | SEQ ID NO: 4997 | SEQ ID NO: 5018 | SEQ ID NO: 5025 |
| 26-52 | SEQ ID NO: 4990 | SEQ ID NO: 4998 | SEQ ID NO: 5018 | SEQ ID NO: 5026 |
| 26-53 | SEQ ID NO: 4995 | SEQ ID NO: 4992 | SEQ ID NO: 5023 | SEQ ID NO: 5020 |
| 26-54 | SEQ ID NO: 4995 | SEQ ID NO: 4993 | SEQ ID NO: 5023 | SEQ ID NO: 5021 |
| 26-55 | SEQ ID NO: 4996 | SEQ ID NO: 4992 | SEQ ID NO: 5024 | SEQ ID NO: 5020 |
| 26-56 | SEQ ID NO: 4996 | SEQ ID NO: 4993 | SEQ ID NO: 5024 | SEQ ID NO: 5021 |

TABLE 72

| Protein | | | | | | |
|---|---|---|---|---|---|---|
| ID | D1-Fc | D5-Fab | D4-Fab | D3-Fab | D6-Fab | D2-Fc |
| 26-01 | wild-type | Pertuzumab | Trastuzumab | Trastuzumab | Pertuzumab | wild-type |
| 26-02 | wild-type | Pertuzumab | Trastuzumab | Trastuzumab | Pertuzumab | wild-type |
| 26-03 | wild-type | Pertuzumab | Trastuzumab | Trastuzumab | Pertuzumab | wild-type |
| 26-04 | wild-type | Pertuzumab | Trastuzumab | Trastuzumab | Pertuzumab | wild-type |
| 26-05 | wild-type | Trastuzumab | Pertuzumab | Pertuzumab | Trastuzumab | wild-type |
| 26-06 | wild-type | Trastuzumab | Pertuzumab | Pertuzumab | Trastuzumab | wild-type |
| 26-07 | wild-type | Trastuzumab | Pertuzumab | Pertuzumab | Trastuzumab | wild-type |
| 26-08 | wild-type | Trastuzumab | Pertuzumab | Pertuzumab | Trastuzumab | wild-type |
| 26-09 | wild-type | Pertuzumab | Cetuximab | Cetuximab | Pertuzumab | wild-type |
| 26-10 | wild-type | Pertuzumab | Cetuximab | Cetuximab | Pertuzumab | wild-type |
| 26-11 | wild-type | Pertuzumab | Cetuximab | Cetuximab | Pertuzumab | wild-type |
| 26-12 | wild-type | Pertuzumab | Cetuximab | Cetuximab | Pertuzumab | wild-type |
| 26-13 | wild-type | Cetuximab | Pertuzumab | Pertuzumab | Cetuximab | wild-type |
| 26-14 | wild-type | Cetuximab | Pertuzumab | Pertuzumab | Cetuximab | wild-type |
| 26-15 | wild-type | Cetuximab | Pertuzumab | Pertuzumab | Cetuximab | wild-type |
| 26-16 | wild-type | Cetuximab | Pertuzumab | Pertuzumab | Cetuximab | wild-type |
| 26-17 | L234A/L235A/P329G | 388D4 | Trastuzumab | Trastuzumab | 388D4 | L234A/L235A/P329G |
| 26-18 | L234A/L235A/P329G | 388D4 | Trastuzumab | Trastuzumab | 388D4 | L234A/L235A/P329G |
| 26-19 | L234A/L235A/P329G | 388D4 | Trastuzumab | Trastuzumab | 388D4 | L234A/L235A/P329G |
| 26-20 | L234A/L235A/P329G | 388D4 | Trastuzumab | Trastuzumab | 388D4 | L234A/L235A/P329G |
| 26-21 | L234A/L235A/P329G | Trastuzumab | 388D4 | 388D4 | Trastuzumab | L234A/L235A/P329G |
| 26-22 | L234A/L235A/P329G | Trastuzumab | 388D4 | 388D4 | Trastuzumab | L234A/L235A/P329G |
| 26-23 | L234A/L235A/P329G | Trastuzumab | 388D4 | 388D4 | Trastuzumab | L234A/L235A/P329G |
| 26-24 | L234A/L235A/P329G | Trastuzumab | 388D4 | 388D4 | Trastuzumab | L234A/L235A/P329G |
| 26-25 | L234A/L235A/P329G | 388D4 | Cetuximab | Cetuximab | 388D4 | L234A/L235A/P329G |
| 26-26 | L234A/L235A/P329G | 388D4 | Cetuximab | Cetuximab | 388D4 | L234A/L235A/P329G |
| 26-27 | L234A/L235A/P329G | 388D4 | Cetuximab | Cetuximab | 388D4 | L234A/L235A/P329G |
| 26-28 | L234A/L235A/P329G | 388D4 | Cetuximab | Cetuximab | 388D4 | L234A/L235A/P329G |
| 26-29 | L234A/L235A/P329G | Cetuximab | 388D4 | 388D4 | Cetuximab | L234A/L235A/P329G |
| 26-30 | L234A/L235A/P329G | Cetuximab | 388D4 | 388D4 | Cetuximab | L234A/L235A/P329G |
| 26-31 | L234A/L235A/P329G | Cetuximab | 388D4 | 388D4 | Cetuximab | L234A/L235A/P329G |
| 26-32 | L234A/L235A/P329G | Cetuximab | 388D4 | 388D4 | Cetuximab | L234A/L235A/P329G |
| 26-33 | L234A/L235A/P329G | B6055 | Trastuzumab | Trastuzumab | B6055 | L234A/L235A/P329G |
| 26-34 | L234A/L235A/P329G | B6055 | Trastuzumab | Trastuzumab | B6055 | L234A/L235A/P329G |
| 26-35 | L234A/L235A/P329G | B6055 | Trastuzumab | Trastuzumab | B6055 | L234A/L235A/P329G |
| 26-36 | L234A/L235A/P329G | B6055 | Trastuzumab | Trastuzumab | B6055 | L234A/L235A/P329G |
| 26-37 | L234A/L235A/P329G | Trastuzumab | B6055 | B6055 | Trastuzumab | L234A/L235A/P329G |
| 26-38 | L234A/L235A/P329G | Trastuzumab | B6055 | B6055 | Trastuzumab | L234A/L235A/P329G |
| 26-39 | L234A/L235A/P329G | Trastuzumab | B6055 | B6055 | Trastuzumab | L234A/L235A/P329G |
| 26-40 | L234A/L235A/P329G | Trastuzumab | B6055 | B6055 | Trastuzumab | L234A/L235A/P329G |
| 26-41 | L234A/L235A/P329G | B6055 | Cetuximab | Cetuximab | B6055 | L234A/L235A/P329G |
| 26-42 | L234A/L235A/P329G | B6055 | Cetuximab | Cetuximab | B6055 | L234A/L235A/P329G |
| 26-43 | L234A/L235A/P329G | B6055 | Cetuximab | Cetuximab | B6055 | L234A/L235A/P329G |
| 26-44 | L234A/L235A/P329G | B6055 | Cetuximab | Cetuximab | B6055 | L234A/L235A/P329G |
| 26-45 | L234A/L235A/P329G | Cetuximab | B6055 | B6055 | Cetuximab | L234A/L235A/P329G |
| 26-46 | L234A/L235A/P329G | Cetuximab | B6055 | B6055 | Cetuximab | L234A/L235A/P329G |
| 26-47 | L234A/L235A/P329G | Cetuximab | B6055 | B6055 | Cetuximab | L234A/L235A/P329G |
| 26-48 | L234A/L235A/P329G | Cetuximab | B6055 | B6055 | Cetuximab | L234A/L235A/P329G |
| 26-49 | wild-type | Cetuximab | Trastuzumab | Trastuzumab | Cetuximab | wild-type |
| 26-50 | wild-type | Cetuximab | Trastuzumab | Trastuzumab | Cetuximab | wild-type |
| 26-51 | wild-type | Cetuximab | Trastuzumab | Trastuzumab | Cetuximab | wild-type |
| 26-52 | wild-type | Cetuximab | Trastuzumab | Trastuzumab | Cetuximab | wild-type |
| 26-53 | wild-type | Trastuzumab | Cetuximab | Cetuximab | Trastuzumab | wild-type |
| 26-54 | wild-type | Trastuzumab | Cetuximab | Cetuximab | Trastuzumab | wild-type |
| 26-55 | wild-type | Trastuzumab | Cetuximab | Cetuximab | Trastuzumab | wild-type |
| 26-56 | wild-type | Trastuzumab | Cetuximab | Cetuximab | Trastuzumab | wild-type |

TABLE 73

| | D1-Fc | D5-Fab | D4-Fab | D3-Fab | D6-Fab | D2-Fc |
|---|---|---|---|---|---|---|
| Protein ID | Specificity | Specificity | Specificity | Specificity | Specificity | Specificity |
| 26-01 | FcgR | ERBB2 (II) | ERBB2 (I) | ERBB2 (1) | ERBB2 (II) | FcgR |
| 26-02 | FcgR | ERBB2 (II) | ERBB2 (I) | ERBB2 (1) | ERBB2 (II) | FcgR |
| 26-03 | FcgR | ERBB2 (II) | ERBB2 (I) | ERBB2 (1) | ERBB2 (II) | FcgR |
| 26-04 | FcgR | ERBB2 (II) | ERBB2 (I) | ERBB2 (1) | ERBB2 (II) | FcgR |
| 26-05 | FcgR | ERBB2 (I) | ERBB2 (II) | ERBB2 (II) | ERBB2 (I) | FcgR |
| 26-06 | FcgR | ERBB2 (I) | ERBB2 (II) | ERBB2 (II) | ERBB2 (I) | FcgR |
| 26-07 | FcgR | ERBB2 (I) | ERBB2 (II) | ERBB2 (II) | ERBB2 (I) | FcgR |
| 26-08 | FcgR | ERBB2 (I) | ERBB2 (II) | ERBB2 (II) | ERBB2 (I) | FcgR |
| 26-09 | FcgR | ERBB2 (II) | EGFR | EGFR | ERBB2 (II) | FcgR |
| 26-10 | FcgR | ERBB2 (II) | EGFR | EGFR | ERBB2 (II) | FcgR |
| 26-11 | FcgR | ERBB2 (II) | EGFR | EGFR | ERBB2 (II) | FcgR |
| 26-12 | FcgR | ERBB2 (II) | EGFR | EGFR | ERBB2 (II) | FcgR |
| 26-13 | FcgR | EGFR | ERBB2 (II) | ERBB2 (II) | EGFR | FcgR |
| 26-14 | FcgR | EGFR | ERBB2 (II) | ERBB2 (II) | EGFR | FcgR |
| 26-15 | FcgR | EGFR | ERBB2 (II) | ERBB2 (II) | EGFR | FcgR |
| 26-16 | FcgR | EGFR | ERBB2 (II) | ERBB2 (II) | EGFR | FcgR |
| 26-17 | FcgR silent | PD-1 | ERBB2 (I) | ERBB2 (1) | PD-1 | FcgR silent |
| 26-18 | FcgR silent | PD-1 | ERBB2 (I) | ERBB2 (1) | PD-1 | FcgR silent |
| 26-19 | FcgR silent | PD-1 | ERBB2 (I) | ERBB2 (1) | PD-1 | FcgR silent |
| 26-20 | FcgR silent | PD-1 | ERBB2 (I) | ERBB2 (1) | PD-1 | FcgR silent |
| 26-21 | FcgR silent | ERBB2 (I) | PD-1 | PD-1 | ERBB2 (I) | FcgR silent |
| 26-22 | FcgR silent | ERBB2 (I) | PD-1 | PD-1 | ERBB2 (I) | FcgR silent |
| 26-23 | FcgR silent | ERBB2 (I) | PD-1 | PD-1 | ERBB2 (I) | FcgR silent |
| 26-24 | FcgR silent | ERBB2 (I) | PD-1 | PD-1 | ERBB2 (I) | FcgR silent |
| 26-25 | FcgR silent | PD-1 | EGFR | EGFR | PD-1 | FcgR silent |
| 26-26 | FcgR silent | PD-1 | EGFR | EGFR | PD-1 | FcgR silent |
| 26-27 | FcgR silent | PD-1 | EGFR | EGFR | PD-1 | FcgR silent |
| 26-28 | FcgR silent | PD-1 | EGFR | EGFR | PD-1 | FcgR silent |
| 26-29 | FcgR silent | EGFR | PD-1 | PD-1 | EGFR | FcgR silent |
| 26-30 | FcgR silent | EGFR | PD-1 | PD-1 | EGFR | FcgR silent |
| 26-31 | FcgR silent | EGFR | PD-1 | PD-1 | EGFR | FcgR silent |
| 26-32 | FcgR silent | EGFR | PD-1 | PD-1 | EGFR | FcgR silent |
| 26-33 | FcgR silent | PD-L1 | ERBB2 (I) | ERBB2 (1) | PD-L1 | FcgR silent |
| 26-34 | FcgR silent | PD-L1 | ERBB2 (I) | ERBB2 (1) | PD-L1 | FcgR silent |
| 26-35 | FcgR silent | PD-L1 | ERBB2 (I) | ERBB2 (1) | PD-L1 | FcgR silent |
| 26-36 | FcgR silent | PD-L1 | ERBB2 (I) | ERBB2 (1) | PD-L1 | FcgR silent |
| 26-37 | FcgR silent | ERBB2 (I) | PD-L1 | PD-L1 | ERBB2 (I) | FcgR silent |
| 26-38 | FcgR silent | ERBB2 (I) | PD-L1 | PD-L1 | ERBB2 (I) | FcgR silent |
| 26-39 | FcgR silent | ERBB2 (I) | PD-L1 | PD-L1 | ERBB2 (I) | FcgR silent |
| 26-40 | FcgR silent | ERBB2 (I) | PD-L1 | PD-L1 | ERBB2 (I) | FcgR silent |
| 26-41 | FcgR silent | PD-L1 | EGFR | EGFR | PD-L1 | FcgR silent |
| 26-42 | FcgR silent | PD-L1 | EGFR | EGFR | PD-L1 | FcgR silent |
| 26-43 | FcgR silent | PD-L1 | EGFR | EGFR | PD-L1 | FcgR silent |
| 26-44 | FcgR silent | PD-L1 | EGFR | EGFR | PD-L1 | FcgR silent |
| 26-45 | FcgR silent | EGFR | PD-L1 | PD-L1 | EGFR | FcgR silent |
| 26-46 | FcgR silent | EGFR | PD-L1 | PD-L1 | EGFR | FcgR silent |
| 26-47 | FcgR silent | EGFR | PD-L1 | PD-L1 | EGFR | FcgR silent |
| 26-48 | FcgR silent | EGFR | PD-L1 | PD-L1 | EGFR | FcgR silent |
| 26-49 | FcgR | α-EGFR | α-ERBB2 (I) | α-ERBB2 (I) | α-EGFR | FcgR |
| 26-50 | FcgR | α-EGFR | α-ERBB2 (I) | α-ERBB2 (I) | α-EGFR | FcgR |
| 26-51 | FcgR | α-EGFR | α-ERBB2 (I) | α-ERBB2 (I) | α-EGFR | FcgR |
| 26-52 | FcgR | α-EGFR | α-ERBB2 (I) | α-ERBB2 (I) | α-EGFR | FcgR |
| 26-53 | FcgR | α-ERBB2 (I) | α-EGFR | α-EGFR | α-ERBB2 (I) | FcgR |
| 26-54 | FcgR | α-ERBB2 (I) | α-EGFR | α-EGFR | α-ERBB2 (I) | FcgR |
| 26-55 | FcgR | α-ERBB2 (I) | α-EGFR | α-EGFR | α-ERBB2 (I) | FcgR |
| 26-56 | FcgR | α-ERBB2 (I) | α-EGFR | α-EGFR | α-ERBB2 (I) | FcgR |

TABLE 74

| | H1 Chain | | H2 Chain | | L1 Chain | | L2 Chain | |
|---|---|---|---|---|---|---|---|---|
| Protein | V region | Amino acid | V region | Amino acid | V region | Amino acid | V region | Amino acid |
| ID | type | Substitutions | Type | Substitutions | Type | Substitutions | Type | Substitutions |
| 26-01 | VH-CH1 | Q39K/S183E | VK-CH1 | Q38E/S183K | VK-CK | Q38E/V133K | VH-CK | Q39K/V133E |
| 26-02 | VH-CH1 | Q39K/S183E | VK-CH1 | Q38K/S183K | VK-CK | Q38E/V133K | VH-CK | Q39E/V133E |
| 26-03 | VH-CH1 | Q39E/S183E | VK-CH1 | Q38E/S183K | VK-CK | Q38K/V133K | VH-CK | Q39K/V133E |
| 26-04 | VH-CH1 | Q39E/S183E | VK-CH1 | Q38K/S183K | VK-CK | Q38K/V133K | VH-CK | Q39E/V133E |
| 26-05 | VH-CH1 | Q39K/S183E | VK-CH1 | Q38E/S183K | VK-CK | Q38E/V133K | VH-CK | Q39K/V133E |
| 26-06 | VH-CH1 | Q39K/S183E | VK-CH1 | Q38K/S183K | VK-CK | Q38E/V133K | VH-CK | Q39E/V133E |
| 26-07 | VH-CH1 | Q39E/S183E | VK-CH1 | Q38E/S183K | VK-CK | Q38K/V133K | VH-CK | Q39K/V133E |
| 26-08 | VH-CH1 | Q39E/S183E | VK-CH1 | Q38K/S183K | VK-CK | Q38K/V133K | VH-CK | Q39E/V133E |
| 26-09 | VH-CH1 | Q39K/S183E | VK-CH1 | Q38E/S183K | VK-CK | Q38E/V133K | VH-CK | Q39K/V133E |
| 26-10 | VH-CH1 | Q39K/S183E | VK-CH1 | Q38K/S183K | VK-CK | Q38E/V133K | VH-CK | Q39E/V133E |
| 26-11 | VH-CH1 | Q39E/S183E | VK-CH1 | Q38E/S183K | VK-CK | Q38K/V133K | VH-CK | Q39K/V133E |
| 26-12 | VH-CH1 | Q39E/S183E | VK-CH1 | Q38K/S183K | VK-CK | Q38K/V133K | VH-CK | Q39E/V133E |
| 26-13 | VH-CH1 | Q39K/S183E | VK-CH1 | Q38E/S183K | VK-CK | Q38E/V133K | VH-CK | Q39K/V133E |
| 26-14 | VH-CH1 | Q39K/S183E | VK-CH1 | Q38K/S183K | VK-CK | Q38E/V133K | VH-CK | Q39E/V133E |
| 26-15 | VH-CH1 | Q39E/S183E | VK-CH1 | Q38E/S183K | VK-CK | Q38K/V133K | VH-CK | Q39K/V133E |
| 26-16 | VH-CH1 | Q39E/S183E | VK-CH1 | Q38K/S183K | VK-CK | Q38K/V133K | VH-CK | Q39E/V133E |
| 26-17 | VH-CH1 | Q39K/S183E | VK-CH1 | Q38E/S183K | VK-CK | Q38E/V133K | VH-CK | Q39K/V133E |
| 26-18 | VH-CH1 | Q39K/S183E | VK-CH1 | Q38K/S183K | VK-CK | Q38E/V133K | VH-CK | Q39E/V133E |
| 26-19 | VH-CH1 | Q39E/S183E | VK-CH1 | Q38E/S183K | VK-CK | Q38K/V133K | VH-CK | Q39K/V133E |
| 26-20 | VH-CH1 | Q39E/S183E | VK-CH1 | Q38K/S183K | VK-CK | Q38K/V133K | VH-CK | Q39E/V133E |
| 26-21 | VH-CH1 | Q39K/S183E | VK-CH1 | Q38E/S183K | VK-CK | Q38E/V133K | VH-CK | Q39K/V133E |
| 26-22 | VH-CH1 | Q39K/S183E | VK-CH1 | Q38K/S183K | VK-CK | Q38E/V133K | VH-CK | Q39E/V133E |
| 26-23 | VH-CH1 | Q39E/S183E | VK-CH1 | Q38E/S183K | VK-CK | Q38K/V133K | VH-CK | Q39K/V133E |
| 26-24 | VH-CH1 | Q39E/S183E | VK-CH1 | Q38K/S183K | VK-CK | Q38K/V133K | VH-CK | Q39E/V133E |
| 26-25 | VH-CH1 | Q39K/S183E | VK-CH1 | Q38E/S183K | VK-CK | Q38E/V133K | VH-CK | Q39K/V133E |
| 26-26 | VH-CH1 | Q39K/S183E | VK-CH1 | Q38K/S183K | VK-CK | Q38E/V133K | VH-CK | Q39E/V133E |
| 26-27 | VH-CH1 | Q39E/S183E | VK-CH1 | Q38E/S183K | VK-CK | Q38K/V133K | VH-CK | Q39K/V133E |
| 26-28 | VH-CH1 | Q39E/S183E | VK-CH1 | Q38K/S183K | VK-CK | Q38K/V133K | VH-CK | Q39E/V133E |
| 26-29 | VH-CH1 | Q39K/S183E | VK-CH1 | Q38E/S183K | VK-CK | Q38E/V133K | VH-CK | Q39K/V133E |
| 26-30 | VH-CH1 | Q39K/S183E | VK-CH1 | Q38K/S183K | VK-CK | Q38E/V133K | VH-CK | Q39E/V133E |
| 26-31 | VH-CH1 | Q39E/S183E | VK-CH1 | Q38E/S183K | VK-CK | Q38K/V133K | VH-CK | Q39K/V133E |
| 26-32 | VH-CH1 | Q39E/S183E | VK-CH1 | Q38K/S183K | VK-CK | Q38K/V133K | VH-CK | Q39E/V133E |
| 26-33 | VH-CH1 | Q39K/S183E | VK-CH1 | Q38E/S183K | VK-CK | Q38E/V133K | VH-CK | Q39K/V133E |
| 26-34 | VH-CH1 | Q39K/S183E | VK-CH1 | Q38K/S183K | VK-CK | Q38E/V133K | VH-CK | Q39E/V133E |
| 26-35 | VH-CH1 | Q39E/S183E | VK-CH1 | Q38E/S183K | VK-CK | Q38K/V133K | VH-CK | Q39K/V133E |
| 26-36 | VH-CH1 | Q39E/S183E | VK-CH1 | Q38K/S183K | VK-CK | Q38K/V133K | VH-CK | Q39E/V133E |
| 26-37 | VH-CH1 | Q39K/S183E | VK-CH1 | Q38E/S183K | VK-CK | Q38E/V133K | VH-CK | Q39K/V133E |
| 26-38 | VH-CH1 | Q39K/S183E | VK-CH1 | Q38K/S183K | VK-CK | Q38E/V133K | VH-CK | Q39E/V133E |
| 26-39 | VH-CH1 | Q39E/S183E | VK-CH1 | Q38E/S183K | VK-CK | Q38K/V133K | VH-CK | Q39K/V133E |
| 26-40 | VH-CH1 | Q39E/S183E | VK-CH1 | Q38K/S183K | VK-CK | Q38K/V133K | VH-CK | Q39E/V133E |
| 26-41 | VH-CH1 | Q39K/S183E | VK-CH1 | Q38E/S183K | VK-CK | Q38E/V133K | VH-CK | Q39K/V133E |
| 26-42 | VH-CH1 | Q39K/S183E | VK-CH1 | Q38K/S183K | VK-CK | Q38E/V133K | VH-CK | Q39E/V133E |
| 26-43 | VH-CH1 | Q39E/S183E | VK-CH1 | Q38E/S183K | VK-CK | Q38K/V133K | VH-CK | Q39K/V133E |
| 26-44 | VH-CH1 | Q39E/S183E | VK-CH1 | Q38K/S183K | VK-CK | Q38K/V133K | VH-CK | Q39E/V133E |
| 26-45 | VH-CH1 | Q39K/S183E | VK-CH1 | Q38E/S183K | VK-CK | Q38E/V133K | VH-CK | Q39K/V133E |
| 26-46 | VH-CH1 | Q39K/S183E | VK-CH1 | Q38K/S183K | VK-CK | Q38E/V133K | VH-CK | Q39E/V133E |
| 26-47 | VH-CH1 | Q39E/S183E | VK-CH1 | Q38E/S183K | VK-CK | Q38K/V133K | VH-CK | Q39K/V133E |
| 26-48 | VH-CH1 | Q39E/S183E | VK-CH1 | Q38K/S183K | VK-CK | Q38K/V133K | VH-CK | Q39E/V133E |
| 26-49 | VH-CH1 | Q39K/S183E | VK-CH1 | Q38E/S183K | VK-CK | Q38E/V133K | VH-CK | Q39K/V133E |
| 26-50 | VH-CH1 | Q39K/S183E | VK-CH1 | Q38K/S183K | VK-CK | Q38E/V133K | VH-CK | Q39E/V133E |
| 26-51 | VH-CH1 | Q39E/S183E | VK-CH1 | Q38E/S183K | VK-CK | Q38K/V133K | VH-CK | Q39K/V133E |
| 26-52 | VH-CH1 | Q39E/S183E | VK-CH1 | Q38K/S183K | VK-CK | Q38K/V133K | VH-CK | Q39E/V133E |
| 26-53 | VH-CH1 | Q39K/S183E | VK-CH1 | Q38E/S183K | VK-CK | Q38E/V133K | VH-CK | Q39K/V133E |
| 26-54 | VH-CH1 | Q39K/S183E | VK-CH1 | Q38K/S183K | VK-CK | Q38E/V133K | VH-CK | Q39E/V133E |
| 26-55 | VH-CH1 | Q39E/S183E | VK-CH1 | Q38E/S183K | VK-CK | Q38K/V133K | VH-CK | Q39K/V133E |
| 26-56 | VH-CH1 | Q39E/S183E | VK-CH1 | Q38K/S183K | VK-CK | Q38K/V133K | VH-CK | Q39E/V133E |

### Example 29—Pentavalent/Hexavalent, Trispecific Tetrahedral Antibodies Comprising Two Distinct Fabs that Specifically Bind CD3 and Either CD20, ERBB2, or CEACAM5, and the 4-1BB Ligand (4-1BBL)

[2132] Tetrahedral antibodies incorporating an anti-CD3 domain were designed, expressed, and evaluated for their ability to co-engage T cells and disease target cells, and activate immune cellular signaling via the 4-1BB ligand-receptor interaction, for the treatment of cancer and other disease. This series of bispecific constructs employ VH and VL regions from rituximab (anti-CD20), trastuzumab (anti-ERBB2), or cergutuzumab (anti-CEACAM5) to engage target cells, together with VH and VL regions from SP34 (anti-CD3) to engage T cells, and the 4-1BB ligand to activate T cells (Tables 75, 76). Two tetrahedral antibody configurations were employed (Table 77). In the first configuration, the disease targeting Fab domain (anti-CD20, anti-ERBB2, or anti-CEACAM5) is placed in D3/D4 (bivalent), the T cell engaging Fab domain is placed in D6 (monovalent) and/or D5/D6 (bivalent), D1/D2 are Fc domains, and the 4-1BB ligand is placed in D7/D8. In the second configuration, the disease targeting Fab domain (anti-CD19 or anti-CD20) is placed in D3/D4 (bivalent), the T cell engaging Fab domain is placed in D2 (monovalent), D1 is an Fc domain, and the 4-1BB ligand is placed in D7/D8. To achieve placement of the 4-1BB ligand, it is variously attached at the C-terminus of the H1, H2, Fc, or Fab chains (Table 77). To optimize correct VH/VL pairing and to minimize VH/VL mispairing, V region exchange is combined with four different sets of charge pairs to ensure correct pairing of heavy and light chain V regions (Table 78). Additionally, to further facilitate purification of the correctly paired product by Protein A chromatography, for bivalent CD3, the H1 chain incorporates the H435R/Y436F substitution (for bivalent CD3); for monovalent CD3, both the H1 and H2 chains incorporate the H435R/Y436F substitution. The constructs are then evaluated for their structural bispecificity by intact mass spectrometry as described in Example 18, and for their functional bispecificity using a variety of in vitro binding assays, cytotoxicity assays, and cytokine induction and release assays, and in vivo cancer efficacy models, known to one skilled in the art.

TABLE 75

| Protein | | | | | |
|---|---|---|---|---|---|
| ID | H1 Chain | H2 Chain | L1 Chain | L2 Chain | Fc Chain |
| 27-01 | SEQ ID NO: 5035 | SEQ ID NO: 5036 | SEQ ID NO: 5061 | SEQ ID NO: 5062 | SEQ ID NO: 5068 |
| 27-02 | SEQ ID NO: 5035 | SEQ ID NO: 5037 | SEQ ID NO: 5061 | SEQ ID NO: 5063 | SEQ ID NO: 5068 |
| 27-03 | SEQ ID NO: 5038 | SEQ ID NO: 5039 | SEQ ID NO: 5061 | SEQ ID NO: 5062 | SEQ ID NO: 5068 |
| 27-04 | SEQ ID NO: 5038 | SEQ ID NO: 5040 | SEQ ID NO: 5061 | SEQ ID NO: 5063 | SEQ ID NO: 5068 |
| 27-05 | SEQ ID NO: 5038 | SEQ ID NO: 5036 | SEQ ID NO: 5061 | SEQ ID NO: 5062 | SEQ ID NO: 5069 |
| 27-06 | SEQ ID NO: 5038 | SEQ ID NO: 5037 | SEQ ID NO: 5061 | SEQ ID NO: 5063 | |
| 27-07 | SEQ ID NO: 5035 | SEQ ID NO: 5041 | SEQ ID NO: 5061 | SEQ ID NO: 5062 | |
| 27-08 | SEQ ID NO: 5035 | SEQ ID NO: 5042 | SEQ ID NO: 5061 | SEQ ID NO: 5063 | |
| 27-09 | SEQ ID NO: 5038 | SEQ ID NO: 5043 | SEQ ID NO: 5061 | SEQ ID NO: 5062 | |
| 27-10 | SEQ ID NO: 5038 | SEQ ID NO: 5044 | SEQ ID NO: 5061 | SEQ ID NO: 5063 | SEQ ID NO: 5068 |
| 27-11 | SEQ ID NO: 5038 | SEQ ID NO: 5041 | SEQ ID NO: 5061 | SEQ ID NO: 5062 | SEQ ID NO: 5068 |
| 27-12 | SEQ ID NO: 5038 | SEQ ID NO: 5042 | SEQ ID NO: 5061 | SEQ ID NO: 5063 | SEQ ID NO: 5068 |
| 27-13 | SEQ ID NO: 5038 | SEQ ID NO: 5041 | SEQ ID NO: 5061 | SEQ ID NO: 5064 | SEQ ID NO: 5068 |
| 27-14 | SEQ ID NO: 5038 | SEQ ID NO: 5042 | SEQ ID NO: 5061 | SEQ ID NO: 5065 | SEQ ID NO: 5069 |
| 27-15 | SEQ ID NO: 5035 | SEQ ID NO: 5045 | SEQ ID NO: 5061 | SEQ ID NO: 5062 | SEQ ID NO: 5069 |
| 27-16 | SEQ ID NO: 5035 | SEQ ID NO: 5046 | SEQ ID NO: 5061 | SEQ ID NO: 5063 | SEQ ID NO: 5068 |
| 27-17 | SEQ ID NO: 5038 | SEQ ID NO: 5047 | SEQ ID NO: 5061 | SEQ ID NO: 5062 | SEQ ID NO: 5068 |
| 27-18 | SEQ ID NO: 5038 | SEQ ID NO: 5048 | SEQ ID NO: 5061 | SEQ ID NO: 5063 | |
| 27-19 | SEQ ID NO: 5049 | SEQ ID NO: 5036 | SEQ ID NO: 5066 | SEQ ID NO: 5062 | |
| 27-20 | SEQ ID NO: 5049 | SEQ ID NO: 5037 | SEQ ID NO: 5066 | SEQ ID NO: 5063 | |
| 27-21 | SEQ ID NO: 5050 | SEQ ID NO: 5039 | SEQ ID NO: 5066 | SEQ ID NO: 5062 | |
| 27-22 | SEQ ID NO: 5050 | SEQ ID NO: 5040 | SEQ ID NO: 5066 | SEQ ID NO: 5063 | SEQ ID NO: 5068 |
| 27-23 | SEQ ID NO: 5050 | SEQ ID NO: 5036 | SEQ ID NO: 5066 | SEQ ID NO: 5062 | SEQ ID NO: 5068 |
| 27-24 | SEQ ID NO: 5050 | SEQ ID NO: 5037 | SEQ ID NO: 5066 | SEQ ID NO: 5063 | SEQ ID NO: 5068 |
| 27-25 | SEQ ID NO: 5049 | SEQ ID NO: 5051 | SEQ ID NO: 5066 | SEQ ID NO: 5062 | SEQ ID NO: 5068 |
| 27-26 | SEQ ID NO: 5049 | SEQ ID NO: 5052 | SEQ ID NO: 5066 | SEQ ID NO: 5063 | SEQ ID NO: 5069 |
| 27-27 | SEQ ID NO: 5050 | SEQ ID NO: 5053 | SEQ ID NO: 5066 | SEQ ID NO: 5062 | SEQ ID NO: 5069 |
| 27-28 | SEQ ID NO: 5050 | SEQ ID NO: 5054 | SEQ ID NO: 5066 | SEQ ID NO: 5063 | SEQ ID NO: 5068 |
| 27-29 | SEQ ID NO: 5050 | SEQ ID NO: 5051 | SEQ ID NO: 5066 | SEQ ID NO: 5062 | SEQ ID NO: 5068 |
| 27-30 | SEQ ID NO: 5050 | SEQ ID NO: 5052 | SEQ ID NO: 5066 | SEQ ID NO: 5063 | SEQ ID NO: 5068 |
| 27-31 | SEQ ID NO: 5050 | SEQ ID NO: 5051 | SEQ ID NO: 5066 | SEQ ID NO: 5064 | SEQ ID NO: 5068 |
| 27-32 | SEQ ID NO: 5050 | SEQ ID NO: 5052 | SEQ ID NO: 5066 | SEQ ID NO: 5065 | SEQ ID NO: 5069 |
| 27-33 | SEQ ID NO: 5049 | SEQ ID NO: 5045 | SEQ ID NO: 5066 | SEQ ID NO: 5062 | SEQ ID NO: 5069 |
| 27-34 | SEQ ID NO: 5049 | SEQ ID NO: 5046 | SEQ ID NO: 5066 | SEQ ID NO: 5063 | SEQ ID NO: 5068 |
| 27-35 | SEQ ID NO: 5050 | SEQ ID NO: 5047 | SEQ ID NO: 5066 | SEQ ID NO: 5062 | SEQ ID NO: 5068 |
| 27-36 | SEQ ID NO: 5050 | SEQ ID NO: 5048 | SEQ ID NO: 5066 | SEQ ID NO: 5063 | |
| 27-37 | SEQ ID NO: 5055 | SEQ ID NO: 5036 | SEQ ID NO: 5067 | SEQ ID NO: 5062 | |
| 27-38 | SEQ ID NO: 5055 | SEQ ID NO: 5037 | SEQ ID NO: 5067 | SEQ ID NO: 5063 | |
| 27-39 | SEQ ID NO: 5056 | SEQ ID NO: 5039 | SEQ ID NO: 5067 | SEQ ID NO: 5062 | |
| 27-40 | SEQ ID NO: 5056 | SEQ ID NO: 5040 | SEQ ID NO: 5067 | SEQ ID NO: 5063 | SEQ ID NO: 5068 |
| 27-41 | SEQ ID NO: 5056 | SEQ ID NO: 5036 | SEQ ID NO: 5067 | SEQ ID NO: 5062 | SEQ ID NO: 5068 |
| 27-42 | SEQ ID NO: 5056 | SEQ ID NO: 5037 | SEQ ID NO: 5067 | SEQ ID NO: 5063 | SEQ ID NO: 5068 |
| 27-43 | SEQ ID NO: 5055 | SEQ ID NO: 5057 | SEQ ID NO: 5067 | SEQ ID NO: 5062 | SEQ ID NO: 5068 |
| 27-44 | SEQ ID NO: 5055 | SEQ ID NO: 5058 | SEQ ID NO: 5067 | SEQ ID NO: 5063 | SEQ ID NO: 5069 |
| 27-45 | SEQ ID NO: 5056 | SEQ ID NO: 5059 | SEQ ID NO: 5067 | SEQ ID NO: 5062 | SEQ ID NO: 5069 |
| 27-46 | SEQ ID NO: 5056 | SEQ ID NO: 5060 | SEQ ID NO: 5067 | SEQ ID NO: 5063 | SEQ ID NO: 5068 |
| 27-47 | SEQ ID NO: 5056 | SEQ ID NO: 5057 | SEQ ID NO: 5067 | SEQ ID NO: 5062 | SEQ ID NO: 5068 |
| 27-48 | SEQ ID NO: 5056 | SEQ ID NO: 5058 | SEQ ID NO: 5067 | SEQ ID NO: 5063 | SEQ ID NO: 5068 |
| 27-49 | SEQ ID NO: 5056 | SEQ ID NO: 5057 | SEQ ID NO: 5067 | SEQ ID NO: 5064 | SEQ ID NO: 5068 |
| 27-50 | SEQ ID NO: 5056 | SEQ ID NO: 5058 | SEQ ID NO: 5067 | SEQ ID NO: 5065 | SEQ ID NO: 5069 |
| 27-51 | SEQ ID NO: 5055 | SEQ ID NO: 5045 | SEQ ID NO: 5067 | SEQ ID NO: 5062 | SEQ ID NO: 5069 |
| 27-52 | SEQ ID NO: 5055 | SEQ ID NO: 5046 | SEQ ID NO: 5067 | SEQ ID NO: 5063 | SEQ ID NO: 5068 |
| 27-53 | SEQ ID NO: 5056 | SEQ ID NO: 5047 | SEQ ID NO: 5067 | SEQ ID NO: 5062 | SEQ ID NO: 5068 |
| 27-54 | SEQ ID NO: 5056 | SEQ ID NO: 5048 | SEQ ID NO: 5067 | SEQ ID NO: 5063 | |

TABLE 76

| Protein | | D7 (4- | | | | | | D8 (4- | |
|---|---|---|---|---|---|---|---|---|---|
| ID | D1-Fc | 1BBL) | D5-Fab | D4-Fab | D3-Fab | D6-Fab | D2-Fab | 1BBL) | D2-Fc |
| 27-01 | L234A/L235A/P329G | H1 chain | | Rituximab | Rituximab | SP34 | | H1 chain | L234A/L235A/P329G |
| 27-02 | L234A/L235A/P329G | H1 chain | | Rituximab | Rituximab | SP34 | | H1 chain | L234A/L235A/P329G |
| 27-03 | L234A/L235A/P329G | H2 chain | | Rituximab | Rituximab | SP34 | | H2 chain | L234A/L235A/P329G |
| 27-04 | L234A/L235A/P329G | H2 chain | | Rituximab | Rituximab | SP34 | | H2 chain | L234A/L235A/P329G |
| 27-05 | L234A/L235A/P329G | Fc chain | | Rituximab | Rituximab | SP34 | | Fc chain | L234A/L235A/P329G |
| 27-06 | L234A/L235A/P329G | Fc chain | | Rituximab | Rituximab | SP34 | | Fc chain | L234A/L235A/P329G |
| 27-07 | L234A/L235A/P329G | H1 chain | | Rituximab | Rituximab | | SP34 | H1 chain | |
| 27-08 | L234A/L235A/P329G | H1 chain | | Rituximab | Rituximab | | SP34 | H1 chain | |
| 27-09 | L234A/L235A/P329G | H2 chain | | Rituximab | Rituximab | | SP34 | H2 chain | |
| 27-10 | L234A/L235A/P329G | H2 chain | | Rituximab | Rituximab | | SP34 | H2 chain | |
| 27-11 | L234A/L235A/P329G | Fc chain | | Rituximab | Rituximab | | SP34 | Fc chain | |
| 27-12 | L234A/L235A/P329G | Fc chain | | Rituximab | Rituximab | | SP34 | Fc chain | |
| 27-13 | L234A/L235A/P329G | Fab chain | | Rituximab | Rituximab | | SP34 | Fab chain | |
| 27-14 | L234A/L235A/P329G | Fab chain | | Rituximab | Rituximab | | SP34 | Fab chain | |
| 27-15 | L234A/L235A/P329G | H1 chain | SP34 | Rituximab | Rituximab | SP34 | | H1 chain | L234A/L235A/P329G |
| 27-16 | L234A/L235A/P329G | H1 chain | SP34 | Rituximab | Rituximab | SP34 | | H1 chain | L234A/L235A/P329G |
| 27-17 | L234A/L235A/P329G | H2 chain | SP34 | Rituximab | Rituximab | SP34 | | H2 chain | L234A/L235A/P329G |
| 27-18 | L234A/L235A/P329G | H2 chain | SP34 | Rituximab | Rituximab | SP34 | | H2 chain | L234A/L235A/P329G |
| 27-19 | L234A/L235A/P329G | H1 chain | | Trastuzumab | Trastuzumab | SP34 | | H1 chain | L234A/L235A/P329G |
| 27-20 | L234A/L235A/P329G | H1 chain | | Trastuzumab | Trastuzumab | SP34 | | H1 chain | L234A/L235A/P329G |
| 27-21 | L234A/L235A/P329G | H2 chain | | Trastuzumab | Trastuzumab | SP34 | | H2 chain | L234A/L235A/P329G |
| 27-22 | L234A/L235A/P329G | H2 chain | | Trastuzumab | Trastuzumab | SP34 | | H2 chain | L234A/L235A/P329G |
| 27-23 | L234A/L235A/P329G | Fc chain | | Trastuzumab | Trastuzumab | SP34 | | Fc chain | L234A/L235A/P329G |
| 27-24 | L234A/L235A/P329G | Fc chain | | Trastuzumab | Trastuzumab | SP34 | | Fc chain | L234A/L235A/P329G |
| 27-25 | L234A/L235A/P329G | H1 chain | | Trastuzumab | Trastuzumab | | SP34 | H1 chain | |
| 27-26 | L234A/L235A/P329G | H1 chain | | Trastuzumab | Trastuzumab | | SP34 | H1 chain | |
| 27-27 | L234A/L235A/P329G | H2 chain | | Trastuzumab | Trastuzumab | | SP34 | H2 chain | |
| 27-28 | L234A/L235A/P329G | H2 chain | | Trastuzumab | Trastuzumab | | SP34 | H2 chain | |
| 27-29 | L234A/L235A/P329G | Fc chain | | Trastuzumab | Trastuzumab | | SP34 | Fc chain | |
| 27-30 | L234A/L235A/P329G | Fc chain | | Trastuzumab | Trastuzumab | | SP34 | Fc chain | |
| 27-31 | L234A/L235A/P329G | Fab chain | | Trastuzumab | Trastuzumab | | SP34 | Fab chain | |
| 27-32 | L234A/L235A/P329G | Fab chain | | Trastuzumab | Trastuzumab | | SP34 | Fab chain | |
| 27-33 | L234A/L235A/P329G | H1 chain | SP34 | Trastuzumab | Trastuzumab | SP34 | | H1 chain | L234A/L235A/P329G |
| 27-34 | L234A/L235A/P329G | H1 chain | SP34 | Trastuzumab | Trastuzumab | SP34 | | H1 chain | L234A/L235A/P329G |
| 27-35 | L234A/L235A/P329G | H2 chain | SP34 | Trastuzumab | Trastuzumab | SP34 | | H2 chain | L234A/L235A/P329G |
| 27-36 | L234A/L235A/P329G | H2 chain | SP34 | Trastuzumab | Trastuzumab | SP34 | | H2 chain | L234A/L235A/P329G |
| 27-37 | L234A/L235A/P329G | H1 chain | | Cergutuzumab | Cergutuzumab | SP34 | | H1 chain | L234A/L235A/P329G |
| 27-38 | L234A/L235A/P329G | H1 chain | | Cergutuzumab | Cergutuzumab | SP34 | | H1 chain | L234A/L235A/P329G |
| 27-39 | L234A/L235A/P329G | H2 chain | | Cergutuzumab | Cergutuzumab | SP34 | | H2 chain | L234A/L235A/P329G |
| 27-40 | L234A/L235A/P329G | H2 chain | | Cergutuzumab | Cergutuzumab | SP34 | | H2 chain | L234A/L235A/P329G |
| 27-41 | L234A/L235A/P329G | Fc chain | | Cergutuzumab | Cergutuzumab | SP34 | | Fc chain | L234A/L235A/P329G |
| 27-42 | L234A/L235A/P329G | Fc chain | | Cergutuzumab | Cergutuzumab | SP34 | | Fc chain | L234A/L235A/P329G |
| 27-43 | L234A/L235A/P329G | H1 chain | | Cergutuzumab | Cergutuzumab | | SP34 | H1 chain | |
| 27-44 | L234A/L235A/P329G | H1 chain | | Cergutuzumab | Cergutuzumab | | SP34 | H1 chain | |
| 27-45 | L234A/L235A/P329G | H2 chain | | Cergutuzumab | Cergutuzumab | | SP34 | H2 chain | |
| 27-46 | L234A/L235A/P329G | H2 chain | | Cergutuzumab | Cergutuzumab | | SP34 | H2 chain | |
| 27-47 | L234A/L235A/P329G | Fc chain | | Cergutuzumab | Cergutuzumab | | SP34 | Fc chain | |
| 27-48 | L234A/L235A/P329G | Fc chain | | Cergutuzumab | Cergutuzumab | | SP34 | Fc chain | |
| 27-49 | L234A/L235A/P329G | Fab chain | | Cergutuzumab | Cergutuzumab | | SP34 | Fab chain | |
| 27-50 | L234A/L235A/P329G | Fab chain | | Cergutuzumab | Cergutuzumab | | SP34 | Fab chain | |
| 27-51 | L234A/L235A/P329G | H1 chain | SP34 | Cergutuzumab | Cergutuzumab | SP34 | | H1 chain | L234A/L235A/P329G |
| 27-52 | L234A/L235A/P329G | H1 chain | SP34 | Cergutuzumab | Cergutuzumab | SP34 | | H1 chain | L234A/L235A/P329G |
| 27-53 | L234A/L235A/P329G | H2 chain | SP34 | Cergutuzumab | Cergutuzumab | SP34 | | H2 chain | L234A/L235A/P329G |
| 27-54 | L234A/L235A/P329G | H2 chain | SP34 | Cergutuzumab | Cergutuzumab | SP34 | | H2 chain | L234A/L235A/P329G |

TABLE 77

| Protein | D1-Fc | D7 | D5-Fab | D4-Fab | D3-Fab | D6-Fab | D2-Fab | D8 | D2-Fc |
|---|---|---|---|---|---|---|---|---|---|
| ID | Specificity | Specificity | Specificity | Specificity | Specificity | Specificity | Specificity | Specificity | Specificity |
| 27-01 | FcgR silent | 4-1BB | | CD20 | CD20 | CD3 | | 4-1BB | FcgR silent |
| 27-02 | FcgR silent | 4-1BB | | CD20 | CD20 | CD3 | | 4-1BB | FcgR silent |
| 27-03 | FcgR silent | 4-1BB | | CD20 | CD20 | CD3 | | 4-1BB | FcgR silent |
| 27-04 | FcgR silent | 4-1BB | | CD20 | CD20 | CD3 | | 4-1BB | FcgR silent |
| 27-05 | FcgR silent | 4-1BB | | CD20 | CD20 | CD3 | | 4-1BB | FcgR silent |
| 27-06 | FcgR silent | 4-1BB | | CD20 | CD20 | CD3 | | 4-1BB | FcgR silent |
| 27-07 | FcgR silent | 4-1BB | | CD20 | CD20 | | CD3 | 4-1BB | FcgR silent |
| 27-08 | FcgR silent | 4-1BB | | CD20 | CD20 | | CD3 | 4-1BB | FcgR silent |
| 27-09 | FcgR silent | 4-1BB | | CD20 | CD20 | | CD3 | 4-1BB | FcgR silent |
| 27-10 | FcgR silent | 4-1BB | | CD20 | CD20 | | CD3 | 4-1BB | FcgR silent |
| 27-11 | FcgR silent | 4-1BB | | CD20 | CD20 | | CD3 | 4-1BB | FcgR silent |
| 27-12 | FcgR silent | 4-1BB | | CD20 | CD20 | | CD3 | 4-1BB | FcgR silent |
| 27-13 | FcgR silent | 4-1BB | | CD20 | CD20 | | CD3 | 4-1BB | FcgR silent |
| 27-14 | FcgR silent | 4-1BB | | CD20 | CD20 | | CD3 | 4-1BB | FcgR silent |
| 27-15 | FcgR silent | 4-1BB | CD3 | CD20 | CD20 | CD3 | | 4-1BB | FcgR silent |
| 27-16 | FcgR silent | 4-1BB | CD3 | CD20 | CD20 | CD3 | | 4-1BB | FcgR silent |
| 27-17 | FcgR silent | 4-1BB | CD3 | CD20 | CD20 | CD3 | | 4-1BB | FcgR silent |
| 27-18 | FcgR silent | 4-1BB | CD3 | CD20 | CD20 | CD3 | | 4-1BB | FcgR silent |
| 27-19 | FcgR silent | 4-1BB | | ERBB2 | ERBB2 | CD3 | | 4-1BB | FcgR silent |
| 27-20 | FcgR silent | 4-1BB | | ERBB2 | ERBB2 | CD3 | | 4-1BB | FcgR silent |
| 27-21 | FcgR silent | 4-1BB | | ERBB2 | ERBB2 | CD3 | | 4-1BB | FcgR silent |
| 27-22 | FcgR silent | 4-1BB | | ERBB2 | ERBB2 | CD3 | | 4-1BB | FcgR silent |
| 27-23 | FcgR silent | 4-1BB | | ERBB2 | ERBB2 | CD3 | | 4-1BB | FcgR silent |
| 27-24 | FcgR silent | 4-1BB | | ERBB2 | ERBB2 | CD3 | | 4-1BB | FcgR silent |
| 27-25 | FcgR silent | 4-1BB | | ERBB2 | ERBB2 | | CD3 | 4-1BB | FcgR silent |
| 27-26 | FcgR silent | 4-1BB | | ERBB2 | ERBB2 | | CD3 | 4-1BB | FcgR silent |
| 27-27 | FcgR silent | 4-1BB | | ERBB2 | ERBB2 | | CD3 | 4-1BB | FcgR silent |
| 27-28 | FcgR silent | 4-1BB | | ERBB2 | ERBB2 | | CD3 | 4-1BB | FcgR silent |
| 27-29 | FcgR silent | 4-1BB | | ERBB2 | ERBB2 | | CD3 | 4-1BB | FcgR silent |
| 27-30 | FcgR silent | 4-1BB | | ERBB2 | ERBB2 | | CD3 | 4-1BB | FcgR silent |
| 27-31 | FcgR silent | 4-1BB | | ERBB2 | ERBB2 | | CD3 | 4-1BB | FcgR silent |
| 27-32 | FcgR silent | 4-1BB | | ERBB2 | ERBB2 | | CD3 | 4-1BB | FcgR silent |
| 27-33 | FcgR silent | 4-1BB | CD3 | ERBB2 | ERBB2 | CD3 | | 4-1BB | FcgR silent |
| 27-34 | FcgR silent | 4-1BB | CD3 | ERBB2 | ERBB2 | CD3 | | 4-1BB | FcgR silent |
| 27-35 | FcgR silent | 4-1BB | CD3 | ERBB2 | ERBB2 | CD3 | | 4-1BB | FcgR silent |
| 27-36 | FcgR silent | 4-1BB | CD3 | ERBB2 | ERBB2 | CD3 | | 4-1BB | FcgR silent |
| 27-37 | FcgR silent | 4-1BB | | CEACAM5 | CEACAM5 | CD3 | | 4-1BB | FcgR silent |
| 27-38 | FcgR silent | 4-1BB | | CEACAM5 | CEACAM5 | CD3 | | 4-1BB | FcgR silent |
| 27-39 | FcgR silent | 4-1BB | | CEACAM5 | CEACAM5 | CD3 | | 4-1BB | FcgR silent |
| 27-40 | FcgR silent | 4-1BB | | CEACAM5 | CEACAM5 | CD3 | | 4-1BB | FcgR silent |
| 27-41 | FcgR silent | 4-1BB | | CEACAM5 | CEACAM5 | CD3 | | 4-1BB | FcgR silent |
| 27-42 | FcgR silent | 4-1BB | | CEACAM5 | CEACAM5 | CD3 | | 4-1BB | FcgR silent |
| 27-43 | FcgR silent | 4-1BB | | CEACAM5 | CEACAM5 | | CD3 | 4-1BB | FcgR silent |
| 27-44 | FcgR silent | 4-1BB | | CEACAM5 | CEACAM5 | | CD3 | 4-1BB | FcgR silent |
| 27-45 | FcgR silent | 4-1BB | | CEACAM5 | CEACAM5 | | CD3 | 4-1BB | FcgR silent |
| 27-46 | FcgR silent | 4-1BB | | CEACAM5 | CEACAM5 | | CD3 | 4-1BB | FcgR silent |
| 27-47 | FcgR silent | 4-1BB | | CEACAM5 | CEACAM5 | | CD3 | 4-1BB | FcgR silent |
| 27-48 | FcgR silent | 4-1BB | | CEACAM5 | CEACAM5 | | CD3 | 4-1BB | FcgR silent |
| 27-49 | FcgR silent | 4-1BB | | CEACAM5 | CEACAM5 | | CD3 | 4-1BB | FcgR silent |
| 27-50 | FcgR silent | 4-1BB | | CEACAM5 | CEACAM5 | | CD3 | 4-1BB | FcgR silent |
| 27-51 | FcgR silent | 4-1BB | CD3 | CEACAM5 | CEACAM5 | CD3 | | 4-1BB | FcgR silent |
| 27-52 | FcgR silent | 4-1BB | CD3 | CEACAM5 | CEACAM5 | CD3 | | 4-1BB | FcgR silent |
| 27-53 | FcgR silent | 4-1BB | CD3 | CEACAM5 | CEACAM5 | CD3 | | 4-1BB | FcgR silent |
| 27-54 | FcgR silent | 4-1BB | CD3 | CEACAM5 | CEACAM5 | CD3 | | 4-1BB | FcgR silent |

TABLE 78

| | H1 Chain | | H2 Chain | | L1 Chain | | L2 Chain | |
|---|---|---|---|---|---|---|---|---|
| Protein | V region | Amino acid | V region | Amino acid | V region | Amino acid | V region | Amino acid |
| ID | type | Substitutions | Type | Substitutions | Type | Substitutions | Type | Substitutions |
| 27-01 | VH-CH1 | Q39K/S183E | VK-CH1 | Q38E/S183K | VK-CK | Q38E/V133K | VH-CK | Q39K/V133E |
| 27-02 | VH-CH1 | Q39K/S183E | VK-CH1 | Q38K/S183K | VK-CK | Q38E/V133K | VH-CK | Q39E/V133E |
| 27-03 | VH-CH1 | Q39K/S183E | VK-CH1 | Q38E/S183K | VK-CK | Q38E/V133K | VH-CK | Q39K/V133E |
| 27-04 | VH-CH1 | Q39K/S183E | VK-CH1 | Q38K/S183K | VK-CK | Q38E/V133K | VH-CK | Q39E/V133E |
| 27-05 | VH-CH1 | Q39K/S183E | VK-CH1 | Q38E/S183K | VK-CK | Q38E/V133K | VH-CK | Q39K/V133E |
| 27-06 | VH-CH1 | Q39K/S183E | VK-CH1 | Q38K/S183K | VK-CK | Q38E/V133K | VH-CK | Q39E/V133E |
| 27-07 | VH-CH1 | Q39K/S183E | VH-CH1 | Q39K/S183E | VK-CK | Q38E/V133K | VH-CK | Q39K/V133E |
| | | | VK-CH1 | Q38E/S183K | | | | |
| 27-08 | VH-CH1 | Q39K/S183E | VH-CH1 | Q39K/S183E | VK-CK | Q38E/V133K | VH-CK | Q39E/V133E |
| | | | VK-CH1 | Q38K/S183K | | | | |
| 27-09 | VH-CH1 | Q39K/S183E | VH-CH1 | Q39K/S183E | VK-CK | Q38E/V133K | VH-CK | Q39K/V133E |
| | | | VK-CH1 | Q38E/S183K | | | | |
| 27-10 | VH-CH1 | Q39K/S183E | VH-CH1I | Q39K/S183E | VK-CK | Q38E/V133K | VH-CK | Q39E/V133E |
| | | | VK-CH1 | Q38K/S183K | | | | |
| 27-11 | VH-CH1 | Q39K/S183E | VH-CH1 | Q39K/S183E | VK-CK | Q38E/V133K | VH-CK | Q39K/V133E |
| | | | VK-CH1 | Q38E/S183K | | | | |
| 27-12 | VH-CH1 | Q39K/S183E | VH-CH1 | Q39K/S183E | VK-CK | Q38E/V133K | VH-CK | Q39E/V133E |
| | | | VK-CH1 | Q38K/S183K | | | | |
| 27-13 | VH-CH1 | Q39K/S183E | VH-CH1 | Q39K/S183E | VK-CK | Q38E/V133K | VH-CK | Q39K/V133E |
| | | | VK-CH1 | Q38E/S183K | | | | |
| 27-14 | VH-CH1 | Q39K/S183E | VH-CH1 | Q39K/S183E | VK-CK | Q38E/V133K | VH-CK | Q39E/V133E |
| | | | VK-CH1 | Q38K/S183K | | | | |
| 27-15 | VH-CH1 | Q39K/S183E | VK-CH1 | Q38E/S183K | VK-CK | Q38E/V133K | VH-CK | Q39K/V133E |
| 27-16 | VH-CH1 | Q39K/S183E | VK-CH1 | Q38K/S183K | VK-CK | Q38E/V133K | VH-CK | Q39E/V133E |
| 27-17 | VH-CH1 | Q39K/S183E | VK-CH1 | Q38E/S183K | VK-CK | Q38E/V133K | VH-CK | Q39K/V133E |
| 27-18 | VH-CH1 | Q39K/S183E | VK-CH1 | Q38K/S183K | VK-CK | Q38E/V133K | VH-CK | Q39E/V133E |
| 27-19 | VH-CH1 | Q39K/S183E | VK-CH1 | Q38E/S183K | VK-CK | Q38E/V133K | VH-CK | Q39K/V133E |
| 27-20 | VH-CH1 | Q39K/S183E | VK-CH1 | Q38K/S183K | VK-CK | Q38E/V133K | VH-CK | Q39E/V133E |
| 27-21 | VH-CH1 | Q39K/S183E | VK-CH1 | Q38E/S183K | VK-CK | Q38E/V133K | VH-CK | Q39K/V133E |
| 27-22 | VH-CH1 | Q39K/S183E | VK-CH1 | Q38K/S183K | VK-CK | Q38E/V133K | VH-CK | Q39E/V133E |
| 27-23 | VH-CH1 | Q39K/S183E | VK-CH1 | Q38E/S183K | VK-CK | Q38E/V133K | VH-CK | Q39K/V133E |
| 27-24 | VH-CH1 | Q39K/S183E | VK-CH1 | Q38K/S183K | VK-CK | Q38E/V133K | VH-CK | Q39E/V133E |
| 27-25 | VH-CH1 | Q39K/S183E | VH-CH1 | Q39K/S183E | VK-CK | Q38E/V133K | VH-CK | Q39K/V133E |
| | | | VK-CH1 | Q38E/S183K | | | | |
| 27-26 | VH-CH1 | Q39K/S183E | VH-CH1 | Q39K/S183E | VK-CK | Q38E/V133K | VH-CK | Q39E/V133E |
| | | | VK-CH1 | Q38K/S183K | | | | |
| 27-27 | VH-CH1 | Q39K/S183E | VH-CH1 | Q39K/S183E | VK-CK | Q38E/V133K | VH-CK | Q39K/V133E |
| | | | VK-CH1 | Q38E/S183K | | | | |
| 27-28 | VH-CH1 | Q39K/S183E | VH-CH1 | Q39K/S183E | VK-CK | Q38E/V133K | VH-CK | Q39E/V133E |
| | | | VK-CH1 | Q38K/S183K | | | | |
| 27-29 | VH-CH1 | Q39K/S183E | VH-CH1 | Q39K/S183E | VK-CK | Q38E/V133K | VH-CK | Q39K/V133E |
| | | | VK-CH1 | Q38E/S183K | | | | |
| 27-30 | VH-CH1 | Q39K/S183E | VH-CH1 | Q39K/S183E | VK-CK | Q38E/V133K | VH-CK | Q39E/V133E |
| | | | VK-CH1 | Q38K/S183K | | | | |
| 27-31 | VH-CH1 | Q39K/S183E | VH-CH1 | Q39K/S183E | VK-CK | Q38E/V133K | VH-CK | Q39K/V133E |
| | | | VK-CH1 | Q38E/S183K | | | | |
| 27-32 | VH-CH1 | Q39K/S183E | VH-CH1 | Q39K/S183E | VK-CK | Q38E/V133K | VH-CK | Q39E/V133E |
| | | | VK-CH1 | Q38K/S183K | | | | |
| 27-33 | VH-CH1 | Q39K/S183E | VK-CH1 | Q38E/S183K | VK-CK | Q38E/V133K | VH-CK | Q39K/V133E |
| 27-34 | VH-CH1 | Q39K/S183E | VK-CH1 | Q38K/S183K | VK-CK | Q38E/V133K | VH-CK | Q39E/V133E |
| 27-35 | VH-CH1 | Q39K/S183E | VK-CH1 | Q38E/S183K | VK-CK | Q38E/V133K | VH-CK | Q39K/V133E |
| 27-36 | VH-CH1 | Q39K/S183E | VK-CH1 | Q38K/S183K | VK-CK | Q38E/V133K | VH-CK | Q39E/V133E |
| 27-37 | VH-CH1 | Q39K/S183E | VK-CH1 | Q38E/S183K | VK-CK | Q38E/V133K | VH-CK | Q39K/V133E |
| 27-38 | VH-CH1 | Q39K/S183E | VK-CH1 | Q38K/S183K | VK-CK | Q38E/V133K | VH-CK | Q39E/V133E |
| 27-39 | VH-CH1 | Q39K/S183E | VK-CH1 | Q38E/S183K | VK-CK | Q38E/V133K | VH-CK | Q39K/V133E |
| 27-40 | VH-CH1 | Q39K/S183E | VK-CH1 | Q38K/S183K | VK-CK | Q38E/V133K | VH-CK | Q39E/V133E |
| 27-41 | VH-CH1 | Q39K/S183E | VK-CH1 | Q38E/S183K | VK-CK | Q38E/V133K | VH-CK | Q39K/V133E |
| 27-42 | VH-CH1 | Q39K/S183E | VK-CH1 | Q38K/S183K | VK-CK | Q38E/V133K | VH-CK | Q39E/V133E |
| 27-43 | VH-CH1 | Q39K/S183E | VH-CH1 | Q39K/S183E | VK-CK | Q38E/V133K | VH-CK | Q39K/V133E |
| | | | VK-CH1 | Q38E/S183K | | | | |
| 27-44 | VH-CH1 | Q39K/S183E | VH-CH1 | Q39K/S183E | VK-CK | Q38E/V133K | VH-CK | Q39E/V133E |
| | | | VK-CH1 | Q38K/S183K | | | | |
| 27-45 | VH-CH1 | Q39K/S183E | VH-CH1 | Q39K/S183E | VK-CK | Q38E/V133K | VH-CK | Q39K/V133E |
| | | | VK-CH1 | Q38E/S183K | | | | |
| 27-46 | VH-CH1 | Q39K/S183E | VH-CH1 | Q39K/S183E | VK-CK | Q38E/V133K | VH-CK | Q39E/V133E |
| | | | VK-CH1 | Q38K/S183K | | | | |
| 27-47 | VH-CH1 | Q39K/S183E | VH-CH1 | Q39K/S183E | VK-CK | Q38E/V133K | VH-CK | Q39K/V133E |
| | | | VK-CH1 | Q38E/S183K | | | | |
| 27-48 | VH-CH1 | Q39K/S183E | VH-CH1 | Q39K/S183E | VK-CK | Q38E/V133K | VH-CK | Q39E/V133E |
| | | | VK-CH1 | Q38K/S183K | | | | |
| 27-49 | VH-CH1 | Q39K/S183E | VH-CH1 | Q39K/S183E | VK-CK | Q38E/V133K | VH-CK | Q39K/V133E |
| | | | VK-CH1 | Q38E/S183K | | | | |
| 27-50 | VH-CH1 | Q39K/S183E | VH-CH1 | Q39K/S183E | VK-CK | Q38E/V133K | VH-CK | Q39E/V133E |
| | | | VK-CH1 | Q38K/S183K | | | | |
| 27-51 | VH-CH1 | Q39K/S183E | VK-CH1 | Q38E/S183K | VK-CK | Q38E/V133K | VH-CK | Q39K/V133E |
| 27-52 | VH-CH1 | Q39K/S183E | VK-CH1 | Q38K/S183K | VK-CK | Q38E/V133K | VH-CK | Q39E/V133E |
| 27-53 | VH-CH1 | Q39K/S183E | VK-CH1 | Q38E/S183K | VK-CK | Q38E/V133K | VH-CK | Q39K/V133E |
| 27-54 | VH-CH1 | Q39K/S183E | VK-CH1 | Q38K/S183K | VK-CK | Q38E/V133K | VH-CK | Q39E/V133E |

### Example 30—Hexavalent, Trispecific Tetrahedral Antibodies Comprising the SIRPα Extracellular Domain (V2 Form), a Fab that Specifically Binds CD20, CD38, ERBB2, EGFR, or CEACAM5, and the CD40 Ligand (CD40L)

[2133] Tetrahedral antibodies were designed, expressed, and evaluated for their ability to bind and block the CD47-SIRPα interaction, target CD20, CD38, ERBB2, EGFR, or CEACAM5-expressing cancer cells, and activate immune cellular signaling via the CD40 ligand-receptor interaction, for the treatment of cancer and related disease. This series of bispecific/trispecific constructs employ portions of the SIRPα, extracellular region (V2 form), VH and VL regions from rituximab (anti-CD20), daratumumab (anti-CD38), trastuzumab (anti-ERBB2), cetuximab (anti-EGFR) and cergutuzumab (anti-CEACAM5), and optionally, a single-chain CD40 ligand trimer (CD40L) (Tables 79, 80). Three distinct configurations were evaluated (Table 81). In the first configuration, a portion of the SIRPα, V2 form extracellular domain is placed in D3/D4, the cancer-targeting Fab, when present, is placed in D5/D6. In the second configuration, a portion of the SIRPα, V2 form extracellular domain is placed in D3/D4, the cancer-targeting Fab, when present, is placed in D5/D6, and the CD40L is placed in D7/D8 by fusion to the H1 chain. In the third configuration, a portion of the SIRPα, V2 form extracellular domain is placed in D3/D4, the cancer-targeting Fab, when present, is placed in D5/D6, and the CD40L is placed in D7/D8 by fusion to the Fc or H2 chain. To further facilitate purification of the correctly paired product by Protein A chromatography, for bivalent CD3, the H1 chain incorporates the H435R/Y436F substitution (for bivalent CD3); for monovalent CD3, both the H1 and H2 chains incorporate the H435R/Y436F substitution. The constructs are then evaluated for their structural bispecificity by intact mass spectrometry as described in Example 18, and for their functional bispecificity using a variety of in vitro binding assays, cytotoxicity assays, and cytokine induction and release assays, and in vivo cancer efficacy models, known to one skilled in the art.

TABLE 79

| Protein ID | H1 Chain | H2 Chain | L2 Chain | Fc Chain |
|---|---|---|---|---|
| 28-01 | SEQ ID NO: 5070 | | | SEQ ID NO: 5089 |
| 28-02 | SEQ ID NO: 5071 | | | SEQ ID NO: 5089 |
| 28-03 | SEQ ID NO: 5070 | SEQ ID NO: 5072 | SEQ ID NO: 5084 | |
| 28-04 | SEQ ID NO: 5071 | SEQ ID NO: 5072 | SEQ ID NO: 5084 | |
| 28-05 | SEQ ID NO: 5070 | SEQ ID NO: 5073 | SEQ ID NO: 5085 | |
| 28-06 | SEQ ID NO: 5071 | SEQ ID NO: 5073 | SEQ ID NO: 5085 | |
| 28-07 | SEQ ID NO: 5070 | SEQ ID NO: 5074 | SEQ ID NO: 5086 | |
| 28-08 | SEQ ID NO: 5071 | SEQ ID NO: 5074 | SEQ ID NO: 5086 | |
| 28-09 | SEQ ID NO: 5070 | SEQ ID NO: 5075 | SEQ ID NO: 5087 | |
| 28-10 | SEQ ID NO: 5071 | SEQ ID NO: 5075 | SEQ ID NO: 5087 | |
| 28-11 | SEQ ID NO: 5070 | SEQ ID NO: 5076 | SEQ ID NO: 5088 | |
| 28-12 | SEQ ID NO: 5071 | SEQ ID NO: 5076 | SEQ ID NO: 5088 | |
| 28-13 | SEQ ID NO: 5077 | | | SEQ ID NO: 5089 |
| 28-14 | SEQ ID NO: 5078 | | | SEQ ID NO: 5089 |
| 28-15 | SEQ ID NO: 5077 | SEQ ID NO: 5072 | SEQ ID NO: 5084 | |
| 28-16 | SEQ ID NO: 5078 | SEQ ID NO: 5072 | SEQ ID NO: 5084 | |
| 28-17 | SEQ ID NO: 5077 | SEQ ID NO: 5073 | SEQ ID NO: 5085 | |
| 28-18 | SEQ ID NO: 5078 | SEQ ID NO: 5073 | SEQ ID NO: 5085 | |
| 28-19 | SEQ ID NO: 5077 | SEQ ID NO: 5074 | SEQ ID NO: 5086 | |
| 28-20 | SEQ ID NO: 5078 | SEQ ID NO: 5074 | SEQ ID NO: 5086 | |
| 28-21 | SEQ ID NO: 5077 | SEQ ID NO: 5075 | SEQ ID NO: 5087 | |
| 28-22 | SEQ ID NO: 5078 | SEQ ID NO: 5075 | SEQ ID NO: 5087 | |
| 28-23 | SEQ ID NO: 5077 | SEQ ID NO: 5076 | SEQ ID NO: 5088 | |
| 28-24 | SEQ ID NO: 5078 | SEQ ID NO: 5076 | SEQ ID NO: 5088 | |
| 28-25 | SEQ ID NO: 5070 | | | SEQ ID NO: 5090 |
| 28-26 | SEQ ID NO: 5071 | | | SEQ ID NO: 5090 |
| 28-27 | SEQ ID NO: 5070 | SEQ ID NO: 5079 | SEQ ID NO: 5084 | |
| 28-28 | SEQ ID NO: 5071 | SEQ ID NO: 5079 | SEQ ID NO: 5084 | |
| 28-29 | SEQ ID NO: 5070 | SEQ ID NO: 5080 | SEQ ID NO: 5085 | |
| 28-30 | SEQ ID NO: 5071 | SEQ ID NO: 5080 | SEQ ID NO: 5085 | |
| 28-31 | SEQ ID NO: 5070 | SEQ ID NO: 5081 | SEQ ID NO: 5086 | |
| 28-32 | SEQ ID NO: 5071 | SEQ ID NO: 5081 | SEQ ID NO: 5086 | |
| 28-33 | SEQ ID NO: 5070 | SEQ ID NO: 5082 | SEQ ID NO: 5087 | |
| 28-34 | SEQ ID NO: 5071 | SEQ ID NO: 5082 | SEQ ID NO: 5087 | |
| 28-35 | SEQ ID NO: 5070 | SEQ ID NO: 5083 | SEQ ID NO: 5088 | |
| 28-36 | SEQ ID NO: 5071 | SEQ ID NO: 5083 | SEQ ID NO: 5088 | |

TABLE 80

| Protein | | | | | | | | |
|---|---|---|---|---|---|---|---|---|
| ID | D1-Fc | D7-CD40L | D5-Fab | D4 | D3 | D6-Fab | D8-CD40L | D2-Fc |
| 28-01 | wild-type | | | SIRPα | SIRPα | | | wild-type |
| 28-02 | wild-type | | | SIRPα | SIRPα | | | wild-type |
| 28-03 | wild-type | | Rituximab | SIRPα | SIRPα | Rituximab | | wild-type |
| 28-04 | wild-type | | Rituximab | SIRPα | SIRPα | Rituximab | | wild-type |
| 28-05 | wild-type | | Daratumumab | SIRPα | SIRPα | Daratumumab | | wild-type |
| 28-06 | wild-type | | Daratumumab | SIRPα | SIRPα | Daratumumab | | wild-type |
| 28-07 | wild-type | | Trastuzumab | SIRPα | SIRPα | Trastuzumab | | wild-type |
| 28-08 | wild-type | | Trastuzumab | SIRPα | SIRPα | Trastuzumab | | wild-type |
| 28-09 | wild-type | | Cetuximab | SIRPα | SIRPα | Cetuximab | | wild-type |
| 28-10 | wild-type | | Cetuximab | SIRPα | SIRPα | Cetuximab | | wild-type |
| 28-11 | wild-type | | Cergutuzumab | SIRPα | SIRPα | Cergutuzumab | | wild-type |
| 28-12 | wild-type | | Cergutuzumab | SIRPα | SIRPα | Cergutuzumab | | wild-type |
| 28-13 | wild-type | H1 chain | | SIRPα | SIRPα | | H1 chain | wild-type |
| 28-14 | wild-type | H1 chain | | SIRPα | SIRPα | | H1 chain | wild-type |
| 28-15 | wild-type | H1 chain | Rituximab | SIRPα | SIRPα | Rituximab | H1 chain | wild-type |
| 28-16 | wild-type | H1 chain | Rituximab | SIRPα | SIRPα | Rituximab | H1 chain | wild-type |
| 28-17 | wild-type | H1 chain | Daratumumab | SIRPα | SIRPα | Daratumumab | H1 chain | wild-type |
| 28-18 | wild-type | H1 chain | Daratumumab | SIRPα | SIRPα | Daratumumab | H1 chain | wild-type |
| 28-19 | wild-type | H1 chain | Trastuzumab | SIRPα | SIRPα | Trastuzumab | H1 chain | wild-type |
| 28-20 | wild-type | H1 chain | Trastuzumab | SIRPα | SIRPα | Trastuzumab | H1 chain | wild-type |
| 28-21 | wild-type | H1 chain | Cetuximab | SIRPα | SIRPα | Cetuximab | H1 chain | wild-type |
| 28-22 | wild-type | H1 chain | Cetuximab | SIRPα | SIRPα | Cetuximab | H1 chain | wild-type |
| 28-23 | wild-type | H1 chain | Cergutuzumab | SIRPα | SIRPα | Cergutuzumab | H1 chain | wild-type |
| 28-24 | wild-type | H1 chain | Cergutuzumab | SIRPα | SIRPα | Cergutuzumab | H1 chain | wild-type |
| 28-25 | wild-type | Fc chain | | SIRPα | SIRPα | | Fc chain | wild-type |
| 28-26 | wild-type | Fc chain | | SIRPα | SIRPα | | Fc chain | wild-type |
| 28-27 | wild-type | H2 chain | Rituximab | SIRPα | SIRPα | Rituximab | H2 chain | wild-type |
| 28-28 | wild-type | H2 chain | Rituximab | SIRPα | SIRPα | Rituximab | H2 chain | wild-type |
| 28-29 | wild-type | H2 chain | Daratumumab | SIRPα | SIRPα | Daratumumab | H2 chain | wild-type |
| 28-30 | wild-type | H2 chain | Daratumumab | SIRPα | SIRPα | Daratumumab | H2 chain | wild-type |
| 28-31 | wild-type | H2 chain | Trastuzumab | SIRPα | SIRPα | Trastuzumab | H2 chain | wild-type |
| 28-32 | wild-type | H2 chain | Trastuzumab | SIRPα | SIRPα | Trastuzumab | H2 chain | wild-type |
| 28-33 | wild-type | H2 chain | Cetuximab | SIRPα | SIRPα | Cetuximab | H2 chain | wild-type |
| 28-34 | wild-type | H2 chain | Cetuximab | SIRPα | SIRPα | Cetuximab | H2 chain | wild-type |
| 28-35 | wild-type | H2 chain | Cergutuzumab | SIRPα | SIRPα | Cergutuzumab | H2 chain | wild-type |
| 28-36 | wild-type | H2 chain | Cergutuzumab | SIRPα | SIRPα | Cergutuzumab | H2 chain | wild-type |

TABLE 81

| Protein | D1-Fc | D7 | D5-Fab | D4 | D3 | D6-Fab | D8 | D2-Fc |
|---|---|---|---|---|---|---|---|---|
| ID | Specificity | Specificity | Specificity | Specificity | Specificity | Specificity | Specificity | Specificity |
| 28-01 | FcgR | | | CD47 | CD47 | | | FcgR |
| 28-02 | FcgR | | | CD47 | CD47 | | | FcgR |
| 28-03 | FcgR | | CD20 | CD47 | CD47 | CD20 | | FcgR |
| 28-04 | FcgR | | CD20 | CD47 | CD47 | CD20 | | FcgR |
| 28-05 | FcgR | | CD38 | CD47 | CD47 | CD38 | | FcgR |
| 28-06 | FcgR | | CD38 | CD47 | CD47 | CD38 | | FcgR |
| 28-07 | FcgR | | ERBB1 | CD47 | CD47 | ERBB1 | | FcgR |
| 28-08 | FcgR | | ERBB1 | CD47 | CD47 | ERBB1 | | FcgR |
| 28-09 | FcgR | | EGFR | CD47 | CD47 | EGFR | | FcgR |
| 28-10 | FcgR | | EGFR | CD47 | CD47 | EGFR | | FcgR |
| 28-11 | FcgR | | CEACAM5 | CD47 | CD47 | CEACAM5 | | FcgR |
| 28-12 | FcgR | | CEACAM5 | CD47 | CD47 | CEACAM5 | | FcgR |
| 28-13 | FcgR | CD40 | | CD47 | CD47 | | CD40 | FcgR |
| 28-14 | FcgR | CD40 | | CD47 | CD47 | | CD40 | FcgR |
| 28-15 | FcgR | CD40 | CD20 | CD47 | CD47 | CD20 | CD40 | FcgR |
| 28-16 | FcgR | CD40 | CD20 | CD47 | CD47 | CD20 | CD40 | FcgR |
| 28-17 | FcgR | CD40 | CD38 | CD47 | CD47 | CD38 | CD40 | FcgR |
| 28-18 | FcgR | CD40 | CD38 | CD47 | CD47 | CD38 | CD40 | FcgR |
| 28-19 | FcgR | CD40 | ERBB1 | CD47 | CD47 | ERBB1 | CD40 | FcgR |
| 28-20 | FcgR | CD40 | ERBB1 | CD47 | CD47 | ERBB1 | CD40 | FcgR |
| 28-21 | FcgR | CD40 | EGFR | CD47 | CD47 | EGFR | CD40 | FcgR |
| 28-22 | FcgR | CD40 | EGFR | CD47 | CD47 | EGFR | CD40 | FcgR |
| 28-23 | FcgR | CD40 | CEACAM5 | CD47 | CD47 | CEACAM5 | CD40 | FcgR |
| 28-24 | FcgR | CD40 | CEACAM5 | CD47 | CD47 | CEACAM5 | CD40 | FcgR |
| 28-25 | FcgR | CD40 | | CD47 | CD47 | | CD40 | FcgR |
| 28-26 | FcgR | CD40 | | CD47 | CD47 | | CD40 | FcgR |
| 28-27 | FcgR | CD40 | CD20 | CD47 | CD47 | CD20 | CD40 | FcgR |
| 28-28 | FcgR | CD40 | CD20 | CD47 | CD47 | CD20 | CD40 | FcgR |
| 28-29 | FcgR | CD40 | CD38 | CD47 | CD47 | CD38 | CD40 | FcgR |
| 28-30 | FcgR | CD40 | CD38 | CD47 | CD47 | CD38 | CD40 | FcgR |
| 28-31 | FcgR | CD40 | ERBB1 | CD47 | CD47 | ERBB1 | CD40 | FcgR |
| 28-32 | FcgR | CD40 | ERBB1 | CD47 | CD47 | ERBB1 | CD40 | FcgR |
| 28-33 | FcgR | CD40 | EGFR | CD47 | CD47 | EGFR | CD40 | FcgR |
| 28-34 | FcgR | CD40 | EGFR | CD47 | CD47 | EGFR | CD40 | FcgR |
| 28-35 | FcgR | CD40 | CEACAM5 | CD47 | CD47 | CEACAM5 | CD40 | FcgR |
| 28-36 | FcgR | CD40 | CEACAM5 | CD47 | CD47 | CEACAM5 | CD40 | FcgR |

### Example 31

[2134] To identify mutations that disrupt homodimerization of the collectrin-like domain, a series of variants are prepared in which each of amino acid residues Tyr633, Tyr641, Arg652, and Arg710 is independently substituted with lysine and glutamic acid. Each of the resulting variants is expressed as tetrahedral antibody of three different chains, an H1 chain, L1 chain, and Fc chain, as shown in FIG. 29A. Domains D1 and D2 are heterodimeric Fe domains formed by the H1 and Fe chains, and domains D3 and D4 are anti-CD19 FMC63 Fabs formed by the H1 and L1 chains. Table 82 summarizes the SEQ IDs of the H1, L1, and Fc chains used for the expression of each variant. Table 83 summarizes the amino acid substitutions at Tyr633, Tyr641, Arg652, and Arg710 for each variant. Table 83 also summarizes the predicted interaction between the first and second dimerizing polypeptides for each of the variants with respect to the cognate Arg710-Tyr633 and Arg652-Tyr641 pairs of the parent CLD dimerizing polypeptides from which they are derived,

[2135] Each tetrahedral antibody is evaluated for its ability to be expressed and secreted in CHO cells. Variants that are not expressed and secreted as homodimers are further evaluated for their ability to expressed and secreted as heterodimers via their co-expression together with other variants that are not expressed and secreted as homodimers.

TABLE 82

| Protein | | | |
|---|---|---|---|
| ID | H1 Chain | L2 Chain | Fc Chain |
| 29-01 | SEQ ID NO: 7765 | SEQ ID NO: 7846 | SEQ ID NO: 7847 |
| 29-02 | SEQ ID NO: 7766 | SEQ ID NO: 7846 | SEQ ID NO: 7847 |
| 29-03 | SEQ ID NO: 7767 | SEQ ID NO: 7846 | SEQ ID NO: 7847 |
| 29-04 | SEQ ID NO: 7768 | SEQ ID NO: 7846 | SEQ ID NO: 7847 |
| 29-05 | SEQ ID NO: 7769 | SEQ ID NO: 7846 | SEQ ID NO: 7847 |
| 29-06 | SEQ ID NO: 7770 | SEQ ID NO: 7846 | SEQ ID NO: 7847 |
| 29-07 | SEQ ID NO: 7771 | SEQ ID NO: 7846 | SEQ ID NO: 7847 |
| 29-08 | SEQ ID NO: 7772 | SEQ ID NO: 7846 | SEQ ID NO: 7847 |
| 29-09 | SEQ ID NO: 7773 | SEQ ID NO: 7846 | SEQ ID NO: 7847 |
| 29-10 | SEQ ID NO: 7774 | SEQ ID NO: 7846 | SEQ ID NO: 7847 |
| 29-11 | SEQ ID NO: 7775 | SEQ ID NO: 7846 | SEQ ID NO: 7847 |
| 29-12 | SEQ ID NO: 7776 | SEQ ID NO: 7846 | SEQ ID NO: 7847 |
| 29-13 | SEQ ID NO: 7777 | SEQ ID NO: 7846 | SEQ ID NO: 7847 |
| 29-14 | SEQ ID NO: 7778 | SEQ ID NO: 7846 | SEQ ID NO: 7847 |
| 29-15 | SEQ ID NO: 7779 | SEQ ID NO: 7846 | SEQ ID NO: 7847 |
| 29-16 | SEQ ID NO: 7780 | SEQ ID NO: 7846 | SEQ ID NO: 7847 |
| 29-17 | SEQ ID NO: 7781 | SEQ ID NO: 7846 | SEQ ID NO: 7847 |
| 29-18 | SEQ ID NO: 7782 | SEQ ID NO: 7846 | SEQ ID NO: 7847 |
| 29-19 | SEQ ID NO: 7783 | SEQ ID NO: 7846 | SEQ ID NO: 7847 |
| 29-20 | SEQ ID NO: 7784 | SEQ ID NO: 7846 | SEQ ID NO: 7847 |
| 29-21 | SEQ ID NO: 7785 | SEQ ID NO: 7846 | SEQ ID NO: 7847 |
| 29-22 | SEQ ID NO: 7786 | SEQ ID NO: 7846 | SEQ ID NO: 7847 |
| 29-23 | SEQ ID NO: 7787 | SEQ ID NO: 7846 | SEQ ID NO: 7847 |
| 29-24 | SEQ ID NO: 7788 | SEQ ID NO: 7846 | SEQ ID NO: 7847 |
| 29-25 | SEQ ID NO: 7789 | SEQ ID NO: 7846 | SEQ ID NO: 7847 |
| 29-26 | SEQ ID NO: 7790 | SEQ ID NO: 7846 | SEQ ID NO: 7847 |
| 29-27 | SEQ ID NO: 7791 | SEQ ID NO: 7846 | SEQ ID NO: 7847 |
| 29-28 | SEQ ID NO: 7792 | SEQ ID NO: 7846 | SEQ ID NO: 7847 |
| 29-29 | SEQ ID NO: 7793 | SEQ ID NO: 7846 | SEQ ID NO: 7847 |
| 29-30 | SEQ ID NO: 7794 | SEQ ID NO: 7846 | SEQ ID NO: 7847 |
| 29-31 | SEQ ID NO: 7795 | SEQ ID NO: 7846 | SEQ ID NO: 7847 |
| 29-32 | SEQ ID NO: 7796 | SEQ ID NO: 7846 | SEQ ID NO: 7847 |
| 29-33 | SEQ ID NO: 7797 | SEQ ID NO: 7846 | SEQ ID NO: 7847 |
| 29-34 | SEQ ID NO: 7798 | SEQ ID NO: 7846 | SEQ ID NO: 7847 |
| 29-35 | SEQ ID NO: 7799 | SEQ ID NO: 7846 | SEQ ID NO: 7847 |
| 29-36 | SEQ ID NO: 7800 | SEQ ID NO: 7846 | SEQ ID NO: 7847 |
| 29-37 | SEQ ID NO: 7801 | SEQ ID NO: 7846 | SEQ ID NO: 7847 |
| 29-38 | SEQ ID NO: 7802 | SEQ ID NO: 7846 | SEQ ID NO: 7847 |
| 29-39 | SEQ ID NO: 7803 | SEQ ID NO: 7846 | SEQ ID NO: 7847 |
| 29-40 | SEQ ID NO: 7804 | SEQ ID NO: 7846 | SEQ ID NO: 7847 |
| 29-41 | SEQ ID NO: 7805 | SEQ ID NO: 7846 | SEQ ID NO: 7847 |
| 29-42 | SEQ ID NO: 7806 | SEQ ID NO: 7846 | SEQ ID NO: 7847 |
| 29-43 | SEQ ID NO: 7807 | SEQ ID NO: 7846 | SEQ ID NO: 7847 |
| 29-44 | SEQ ID NO: 7808 | SEQ ID NO: 7846 | SEQ ID NO: 7847 |
| 29-45 | SEQ ID NO: 7809 | SEQ ID NO: 7846 | SEQ ID NO: 7847 |
| 29-46 | SEQ ID NO: 7810 | SEQ ID NO: 7846 | SEQ ID NO: 7847 |
| 29-47 | SEQ ID NO: 7811 | SEQ ID NO: 7846 | SEQ ID NO: 7847 |
| 29-48 | SEQ ID NO: 7812 | SEQ ID NO: 7846 | SEQ ID NO: 7847 |
| 29-49 | SEQ ID NO: 7813 | SEQ ID NO: 7846 | SEQ ID NO: 7847 |
| 29-50 | SEQ ID NO: 7814 | SEQ ID NO: 7846 | SEQ ID NO: 7847 |
| 29-51 | SEQ ID NO: 7815 | SEQ ID NO: 7846 | SEQ ID NO: 7847 |
| 29-52 | SEQ ID NO: 7816 | SEQ ID NO: 7846 | SEQ ID NO: 7847 |
| 29-53 | SEQ ID NO: 7817 | SEQ ID NO: 7846 | SEQ ID NO: 7847 |
| 29-54 | SEQ ID NO: 7818 | SEQ ID NO: 7846 | SEQ ID NO: 7847 |
| 29-55 | SEQ ID NO: 7819 | SEQ ID NO: 7846 | SEQ ID NO: 7847 |
| 29-56 | SEQ ID NO: 7820 | SEQ ID NO: 7846 | SEQ ID NO: 7847 |
| 29-57 | SEQ ID NO: 7821 | SEQ ID NO: 7846 | SEQ ID NO: 7847 |
| 29-58 | SEQ ID NO: 7822 | SEQ ID NO: 7846 | SEQ ID NO: 7847 |
| 29-59 | SEQ ID NO: 7823 | SEQ ID NO: 7846 | SEQ ID NO: 7847 |
| 29-60 | SEQ ID NO: 7824 | SEQ ID NO: 7846 | SEQ ID NO: 7847 |
| 29-61 | SEQ ID NO: 7825 | SEQ ID NO: 7846 | SEQ ID NO: 7847 |
| 29-62 | SEQ ID NO: 7826 | SEQ ID NO: 7846 | SEQ ID NO: 7847 |
| 29-63 | SEQ ID NO: 7827 | SEQ ID NO: 7846 | SEQ ID NO: 7847 |
| 29-64 | SEQ ID NO: 7828 | SEQ ID NO: 7846 | SEQ ID NO: 7847 |
| 29-65 | SEQ ID NO: 7829 | SEQ ID NO: 7846 | SEQ ID NO: 7847 |
| 29-66 | SEQ ID NO: 7830 | SEQ ID NO: 7846 | SEQ ID NO: 7847 |
| 29-67 | SEQ ID NO: 7831 | SEQ ID NO: 7846 | SEQ ID NO: 7847 |
| 29-68 | SEQ ID NO: 7832 | SEQ ID NO: 7846 | SEQ ID NO: 7847 |
| 29-69 | SEQ ID NO: 7833 | SEQ ID NO: 7846 | SEQ ID NO: 7847 |
| 29-70 | SEQ ID NO: 7834 | SEQ ID NO: 7846 | SEQ ID NO: 7847 |
| 29-71 | SEQ ID NO: 7835 | SEQ ID NO: 7846 | SEQ ID NO: 7847 |
| 29-72 | SEQ ID NO: 7836 | SEQ ID NO: 7846 | SEQ ID NO: 7847 |
| 29-73 | SEQ ID NO: 7837 | SEQ ID NO: 7846 | SEQ ID NO: 7847 |
| 29-74 | SEQ ID NO: 7838 | SEQ ID NO: 7846 | SEQ ID NO: 7847 |
| 29-75 | SEQ ID NO: 7839 | SEQ ID NO: 7846 | SEQ ID NO: 7847 |
| 29-76 | SEQ ID NO: 7840 | SEQ ID NO: 7846 | SEQ ID NO: 7847 |
| 29-77 | SEQ ID NO: 7841 | SEQ ID NO: 7846 | SEQ ID NO: 7847 |
| 29-78 | SEQ ID NO: 7842 | SEQ ID NO: 7846 | SEQ ID NO: 7847 |
| 29-79 | SEQ ID NO: 7843 | SEQ ID NO: 7846 | SEQ ID NO: 7847 |
| 29-80 | SEQ ID NO: 7844 | SEQ ID NO: 7846 | SEQ ID NO: 7847 |
| 29-81 | SEQ ID NO: 7845 | SEQ ID NO: 7846 | SEQ ID NO: 7847 |

TABLE 83

| | Amino Acid Substitution | | | | Predicted Interaction | |
|---|---|---|---|---|---|---|
| Protein ID | Tyr633 | Tyr641 | Arg652 | Arg710 | Arg710-Tyr633 | Arg652-Tyr641 |
| 29-01 | Y | Y | R | R | cation-π | cation-π |
| 29-02 | K | Y | R | R | cation-cation | cation-π |
| 29-03 | E | Y | R | R | cation-anion | cation-π |
| 29-04 | Y | Y | R | K | cation-π (weak) | cation-π |
| 29-05 | K | Y | R | K | cation-cation | cation-π |
| 29-06 | E | Y | R | K | cation-anion | cation-π |
| 29-07 | Y | Y | R | E | anion-π (weak) | cation-π |
| 29-08 | K | Y | R | E | anion-cation | cation-π |
| 29-09 | E | Y | R | E | anion-anion | cation-π |
| 29-10 | Y | K | R | R | cation-π | cation-cation |
| 29-11 | K | K | R | R | cation-cation | cation-cation |
| 29-12 | E | K | R | R | cation-anion | cation-cation |
| 29-13 | Y | K | R | K | cation-π (weak) | cation-cation |
| 29-14 | K | K | R | K | cation-cation | cation-cation |
| 29-15 | E | K | R | K | cation-anion | cation-cation |
| 29-16 | Y | K | R | E | anion-π (weak) | cation-cation |
| 29-17 | K | K | R | E | anion-cation | cation-cation |
| 29-18 | E | K | R | E | anion-anion | cation-cation |
| 29-19 | Y | E | R | R | cation-π | cation-anion |
| 29-20 | K | E | R | R | cation-cation | cation-anion |
| 29-21 | E | E | R | R | cation-anion | cation-anion |
| 29-22 | Y | E | R | K | cation-π (weak) | cation-anion |
| 29-23 | K | E | R | K | cation-cation | cation-anion |
| 29-24 | E | E | R | K | cation-anion | cation-anion |
| 29-25 | Y | E | R | E | anion-π (weak) | cation-anion |
| 29-26 | K | E | R | E | anion-cation | cation-anion |
| 29-27 | E | E | R | E | anion-anion | cation-anion |
| 29-28 | Y | Y | K | R | cation-π | cation-π (weak) |
| 29-29 | K | Y | K | R | cation-cation | cation-π (weak) |
| 29-30 | E | Y | K | R | cation-anion | cation-π (weak) |
| 29-31 | Y | Y | K | K | cation-π (weak) | cation-π (weak) |
| 29-32 | K | Y | K | K | cation-cation | cation-π (weak) |
| 29-33 | E | Y | K | K | cation-anion | cation-π (weak) |
| 29-34 | Y | Y | K | E | anion-π (weak) | cation-π (weak) |
| 29-35 | K | Y | K | E | anion-cation | cation-π (weak) |
| 29-36 | E | Y | K | E | anion-anion | cation-π (weak) |
| 29-37 | Y | K | K | R | cation-π | cation-cation |
| 29-38 | K | K | K | R | cation-cation | cation-cation |
| 29-39 | E | K | K | R | cation-anion | cation-cation |
| 29-40 | Y | K | K | K | cation-π (weak) | cation-cation |
| 29-41 | K | K | K | K | cation-cation | cation-cation |
| 29-42 | E | K | K | K | cation-anion | cation-cation |
| 29-43 | Y | K | K | E | anion-π (weak) | cation-cation |
| 29-44 | K | K | K | E | anion-cation | cation-cation |
| 29-45 | E | K | K | E | anion-anion | cation-cation |
| 29-46 | Y | E | K | R | cation-π | cation-anion |
| 29-47 | K | E | K | R | cation-cation | cation-anion |
| 29-48 | E | E | K | R | cation-anion | cation-anion |
| 29-49 | Y | E | K | K | cation-π (weak) | cation-anion |
| 29-50 | K | E | K | K | cation-cation | cation-anion |
| 29-51 | E | E | K | K | cation-anion | cation-anion |
| 29-52 | Y | E | K | E | anion-π (weak) | cation-anion |
| 29-53 | K | E | K | E | anion-cation | cation-anion |
| 29-54 | E | E | K | E | anion-anion | cation-anion |
| 29-55 | Y | Y | E | R | cation-π | anion-π (weak) |
| 29-56 | K | Y | E | R | cation-cation | anion-π (weak) |
| 29-57 | E | Y | E | R | cation-anion | anion-π (weak) |
| 29-58 | Y | Y | E | K | cation-π (weak) | anion-π (weak) |
| 29-59 | K | Y | E | K | cation-cation | anion-π (weak) |
| 29-60 | E | Y | E | K | cation-anion | anion-π (weak) |
| 29-61 | Y | Y | E | E | anion-π (weak) | anion-π (weak) |
| 29-62 | K | Y | E | E | anion-cation | anion-π (weak) |
| 29-63 | E | Y | E | E | anion-anion | anion-π (weak) |
| 29-64 | Y | K | E | R | cation-π | anion-cation |
| 29-65 | K | K | E | R | cation-cation | anion-cation |
| 29-66 | E | K | E | R | cation-anion | anion-cation |
| 29-67 | Y | K | E | K | cation-π (weak) | anion-cation |
| 29-68 | K | K | E | K | cation-cation | anion-cation |
| 29-69 | E | K | E | K | cation-anion | anion-cation |
| 29-70 | Y | K | E | E | anion-π (weak) | anion-cation |
| 29-71 | K | K | E | E | anion-cation | anion-cation |
| 29-72 | E | K | E | E | anion-anion | anion-cation |
| 29-73 | Y | E | E | R | cation-π | anion-anion |
| 29-74 | K | E | E | R | cation-cation | anion-anion |
| 29-75 | E | E | E | R | cation-anion | anion-anion |
| 29-76 | Y | E | E | K | cation-π (weak) | anion-anion |
| 29-77 | K | E | E | K | cation-cation | anion-anion |
| 29-78 | E | E | E | K | cation-anion | anion-anion |
| 29-79 | Y | E | E | E | anion-π (weak) | anion-anion |
| 29-80 | K | E | E | E | anion-cation | anion-anion |
| 29-81 | E | E | E | E | anion-anion | anion-anion |

### Example 32

[2136] FIG. 52 illustrates the structures of the molecules of this Example. Structures were confirmed by specific cleavage by JdeZ protease and multi-angle light scattering coupled with size-exclusion chromatography (SEC-MALS) (FIGS. 57-59, FIG. 84). Panels A to C of FIG. 52 illustrate three topologically distinct types of ACE2 dimers that are formed when dimerization is driven solely by the Fc domain (Panel A), solely by the ACE2 collectrin-like domain (Panel B), or by both the Fc and collectrin-like domains (Panel C). The first construct (ACE2-615 homodimer) and second construct (ACE2-740 heterodimer) were each produced as a single species. It was discovered that the third construct was a mixture of two topologically distinct forms (Panel A of FIG. 53). The smaller form is the predicted ACE2-740 homodimer (Panel C of FIG. 52). The larger form is an ACE2-740 superhomodimer (Panel D of FIG. 52), featuring a novel topology reflecting cross-dimerization of its two pairs of CLD dimerizing polypeptides and two pairs of Fc dimerizing polypeptides. The structure of the superdimer suggests a tetrahedral-like configuration formed by the outward projection of its two ACE2 peptidase dimers (8-10) and two Fe dimers from a central “nucleus”.

[2137] Stoichiometric competition binding studies revealed extraordinary activity associated with the superdimer. When impure mixtures of ACE2-740 superhomodimer and ACE2-740 homodimer were titrated with limiting amounts of aggregate-free, individual spike trimers, a preferred “order-of-binding” was observed in which superdimer-spike complexes formed at the expense of dimer-spike complexes (Panel D of FIG. 53). Similar results were obtained for equimolar mixtures of purified ACE2-740 superhomodimer with each of the three topologically distinct ACE2 dimers shown in Panels A to C of FIG. 52 (FIG. 60).

[2138] Panels E to H of FIG. 52 illustrate “superheterodimers” that can be produced as a single topological form rather than mixtures by limiting the constructs to a single pair of CLD-dimerizing polypeptides. These constructs are referred to as GEM-DIMERs™ (Gemini dimers) given their twin-like structures. GEM-DIMERs may comprise any combination of antibodies and Fc-fusion proteins. Notably, the bispecific GEM-DIMERs shown in panels F and H can be engineered in two distinct configurations depending on which of the Fab or fusion protein domains (e.g., ACE2) is connected directly to the collectrin-like domain, and which is connected directly to the Fc domain. This structural distinction can have important functional consequences as demonstrated below.

[2139] Panels B and C of FIG. 53 show that ACE2-740/615 superheterodimer (Panel E of FIG. 52), with four ACE2 peptidase domains, and ACE2-740/B13A superheterodimer (Panel F of FIG. 52), with two ACE2 peptidase domains and two Fab domains from the anti-spike B13A antibody (11), are each produced as a single species. ACE2-740/615 superheterodimer and ACE2-740/B13A superheterodimer demonstrate highly potent binding to individual spike trimers, comparable to ACE2-740 superhomodimer (Panels E to F of FIG. 53). The qualitative results from our competition binding experiments were confirmed by quantitative solution binding analysis (FIG. 85). The three topologically distinct ACE2 dimers, ACE2-615 homodimer, ACE2-740 heterodimer, and ACE2-740 homodimer, bound spike protein with a K_{D} of 1.56 nM, 1.92 nM, and 1.39 nM, respectively. ACE2-740 superhomodimer, ACE2-740/615 superheterodimer, and ACE2-740/B13A superheterodimer bound spike protein with a K_{D} of 27.2 pM, 26.7 pM and 15.8 pM, respectively. These results demonstrate a cooperative binding advantage of ACE2 superdimers over ACE2 dimers of 51- to 126-fold.

[2140] To assess our ACE2 superdimers as candidates for treatment of COVID-19 and other ACE2 utilizing viruses, their ability to neutralize live SARS-CoV-2 betacoronavirus and NL63 alphacoronavirus was compared (Panels G to I of FIG. 54, FIG. 61, FIG. 86). The results recapitulate the relative potencies of superdimers and dimers in our solution binding studies (FIG. 85). ACE2-740 superhomodimer and ACE2-740/615 superheterodimer demonstrate 403-fold and 143-fold greater potency than ACE2-615 homodimer against SARS-CoV-2, and 87-fold and >78-fold greater potency against NL63. ACE2-740/B13A superheterodimer demonstrates 646-fold and 29-fold greater potency against SARS-CoV-2 compared with ACE2-740 heterodimer and B13A antibody, respectively. The ability of ACE2 superdimers and dimers to neutralize spike protein binding to cell surface ACE2 receptors was also compared (Panels J to K of FIG. 53, FIG. 87). ACE2-740 superhomodimer and ACE2-740/615 superheterodimer neutralized spike binding with a cooperative binding advantage over ACE2-740 homodimer of 8.9-fold and 10.6-fold. ACE2-740/B13A superheterodimer neutralized spike binding with a cooperative binding advantage over ACE2-740 homodimer and B13A antibody of 11.2-fold and 3.8-fold. ACE2-740/B13A superheterodimer was further evaluated using an in vivo prophylactic model of SARS-CoV-2 infection in golden Syrian hamsters (12). Panel L of FIG. 53 demonstrates that ACE2-740/B13A superheterodimer (25 mg/kg) exhibits comparable efficacy in preventing weight-loss compared to a two-antibody cocktail of REGN10987 (25 mg/kg) and REGN10933 (25 mg/kg), and superior efficacy to REGN10933 alone (25 mg/kg).

[2141] To determine the utility of superdimerization to increase the potency of therapeutic antibodies, ACE2-740/Fab superheterodimers (Panel F of FIG. 52), Fab/Fab superheterodimers (Panel G of FIG. 52), and bispecific Fab1/Fab2 superheterodimers (Panel H of FIG. 52) were created using eight clinically authorized antibodies (13-18). In stoichiometric competition binding experiments with individual spike trimers, a preferred order-of-binding was observed in which antibody superheterodimer-spike complexes generally formed at the expense of parent antibody-spike complexes (FIGS. 62-63). Pseudovirus experiments similarly demonstrate a dramatic increase in the neutralization potency of antibody superheterodimers compared to their parent antibodies (FIG. 64). In particular, RG2-RG2 and CT1-CT1 neutralized the B.1.531 variant approximately 100-fold better than the REGN10933 and CT-P59 parent antibodies (FIG. 88).

[2142] It is noteworthy that ACE2 dimers, whether formed by CLD dimerization, Fc dimerization, or both, appear to bind with relatively low avidity to individual spike trimers, in spite of the trivalency of the spike protein, suggesting that the configuration of the three receptor binding domains (RBDs) is incompatible with bivalent binding by ACE2 dimers. The fact that ACE2 superdimers as well as antibody superdimers bind more strongly to individual spike trimers suggests that the topology of the superdimer allows it to assume a configuration that is capable of an intra-spike interaction in which at least two binding sites on the spike trimer are simultaneously engaged. The molar masses of superdimer-spike binding complexes formed in the presence of excess superdimer (FIG. 89) provide evidence for two distinct types of intra-spike interaction. The first type, exemplified by ACE2-740/615 superheterodimer and most of the Fab/Fab superheterodimers, is characterized by 1:1 superdimer-spike trimer complex, indicating an intra-spike, inter-subunit interaction in which a single superdimer simultaneously engages a single type of epitope on at least two of the three S protein subunits constituting the spike trimer. The second type, exemplified by ACE2-740/B13A superheterodimer and bispecific Fab1/Fab2 superheterodimers, is characterized by a 2:1 or greater complex, indicating an intra-spike interaction in which each superdimer engages two distinct epitopes in an inter-subunit or intra-subunit fashion, but which in either event allows two or more superdimers to access an individual spike trimer simultaneously. The superdimer configuration may provide a general solution to the inability of antibodies and Fc-fusion proteins to engage multiple targets that are refractory to simultaneous binding, whether of a monospecific or multispecific nature.

[2143] It was next confirmed that superheterodimers have antibody-like plasma half-lives using the human FcRn Tg32 homozygous transgenic mouse model. This model is used to predict the clearance (CL) of human antibodies in humans with greater accuracy than non-human primate studies (19). Each superheterodimer was administered as a single i.v. bolus (10 mg/kg) and ACE2 plasma levels were determined by spike binding (FIGS. 65-66, FIG. 90). Two ACE2-740/B13A superheterodimers, one possessing and one lacking angiotensin-converting enzyme activity (FIG. 67, FIG. 91), demonstrate comparable terminal half-lives (T1/2) of 10.6 and 11.2 days, respectively, representing a 33.5- to 35.4-fold improvement compared with the T1/2 of 7.6 hours observed for soluble recombinant human ACE2 (APN01) in humans (single i.v. bolus at 1.2 mg/kg) (20). In addition, two GEM-DIMERs (Fab/Fab superheterodimers, Panel G of FIG. 52), RG2-RG2 and VR1-VR1, incorporating the Fab domains of the REGN10987 and VIR7831 antibodies, respectively, demonstrated a T_{1/2} of 17.6 and 16.3 days, respectively, which compared favorably with the T_{1/2} of 12.9 and 14.7 days observed for the parent antibodies.

[2144] The Omicron B.1.1.529 variant, which eliminates or substantially reduces the effectiveness of most clinically authorized antibodies, highlights a potential therapeutic advantage for ACE2 superdimers in addressing SARS-CoV-2 resistance. FIG. 3 demonstrates that both the ACE2-740/615 and ACE2-740/B13A superheterodimers potently neutralize viral infection by Omicron B.1.1.529 and eleven other major variants. ACE2-740/615 superheterodimer is extraordinarily effective against Omicron B.1.1.529 (IC₅₀=7-16 pM), demonstrating 147-fold or greater potency than REGN10987, REGN10933, LY-CoV555, LY-CoV016, AZD1061, AZD8895, VIR-7831, and CT-P59 (FIG. 55, FIGS. 68-78, FIG. 92). ACE2-740/B13A superheterodimer generally demonstrates equal or better neutralization activity than the same eight antibodies against all twelve variants. In keeping with our prediction of the particular therapeutic value of ACE2 molecules without affinity-enhancing mutations, SARS-CoV-2 has not, to date, successfully evaded neutralization by our ACE2 superdimers. It is suggested that Omicron B.1.1.529, known for its high transmissibility, has been selected in a manner resulting in its particular susceptibility to ACE2-740/615 superheterodimer with its four ACE2 domains.

[2145] Bispecific GEM-DIMERs were created using two anti-spike antibodies to determine whether they can neutralize certain resistant variants more effectively than two-antibody cocktails containing the parent antibodies. A bispecific GEM-DIMER (Fab1/Fab2 superheterodimer, FIG. 1H) consisting of the REGN10987 and REGN10933 Fabs (HB1701; protein 17-01) neutralized the N439K/B.1.351 variant 25-fold better than a two-antibody cocktail of REGN10987 and REGN10933 (Panels A to C of FIG. 56, FIG. 79, FIG. 93). The neutralizing activity of HB1701 was comparable to the highly potent ACE2-740/615 and ACE2-740/B13A superheterodimers, demonstrating that bispecific GEM-DIMERs can potently neutralize SARS-CoV-2 variants that are resistant to cocktails of their parent antibodies.

[2146] It was next examined whether bispecific GEM-DIMERs can effectively target cell surface proteins, in particular targets for cancer therapeutics. The clinical application of anti-CD20 and anti-CD19 antibodies is associated with treatment-resistant and/or recurrent disease (21, 22) suggesting the therapeutic value of a GEM-DIMER targeting CD20 and CD19 simultaneously. Bispecific GEM-DIMERs were created (Fab1/Fab2 superheterodimers (Panel H of FIG. 52) using Rituxan, an anti-CD20 antibody widely used as a frontline treatment in B cell lymphoma (23), and FMC63, an anti-CD19 antibody used as a component of chimeric antigen receptors for CAR-T cell therapy of relapsed/refractory B-cell lymphoma (24). The ability of two anti-CD20/anti-CD19 bispecific GEM-DIMERs (HB1905, HB1906) to bind cell surface CD20 and CD19 was evaluated by pre-incubating each with the CD20/CD19-positive human Toledo cell line followed by addition of fluorescently labeled Rituxan and FMC63. FIG. 80 demonstrates that both HB1905 and HB1906 completely extinguish binding of both labeled antibodies, whereas the unlabeled Rituxan and FMC63 parent antibody controls each only compete against its labeled counterpart. Surface plasmon resonance binding studies demonstrate that HB1905 and HB1906 bind monovalent CD20 and CD19, as well as Fc gamma receptors and complement component C1q, with an affinity comparable to Rituxan and FMC63 (FIG. 81). The functional bispecificity of HB1905 and HB1906 was evaluated by antibody-dependent cell-mediated cytotoxicity (ADCC) of Toledo cells. As shown in Panels D to E of FIG. 56, the ADCC activity observed for HB1905 and HB1906 was 39- to 44-fold better than a two-antibody cocktail containing Rituxan and FMC63 (FIG. 94). These results indicate that the bispecific GEM-DIMER configuration may be generally valuable in anti-cancer therapeutics to combat resistance.

[2147] It was also examined whether bispecific GEM-DIMERs can effectively target soluble proteins, in particular cytokines that are important mediators of autoimmunity and inflammatory disease. Bispecific GEM-DIMERs (Fab1/Fab2 superheterodimers, Panel H of FIG. 52) were created using adalimumab, an anti-TNF-α antibody, and secukinumab, an anti-IL-17A antibody, which are used to treat rheumatoid arthritis, psoriatic arthritis, plaque psoriasis, ankylosing spondylitis, and inflammatory bowel disease (25). Two alternative GEM-DIMER configurations were evaluated, in which either the Fab derived from adalimumab or secukinumab is connected to the collectrin-like domain while the other Fab is connected directly to the Fc domain. GEM-DIMERs of both configurations (Ad×Se and Se×Ad) neutralized TNF-α with a potency comparably to adalimumab (Panel A of FIG. 82, FIG. 95). Remarkably, GEM-DIMERs of the Ad×Se configuration neutralized IL-17A with a potency 8.3-fold to 11.5-fold better than GEM-DIMERs of the Se×Ad configuration, and 9.1-fold to 12.0-fold better than secukinumab itself (Panel B of FIG. 82, FIG. 95). Next, the Ad×Se GEM-DIMER was evaluated for its ability to inhibit the synergistic effect of TNF-α and IL-17A on the production of IL-6 in normal human dermal fibroblasts. TNF-α and IL-17A together stimulate much higher levels of IL-6 in these cells than that observed with either TNF-α and IL-17A alone (FIG. 83). As shown in Panel F of FIG. 56, the HB2309 Ad×Se GEM-DIMER completely abolished the production of IL-6 induced by the TNF-α and IL-17A combination, while neither adalimumab nor secukinumab alone was able to do so. In addition, the Ad×Se GEM-DIMER was able to completely abolish the IL-6 response an order-of-magnitude more effectively than several two-antibody cocktails of secukinumab and adalimumab ranging from 1:1 to 50:1 (Panel G of FIG. 56).

[2148] In summary, this Example demonstrates that it is possible to create a new class of multispecific, multivalent, antibody-like molecules in the form of GEM-DIMERs that may be applied to any combination of antibodies and Fc-fusion proteins. It has been shown, using several model systems, namely neutralization of resistant virus, cancer cell killing, and cytokine inhibition, that GEM-DIMERs have activity superior to two-antibody cocktails in each of these three clinical areas. Their ease of synthesis, antibody-like pharmacokinetics and effector functions demonstrate that these molecules can be useful in a variety of clinical settings especially when combination therapy is warranted.

### Supplemental Materials

### Methods and Materials

### Mammalian Expression and Purification of Recombinant Proteins

[2149] Recombinant proteins were expressed by transient expression in CHO-K1 cells adapted to serum-free suspension culture (TunaCHO) using a mammalian expression vector and purified by Protein A affinity chromatography (LakePharma, San Carlos, CA). Cells were seeded in a shake flask and expanded in suspension using a serum-free and chemically defined medium. On the day of transfection, cells were seeded into a new vessel with fresh medium. Transient transfections were performed by adding transfection reagents complexed with DNA under high density conditions. After transfection, cells were maintained as a batch-fed culture in a shake flask until the end of the production run. The conditioned cell culture fluid was harvested after 7 to 14 days, clarified by centrifugation, and sterile filtered prior to purification. Affinity chromatography was carried out by applying the supernatant to a column packed with the CaptivA Protein A Affinity Resin (Repligen, Massachusetts, USA) pre-equilibrated with phosphate buffered saline (PBS) (137 mM NaCl, 2.7 mM KCl, 10 mM Na₂HPO₄, 2 mM KH₂PO₄ pH 7.4). The column was washed with PBS until the OD₂₈₀ value returned to baseline. Target protein was then eluted with 0.25% acetic acid at pH 3.5. Fractions were collected, buffered with 1 M HEPES, and fractions containing the target protein were pooled, buffer exchanged into 100 mM HEPES, 100 mM NaCl, 50 mM sodium acetate, pH 6.0, filtered through a 0.2 μm membrane filter and stored at 4° C. prior to use. The protein concentration was calculated from the OD₂₈₀ value and calculated extinction coefficient.

### Preparative Size-Exclusion Chromatography (SEC)

[2150] Preparative SEC was carried out on an AKTA Avant 25 (Cytiva, Marlborough, MA). Proteins were concentrated to 10-15 mg/mL using an Amicon Ultra-15, 3MWCO, ultracentrifugal filter unit, Cat #UFC900324 (Millipore, Burlington, MA), then loaded onto a HiLoad 26/600 Superdex 200 preparative grade column, Cat #28989336 (Cytiva, Marlborough, MA). Elution was carried out with PBS, Cat #CCFAL003 (UCSF Cell Culture Facility, San Francisco, CA). Fractions corresponding to the protein of interest were identified based upon analytical SEC and analysis by reducing and non-reducing SDS-PAGE, pooled, concentrated by ultrafiltration, and stored at 4° C.

### Analytical Size-Exclusion-High-Performance Liquid Chromatography (SE-HPLC)

[2151] Analytical SE-HPLC was carried out on a Prominence HPLC (Shimadzu, Kyoto, Japan). Zenix-C SEC-300 columns (3 particle size, 300 angstrom pore size, 4.6×300 mm), Cat #233300-4630 (Sepax, Newark, Delaware), were used as a pair in series with mobile phase (PBS, 300 mM NaCl), flow rate (0.2 mL/min), column temperature (25° C.), and detection wavelength (280/214 nm). LabSolutions v5.9 software (Shimadzu) was used for UV data acquisition and processing.

### Multi-Angle Light Scattering (MALS) Analysis

[2152] The molar mass of proteins was determined by combining SE-HPLC with measurement of refractive index (RI) and multi-angle light scattering (SEC-MALS) using an Optilab T-rEX RI detector and Treos MALS detector in-line (Wyatt, Goleta, CA). The temperature of the detectors was maintained at 25° C. The signal obtained for the monomeric form of bovine serum albumin (BSA) was used to normalize the detectors and to correct for band broadening between detectors. Astra v6.1.7 software (Wyatt Technology) was used for light scattering and refractive index data acquisition and processing. A value of 0.185 mL/g was used for the dn/dc ratio of proteins.

### IdeZ Cleavage Analysis and TCEP Reduction

[2153] Digestions were carried out with 100 μg of protein and 3 μL of IdeZ Protease, Cat #P0770S (NEB, Ipswich, MA), in a 100 μL reaction volume containing 1× GlycoBuffer 2 at 37° C. for 60 min. The reaction mixture was then mixed with 100 μL slurry of Protein A Sepharose Fast Flow beads, Cat #17507901 (Cytiva), for 1 hr at RT with constant mixing in a rotator. Fragments lacking the Fc domain were recovered by centrifugation at 1000×g for 2 min using 0.5 mL spin columns, Cat #69705 (Thermo Fisher, Waltham, MA). The beads were washed with 25 μL of PBS and the two eluates combined. One-half of the eluate was reduced with TCEP-HCl (tris (2-carboxyethyl) phosphine hydrochloride) Cat #20490 (Thermo Fisher), at 0.17 mM and incubated for 30 min in the dark at RT. IdeZ-treated and IdeZ-treated/TCEP-reduced aliquots were analyzed by SEC-MALS as described.

### Stoichiometric Competition Binding Analysis

[2154] Binding reactions were prepared by titrating the spike-binding protein with aggregate-free, individual spike trimers (Wuhan-Hu-1, GenBank: MN908947, NCBI ref sequence NC_045512.2, Lot No. 20345PPT) (ExcellGene, Monthey, Switzerland) in PBS. Reactions were incubated at 14° C. for 3 hrs, then analyzed by SEC-MALS as described.

### Kinetic Exclusion Assay (KinExA)

[2155] KinExA experiments were performed at RT (approx. 22° C.) on a KinExA 3200 (Sapidyne, Boise, ID). The spike-binding protein served as the constant binding partner (“CBP”) and was titrated with spike trimer (ExcellGene) as the “titrant” in PBS with 1 mg/mL BSA, Cat #2A3018 (Sapidyne). Samples were equilibrated at RT and remaining free spike-binding protein was captured by filtration on solid phase polymethylacrylate (PMMA) particles, Cat #2P4510 (Sapidyne) or 98 μm polystyrene particles, Cat #442178 (Sapidyne) previously adsorption-coated with spike protein at a concentration of 30 μg/mL. A secondary antibody, Alexa Fluor 647-conjugated AffiniPure Goat Anti-Human IgG, F(ab′)₂, Cat #109-605-097 or Affinipure Rabbit Anti-Human IgG Fcγ fragment specific, Cat #309-005-008 (Jackson ImmunoResearch, West Grove, PA), at a final concentration of 0.5 μg/mL was used to detect the unbound fraction. KinExA detection optics consisted of a 620/30 bandpass excitation filter, a 670/40 bandpass emission filter and a 645 nm longpass dichroic mirror. Standard equilibrium analysis was performed using v4.3.20 of the KinExA Pro software (Sapidyne). Titrant and CBP concentrations used in the n-curve analysis were converted to binding site concentrations based on the indicated valence of test article provided in the tables. The spike trimer was used as the analysis concentration reference after correction for activity.

### Neutralization of SARS-CoV-2 Spike Protein Binding to ACE2-Expressing Cells

[2156] 293T-hsACE2 cells, Cat #C-HA101 (Integral Molecular, PA) were cultured in DMEM, Cat #30-2002 (ATCC, Manassas, VA) with 10% FBS, Cat #SH30910.03HI (Cytiva), 10 mM HEPES, 1× pen-strep, Cat #15140148 (Thermo Fisher), and 1 mg/mL puromycin, Cat #A1113802 (Thermo Fisher) in T75 culture flasks. On day 1, cells were trypsinized with 0.05% Trypsin-EDTA, Cat #25200056 (Thermo Fisher), washed with DMEM and placed in 96 well V-bottom plates at 5×10⁴ cells/well. Serially diluted spike-binding proteins were added to cells in duplicate, incubated for 5 min at RT, followed by the addition of 2.5 nM biotinylated aggregate-free spike trimer (Excellgene) and incubated 1 hr at RT. Cells were washed twice with Wash Buffer (PBS, 1% BSA), Cat #130-091-376 (Miltenyi, Germany), resuspended in Wash Buffer with AF488-labeled Streptavidin, Cat #405235 (BioLegend, San Diego, CA), and incubated for one hr at 4° C. The cells were washed twice, resuspended in Wash Buffer, and analyzed on a NovoCyte 2000R cytometer (Agilent, Santa Clara, CA). The MFI of AF488 Streptavidin bound to biotinylated spike on the cell-surface was determined with NovoExpress Software v1.4.1 (Agilent) and results analyzed by nonlinear regression using GraphPad Prism v5. The amount of bound spike trimer in relative units (RU) was determined using a standard curve with known concentrations of the spike protein.

### Live SARS-CoV-2 and NL63 Neutralization Assay

[2157] Infectious virus USA-WA1/2020, Cat #NR-52281, and NL63, Cat #NR-470 (BEI, Manassas, VA) was expanded using a single passage in Vero/TMPRSS2 cells. Virus was end-point titrated in Vero/TMPRSS2 and 100 TCID50 used per well. Virus was pre-incubated for 1 hr at 37° C. with serial dilutions of antibody, then plated in replicates of 8 on Vero/TMPRSS2 cells. After 7 days, wells were scored for cytopathic effect.

### Pseudotyped SARS-CoV-2 Neutralization Assay

[2158] Neutralization assays were carried out with pseudotyped SARS-CoV-2 reporter virus particles (RVPs) with luciferase from Integral Molecular according to their protocol with the following variants: D614G B.1 (RVP-702L), SARS-CoV-1 Urbani (RVP-801L), N439K (RVP-704L), Alpha UK B.1.1.7 (RVP-706L), UK B.1.1.7 with E484K (RVP-717L), Beta South African A3 B.1.351 (RVP-724L), South African B.1.351 (RVP-707L), Gamma Brazilian P.1 (RVP-708L), Delta Indian B.1.617.2 (RVP-763L), Epsilon Californian B.1.427/B.1.429 (RVP-713L), Zeta Brazilian P.2 (RVP-736L), Eta Nigerian/European B.1.525 (RVP-723L), Iota New York B.1.526 (RVP-726L), Kappa Indian B.1.617.1 (RVP-730L), Lambda C.37 (RVP-766L), Mu Columbia, B.1.621 (RVP-767L), Omicron B.1.1.529 (RVP-786L), and a variant incorporating the N439K and Beta South Africa A3 B.1.351 mutations (RVP-769L). Serially diluted anti-spike proteins were incubated with pseudotyped SARS-CoV-2 Renilla luciferase for 1 hr at 37° C. Nine or more concentrations were tested for each protein. Pseudovirus in culture media without protein was used as a negative control to determine 100% infectivity. The mixtures were then incubated with 293T-hsACE2 cells at 2.5×10⁵ cells/mL in the 96-well plates. Infection took place over approximately 72 hrs at 37° C. with 5% CO₂. The luciferase signal was measured using the Renilla-Glo Luciferase Assay System, Cat #E2710 (Promega, Madison, WI) with the luminometer set at 1 ms integration time. The relative luminescence signals (RLU) obtained from the negative control wells were normalized and used to calculate the neutralization percentage for each concentration. All samples were run in duplicate. The data were processed by GraphPad Prism v9.3.1 to fit a 4-parameter logistic curve and calculate the log IC₅₀.

### Syrian Hamster Efficacy Study

[2159] The study was conducted at BIOQUAL, Inc. (Rockville, MD). A total of 24 male golden hamsters 6-8 weeks old were assigned to four groups (n=6). Animals were treated with the appropriate material for their group on study day minus one (−1) via intraperitoneal (IP) injection. Test articles were prepared in PBS. The SARS-CoV-2 B.1.351 variant that was used for infection, hCoV-19/South Africa/KRISP-K005325/2020, Cat #NR-54974, Lot #020521-105) was sourced from BEI Resources (ATCC). This variant has the following amino acid mutations in its spike protein with reference to the sequence of the Wuhan-1 isolate (NCBI Reference Sequence: NC_045512.2): L18F, D80A, D215A, L242/A243/L244 deletion, K417N, E484K N501Y, D614G, A701V. On study day 0, animals were bled pre-challenge, followed by intranasal challenge with 108,750 PFU of SARS-CoV-2 in PBS 50 uL per nostril. Animals were observed twice daily in the post-challenge phase and their weights were collected daily.

### Pharmacokinetic (PK) Assays

[2160] The study was conducted by The Jackson Laboratory, Bar Harbor, ME using 6-8 week old male B6.Cg-Fcgrttm1Dcr Tg(FCGRT)32Dcr/DcrJ mice homozygous for the human FcRn transgene. Initial body weights were measured within 1 day of each test article administration. At 0 hrs on Day 0, each protein was administered by IV injection at 10 mg/kg in a volume of 5 mL/kg. Blood samples (25 μL) were collected from each mouse at 5 min, 6 hr, 1 d, 3 d, 5 d, 7 d, 10 d, 14 d, 17 d, 21 d, and 28 d after administration. The blood samples were collected into 1 μL of K₃EDTA, processed to plasma, diluted 1/10 in 50% glycerol in PBS, frozen in specialized 96 well storage pates and stored at −20° C. Plasma samples were assayed by the electrochemiluminescence immunoassay to detect the levels of each protein conducted at Hinge Bio Inc. Spike protein, Cat #46328 (LakePharma), was diluted to 20 nM with PBS and coated on QuickPlex 96-Well plates, Cat #L55XA, Meso Scale, Rockville, MD) with 25 μL per well. The plates were sealed and incubated overnight at 4° C., then blocked by PBS—B (PBS with 1% BSA) at RT for 30 min. Plasma samples were diluted 250- to 4000-fold with PBS—B and 25 μL of the diluted samples were added to the coated MSD plates using Biomek 15 liquid handler (Beckman, Brea, CA). Plasma samples were incubated with shaking (700 rpm) at RT for 60 mins. Biotinylated goat anti human-Fab antibody, Cat #ab64666 (Abcam, Cambridge, UK), or biotinylated goat Anti-Human ACE-2 antibody, Cat #DY933-05 (R&D Systems, Minneapolis, MN) was used as a detection antibody. Detection antibody (25 μL) was incubated with shaking (700 rpm) at RT for 60 mins. Sulfo-tag streptavidin (25 μL), Cat #R32AD (Meso Scale) was used as a secondary detection reagent. Read Buffer A (150 μL), Cat #R92TG (Meso Scale) was added before the plate was read on the MESO QuickPlex. Data were analyzed with MSD Discovery Workbench 4.0.13 (Meso Scale).

### Pharmacokinetic (PK) Analysis

[2161] Noncompartmental pharmacokinetic data analysis was performed using Phoenix WinNonlin v8.3 (Certara, Princeton, NJ). Parameters were estimated for individual mice using a module for IV bolus administration. The area under the plasma concentration versus time curve was estimated using the linear trapezoid method. Terminal slopes for all animals were estimated over the time period from approximately 5 days through the end of sampling at approximately 28 days and used to calculate half-life and AUC extrapolated to infinity.

### ACE2 Enzyme Assays

[2162] The carboxypeptidase reaction was initiated when 0.025 μg (wild-type) or 15 μg (ACE2 mutant) of protein was added to 0.2 μM angiotensin II, Cat #AS-20633 (AnaSpec, Fremont, CA), bradykinin, Cat #AS-65642 (AnaSpec) or apelin-13, Cat #APEL-003 (CPC Scientific, San Jose, CA) in the presence of the reaction buffer (PBS with 10 μM ZnCl₂) at 37° C. Recombinant human ACE2, Cat #79200 (BioLegend), was used as a positive control. Aliquots (25 μL) were taken every 2 min and heat inactivated at 80° C. for 5 min. The amount of phenylalanine in the heat inactivated aliquots was quantified using the phenylalanine assay kit, Cat #ab83376 (Abcam).

### Cell Surface CD20, CD19 Binding Assays

[2163] Toledo cells, Cat #CRL-2631 (ATCC), were cultured in RPMI-1640, Cat #30-2001 (ATCC), with 10% fetal bovine serum (FBS) and 1 μg/mL gentamicin, Cat #15750060 (Thermo Fisher), in T25 culture flasks. Cells were dispensed in 96-well V-bottom plates at a concentration of 5×10⁴ cells/well in Blocking Buffer (PBS with 5% mouse serum), Cat #M5905 (Millipore), and incubated with 100 nM CD20- and/or CD19-binding proteins for 30 min at room temperature. The Rituxan and FMC63 antibodies were labeled with AF488, Cat #ab236553, and AF647, Cat #ab269823 (Abcam), respectively, according to the manufacturer's instructions. Cells were incubated with 100 nM labeled antibodies for 30 min at room temperature, washed twice with Wash Buffer (PBS with 0.3% BSA), Cat #A7030 (Millipore), resuspended in Wash Buffer with propidium iodide, Cat #P3566 (Thermo Fisher), to distinguish live cells and analyzed using a NovoCyte 2000R cytometer and NovoExpress Software v1.4.1 (Agilent).

### Antibody-Dependent Cellular Cytotoxicity (ADCC) Assay

[2164] Toledo cells were used as target cells and maintained in RPMI with GlutaMax, Cat #61870036 (Thermo Fisher Scientific, Waltham, MA), and 10% FBS, Cat #SH30070.03IH30-45 (Cytiva). To differentiate target cells from natural killer (NK) cells, the Toledo cells were labeled with 5 pM CellTrace Yellow, Cat #C34567 (Thermo Fisher), for 20 min at 37° C. After quenching and washing according to the manufacturer's recommendation, 1×10³ cells, in duplicate, were incubated with CD20- and/or CD19-binding proteins and 2 pM CellEvent Caspase-3/7 Green Detection Reagent, Cat #C10423 (Thermo Fisher), for 10 min at room temperature in 96-well ultra-low attachment 96-well microplates, Cat #7007 (Corning, Corning, NY). Human peripheral blood NK cells, Cat #70036 (StemCell Technologies, Vancouver, Canada), were added at an effector:target ratio of 10:1. Caspase-3/7 cleavage was measured every hour for 8 hours using an IncuCyte SX5 (Sartorius, Gattingen, Germany), at 37° C. with 5% CO₂. Caspase-3/7 positive target cells were discriminated from unlabeled apoptotic NK cells using multi-channel fluorescence. Kinetic data were obtained using IncuCyte 2021A software (Sartorius) before area-under-the-curve (AUC) (mean±SEM) and non-linear regression analysis were performed using GraphPad Prism v9.3.1.

### Surface Plasmon Resonance (SPR) Experiments

[2165] SPR capture kinetic experiments were performed on a Carterra LSA instrument (Carterra, Salt Lake City, UT). Recombinant proteins (5 μg/mL) were directly immobilized on the Carterra CMD-P chip using amine coupling. Recombinant FcγRIIIa (2000 nM-2.7 nM), Cat #4325-FC-50 (R&D Systems), FcγRIIa (R167) (667 nM-2.7 nM), Cat #1330-CD-050/CF (R&D Systems), FcγRI (55.6 nM-0.68 nM), Cat #CF1257-FC (R&D Systems), CD19 (500 nM-0.68 nM), Cat #CD9-H52H2 (ACROBiosystems, Newark, DE), C1q (167 nM-0.68 nM), Cat #A099 (Complement Technology, Tyler, Texas) were diluted in three-fold dilution steps using HEPES buffer (10 mM HEPES, 150 mM NaCl, 3 mM EDTA, with 0.005% Tween-20, 0.05% DDM, 0.01% CHS pH 7.4 with 0.05 mg/ml BSA). Recombinant CD20 (167 nM-0.68 nM), Cat #CD0-H52H3 (ACROBiosystems), was diluted in a three-fold dilution step with HEPES buffer containing 0.05% DDM and 0.01% CHS. Proteins were injected onto the CMD-P chip for 5 min during the association phase followed by HEPES buffer injection for another 5 min during the dissociation phase. The CMD-P chip was regenerated by flowing Pierce IgG Elution Buffer, Cat #21004 (Thermo Fisher), with 1 M NaCl, 3 times with 1 min intervals after each round of analyte injection. Data were analyzed using the Carterra Kinetics Software (Carterra).

### Inhibition of Recombinant Human TNF-α-Mediated Cytotoxicity on WEHI-164 Cells

[2166] Neutralizing potency of HB2309, HB2310, HB2313, and HB2314 was measured in a recombinant human rhTNF-α-induced cytotoxicity assay in a WEHI-164 mouse fibrosarcoma cell line expressing endogenous mouse TNF-α receptors. WEHI-164 cells, Cat #CRL1751 (ATCC, Manassas, VA), were seeded in duplicate at 5×10⁴ cells/well into a 96-well plate and cultured in RPMI 1640 medium supplemented with 10% (v/v) FBS for 18 hours. Serially diluted GEM-DIMERs and antibodies (final concentration: 10.2-60,000 pM) were preincubated in medium containing 2 μg/mL actinomycin D and 20 IU/mL of human TNF-α for 30 min at 37° C. The cells were incubated for an additional 20 h at 37° C. and cell viability was analyzed using CellTiter-Glo, Cat #G7573 (Promega, Madison, WI), according to the manufacturer's recommendations.

### IL-17A Reporter Bioassay

[2167] Neutralizing potency of HB2309, HB2310, HB2313, and HB2314 was measured with the IL-17 Bioassay Thaw and Use kit, Cat #CS2018C08 (Promega, WI), following the manufacturer's recommendations. Briefly, proprietary cells supplied with the kit containing a luciferase reporter gene driven by the IL-17R promoter were cultured for 18 hours at 37° C. with 5% CO₂. Serially diluted GEM-DIMERs and antibodies were preincubated with 20 ng/mL recombinant human IL-17A, Cat #200-17 (PeproTech EC Ltd, Rocky Hill, NJ), for 25 min at 37° C. before being added to the cells. The cells were incubated for an additional 6 hours at 37° C. with 5% CO₂. IL-17A activity was quantitated by measuring luminescence with SpectraMax® Paradigm® (Molecular Devices, LLC, San Jose, CA). Nonlinear regression was performed with Prism v9.5.0.

Neutralization of Recombinant Human IL-17A and TNF-α-Induced IL-6 Secretion from Normal Human Dermal Fibroblasts

[2168] Primary normal human dermal fibroblasts NHDF, Cat #12302 (PromoCell, Heidelberg, Germany), isolated from the dermis of adult skin were cultivated in Growth Medium 2, Cat #C23020 (PromoCell), and plated overnight in 96-well plates, Cat #6005182 (Perkin Elmer, Waltham, MA), at 2×10⁴ cells per well. Media was replaced the following day with media containing a previously established synergistic combination of 2.5 ng/mL recombinant human TNF-α, (Cat #10291), and 10 ng/mL recombinant human IL-17A, Cat #7955 (R&D Systems, Minneapolis, MN), that was preincubated with serially diluted GEM-DIMER (HB2309), adalimumab, secukinumab, or various ratios of secukinumab to adalimumab for 30 min at 37° C. After 24 hours, supernatants were collected and used to determine the concentration of secreted IL-6, Cat #K151AKB-2 (Mesoscale Discovery, Rockville, MD), according to the manufacturer's instructions.

### Discussion

[2169] The ability of antibodies and Fc-fusion proteins to bind multiple targets cooperatively is often limited by their topology. This Example reports the discovery that ACE2-Fc fusion proteins spontaneously cross-dimerize, forming “superdimers” capable of extraordinary SARS-CoV-2 intra-spike cooperative binding and neutralization of all major viral variants including Omicron. This Example demonstrate how super-dimerization of antibodies and Fc-fusion proteins can be used to engineer bispecific “superheterodimers” with greater potency than cocktails of the two parent antibodies in their ability to neutralize resistant variants of SARS-CoV-2, direct the killing of cancer cells via antibody-dependent cell cytotoxicity (ADCC), and block the synergistic effects of inflammatory cytokines. Topological engineering represents a new approach for overcoming the challenges in developing combination therapies, particularly in multi-etiologic and resistant disease.

[2170] Efforts to make multispecific antibodies that bind targets cooperatively have relied almost exclusively on peptide bonding to connect multiple binding domains. The effectiveness of this approach is limited by the topology of the antibody molecule. The resulting multipartite fusion proteins are often fraught with steric hindrance, preventing the requisite domains from binding their respective targets simultaneously. The key feature defining the topology of the antibody molecule is its dimeric nature, a function of the Fc domain. Although the Fc domain has been used successfully to develop dimeric fusion proteins with many therapeutic advantages such as longer plasma half-lives (1), Fc-fusion proteins are also limited by their antibody-like topology. For example, ACE2-Fc fusion proteins have limited ability to neutralize SARS-CoV-2 due to inefficient binding of the viral spike protein (2-5). ACE2 mutants with affinity-enhancing mutations are not an optimal solution to this problem as they may increase the risk of viral escape. These fundamental limitations were overcome by using non-covalent assembly to create therapeutics with a novel topology compared to that of antibodies. Nature provides many examples of topologically engineered quaternary structures that assemble spontaneously via non-covalent forces (6, 7). Described herein is a new approach using cross-dimerization mediated by the ACE2 collectrin-like domain (CLD) in concert with the Fc domain to create antibody-like molecules with new topologies that bind targets cooperatively.

### Example 33—Hexavalent, Bispecific Tetrahedral Antibodies Comprising Two Distinct Fabs that Specifically Bind CD3 and CD19

[2171] Tetrahedral antibodies incorporating anti-CD3 and anti-CD19 domains were designed, expressed, and evaluated for their ability to co-engage T cells and disease target cells, activate immune cellular signaling, and induce cytokine expression and secretion, for the treatment of cancer, inflammatory disease, autoimmune disease, and other disease. This series of bispecific constructs employ VH and VL regions from FMC59 or tafasitamab to engage CD9-expressing target cells, together with VH and VL regions from SP34 to engage T cells (Tables 84, 85). Several tetrahedral antibody configurations were employed (Table 86). In one configuration (proteins 3501, 3507, 3513, 3515, 3517, 3518, 3519, 3520), the anti-CD3 domain is placed in the third (D3) and fourth (D4) domains (bivalent), while the anti-CD19 domain is placed in the fifth (D5), sixth (D6), ninth (D9), and tenth (D10) domains (tetravalent). In another configuration (proteins 3502, 3508, 3514, 3516), the anti-CD3 domain is placed in the ninth (D9) and tenth (D10) domains (bivalent), while the anti-CD19 domain is placed in the third (D3), fourth (D4), fifth (D5), and sixth (D10) domains (tetravalent). In yet another configuration (proteins 3521, 3522, 3523, 3524), the anti-CD3 domain is placed in the fifth (D5) and six (D6) domains (bivalent), while the anti-CD19 domain is placed in the third (D3), fourth (D4), eleventh (D11), and twelfth (D12) domains (tetravalent). In a further configuration (proteins 3503, 3509), the anti-CD3 domain is placed in the third (D3) and fourth (D4) domains (bivalent), while the anti-CD19 domain is placed in the ninth (D9), and tenth (D10) domains (bivalent). In a still further configuration (3504, 3510), the anti-CD3 domain is placed in the ninth (D9) and tenth (D10) domains (bivalent), while the anti-CD19 domain is placed in the third (D3) and fourth (D4) domains (bivalent). To optimize correct VH/VL pairing and to minimize VH/VL mispairing, V region exchange is combined with charge pairs to ensure correct pairing of heavy and light chain V regions. Additionally, to facilitate purification of the correctly paired H1/H2 heterodimer by sequential Protein A and lambda light chain affinity chromatography, one of the H1 or H2 chains incorporates the H435R/Y436F substitution, preventing protein A binding, and is designed to specifically pair with a lambda light chain, thus permitting lambda affinity resin binding. The other of the H1 or H2 chains retains the H435/Y436 wild-type sequence, allowing protein A binding, and is designed to specifically pair with a kappa light chain, thus preventing lambda affinity resin binding. Proteins are then evaluated for their structural bispecificity by intact mass spectrometry as described in Example 18, and for their functional bispecificity using a variety of in vitro binding assays, cytotoxicity assays, and cytokine induction and release assays, and in vivo cancer, inflammatory disease, autoimmune disease, and other efficacy models, known to one skilled in the art.

TABLE 84

| Protein ID | H1 Chain | H2 Chain | L1 Chain | L2 Chain | Fc Chain |
|---|---|---|---|---|---|
| 35-01 | SEQ ID NO: 7848 | SEQ ID NO: 7849 | SEQ ID NO: 4819 | SEQ ID NO: 699 | |
| 35-02 | SEQ ID NO: 7850 | SEQ ID NO: 7849 | SEQ ID NO: 4819 | SEQ ID NO: 699 | |
| 35-03 | SEQ ID NO: 7848 | | SEQ ID NO: 4819 | SEQ ID NO: 699 | SEQ ID NO: 7851 |
| 35-04 | SEQ ID NO: 7850 | | SEQ ID NO: 4819 | SEQ ID NO: 699 | SEQ ID NO: 7851 |
| 35-05 | SEQ ID NO: 7852 | SEQ ID NO: 7849 | SEQ ID NO: 4819 | SEQ ID NO: 699 | |
| 35-06 | SEQ ID NO: 7853 | SEQ ID NO: 7849 | SEQ ID NO: 4819 | SEQ ID NO: 699 | |
| 35-07 | SEQ ID NO: 7854 | SEQ ID NO: 7855 | SEQ ID NO: 7868 | SEQ ID NO: 699 | |
| 35-08 | SEQ ID NO: 7856 | SEQ ID NO: 7855 | SEQ ID NO: 7868 | SEQ ID NO: 699 | |
| 35-09 | SEQ ID NO: 7854 | | SEQ ID NO: 7868 | SEQ ID NO: 699 | SEQ ID NO: 7851 |
| 35-10 | SEQ ID NO: 7856 | | SEQ ID NO: 7868 | SEQ ID NO: 699 | SEQ ID NO: 7851 |
| 35-11 | SEQ ID NO: 7852 | SEQ ID NO: 7855 | SEQ ID NO: 7868 | SEQ ID NO: 699 | |
| 35-12 | SEQ ID NO: 7857 | SEQ ID NO: 7855 | SEQ ID NO: 7868 | SEQ ID NO: 699 | |
| 35-13 | SEQ ID NO: 7858 | SEQ ID NO: 7859 | SEQ ID NO: 4819 | SEQ ID NO: 699 | |
| 35-14 | SEQ ID NO: 7860 | SEQ ID NO: 7859 | SEQ ID NO: 4819 | SEQ ID NO: 699 | |
| 35-15 | SEQ ID NO: 7861 | SEQ ID NO: 7862 | SEQ ID NO: 7868 | SEQ ID NO: 699 | |
| 35-16 | SEQ ID NO: 7863 | SEQ ID NO: 7862 | SEQ ID NO: 7868 | SEQ ID NO: 699 | |
| 35-17 | SEQ ID NO: 7858 | SEQ ID NO: 7859 | SEQ ID NO: 4819 | SEQ ID NO: 7869 | |
| 35-18 | SEQ ID NO: 7861 | SEQ ID NO: 7862 | SEQ ID NO: 7868 | SEQ ID NO: 7869 | |
| 35-19 | SEQ ID NO: 7858 | SEQ ID NO: 7859 | SEQ ID NO: 4819 | SEQ ID NO: 7870 | |
| 35-20 | SEQ ID NO: 7861 | SEQ ID NO: 7862 | SEQ ID NO: 7868 | SEQ ID NO: 7870 | |
| 35-21 | SEQ ID NO: 7864 | SEQ ID NO: 7865 | SEQ ID NO: 4819 | SEQ ID NO: 7869 | |
| 35-22 | SEQ ID NO: 7866 | SEQ ID NO: 7867 | SEQ ID NO: 7868 | SEQ ID NO: 7869 | |
| 35-23 | SEQ ID NO: 7864 | SEQ ID NO: 7865 | SEQ ID NO: 4819 | SEQ ID NO: 7870 | |
| 35-24 | SEQ ID NO: 7866 | SEQ ID NO: 7867 | SEQ ID NO: 7868 | SEQ ID NO: 7870 | |

TABLE 85

| Protein ID | D1-Fc | D5-Fab | D10-Fab | D4-Fab | D3-Fab | D9-Fab | D6-Fab | D2-Fc |
|---|---|---|---|---|---|---|---|---|
| 35-01 | L234A/L235A/G236R | FMC59 | FMC59 | SP34 | SP34 | FMC59 | FMC59 | L234A/L235A/G236R |
| 35-02 | L234A/L235A/G236R | FMC59 | SP34 | FMC59 | FMC59 | SP34 | FMC59 | L234A/L235A/G236R |
| 35-03 | L234A/L235A/G236R | | FMC59 | SP34 | SP34 | FMC59 | | L234A/L235A/G236R |
| 35-04 | L234A/L235A/G236R | | SP34 | FMC59 | FMC59 | SP34 | | L234A/L235A/G236R |
| 35-05 | L234A/L235A/G236R | FMC59 | | SP34 | SP34 | | FMC59 | L234A/L235A/G236R |
| 35-06 | L234A/L235A/G236R | FMC59 | | | SP34 | FMC59 | | L234A/L235A/G236R |
| 35-07 | L234A/L235A/G236R | tafasitamab | tafasitamab | SP34 | SP34 | tafasitamab | tafasitamab | L234A/L235A/G236R |
| 35-08 | L234A/L235A/G236R | tafasitamab | SP34 | tafasitamab | tafasitamab | SP34 | tafasitamab | L234A/L235A/G236R |
| 35-09 | L234A/L235A/G236R | | tafasitamab | SP34 | SP34 | tafasitamab | | L234A/L235A/G236R |
| 35-10 | L234A/L235A/G236R | | SP34 | tafasitamab | tafasitamab | SP34 | | L234A/L235A/G236R |
| 35-11 | L234A/L235A/G236R | tafasitamab | | SP34 | SP34 | | tafasitamab | L234A/L235A/G236R |
| 35-12 | L234A/L235A/G236R | tafasitamab | | | SP34 | tafasitamab | | L234A/L235A/G236R |
| 35-13 | L234S/L235T/G236R | FMC59 | FMC59 | SP34 | SP34 | FMC59 | FMC59 | L234S/L235T/G236R |
| 35-14 | L234S/L235T/G236R | FMC59 | SP34 | FMC59 | FMC59 | SP34 | FMC59 | L234S/L235T/G236R |
| 35-15 | L234S/L235T/G236R | tafasitamab | tafasitamab | SP34 | SP34 | tafasitamab | tafasitamab | L234S/L235T/G236R |
| 35-16 | L234S/L235T/G236R | tafasitamab | SP34 | tafasitamab | tafasitamab | SP34 | tafasitamab | L234S/L235T/G236R |
| 35-17 | L234S/L235T/G236R | FMC59 | FMC59 | SP34 | SP34 | FMC59 | FMC59 | L234S/L235T/G236R |
| 35-18 | L234S/L235T/G236R | tafasitamab | tafasitamab | SP34 | SP34 | tafasitamab | tafasitamab | L234S/L235T/G236R |
| 35-19 | L234S/L235T/G236R | FMC59 | FMC59 | SP34 | SP34 | FMC59 | FMC59 | L234S/L235T/G236R |
| 35-20 | L234S/L235T/G236R | tafasitamab | tafasitamab | SP34 | SP34 | tafasitamab | tafasitamab | L234S/L235T/G236R |
| Protein ID | D1-Fc | D11-Fab | D5-Fab | D4-Fab | D3-Fab | D12-Fab | D6-Fab | D2-Fc |
| 35-21 | L234S/L235T/G236R | FMC59 | SP34 | FMC59 | FMC59 | SP34 | FMC59 | L234S/L235T/G236R |
| 35-22 | L234S/L235T/G236R | tafasitamab | SP34 | tafasitamab | tafasitamab | SP34 | tafasitamab | L234S/L235T/G236R |
| 35-23 | L234S/L235T/G236R | FMC59 | SP34 | FMC59 | FMC59 | SP34 | FMC59 | L234S/L235T/G236R |
| 35-24 | L234S/L235T/G236R | tafasitamab | SP34 | tafasitamab | tafasitamab | SP34 | tafasitamab | L234S/L235T/G236R |

TABLE 86

| Protein | | D1-Fc | | | | | | | D2-Fc |
|---|---|---|---|---|---|---|---|---|---|
| ID | Protein Type | Specificity | D5-Fab | D10-Fab | D4-Fab | D3-Fab | D9-Fab | D6-Fab | Specificity |
| 35-01 | Tetrahedral | FcgR silent | CD19 | CD19 | CD3 | CD3 | CD19 | CD19 | FcgR silent |
| 35-02 | Tetrahedral | FcgR silent | CD19 | CD3 | CD19 | CD19 | CD3 | CD19 | FcgR silent |
| 35-03 | Tetrahedral | FcgR silent | | CD19 | CD3 | CD3 | CD19 | | FcgR silent |
| 35-04 | Tetrahedral | FcgR silent | | CD3 | CD19 | CD19 | CD3 | | FcgR silent |
| 35-05 | Tetrahedral | FcgR silent | CD19 | | CD3 | CD3 | | CD19 | FcgR silent |
| 35-06 | 2+1 antibody | FcgR silent | CD19 | | | CD3 | CD19 | | FcgR silent |
| 35-07 | Tetrahedral | FcgR silent | CD19 | CD19 | CD3 | CD3 | CD19 | CD19 | FcgR silent |
| 35-08 | Tetrahedral | FcgR silent | CD19 | CD3 | CD19 | CD19 | CD3 | CD19 | FcgR silent |
| 35-09 | Tetrahedral | FcgR silent | | CD19 | CD3 | CD3 | CD19 | | FcgR silent |
| 35-10 | Tetrahedra | FcgR silent | | CD3 | CD19 | CD19 | CD3 | | FcgR silent |
| 35-11 | Tetrahedral | FcgR silent | CD19 | | CD3 | CD3 | | CD19 | FcgR silent |
| 35-12 | 2+1 antibody | FcgR silent | CD19 | | | CD3 | CD19 | | FcgR silent |
| 35-13 | Tetrahedral | FcgR silent | CD19 | CD19 | CD3 | CD3 | CD19 | CD19 | FcgR silent |
| 35-14 | Tetrahedral | FcgR silent | CD19 | CD3 | CD19 | CD19 | CD3 | CD19 | FcgR silent |
| 35-15 | Tetrahedral | FcgR silent | CD19 | CD19 | CD3 | CD3 | CD19 | CD19 | FcgR silent |
| 35-16 | Tetrahedral | FcgR silent | CD19 | CD3 | CD19 | CD19 | CD3 | CD19 | FcgR silent |
| 35-17 | Tetrahedral | FcgR silent | CD19 | CD19 | CD3 | CD3 | CD19 | CD19 | FcgR silent |
| 35-18 | Tetrahedral | FcgR silent | CD19 | CD19 | CD3 | CD3 | CD19 | CD19 | FcgR silent |
| 35-19 | Tetrahedral | FcgR silent | CD19 | CD19 | CD3 | CD3 | CD19 | CD19 | FcgR silent |
| 35-20 | Tetrahedral | FcgR silent | CD19 | CD19 | CD3 | CD3 | CD19 | CD19 | FcgR silent |
| Protein | | | | | | | | | |
| ID | | D1-Fc | D11-Fab | D5-Fab | D4-Fab | D3-Fab | D6-Fab | D12-Fab | D2-Fc |
| 35-21 | Tetrahedral | FcgR silent | CD19 | CD3 | CD19 | CD19 | CD3 | CD19 | FcgR silent |
| 35-22 | Tetrahedral | FcgR silent | CD19 | CD3 | CD19 | CD19 | CD3 | CD19 | FcgR silent |
| 35-23 | Tetrahedral | FcgR silent | CD19 | CD3 | CD19 | CD19 | CD3 | CD19 | FcgR silent |
| 35-24 | Tetrahedral | FcgR silent | CD19 | CD3 | CD19 | CD19 | CD3 | CD19 | FcgR silent |

TABLE 87

| | H1 chain | H2 chain | L1 chain | L2 chain |
|---|---|---|---|---|
| Protein ID | V-C region type | V-C region Type | V-C region Type | V-C region Type |
| 35-01 | VH-CH1-VL-CH1 | VH-CH1 | VL-Ck | VH-Ck |
| 35-02 | VL-CH1-VH-CH1 | VH-CH1 | VL-Ck | VH-Ck |
| 35-03 | VH-CH1-VL-CH1 | | VL-Ck | VH-Ck |
| 35-04 | VL-CH1-VH-CH1 | | VL-Ck | VH-Ck |
| 35-05 | VL-CH1 | VH-CH1 | VL-Ck | VH-Ck |
| 35-06 | VH-CH1-VL-CH1 | VH-CH1 | VL-Ck | VH-Ck |
| 35-07 | VH-CH1-VL-CH1 | VH-CH1 | VL-Ck | VH-Ck |
| 35-08 | VL-CH1-VH-CH1 | VH-CH1 | VL-Ck | VH-Ck |
| 35-09 | VH-CH1-VL-CH1 | | VL-Ck | VH-Ck |
| 35-10 | VL-CH1-VH-CH1 | | VL-Ck | VH-Ck |
| 35-11 | VL-CH1 | VH-CH1 | VL-Ck | VH-Ck |
| 35-12 | VH-CH1-VL-CH1 | VH-CHI | VL-Ck | VH-Ck |
| 35-13 | VH-CH1-VL-CH1 | VH-CH1 | VL-Ck | VH-Ck |
| 35-14 | VL-CH1-VH-CH1 | VH-CH1 | VL-Ck | VH-Ck |
| 35-15 | VH-CH1-VL-CH1 | VH-CH1 | VL-Ck | VH-Ck |
| 35-16 | VL-CH1-VH-CH1 | VH-CH1 | VL-Ck | VH-Ck |
| 35-17 | VH-CH1-VL-CH1 | VH-CH1 | VL-Ck | VH-Cλ |
| 35-18 | VH-CH1-VL-CH1 | VH-CH1 | VL-Ck | VH-Cλ |
| 35-19 | VH-CH1-VL-CH1 | VH-CH1 | VL-Ck | VH-Cλ |
| 35-20 | VH-CH1-VL-CH1 | VH-CH1 | VL-Ck | VH-Cλ |
| 35-21 | VH-CH1 | VH-CH1-VL-CH1 | VL-Ck | VH-Cλ |
| 35-22 | VH-CH1 | VH-CH1-VL-CH1 | VL-Ck | VH-Cλ |
| 35-23 | VH-CH1 | VH-CH1-VL-CH1 | VL-Ck | VH-Cλ |
| 35-24 | VH-CH1 | VH-CH1-VL-CH1 | VL-Ck | VH-Cλ |

### Example 34—Target-Specific T Cell Cytotoxicity and T Cell Activation Mediated by Hexavalent, Bispecific Tetrahedral Antibodies Comprising Two Distinct Fabs that Specifically Bind CD3 and CD19

[2172] CD3/CD19 bispecific tetrahedral antibodies were evaluated for their ability to direct T cell-mediated killing of CD19-expressing B cell targets, and their ability to activate T cells in the presence and absence of such B cell targets.

[2173] FIG. 98, Panel A shows the ability of the HB3501 CD3/CD19 bispecific tetrahedral antibody (Tables 84-87) and the HB3506 CD3/CD19 2+1 bispecific antibody to direct T cell-mediated cytotoxicity of Toledo cells, a cell line derived from a human diffuse large B-cell lymphoma (DLBCL) (Catalog No. CRL-2631) (ATCC, Rockville, Maryland).

[2174] FIG. 98, Panel B shows the ability of the HB3501 CD3/CD19 bispecific tetrahedral antibody and the HB3506 CD3/CD19 2+1 bispecific antibody to activate T cells in the presence of Toledo cells as measured by the induction of expression of the CD25 T cell surface antigen

[2175] FIG. 98, Panel C shows the ability of the HB3501 CD3/CD19 bispecific tetrahedral antibody and the HB3506 CD3/CD19 2+1 bispecific antibody to activate T cells in the presence of Toledo cells as measured by the induction of expression of the CD69 T cell surface antigen.

[2176] FIG. 98, Panel D shows the ability of the HB3506 CD3/CD19 2+1 bispecific antibody to activate T cells in the presence and absence of Toledo cells as measured by the induction of expression of the CD25 T cell surface antigen.

[2177] FIG. 98, Panel E shows the ability of the HB3501 CD3/CD19 bispecific tetrahedral antibody to activate T cells in the presence and absence of Toledo cells as measure by the induction of expression of the CD25 T cell surface antigen.

### Materials

[2178] Target cells: Toledo (ATCC #CRL-2631)
[2179] Effector cells: PBMC (BioIVT:CC00473, Lot: LS1117282C and AA05625, Lot: LS8849991)
[2180] T cell isolation: kit Human T cell isolation kit (Stemcell Technologies #17951)
[2181] LDH detection: CytoTox 96® Non-Radioactive Cytotoxicity Assay (Promega #1780)
[2182] Plate reader: SpectraMax® Paradigm® (Molecular Devices)
[2183] Flow cytometry: All antibodies from Biolegend CD3 FITC #317306, CD20 APC #400122, CD25 BV510 #356120, CD69 BV421 #310930,
[2184] Agilent Acea Novocyte Flow Cytometer 3005
[2185] Cell culture Medium: RPMI-1640 (Thermofisher #61870127) with 10% FBS (Thermofisher #10082147)
[2186] Assay plates: U-bottom Ultra Low Cluster 96 well plate (Costar #7007).

### Methods

[2187] Target cells. Toledo were aliquoted 20000 cell/well 40 ul/well in U-bottom Ultra Low Cluster 96 well plate (Costar #7007).

[2188] For the comparison of T cell activation with and without target cells half plate was with medium 40 ul/well instead of target cells.

[2189] Tested components were prepared in 10× concentration starting 50 nM in culture medium; 10 points serial dilution 1:5 was performed. Then 10 ul of the compounds were added to each well with target cells or medium.

[2190] T cells were isolated from donor PBMCs. 50 ul with 200000 cells were added to each well with target cells and compounds. E:T ratio was 10:1

[2191] Target cells with compounds and effector cells were incubated 24 h at 37 C 5% CO2.

[2192] After incubation 50 ul of supernatant transferred to the transparent flat-bottom plate.

[2193] LDH detected in supernatant with CytoTox 96® Non-Radioactive Cytotoxicity Assay #1780. To calculate relative cytotoxicity following controls were used: maximal release Toledo+Lysis buffer; minimal release Toledo+T cells

[2194] To assess T cell activation cells were combined from the triplicates and stained with the cocktail: CD3 FITC, CD20 PE, CD69 BV421, and CD25 BV510. Viability was detected with stain buffer (LIVE/DEAD NIR, 1:1000)

[2195] Results were acquired using Agilent Acea Novocyte Flow Cytometer 3005. Percentage of CD25+ cells and CD69+ out of CD3+ cells were plotted against the compound concentrations.

### REFERENCES

[2196] 1) Capon, D. J. et al. Designing CD4 immunoadhesins for AIDS therapy. Nature 337, 525-31 (1989). doi:10.1038/337525a0
[2197] 2) Chan, K. K. et al. Engineering human ACE2 to optimize binding to the spike protein of SARS coronavirus 2. Science 369, 1261-1265 (2020). doi:10.1126/science.abc0870
[2198] 3) Glasgow, A. et al. Engineered ACE2 receptor traps potently neutralize SARS-CoV-2. Proc Natl Acad Sci 117, 28046-28055 (2020). doi:10.1073/pnas.2016093117
[2199] 4) Li, Y. et al. SARS-CoV-2 and Three Related Coronaviruses Utilize Multiple ACE2 Orthologs and Are Potently Blocked by an Improved ACE2-Ig. J Virol 94, e01283-20 (2020). doi:10.1128/JVI.01283-20
[2200] 5) Linsky, T. W. et al. De novo design of potent and resilient hACE2 decoys to neutralize SARS-CoV-2. Science 370, 1208-1214 (2020). doi:10.1126/science.abe0075
[2201] 6) Levy, E. D. et al. 3D complex: a structural classification of protein complexes. PLoS Comput Biol. 2, e155 (2006). doi:10.1371/journal.pcbi.0020155
[2202] 7) Ahnert, S. E. et al. Principles of assembly reveal a periodic table of protein complexes. Science 350, aaa2245 (2015). doi:10.1126/science.aaa2245
[2203] 8) Poglitsch, M. et al. Recombinant Expression and Characterization of Human and Murine ACE2: Species-Specific Activation of the Alternative Renin-Angiotensin-System. Int J Hypertens 2012, 428950 (2012). doi:10.1155/2012/428950
[2204] 9) Schuster M., et al., inventors; Apeiron Biologics AG, assignee. Recombinant ACE2 Polypeptide Dimer, U.S. Pat. No. 8,586,319 B2 (2013).
[2205] 10) Yan, R. et al. Structural basis for the recognition of SARS-CoV-2 by full-length human ACE2. Science 367, 1444-1448 (2020). doi:10.1126/science.abb2762
[2206] 11) Troitskaya, L. et al. Mouse antibodies with activity against the SARS-CoV-2 D614G and B.1.351 variants. bioRxiv 2021.07.05.451203 [Preprint]. 7 Jul. 2021. https://doi.org/10.1101/2021.07.05.451203
[2207] 12) Chan, J. F. et al. Simulation of the Clinical and Pathological Manifestations of Coronavirus Disease 2019 (COVID-19) in a Golden Syrian Hamster Model: Implications for Disease Pathogenesis and Transmissibility. Clin Infect Dis 71, 2428-2446 (2020). doi:10.1093/cid/ciaa325
[2208] 13) Baum, A. et al. Antibody cocktail to SARS-CoV-2 spike protein prevents rapid mutational escape seen with individual antibodies. Science 369, 1014-1018 (2020). doi:10.1126/science.abd0831
[2209] 14) Jones, B. E. et al. The neutralizing antibody, LY-CoV555, protects against SARS-CoV-2 infection in nonhuman primates. Sci. Transl. Med. 13, eabf1906 (2021). doi:10.1126/scitranslmed.abf1906
[2210] 15) Shi, R. et al. A human neutralizing antibody targets the receptor-binding site of SARS-CoV-2. Nature 584, 120-124 (2020). doi:10.1038/s41586-020-2381-y
[2211] 16) Zost, S. J. et al. Potently neutralizing and protective human antibodies against SARS-CoV-2. Nature 584, 443-449 (2020). doi:10.1038/s41586-020-2548-6
[2212] 17) Pinto, D. et al. Cross-neutralization of SARS-CoV-2 by a human monoclonal SARS-CoV antibody. Nature 583, 290-295 (2020). doi:10.1038/s41586-020-2349-y
[2213] 18) Kim, C. et al. A therapeutic neutralizing antibody targeting receptor binding domain of SARS-CoV-2 spike protein. Nat Commun. 12, 288 (2021). doi:10.1038/s41467-020-20602-5
[2214] 19) Avery, L. B. et al. Utility of a human FcRn transgenic mouse model in drug discovery for early assessment and prediction of human pharmacokinetics of monoclonal antibodies. MAbs 8, 1064-78 (2016). doi:10.1080/19420862.2016.1193660
[2215] 20) Haschke, M. et al. Pharmacokinetics and pharmacodynamics of recombinant human angiotensin-converting enzyme 2 in healthy human subjects. Clin Pharmacokinet 52, 783-92 (2013). doi:10.1007/s40262-013-0072-7
[2216] 21) Smith, M. Rituximab (monoclonal anti-CD20 antibody): mechanisms of action and resistance. Oncogene 22, 7359-7368 (2003). doi:10.1038/sj.onc.1206939
[2217] 22) Spiegel, J. Y. et al. CAR T cells with dual targeting of CD19 and CD22 in adult patients with recurrent or refractory B cell malignancies: a phase 1 trial. Nat Med 27, 1419-1431 (2021). doi:10.1038/s41591-021-01436-0
[2218] 23) Reff, M. E. et al. Depletion of B cells in vivo by a chimeric mouse human monoclonal antibody to CD20. Blood 83, 435-45 (1994). doi:10.1182/blood.V83.2.435.435
[2219] 24) Zola, H. et al. Preparation and characterization of a chimeric CD19 monoclonal antibody. Immunol Cell Biol 69, 411-22 (1991). doi:10.1038/icb.1991.58
[2220] 25) Chan, A. C. and Carter, P. J. Therapeutic antibodies for autoimmunity and inflammation. Nature Reviews Immunology 10, 301-316 (2010). doi:10.1038/nri2761
[2221] 26) Shajahan, A. et al. Comprehensive characterization of N- and O-glycosylation of SARS-CoV-2 human receptor angiotensin converting enzyme 2. Glycobiology 31, 410-424 (2021). doi:10.1093/glycob/cwaa101 M

What is claimed is:

1. A tetrahedral antibody comprising a first, second, third, fourth, fifth, sixth domain, wherein:
a) each of the first and second domains are an Fc domain of an IgG antibody and comprise:
i) a first polypeptide chain comprising a first N-terminus and a first C-terminus of the domain,
ii) a second polypeptide chain comprising a second N-terminus and a second C-terminus of the domain, and
iii) either:
(1) L234A, L235A, and G236R mutations; or
(2) L234S, L235T, and G236R mutations;
b) the first domain and the second domain are joined to each other by a non-covalent linkage between a first collectrin-like domain polypeptide attached by a peptide bond or via a peptide linker to the first N-terminus of the first domain, and a second collectrin-like domain polypeptide attached by a peptide bond or via a peptide linker to the first N-terminus of the second domain;
c) the third domain is a Fab domain which is attached at its C-terminus by a peptide bond or via a peptide linker to the N-terminus of the first collectrin-like domain polypeptide;
d) the fourth domain is a Fab domain which is attached at its C-terminus by a peptide bond or via a peptide linker to the N-terminus of the second collectrin-like domain polypeptide;
e) the fifth domain is a Fab domain which is attached at its C-terminus by a peptide bond or via a peptide linker to the second N-terminus of the first domain;
f) the sixth domain is a Fab domain which is attached at its C-terminus by a peptide bond or via a peptide linker to the second N-terminus of the second domain; and
g) either:
i) the third and fourth domains comprise the V region of a Fab domain of SP34 or a variant thereof with at least 95% identity to said V region and the fifth and sixth domains comprise the V region of a Fab domain of FMC59 or tafasitamab or a variant thereof with at least 95% identity to said V region; or
ii) the third and fourth domains comprise the V region of a Fab domain of FMC59 or tafasitamab or a variant thereof with at least 95% identity to said V region and the fifth and sixth domains comprise the V region of a Fab domain of SP34 or a variant thereof with at least 95% identity to said V region.

2. The tetrahedral antibody of claim 1, further comprising a ninth and tenth domain, wherein:
a) the ninth domain is a Fab domain attached at its C-terminus by a peptide bond or via a peptide linker to an N-terminus of the third domain;
b) the tenth domain is a Fab domain which Fab domain is attached at its C-terminus by a peptide bond or via a peptide linker to an N-terminus of the fourth domain;
c) the ninth and tenth domains comprise either:
i) the V region of a Fab domain of FMC59 or tafasitamab or a variant thereof with at least 95% identity to said V region, or
ii) the V region of a Fab domain of SP34 or a variant thereof with at least 95% identity to said V region.

3. The tetrahedral antibody of claim 1, further comprising an eleventh and twelfth domain, wherein:
a) the eleventh domain is attached at its C-terminus by a peptide bond or via a peptide linker to an N-terminus of the fifth domain;
b) the twelfth domain is attached at its C-terminus by a peptide bond or via a peptide linker to an N-terminus of the sixth domain;
c) the eleventh and twelfth domains comprise either:
i) the V region of a Fab domain of FMC59 or tafasitamab or a variant thereof with at least 95% identity to said V region, or
ii) the V region of a Fab domain of SP34 or a variant thereof with at least 95% identity to said V region.

4. The tetrahedral antibody of any one of claims 2-3, wherein, of the Fab domains of the tetrahedral antibody, a total of 4 Fab domains comprise the V region of a Fab domain of FMC59 or tafasitamab or a variant thereof with at least 95% identity to said V region, and a total of 2 Fab domains comprise the V region of a Fab domain of SP34 or a variant thereof with at least 95% identity to said V region.

5. The tetrahedral antibody of any one of claims 1-4, wherein the V region of a Fab domain of FMC59 comprises amino acids 1-120 of the amino acid sequence set forth in SEQ ID NO:4777 in a first polypeptide chain and amino acids 1-107 of the amino acid sequence set forth in SEQ ID NO:4821 in a second polypeptide chain, preferably wherein each V region of the Fab domains of FMC59 each comprise complementarity determining region (CDR) sequences set forth in amino acids 26-35, 50-65, and 98-109 of SEQ ID NO: 4777 in a first polypeptide chain of the domain and complementarity determining region (CDR) sequences set forth in amino acids 24-34, 50-56, and 89-97 of SEQ ID NO:4821 in a second polypeptide chain of the domain.

6. The tetrahedral antibody of claim 1, which is formed by four different types of polypeptide chains denoted L1, H1, L2, and H2, wherein:
a) the C-terminal portion of the H1 and H2 chains pair with one another to form each of the first and second domains;
b) the N-terminal portion of the H1 chain pairs with the L1 or L2 chains to form each of the third and fourth domains;
c) the N-terminal portion of the H2 chain pairs with the other of the L1 or L2 chains to form each of the fifth and sixth domains;
d) the H1 chain contains the collectrin-like domain polypeptide between the portion of the H1 chain that pairs with the H2 chain and the portion that pairs with the L1 or L2 chain; and
e) preferably one of the H1 or H2 chains comprises a H435R/Y436F substitution and is designed to specifically pair with a lambda light chain and the other of the H1 or H2 chains comprises a H435/Y436 wild-type sequence and is designed to specifically pair with a kappa light chain.

7. The tetrahedral antibody of claim 6, wherein:
a) the L1 chain comprises the amino acid sequence set forth in SEQ ID NO: 4819, the H1 chain comprises the amino acid sequence set forth in SEQ ID NO: 7852, the L2 chain comprises the amino acid sequence set forth in SEQ ID NO: 699, and the H2 chain comprises the amino acid sequence set forth in SEQ ID NO: 7849; or
b) the L1 chain comprises the amino acid sequence set forth in SEQ ID NO: 7868, the H1 chain comprises the amino acid sequence set forth in SEQ ID NO: 7852, the L2 chain comprises the amino acid sequence set forth in SEQ ID NO: 699, and the H2 chain comprises the amino acid sequence set forth in SEQ ID NO: 7855.

8. The tetrahedral antibody of claim 2, which is formed by four different types of polypeptide chains denoted L1, H1, L2, and H2, wherein:
a) the C-terminal portion of the H1 and H2 chains pair with one another to form each of the first and second domains;
b) the N-terminal portion of the H1 chain pairs with the L1 or L2 chains to form each of the ninth, and tenth domains,
c) the portion of the H1 chain between (i) the N-terminal portion of the H1 chain that pairs with the L1 or L2 chains to form each of the ninth, and tenth domains, and (ii) the portion of the H1 chain containing the collectrin-like domain, pairs with the other of the L1 or L2 chains to form each of the third and fourth domains;
d) the N-terminal portion of the H2 chain pairs with the L2 chains to form each of the fifth and sixth domains;
e) the H1 chain contains the collectrin-like domain polypeptide between the portion of the H1 chain that pairs with the H2 chain and the portion that pairs with the L1 or L2 chains; and
f) preferably one of the H1 or H2 chains comprises a H435R/Y436F substitution and is designed to specifically pair with a lambda light chain and the other of the H1 or H2 chains comprises a H435/Y436 wild-type sequence and is designed to specifically pair with a kappa light chain.

9. The tetrahedral antibody of claim 8, wherein:
a) the L1 chain comprises the amino acid sequence set forth in SEQ ID NO: 4819, the H1 chain comprises the amino acid sequence set forth in SEQ ID NO: 7848, the L2 chain comprises the amino acid sequence set forth in SEQ ID NO: 699, and the H2 chain comprises the amino acid sequence set forth in SEQ ID NO: 7849;
b) the L1 chain comprises the amino acid sequence set forth in SEQ ID NO: 4819, the H1 chain comprises the amino acid sequence set forth in SEQ ID NO: 7850, the L2 chain comprises the amino acid sequence set forth in SEQ ID NO: 699, and the H2 chain comprises the amino acid sequence set forth in SEQ ID NO: 7849;
c) the L1 chain comprises the amino acid sequence set forth in SEQ ID NO: 7868, the H1 chain comprises the amino acid sequence set forth in SEQ ID NO: 7854, the L2 chain comprises the amino acid sequence set forth in SEQ ID NO: 699, and the H2 chain comprises the amino acid sequence set forth in SEQ ID NO: 7855;
d) the L1 chain comprises the amino acid sequence set forth in SEQ ID NO: 7868, the H1 chain comprises the amino acid sequence set forth in SEQ ID NO: 7856, the L2 chain comprises the amino acid sequence set forth in SEQ ID NO: 699, and the H2 chain comprises the amino acid sequence set forth in SEQ ID NO: 7855;
e) the L1 chain comprises the amino acid sequence set forth in SEQ ID NO: 4819, the H1 chain comprises the amino acid sequence set forth in SEQ ID NO: 7858, the L2 chain comprises the amino acid sequence set forth in SEQ ID NO: 699, and the H2 chain comprises the amino acid sequence set forth in SEQ ID NO: 7859;
f) the L1 chain comprises the amino acid sequence set forth in SEQ ID NO: 4819, the H1 chain comprises the amino acid sequence set forth in SEQ ID NO: 7860, the L2 chain comprises the amino acid sequence set forth in SEQ ID NO: 699, and the H2 chain comprises the amino acid sequence set forth in SEQ ID NO: 7859;
g) the L1 chain comprises the amino acid sequence set forth in SEQ ID NO: 7868, the H1 chain comprises the amino acid sequence set forth in SEQ ID NO: 7861, the L2 chain comprises the amino acid sequence set forth in SEQ ID NO: 699, and the H2 chain comprises the amino acid sequence set forth in SEQ ID NO: 7862;
h) the L1 chain comprises the amino acid sequence set forth in SEQ ID NO: 7868, the H1 chain comprises the amino acid sequence set forth in SEQ ID NO: 7863, the L2 chain comprises the amino acid sequence set forth in SEQ ID NO: 699, and the H2 chain comprises the amino acid sequence set forth in SEQ ID NO: 7862;
i) the L1 chain comprises the amino acid sequence set forth in SEQ ID NO: 4819, the H1 chain comprises the amino acid sequence set forth in SEQ ID NO: 7858, the L2 chain comprises the amino acid sequence set forth in SEQ ID NO: 7869, and the H2 chain comprises the amino acid sequence set forth in SEQ ID NO: 7859;
j) the L1 chain comprises the amino acid sequence set forth in SEQ ID NO: 7868, the H1 chain comprises the amino acid sequence set forth in SEQ ID NO: 7861, the L2 chain comprises the amino acid sequence set forth in SEQ ID NO: 7869, and the H2 chain comprises the amino acid sequence set forth in SEQ ID NO: 7862;
k) the L1 chain comprises the amino acid sequence set forth in SEQ ID NO: 4819, the H1 chain comprises the amino acid sequence set forth in SEQ ID NO: 7858, the L2 chain comprises the amino acid sequence set forth in SEQ ID NO: 7870, and the H2 chain comprises the amino acid sequence set forth in SEQ ID NO: 7859; or
l) the L1 chain comprises the amino acid sequence set forth in SEQ ID NO: 7868, the H1 chain comprises the amino acid sequence set forth in SEQ ID NO: 7861, the L2 chain comprises the amino acid sequence set forth in SEQ ID NO: 7870, and the H2 chain comprises the amino acid sequence set forth in SEQ ID NO: 7862.

10. The tetrahedral antibody of claim 3, which is formed by four different types of polypeptide chains denoted L1, H1, L2, and H2, wherein:
a) the C-terminal portion of the H1 and H2 chains pair with one another to form each of the first and second domains;
b) the N-terminal portion of the H1 chain pairs with the L1 or L2 chains to form each of the third and fourth domains;
c) the N-terminal portion of the H2 chain pairs with the L1 or L2 chains to form each of the eleventh and twelfth domains;
d) the portion of the H2 chain between (i) the N-terminal portion of the H2 chain that pairs with the L1 or L2 chain to form each of the eleventh and twelfth domains, and (ii) the portion of the H2 chain that pairs with the H1 chain to form the first and second domains, pairs with the other of the L1 or L2 chains to form each of the fifth and sixth domains;
e) the H1 chain contains the collectrin-like domain polypeptide between the portion of the H1 chain that pairs with the H2 chain and the portion that pairs with the L1 or L2 chains; and
f) preferably one of the H1 or H2 chains comprises a H435R/Y436F substitution and is designed to specifically pair with a lambda light chain and the other of the H1 or H2 chains comprises a H435/Y436 wild-type sequence and is designed to specifically pair with a kappa light chain.

11. The tetrahedral antibody of claim 10, wherein:
a) the L1 chain comprises the amino acid sequence set forth in SEQ ID NO: 4819, the H1 chain comprises the amino acid sequence set forth in SEQ ID NO: 7864, the L2 chain comprises the amino acid sequence set forth in SEQ ID NO: 7869, and the H2 chain comprises the amino acid sequence set forth in SEQ ID NO: 7865;
b) the L1 chain comprises the amino acid sequence set forth in SEQ ID NO: 7868, the H1 chain comprises the amino acid sequence set forth in SEQ ID NO: 7866, the L2 chain comprises the amino acid sequence set forth in SEQ ID NO: 7869, and the H2 chain comprises the amino acid sequence set forth in SEQ ID NO: 7867;
c) the L1 chain comprises the amino acid sequence set forth in SEQ ID NO: 4819, the H1 chain comprises the amino acid sequence set forth in SEQ ID NO: 7864, the L2 chain comprises the amino acid sequence set forth in SEQ ID NO: 7870, and the H2 chain comprises the amino acid sequence set forth in SEQ ID NO: 7865; or
d) the L1 chain comprises the amino acid sequence set forth in SEQ ID NO: 7868, the H1 chain comprises the amino acid sequence set forth in SEQ ID NO: 7866, the L2 chain comprises the amino acid sequence set forth in SEQ ID NO: 7870, and the H2 chain comprises the amino acid sequence set forth in SEQ ID NO: 7867.

12. A tetrahedral antibody comprising a first, second, third, fourth, ninth, and tenth domain, wherein:
a) each of the first and second domains are an Fc domain of an IgG antibody and comprise:
i) a first polypeptide chain comprising a first N-terminus and a first C-terminus of the domain,
ii) a second polypeptide chain comprising a second N-terminus and a second C-terminus of the domain, and
iii) either:
(1) L234A, L235A, and G236R mutations; or
(2) L234S, L235T, and G236R mutations;
b) the first domain and the second domain are joined to each other by a non-covalent linkage between a first collectrin-like domain polypeptide attached by a peptide bond or via a peptide linker to the first N-terminus of the first domain, and a second collectrin-like domain polypeptide attached by a peptide bond or via a peptide linker to the first N-terminus of the second domain;
c) the third domain is a Fab domain which is attached at its C-terminus by a peptide bond or via a peptide linker to the N-terminus of the first collectrin-like domain polypeptide;
d) the fourth domain is a Fab domain which is attached at its C-terminus by a peptide bond or via a peptide linker to the N-terminus of the second collectrin-like domain polypeptide;
e) the ninth domain is a Fab domain attached at its C-terminus by a peptide bond or via a peptide linker to an N-terminus of the third domain;
f) the tenth domain is a Fab domain which Fab domain is attached at its C-terminus by a peptide bond or via a peptide linker to an N-terminus of the fourth domain;
g) either:
i) the third and fourth domains comprise the V region of a Fab domain of SP34 or a variant thereof with at least 95% identity to said V region and the ninth and tenth domains comprise the V region of a Fab domain of FMC59 or tafasitamab or a variant thereof with at least 95% identity to said V region; or
ii) the third and fourth domains comprise the V region of a Fab domain of FMC59 or tafasitamab or a variant thereof with at least 95% identity to said V region and the ninth and tenth domains comprise the V region of a Fab domain of SP34 or a variant thereof with at least 95% identity to said V region.

13. The tetrahedral antibody of claim 12, wherein the V region of a Fab domain of FMC59 comprises amino acids 1-120 of the amino acid sequence set forth in SEQ ID NO:4777 in a first polypeptide chain and amino acids 1-107 of the amino acid sequence set forth in SEQ ID NO:4821 in a second polypeptide chain.

14. The tetrahedral antibody of claim 13, wherein each V region of the Fab domains of FMC59 each comprise complementarity determining region (CDR) sequences set forth in amino acids 26-35, 50-65, and 98-109 of SEQ ID NO: 4777 in a first polypeptide chain of the domain and complementarity determining region (CDR) sequences set forth in amino acids 24-34, 50-56, and 89-97 of SEQ ID NO:4821 in a second polypeptide chain of the domain.

15. The tetrahedral antibody of claim 12, which is formed by four different types of polypeptide chains denoted L1, H1, L2, and H2, wherein:
a) the C-terminal portion of the H1 and H2 chains pair with one another to form each of the first and second domains;
b) the N-terminal portion of the H1 chain pairs with the L1 or L2 chains to form each of the ninth, and tenth domains,
c) the portion of the H1 chain between (i) the N-terminal portion of the H1 chain that pairs with the L1 or L2 chains to form each of the ninth, and tenth domains, and (ii) the portion of the H1 chain containing the collectrin-like domain, pairs with the other of the L1 or L2 chains to form each of the third and fourth domains; and
d) the H1 chain contains the collectrin-like domain polypeptide between the portion of the H1 chain that pairs with the H2 chain and the portion that pairs with the L1 or L2 chains.

16. The tetrahedral antibody of claim 15, wherein:
a) the L1 chain comprises the amino acid sequence set forth in SEQ ID NO: 4819, the H1 chain comprises the amino acid sequence set forth in SEQ ID NO: 7848, the L2 chain comprises the amino acid sequence set forth in SEQ ID NO: 699, and the H2 chain comprises the amino acid sequence set forth in SEQ ID NO: 7851;
b) the L1 chain comprises the amino acid sequence set forth in SEQ ID NO: 4819, the H1 chain comprises the amino acid sequence set forth in SEQ ID NO: 7850, the L2 chain comprises the amino acid sequence set forth in SEQ ID NO: 699, and the H2 chain comprises the amino acid sequence set forth in SEQ ID NO: 7851;
c) the L1 chain comprises the amino acid sequence set forth in SEQ ID NO: 7868, the H1 chain comprises the amino acid sequence set forth in SEQ ID NO: 7864, the L2 chain comprises the amino acid sequence set forth in SEQ ID NO: 7870, and the H2 chain comprises the amino acid sequence set forth in SEQ ID NO: 7851; or
d) the L1 chain comprises the amino acid sequence set forth in SEQ ID NO: 7868, the H1 chain comprises the amino acid sequence set forth in SEQ ID NO: 7866, the L2 chain comprises the amino acid sequence set forth in SEQ ID NO: 7870, and the H2 chain comprises the amino acid sequence set forth in SEQ ID NO: 7851.

17. One or more vectors comprising polynucleotides which encode polypeptides comprising the four different types of polypeptide chains of any one of claims 7, 9, 11, or 16, wherein each polynucleotide is operably linked to a promoter which directs expression of the polynucleotide in a host cell.

18. A host cell comprising the one or more vectors of claim 17.

19. A method of producing a tetrahedral antibody, the method comprising recombinantly expressing the four different types of polypeptide chains of claim 7, 9, 11, or 16 in a host cell.

20. A pharmaceutical composition comprising the tetrahedral antibody of any one of claims 1-16 and one or more pharmaceutically acceptable excipients.

21. A method of treating cancer, inflammatory disease, autoimmune disease in a subject, the method comprising administering to the subject a therapeutically effective amount of the pharmaceutical composition of claim 20.

22. A method of treating B cell disease in a subject, the method comprising administering to the subject a therapeutically effective amount of the pharmaceutical composition of claim 20.

The application's sequence listing, which the Patent Office published only in electronic form, follows.

SEQUENCE LISTING (7870 sequences)

SEQ ID NO: 1 - protein, 213 aa, synthetic construct
  REGION 1..213: note = Rc6; L chain: R1
QIVLSQSPAILSASPGEKVTMTCRASSSVSYIHWFQQKPGSSPKPWIYATSNLASGVPVRFSGSGSGTSYSLTISRVEAEDAATYYCQQWTSNPPTFGGGTKLEIKRTVAAPSVFIFPPSDEQLKSGTASVVCLLNNFYPREAKVQWKVDNALQSGNSQESVTEQDSKDSTYSLSSTLTLSKADYEKHKVYACEVTHQGLSSPVTKSFNRGEC

SEQ ID NO: 2 - protein, 451 aa, synthetic construct
  REGION 1..451: note = Rc6; H chain: Rh
QVQLQQPGAELVKPGASVKMSCKASGYTFTSYNMHWVKQTPGRGLEWIGAIYPGNGDTSYNQKFKGKATLTADKSSSTAYMQLSSLTSEDSAVYYCARSTYYGGDWYFNVWGAGTTVTVSAASTKGPSVFPLAPSSKSTSGGTAALGCLVKDYFPEPVTVSWNSGALTSGVHTFPAVLQSSGLYSLSSVVTVPSSSLGTQTYICNVNHKPSNTKVDKKAEPKSCDKTHTCPPCPAPELLGGPSVFLFPPKPKDTLMISRTPEVTCVVVDVSHEDPEVKFNWYVDGVEVHNAKTKPREEQYNSTYRVVSVLTVLHQDWLNGKEYKCKVSNKALPAPIEKTISKAKGQPREPQVYTLPPSRDELTKNQVSLTCLVKGFYPSDIAVEWESNGQPENNYKTTPPVLDSDGSFFLYSKLTVDKSRWQQGNVFSCSVMHEALHNHYTQKSLSLSPGK

SEQ ID NO: 3 - protein, 222 aa, synthetic construct
  REGION 1..222: note = Rc6; Fc chain: Fc6CC
CPPCPAPELLGGPSVFLFPPKPKDTLMISRTPEVTCVVVDVSHEDPEVKFNWYVDGVEVHNAKTKPREEQYNSTYRVVSVLTVLHQDWLNGKEYKCKVSNKALPAPIEKTISKAKGQPREPQVYTLPPSRDELTKNQVSLTCLVKGFYPSDIAVEWESNGQPENNYKTTPPVLDSDGSFFLYSKLTVDKSRWQQGNVFSCSVMHEALHNHYTQKSLSLSPGK

SEQ ID NO: 4 - protein, 451 aa, synthetic construct
  REGION 1..451: note = Rc6HYRF; H chain: Rh-HYRF
QVQLQQPGAELVKPGASVKMSCKASGYTFTSYNMHWVKQTPGRGLEWIGAIYPGNGDTSYNQKFKGKATLTADKSSSTAYMQLSSLTSEDSAVYYCARSTYYGGDWYFNVWGAGTTVTVSAASTKGPSVFPLAPSSKSTSGGTAALGCLVKDYFPEPVTVSWNSGALTSGVHTFPAVLQSSGLYSLSSVVTVPSSSLGTQTYICNVNHKPSNTKVDKKAEPKSCDKTHTCPPCPAPELLGGPSVFLFPPKPKDTLMISRTPEVTCVVVDVSHEDPEVKFNWYVDGVEVHNAKTKPREEQYNSTYRVVSVLTVLHQDWLNGKEYKCKVSNKALPAPIEKTISKAKGQPREPQVYTLPPSRDELTKNQVSLTCLVKGFYPSDIAVEWESNGQPENNYKTTPPVLDSDGSFFLYSKLTVDKSRWQQGNVFSCSVMHEALHNRFTQKSLSLSPGK

SEQ ID NO: 5 - protein, 451 aa, synthetic construct; identical to SEQ ID NO: 4
  REGION 1..451: note = Rc60; H chain: Rh-knob

SEQ ID NO: 6 - protein, 222 aa, synthetic construct
  REGION 1..222: note = Rc60; Fc chain: Fc6CC-hole
CPPCPAPELLGGPSVFLFPPKPKDTLMISRTPEVTCVVVDVSHEDPEVKFNWYVDGVEVHNAKTKPREEQYNSTYRVVSVLTVLHQDWLNGKEYKCKVSNKALPAPIEKTISKAKGQPREPQVCTLPPSRDELTKNQVSLSCAVKGFYPSDIAVEWESNGQPENNYKTTPPVLDSDGSFFLVSKLTVDKSRWQQGNVFSCSVMHEALHNHYTQKSLSLSPGK

SEQ ID NO: 7 - protein, 451 aa, synthetic construct
  REGION 1..451: note = Rc66; H chain: Rh-B
QVQLQQPGAELVKPGASVKMSCKASGYTFTSYNMHWVKQTPGRGLEWIGAIYPGNGDTSYNQKFKGKATLTADKSSSTAYMQLSSLTSEDSAVYYCARSTYYGGDWYFNVWGAGTTVTVSAASTKGPSVFPLAPSSKSTSGGTAALGCLVKDYFPEPVTVSWNSGALTSGVHTFPAVLQSSGLYSLSSVVTVPSSSLGTQTYICNVNHKPSNTKVDKKAEPKSCDKTHTCPPCPAPELLGGPSVFLFPPKPKDTLMISRTPEVTCVVVDVSHEDPEVKFNWYVDGVEVHNAKTKPREEQYNSTYRVVSVLTVLHQDWLNGKEYKCKVSNKALPAPIEKTISKAKGQPREPQVYVLPPSRDELTKNQVSLLCLVKGFYPSDIAVEWESNGQPENNYLTWPPVLDSDGSFFLYSKLTVDKSRWQQGNVFSCSVMHEALHNHYTQKSLSLSPGK

SEQ ID NO: 8 - protein, 222 aa, synthetic construct
  REGION 1..222: note = Rc66; Fc chain: Fc6CC-A
CPPCPAPELLGGPSVFLFPPKPKDTLMISRTPEVTCVVVDVSHEDPEVKFNWYVDGVEVHNAKTKPREEQYNSTYRVVSVLTVLHQDWLNGKEYKCKVSNKALPAPIEKTISKAKGQPREPQVYVYPPSRDELTKNQVSLTCLVKGFYPSDIAVEWESNGQPENNYKTTPPVLDSDGSFALVSKLTVDKSRWQQGNVFSCSVMHEALHNHYTQKSLSLSPGK

SEQ ID NO: 9 - protein, 451 aa, synthetic construct
  REGION 1..451: note = Rc66SIDE; H chain: Rh-B/SIDE
QVQLQQPGAELVKPGASVKMSCKASGYTFTSYNMHWVKQTPGRGLEWIGAIYPGNGDTSYNQKFKGKATLTADKSSSTAYMQLSSLTSEDSAVYYCARSTYYGGDWYFNVWGAGTTVTVSAASTKGPSVFPLAPSSKSTSGGTAALGCLVKDYFPEPVTVSWNSGALTSGVHTFPAVLQSSGLYSLSSVVTVPSSSLGTQTYICNVNHKPSNTKVDKKAEPKSCDKTHTCPPCPAPELLGGPDVFLFPPKPKDTLMISRTPEVTCVVVDVSHEDPEVKFNWYVDGVEVHNAKTKPREEQYNSTYRVVSVLTVLHQDWLNGKEYKCKVSNKALPAPEEKTISKAKGQPREPQVYVLPPSRDELTKNQVSLLCLVKGFYPSDIAVEWESNGQPENNYLTWPPVLDSDGSFFLYSKLTVDKSRWQQGNVFSCSVMHEALHNHYTQKSLSLSPGK

SEQ ID NO: 10 - protein, 222 aa, synthetic construct
  REGION 1..222: note = Rc66SIDE; Fc chain: Fc6CC-A/SIDE
CPPCPAPELLGGPDVFLFPPKPKDTLMISRTPEVTCVVVDVSHEDPEVKFNWYVDGVEVHNAKTKPREEQYNSTYRVVSVLTVLHQDWLNGKEYKCKVSNKALPAPEEKTISKAKGQPREPQVYVYPPSRDELTKNQVSLTCLVKGFYPSDIAVEWESNGQPENNYKTTPPVLDSDGSFALVSKLTVDKSRWQQGNVFSCSVMHEALHNHYTQKSLSLSPGK

SEQ ID NO: 11 - protein, 451 aa, synthetic construct
  REGION 1..451: note = Rc66AAC9; H chain: Rh-B/AAC9
QVQLQQPGAELVKPGASVKMSCKASGYTFTSYNMHWVKQTPGRGLEWIGAIYPGNGDTSYNQKFKGKATLTADKSSSTAYMQLSSLTSEDSAVYYCARSTYYGGDWYFNVWGAGTTVTVSAASTKGPSVFPLAPSSKSTSGGTAALGCLVKDYFPEPVTVSWNSGALTSGVHTFPAVLQSSGLYSLSSVVTVPSSSLGTQTYICNVNHKPSNTKVDKKAEPKSCDKTHTCPPCPAPKRRGGPSVFLFPPKPKDTLMISRTPEVTCVVVDVSHEDPEVKFNWYVDGVEVHNAKTKPREEQYNSTYRVVSVLTVLHQDWLNGKEYKCKVSNKALPAPIEKTISKAKGQPREPQVYVLPPSRDELTKNQVSLLCLVKGFYPSDIAVEWESNGQPENNYLTWPPVLDSDGSFFLYSKLTVDKSRWQQGNVFSCSVMHEALHNHYTQKSLSLSPGK

SEQ ID NO: 12 - protein, 222 aa, synthetic construct
  REGION 1..222: note = Rc66AAC9; H chain: Rh-B/AAC9
CPPCPAPEDEGGPSVFLFPPKPKDTLMISRTPEVTCVVVDVSHEDPEVKFNWYVDGVEVHNAKTKPREEQYNSTYRVVSVLTVLHQDWLNGKEYKCKVSNKALPAPIEKTISKAKGQPREPQVYVYPPSRDELTKNQVSLTCLVKGFYPSDIAVEWESNGQPENNYKTTPPVLDSDGSFALVSKLTVDKSRWQQGNVFSCSVMHEALHNHYTQKSLSLSPGK

SEQ ID NO: 13 - protein, 684 aa, synthetic construct
  REGION 1..684: note = Rc66AAC9HA9; H chain: Rh-B/AAC9/HA9h
QVQLQQPGAELVKPGASVKMSCKASGYTFTSYNMHWVKQTPGRGLEWIGAIYPGNGDTSYNQKFKGKATLTADKSSSTAYMQLSSLTSEDSAVYYCARSTYYGGDWYFNVWGAGTTVTVSAASTKGPSVFPLAPSSKSTSGGTAALGCLVKDYFPEPVTVSWNSGALTSGVHTFPAVLQSSGLYSLSSVVTVPSSSLGTQTYICNVNHKPSNTKVDKKAEPKSCDKTHTCPPCPAPKRRGGPSVFLFPPKPKDTLMISRTPEVTCVVVDVSHEDPEVKFNWYVDGVEVHNAKTKPREEQYNSTYRVVSVLTVLHQDWLNGKEYKCKVSNKALPAPIEKTISKAKGQPREPQVYVLPPSRDELTKNQVSLLCLVKGFYPSDIAVEWESNGQPENNYLTWPPVLDSDGSFFLYSKLTVDKSRWQQGNVFSCSVMHEALHNHYTQKSLSLSPGKAAAGGGGSGGGGSEVQLQESGGGLVQPGDSLRLSCAASGFTFSNYWLGWIRQAPGKGPEWVGDIYPGGGYTNYNEKFKGRFTISADTSKNIAYLQVNSLRAEDTAVYYCARSASWYFDVWGQGTLVTVSSASTKGPSVFPLAPSSKSTSGGTAALGCLVKDYFPEPVTVSWNSGALTSGVHTFPAVLQSSGLYSLSSVVTVPSSSLGTQTYICNVNHKPSNTKVDKKVEPKSC

SEQ ID NO: 14 - protein, 452 aa, synthetic construct
  REGION 1..452: note = Rc66AAC9HA9; Fc chain: Fc6CC-A/AAC9/HA91
CPPCPAPEDEGGPSVFLFPPKPKDTLMISRTPEVTCVVVDVSHEDPEVKFNWYVDGVEVHNAKTKPREEQYNSTYRVVSVLTVLHQDWLNGKEYKCKVSNKALPAPIEKTISKAKGQPREPQVYVYPPSRDELTKNQVSLTCLVKGFYPSDIAVEWESNGQPENNYKTTPPVLDSDGSFALVSKLTVDKSRWQQGNVFSCSVMHEALHNHYTQKSLSLSPGKAAAGGGGSGGGGSDIELTQSPSSLSASVGDRVTITCRSNTGTVTTSNYASWYQQKPGKAPKGLIGHTNNRAPGVPSRFSGSLSGADATLTISSLQPEDLATYYCALWYNNHWVFGQGTKLEIKRTVAAPSVFIFPPSDEQLKSGTASVVCLLNNFYPREAKVQWKVDNALQSGNSQESVTEQDSKDSTYSLSSTLTLSKADYEKHKVYACEVTHQGLSSPVTKSFNRGEC

SEQ ID NO: 15 - protein, 455 aa, synthetic construct
  REGION 1..455: note = FcAAC9HA9; H chain: Fc6CC-B/AAC9/HA9h
CPPCPAPKRRGGPSVFLFPPKPKDTLMISRTPEVTCVVVDVSHEDPEVKFNWYVDGVEVHNAKTKPREEQYNSTYRVVSVLTVLHQDWLNGKEYKCKVSNKALPAPIEKTISKAKGQPREPQVYVLPPSRDELTKNQVSLLCLVKGFYPSDIAVEWESNGQPENNYLTWPPVLDSDGSFFLYSKLTVDKSRWQQGNVFSCSVMHEALHNHYTQKSLSLSPGKAAAGGGGSGGGGSEVQLQESGGGLVQPGDSLRLSCAASGFTFSNYWLGWIRQAPGKGPEWVGDIYPGGGYTNYNEKFKGRFTISADTSKNIAYLQVNSLRAEDTAVYYCARSASWYFDVWGQGTLVTVSSASTKGPSVFPLAPSSKSTSGGTAALGCLVKDYFPEPVTVSWNSGALTSGVHTFPAVLQSSGLYSLSSVVTVPSSSLGTQTYICNVNHKPSNTKVDKKVEPKSC

SEQ ID NO: 16 - protein, 217 aa, synthetic construct
  REGION 1..217: note = HA9c66AAC9; L chain: HA91
DIELTQSPSSLSASVGDRVTITCRSNTGTVTTSNYASWYQQKPGKAPKGLIGHTNNRAPGVPSRFSGSLSGADATLTISSLQPEDLATYYCALWYNNHWVFGQGTKLEIKRTVAAPSVFIFPPSDEQLKSGTASVVCLLNNFYPREAKVQWKVDNALQSGNSQESVTEQDSKDSTYSLSSTLTLSKADYEKHKVYACEVTHQGLSSPVTKSFNRGEC

SEQ ID NO: 17 - protein, 447 aa, synthetic construct
  REGION 1..447: note = HA9c66AAC9; H chain: HA9h-B/AAC9
EVQLQESGGGLVQPGDSLRLSCAASGFTFSNYWLGWIRQAPGKGPEWVGDIYPGGGYTNYNEKFKGRFTISADTSKNIAYLQVNSLRAEDTAVYYCARSASWYFDVWGQGTLVTVSSASTKGPSVFPLAPSSKSTSGGTAALGCLVKDYFPEPVTVSWNSGALTSGVHTFPAVLQSSGLYSLSSVVTVPSSSLGTQTYICNVNHKPSNTKVDKKVEPKSCDKTHTCPPCPAPKRRGGPSVFLFPPKPKDTLMISRTPEVTCVVVDVSHEDPEVKFNWYVDGVEVHNAKTKPREEQYNSTYRVVSVLTVLHQDWLNGKEYKCKVSNKALPAPIEKTISKAKGQPREPQVYVLPPSRDELTKNQVSLLCLVKGFYPSDIAVEWESNGQPENNYLTWPPVLDSDGSFFLYSKLTVDKSRWQQGNVFSCSVMHEALHNHYTQKSLSLSPGK

SEQ ID NO: 18 - protein, 213 aa, synthetic construct
  REGION 1..213: note = HRc66; L chain: HR-1
DIQMTQSPSSLSASVGDRVTITCRASSSVSYIHWYQQKPGKAPKPLIYATSNLASGVPSRFSGSGSGTDFTLTISSLQPEDFATYYCQQWTSNPPTFGQGTKVEIKRTVAAPSVFIFPPSDEQLKSGTASVVCLLNNFYPREAKVQWKVDNALQSGNSQESVTEQDSKDSTYSLSSTLTLSKADYEKHKVYACEVTHQGLSSPVTKSFNRGEC

SEQ ID NO: 19 - protein, 451 aa, synthetic construct
  REGION 1..451: note = HRc66; H chain: HRh-B
EVQLVESGGGLVQPGGSLRLSCAASGYTFTSYNMHWVRQAPGKGLEWVGAIYPGNGDTSYNQKFKGRFTISVDKSKNTLYLQMNSLRAEDTAVYYCARSTYYGGDWYFNVWGQGTLVTVSSASTKGPSVFPLAPSSKSTSGGTAALGCLVKDYFPEPVTVSWNSGALTSGVHTFPAVLQSSGLYSLSSVVTVPSSSLGTQTYICNVNHKPSNTKVDKKVEPKSCDKTHTCPPCPAPELLGGPSVFLFPPKPKDTLMISRTPEVTCVVVDVSHEDPEVKFNWYVDGVEVHNAKTKPREEQYNSTYRVVSVLTVLHQDWLNGKEYKCKVSNKALPAPIEKTISKAKGQPREPQVYVLPPSRDELTKNQVSLLCLVKGFYPSDIAVEWESNGQPENNYLTWPPVLDSDGSFFLYSKLTVDKSRWQQGNVFSCSVMHEALHNHYTQKSLSLSPGK

SEQ ID NO: 20 - protein, 218 aa, synthetic construct
  REGION 1..218: note = B19c66; L chain: B19l
DIQLTQSPASLAVSLGQRATISCKASQSVDYDGDSYLNWYQQIPGQPPKLLIYDASNLVSGIPPRFSGSGSGTDFTLNIHPVEKVDAATYHCQQSTEDPWTFGGGTKLEIKRTVAAPSVFIFPPSDEQLKSGTASVVCLLNNFYPREAKVQWKVDNALQSGNSQESVTEQDSKDSTYSLSSTLTLSKADYEKHKVYACEVTHQGLSSPVTKSFNRGEC

SEQ ID NO: 21 - protein, 454 aa, synthetic construct
  REGION 1..454: note = B19c66; H chain: B19h-B
QVQLQQSGAELVRPGSSVKISCKASGYAFSSYWMNWVKQRPGQGLEWIGQIWPGDGDTNYNGKFKGKATLTADESSSTAYMQLSSLASEDSAVYFCARRETTTVGRYYYAMDYWGQGTTVTVSSASTKGPSVFPLAPSSKSTSGGTAALGCLVKDYFPEPVTVSWNSGALTSGVHTFPAVLQSSGLYSLSSVVTVPSSSLGTQTYICNVNHKPSNTKVDKKVEPKSCDKTHTCPPCPAPELLGGPSVFLFPPKPKDTLMISRTPEVTCVVVDVSHEDPEVKFNWYVDGVEVHNAKTKPREEQYNSTYRVVSVLTVLHQDWLNGKEYKCKVSNKALPAPIEKTISKAKGQPREPQVYVLPPSRDELTKNQVSLLCLVKGFYPSDIAVEWESNGQPENNYLTWPPVLDSDGSFFLYSKLTVDKSRWQQGNVFSCSVMHEALHNHYTQKSLSLSPGK

SEQ ID NO: 22 - protein, 454 aa, synthetic construct
  REGION 1..454: note = B19c66AAC9; H chain: B19h-B/AAC9
QVQLQQSGAELVRPGSSVKISCKASGYAFSSYWMNWVKQRPGQGLEWIGQIWPGDGDTNYNGKFKGKATLTADESSSTAYMQLSSLASEDSAVYFCARRETTTVGRYYYAMDYWGQGTTVTVSSASTKGPSVFPLAPSSKSTSGGTAALGCLVKDYFPEPVTVSWNSGALTSGVHTFPAVLQSSGLYSLSSVVTVPSSSLGTQTYICNVNHKPSNTKVDKKVEPKSCDKTHTCPPCPAPKRRGGPSVFLFPPKPKDTLMISRTPEVTCVVVDVSHEDPEVKFNWYVDGVEVHNAKTKPREEQYNSTYRVVSVLTVLHQDWLNGKEYKCKVSNKALPAPIEKTISKAKGQPREPQVYVLPPSRDELTKNQVSLLCLVKGFYPSDIAVEWESNGQPENNYLTWPPVLDSDGSFFLYSKLTVDKSRWQQGNVFSCSVMHEALHNHYTQKSLSLSPGK

SEQ ID NO: 23 - protein, 733 aa, synthetic construct
  REGION 1..733: note = Blc6AAC9; scFv chain: BlscFvAAC9-B
DIQLTQSPASLAVSLGQRATISCKASQSVDYDGDSYLNWYQQIPGQPPKLLIYDASNLVSGIPPRFSGSGSGTDFTLNIHPVEKVDAATYHCQQSTEDPWTFGGGTKLEIKGGGGSGGGGSGGGGSQVQLQQSGAELVRPGSSVKISCKASGYAFSSYWMNWVKQRPGQGLEWIGQIWPGDGDTNYNGKFKGKATLTADESSSTAYMQLSSLASEDSAVYFCARRETTTVGRYYYAMDYWGQGTTVTVSSGGGGSDIKLQQSGAELARPGASVKMSCKTSGYTFTRYTMHWVKQRPGQGLEWIGYINPSRGYTNYNQKFKDKATLTTDKSSSTAYMQLSSLTSEDSAVYYCARYYDDHYCLDYWGQGTTLTVSSVEGGSGGSGGSGGSGGVDDIQLTQSPAIMSASPGEKVTMTCRASSSVSYMNWYQQKSGTSPKRWIYDTSKVASGVPYRFSGSGSGTSYSLTISSMEAEDAATYYCQQWSSNPLTFGAGTKLELKAAAEPKSSDKTHTCPPCPAPKRRGGPSVFLFPPKPKDTLMISRTPEVTCVVVDVSHEDPEVKFNWYVDGVEVHNAKTKPREEQYNSTYRVVSVLTVLHQDWLNGKEYKCKVSNKALPAPIEKTISKAKGQPREPQVYVLPPSRDELTKNQVSLLCLVKGFYPSDIAVEWESNGQPENNYLTWPPVLDSDGSFFLYSKLTVDKSRWQQGNVFSCSVMHEALHNHYTQKSLSLSPGK

SEQ ID NO: 24 - protein, 213 aa, synthetic construct
  REGION 1..213: note = Drc66; L chain: Dr1
SELTQDPAVSVALGQTVRITCSGDSLRSYYASWYQQKPGQAPVLVIYGANNRPSGIPDRFSGSSSGNTASLTITGAQAEDEADYYCNSADSSGNHVVFGGGTKLTVLGQPKAAPSVTLFPPSSEELQANKATLVCLISDFYPGAVTVAWKADSSPVKAGVETTTPSKQSNNKYAASSYLSLTPEQWKSHKSYSCQVTHEGSTVEKTVAPTECS

SEQ ID NO: 25 - protein, 451 aa, synthetic construct
  REGION 1..451: note = Drc66; H chain: Drh-B
EVQLVQSGGGVERPGGSLRLSCAASGFTFDDYAMSWVRQAPGKGLEWVSGINWQGGSTGYADSVKGRVTISRDNAKNSLYLQMNSLRAEDTAVYYCAKILGAGRGWYFDYWGKGTTVTVSSASTKGPSVFPLAPSSKSTSGGTAALGCLVKDYFPEPVTVSWNSGALTSGVHTFPAVLQSSGLYSLSSVVTVPSSSLGTQTYICNVNHKPSNTKVDKKVEPKSCDKTHTCPPCPAPELLGGPSVFLFPPKPKDTLMISRTPEVTCVVVDVSHEDPEVKFNWYVDGVEVHNAKTKPREEQYNSTYRVVSVLTVLHQDWLNGKEYKCKVSNKALPAPIEKTISKAKGQPREPQVYVLPPSRDELTKNQVSLLCLVKGFYPSDIAVEWESNGQPENNYLTWPPVLDSDGSFFLYSKLTVDKSRWQQGNVFSCSVMHEALHNHYTQKSLSLSPGK

SEQ ID NO: 26 - protein, 351 aa, synthetic construct
  REGION 1..351: note = 15c6AAC9; IL-15 chain: IL15-B/AAC9
NWVNVISDLKKIEDLIQSMHIDATLYTESDVHPSCKVTAMKCFLLELQVISLESGDASIHDTVENLIILANNSLSSNGNVTESGCKECEELEEKNIKEFLQSFVHIVQMFINTSGGGGSEPKSSDKTHTCPPCPAPKRRGGPSVFLFPPKPKDTLMISRTPEVTCVVVDVSHEDPEVKFNWYVDGVEVHNAKTKPREEQYNSTYRVVSVLTVLHQDWLNGKEYKCKVSNKALPAPIEKTISKAKGQPREPQVYVLPPSRDELTKNQVSLLCLVKGFYPSDIAVEWESNGQPENNYLTWPPVLDSDGSFFLYSKLTVDKSRWQQGNVFSCSVMHEALHNHYTQKSLSLSPGK

SEQ ID NO: 27 - protein, 406 aa, synthetic construct
  REGION 1..406: note = 15Rc6AAC9; IL-15R chain: IL15R-B/AAC9
ITCPPPMSVEHADIWVKSYSLYSRERYICNSGFKRKAGTSSLTECVLNKATNVAHWTTPSLKCIRDPALVHQRPAPPSTVTTAGVTPQPESLSPSGKEPAASSPSSNNTAATTAAIVPGSQLMPSKSPSTGTTEISSHESSHGTPSQTTAKNWELTASASHQPPGVYPQGGGGSEPKSSDKTHTCPPCPAPKRRGGPSVFLFPPKPKDTLMISRTPEVTCVVVDVSHEDPEVKFNWYVDGVEVHNAKTKPREEQYNSTYRVVSVLTVLHQDWLNGKEYKCKVSNKALPAPIEKTISKAKGQPREPQVYVLPPSRDELTKNQVSLLCLVKGFYPSDIAVEWESNGQPENNYLTWPPVLDSDGSFFLYSKLTVDKSRWQQGNVFSCSVMHEALHNHYTQKSLSLSPGK

SEQ ID NO: 28 - protein, 227 aa, synthetic construct
  REGION 1..227: note = Dc6AAC9; Fc chain: DKTHT-Fc6CC-B/AAC9
DKTHTCPPCPAPKRRGGPSVFLFPPKPKDTLMISRTPEVTCVVVDVSHEDPEVKFNWYVDGVEVHNAKTKPREEQYNSTYRVVSVLTVLHQDWLNGKEYKCKVSNKALPAPIEKTISKAKGQPREPQVYVLPPSRDELTKNQVSLLCLVKGFYPSDIAVEWESNGQPENNYLTWPPVLDSDGSFFLYSKLTVDKSRWQQGNVFSCSVMHEALHNHYTQKSLSLSPGK

SEQ ID NO: 29 - protein, 222 aa, synthetic construct
  REGION 1..222: note = Fc6RF; Fc chain: Fc6CC-RF
CPPCPAPELLGGPSVFLFPPKPKDTLMISRTPEVTCVVVDVSHEDPEVKFNWYVDGVEVHNAKTKPREEQYNSTYRVVSVLTVLHQDWLNGKEYKCKVSNKALPAPIEKTISKAKGQPREPQVYTLPPSRDELTKNQVSLTCLVKGFYPSDIAVEWESNGQPENNYKTTPPVLDSDGSFFLYSKLTVDKSRWQQGNVFSCSVMHEALHNRFTQKSLSLSPGK

SEQ ID NO: 30 - protein, 451 aa, synthetic construct
  REGION 1..451: note = RSIDE; H chain: Rh/SIDE
QVQLQQPGAELVKPGASVKMSCKASGYTFTSYNMHWVKQTPGRGLEWIGAIYPGNGDTSYNQKFKGKATLTADKSSSTAYMQLSSLTSEDSAVYYCARSTYYGGDWYFNVWGAGTTVTVSAASTKGPSVFPLAPSSKSTSGGTAALGCLVKDYFPEPVTVSWNSGALTSGVHTFPAVLQSSGLYSLSSVVTVPSSSLGTQTYICNVNHKPSNTKVDKKAEPKSCDKTHTCPPCPAPELLGGPDVFLFPPKPKDTLMISRTPEVTCVVVDVSHEDPEVKFNWYVDGVEVHNAKTKPREEQYNSTYRVVSVLTVLHQDWLNGKEYKCKVSNKALPAPEEKTISKAKGQPREPQVYTLPPSRDELTKNQVSLTCLVKGFYPSDIAVEWESNGQPENNYKTTPPVLDSDGSFFLYSKLTVDKSRWQQGNVFSCSVMHEALHNHYTQKSLSLSPGK

SEQ ID NO: 31 - protein, 351 aa, synthetic construct
  REGION 1..351: note = 15c6AAC9N79Q; IL-15 chain: IL15-B/AAC/N79Q
NWVNVISDLKKIEDLIQSMHIDATLYTESDVHPSCKVTAMKCFLLELQVISLESGDASIHDTVENLIILANNSLSSNGQVTESGCKECEELEEKNIKEFLQSFVHIVQMFINTSGGGGSEPKSSDKTHTCPPCPAPKRRGGPSVFLFPPKPKDTLMISRTPEVTCVVVDVSHEDPEVKFNWYVDGVEVHNAKTKPREEQYNSTYRVVSVLTVLHQDWLNGKEYKCKVSNKALPAPIEKTISKAKGQPREPQVYVLPPSRDELTKNQVSLLCLVKGFYPSDIAVEWESNGQPENNYLTWPPVLDSDGSFFLYSKLTVDKSRWQQGNVFSCSVMHEALHNHYTQKSLSLSPGK

SEQ ID NO: 32 - protein, 220 aa, synthetic construct
  REGION 1..220: note = 6Ec66; L chain: 6E10l
DIVMTQSPSSLTVTAGEKVALTCKASQSLLSSGNQKNYLTWYQQKPGQPPKLLIYWASIRESGVPDRFTGSGSGTFFTLTISSVQAEDLAVYYCQNDYNYPFTFGSGTKLEIKRTVAAPSVFIFPPSDEQLKSGTASVVCLLNNFYPREAKVQWKVDNALQSGNSQESVTEQDSKDSTYSLSSTLTLSKADYEKHKVYACEVTHQGLSSPVTKSFNRGEC

SEQ ID NO: 33 - protein, 450 aa, synthetic construct
  REGION 1..450: note = 6Ec66; H chain: 6E10h-B
EVQLQQSGAELVKPGASVKLSCTASGFNIKDTYIHWVKQRPEQGLEWIGRFDPVNVNTRYDSRFRGKATITSDASSNTAYLHLNSLTSEDTAVYYCSRSYYNGRRRFTYWGQGTLVTVSAASTKGPSVFPLAPSSKSTSGGTAALGCLVKDYFPEPVTVSWNSGALTSGVHTFPAVLQSSGLYSLSSVVTVPSSSLGTQTYICNVNHKPSNTKVDKKVEPKSCDKTHTCPPCPAPELLGGPSVFLFPPKPKDTLMISRTPEVTCVVVDVSHEDPEVKFNWYVDGVEVHNAKTKPREEQYNSTYRVVSVLTVLHQDWLNGKEYKCKVSNKALPAPIEKTISKAKGQPREPQVYVLPPSRDELTKNQVSLLCLVKGFYPSDIAVEWESNGQPENNYLTWPPVLDSDGSFFLYSKLTVDKSRWQQGNVFSCSVMHEALHNHYTQKSLSLSPGK

SEQ ID NO: 34 - protein, 450 aa, synthetic construct
  REGION 1..450: note = 6E10; H chain: 6E10h
EVQLQQSGAELVKPGASVKLSCTASGFNIKDTYIHWVKQRPEQGLEWIGRFDPVNVNTRYDSRFRGKATITSDASSNTAYLHLNSLTSEDTAVYYCSRSYYNGRRRFTYWGQGTLVTVSAASTKGPSVFPLAPSSKSTSGGTAALGCLVKDYFPEPVTVSWNSGALTSGVHTFPAVLQSSGLYSLSSVVTVPSSSLGTQTYICNVNHKPSNTKVDKKVEPKSCDKTHTCPPCPAPELLGGPSVFLFPPKPKDTLMISRTPEVTCVVVDVSHEDPEVKFNWYVDGVEVHNAKTKPREEQYNSTYRVVSVLTVLHQDWLNGKEYKCKVSNKALPAPIEKTISKAKGQPREPQVYTLPPSRDELTKNQVSLTCLVKGFYPSDIAVEWESNGQPENNYKTTPPVLDSDGSFFLYSKLTVDKSRWQQGNVFSCSVMHEALHNHYTQKSLSLSPGK

SEQ ID NO: 35 - protein, 219 aa, synthetic construct
  REGION 1..219: note = Soc66; L chain: Sol
DVVMTQSPLSLPVTLGQPASISCRSSQSLIYSDGNAYLHWFLQKPGQSPRLLIYKVSNRFSGVPDRFSGSGSGTDFTLKISRVEAEDVGVYYCSQSTHVPWTFGQGTKVEIKRTVAAPSVFIFPPSDEQLKSGTASVVCLLNNFYPREAKVQWKVDNALQSGNSQESVTEQDSKDSTYSLSSTLTLSKADYEKHKVYACEVTHQGLSSPVTKSFNRGEC

SEQ ID NO: 36 - protein, 442 aa, synthetic construct
  REGION 1..442: note = Soc66; H chain: Soh-B
EVQLVESGGGLVQPGGSLRLSCAASGFTFSRYSMSWVRQAPGKGLELVAQINSVGNSTYYPDTVKGRFTISRDNAKNTLYLQMNSLRAEDTAVYYCASGDYWGQGTLVTVSSASTKGPSVFPLAPSSKSTSGGTAALGCLVKDYFPEPVTVSWNSGALTSGVHTFPAVLQSSGLYSLSSVVTVPSSSLGTQTYICNVNHKPSNTKVDKKVEPKSCDKTHTCPPCPAPELLGGPSVFLFPPKPKDTLMISRTPEVTCVVVDVSHEDPEVKFNWYVDGVEVHNAKTKPREEQYNSTYRVVSVLTVLHQDWLNGKEYKCKVSNKALPAPIEKTISKAKGQPREPQVYVLPPSRDELTKNQVSLLCLVKGFYPSDIAVEWESNGQPENNYLTWPPVLDSDGSFFLYSKLTVDKSRWQQGNVFSCSVMHEALHNHYTQKSLSLSPGK

SEQ ID NO: 37 - protein, 442 aa, synthetic construct
  REGION 1..442: note = So; H chain: Soh
EVQLVESGGGLVQPGGSLRLSCAASGFTFSRYSMSWVRQAPGKGLELVAQINSVGNSTYYPDTVKGRFTISRDNAKNTLYLQMNSLRAEDTAVYYCASGDYWGQGTLVTVSSASTKGPSVFPLAPSSKSTSGGTAALGCLVKDYFPEPVTVSWNSGALTSGVHTFPAVLQSSGLYSLSSVVTVPSSSLGTQTYICNVNHKPSNTKVDKKVEPKSCDKTHTCPPCPAPELLGGPSVFLFPPKPKDTLMISRTPEVTCVVVDVSHEDPEVKFNWYVDGVEVHNAKTKPREEQYNSTYRVVSVLTVLHQDWLNGKEYKCKVSNKALPAPIEKTISKAKGQPREPQVYTLPPSRDELTKNQVSLTCLVKGFYPSDIAVEWESNGQPENNYKTTPPVLDSDGSFFLYSKLTVDKSRWQQGNVFSCSVMHEALHNHYTQKSLSLSPGK

SEQ ID NO: 38 - protein, 219 aa, synthetic construct
  REGION 1..219: note = Gl; L1 chain: Gl-L1 (CD20/Vk-Ck)
DIVMTQTPLSLPVTPGEPASISCRSSKSLLHSNGITYLYWYLQKPGQSPQLLIYQMSNLVSGVPDRFSGSGSGTDFTLKISRVEAEDVGVYYCAQNLELPYTFGGGTKVEIKRTVAAPSVFIFPPSDRKLKSGTASVVCLLNNFYPREAKVQWKVDNALQSGNSQESVTEQDSKDSTYSLSSTLTLSKADYEKHKVYACEVTHQGLSSPVTKSFNRGEC

SEQ ID NO: 39 - protein, 232 aa, synthetic construct
  REGION 1..232: note = Gl; L2 chain: Gl-L2 (CD3/VH-C-lambda)
EVQLLESGGGLVQPGGSLRLSCAASGFTFSTYAMNWVRQAPGKGLEWVSRIRSKYNNYATYYADSVKGRFTISRDDSKNTLYLQMNSLRAEDTAVYYCVRHGNFGNSYVSWFAYWGQGTLVTVSSASVAAPSVFIFPPSDEQLKSGTASVVCLLNNFYPREAKVQWKVDNALQSGNSQESVTEQDSKDSTYSLSSTLTLSKADYEKHKVYACEVTHQGLSSPVTKSFNRGEC

SEQ ID NO: 40 - protein, 673 aa, synthetic construct
  REGION 1..673: note = Gl; H1 chain: G1-H1 (CD20/VH-CH1)-(CD3/V-lambda-CH1)
QVQLVQSGAEVKKPGSSVKVSCKASGYAFSYSWINWVRQAPGQGLEWMGRIFPGDGDTDYNGKFKGRVTITADKSTSTAYMELSSLRSEDTAVYYCARNVFDGYWLVYWGQGTLVTVSSASTKGPSVFPLAPSSKSTSGGTAALGCLVEDYFPEPVTVSWNSGALTSGVHTFPAVLQSSGLYSLSSVVTVPSSSLGTQTYICNVNHKPSNTKVDEKVEPKSCDGGGGSGGGGSQAVVTQEPSLTVSPGGTVTLTCGSSTGAVTTSNYANWVQEKPGQAFRGLIGGTNKRAPGTPARFSGSLLGGKAALTLSGAQPEDEAEYYCALWYSNLWVFGGGTKLTVLSSASTKGPSVFPLAPSSKSTSGGTAALGCLVKDYFPEPVTVSWNSGALTSGVHTFPAVLQSSGLYSLSSVVTVPSSSLGTQTYICNVNHKPSNTKVDKKVEPKSCDKTHTCPPCPAPEAAGGPSVFLFPPKPKDTLMISRTPEVTCVVVDVSHEDPEVKFNWYVDGVEVHNAKTKPREEQYNSTYRVVSVLTVLHQDWLNGKEYKCKVSNKALGAPIEKTISKAKGQPREPQVYTLPPCRDELTKNQVSLWCLVKGFYPSDIAVEWESNGQPENNYKTTPPVLDSDGSFFLYSKLTVDKSRWQQGNVFSCSVMHEALHNHYTQKSLSLSPG

SEQ ID NO: 41 - protein, 448 aa, synthetic construct
  REGION 1..448: note = G1; H2 chain: G1-H2 (CD20/VH-CH1)
QVQLVQSGAEVKKPGSSVKVSCKASGYAFSYSWINWVRQAPGQGLEWMGRIFPGDGDTDYNGKFKGRVTITADKSTSTAYMELSSLRSEDTAVYYCARNVFDGYWLVYWGQGTLVTVSSASTKGPSVFPLAPSSKSTSGGTAALGCLVEDYFPEPVTVSWNSGALTSGVHTFPAVLQSSGLYSLSSVVTVPSSSLGTQTYICNVNHKPSNTKVDEKVEPKSCDKTHTCPPCPAPEAAGGPSVFLFPPKPKDTLMISRTPEVTCVVVDVSHEDPEVKFNWYVDGVEVHNAKTKPREEQYNSTYRVVSVLTVLHQDWLNGKEYKCKVSNKALGAPIEKTISKAKGQPREPQVCTLPPSRDELTKNQVSLSCAVKGFYPSDIAVEWESNGQPENNYKTTPPVLDSDGSFFLVSKLTVDKSRWQQGNVFSCSVMHEALHNHYTQKSLSLSPG

SEQ ID NO: 42 - protein, 221 aa, synthetic construct
  REGION 1..221: note = FcPG; Fc chain: Fc6CC-hole/PGLALA/delK
CPPCPAPEAAGGPSVFLFPPKPKDTLMISRTPEVTCVVVDVSHEDPEVKFNWYVDGVEVHNAKTKPREEQYNSTYRVVSVLTVLHQDWLNGKEYKCKVSNKALGAPIEKTISKAKGQPREPQVCTLPPSRDELTKNQVSLSCAVKGFYPSDIAVEWESNGQPENNYKTTPPVLDSDGSFFLVSKLTVDKSRWQQGNVFSCSVMHEALHNHYTQKSLSLSPG

SEQ ID NO: 43 - protein, 222 aa, synthetic construct
  REGION 1..222: note = ObSpc60PG; L1 chain Obx-L (CD20/VH-CH1)
QVQLVQSGAEVKKPGSSVKVSCKASGYAFSYSWINWVRQAPGQGLEWMGRIFPGDGDTDYNGKFKGRVTITADKSTSTAYMELSSLRSEDTAVYYCARNVFDGYWLVYWGQGTLVTVSSASTKGPSVFPLAPSSKSTSGGTAALGCLVKDYFPEPVTVSWNSGALTSGVHTFPAVLQSSGLYSLSSVVTVPSSSLGTQTYICNVNHKPSNTKVDKKVEPKSC

SEQ ID NO: 44 - protein, 216 aa, synthetic construct
  REGION 1..216: note = ObSpc60PG; L2 chain: Sp-L (CD3/V-lambda-C-lambda)
QAVVTQEPSLTVSPGGTVTLTCGSSTGAVTTSNYANWVQEKPGQAFRGLIGGTNKRAPGTPARFSGSLLGGKAALTLSGAQPEDEAEYYCALWYSNLWVFGGGTKLTVLRTVAAPSVFIFPPSDEQLKSGTASVVCLLNNFYPREAKVQWKVDNALQSGNSQESVTEQDSKDSTYSLSSTLTLSKADYEKHKVYACEVTHQGLSSPVTKSFNRGEC

SEQ ID NO: 45 - protein, 684 aa, synthetic construct
  REGION 1..684: note = ObSpc60PG; H chain: ObSp-H (CD20/Vk-Ck)-(CD3/VH-CH1)
DIVMTQTPLSLPVTPGEPASISCRSSKSLLHSNGITYLYWYLQKPGQSPQLLIYQMSNLVSGVPDRFSGSGSGTDFTLKISRVEAEDVGVYYCAQNLELPYTFGGGTKVEIKRTVAAPSVFIFPPSDEQLKSGTASVVCLLNNFYPREAKVQWKVDNALQSGNSQESVTEQDSKDSTYSLSSTLTLSKADYEKHKVYACEVTHQGLSSPVTKSFNRGECDGGGGSGGGGSEVQLLESGGGLVQPGGSLRLSCAASGFTFSTYAMNWVRQAPGKGLEWVSRIRSKYNNYATYYADSVKGRFTISRDDSKNTLYLQMNSLRAEDTAVYYCVRHGNFGNSYVSWFAYWGQGTLVTVSSASTKGPSVFPLAPSSKSTSGGTAALGCLVKDYFPEPVTVSWNSGALTSGVHTFPAVLQSSGLYSLSSVVTVPSSSLGTQTYICNVNHKPSNTKVDKKVEPKSCDKTHTCPPCPAPEAAGGPSVFLFPPKPKDTLMISRTPEVTCVVVDVSHEDPEVKFNWYVDGVEVHNAKTKPREEQYNSTYRVVSVLTVLHQDWLNGKEYKCKVSNKALGAPIEKTISKAKGQPREPQVYTLPPCRDELTKNQVSLWCLVKGFYPSDIAVEWESNGQPENNYKTTPPVLDSDGSFFLYSKLTVDKSRWQQGNVFSCSVMHEALHNHYTQKSLSLSPG

SEQ ID NO: 46 - protein, 219 aa, synthetic construct
  REGION 1..219: note = Obc60PG; L chain: Ob-L (CD20/Vk-Ck)
DIVMTQTPLSLPVTPGEPASISCRSSKSLLHSNGITYLYWYLQKPGQSPQLLIYQMSNLVSGVPDRFSGSGSGTDFTLKISRVEAEDVGVYYCAQNLELPYTFGGGTKVEIKRTVAAPSVFIFPPSDEQLKSGTASVVCLLNNFYPREAKVQWKVDNALQSGNSQESVTEQDSKDSTYSLSSTLTLSKADYEKHKVYACEVTHQGLSSPVTKSFNRGEC

SEQ ID NO: 47 - protein, 448 aa, synthetic construct
  REGION 1..448: note = Obc60PG; H chain: Ob-H/knob/PGLALA (CD20/VH-CH1)
QVQLVQSGAEVKKPGSSVKVSCKASGYAFSYSWINWVRQAPGQGLEWMGRIFPGDGDTDYNGKFKGRVTITADKSTSTAYMELSSLRSEDTAVYYCARNVFDGYWLVYWGQGTLVTVSSASTKGPSVFPLAPSSKSTSGGTAALGCLVKDYFPEPVTVSWNSGALTSGVHTFPAVLQSSGLYSLSSVVTVPSSSLGTQTYICNVNHKPSNTKVDKKVEPKSCDKTHTCPPCPAPEAAGGPSVFLFPPKPKDTLMISRTPEVTCVVVDVSHEDPEVKFNWYVDGVEVHNAKTKPREEQYNSTYRVVSVLTVLHQDWLNGKEYKCKVSNKALGAPIEKTISKAKGQPREPQVYTLPPCRDELTKNQVSLWCLVKGFYPSDIAVEWESNGQPENNYKTTPPVLDSDGSFFLYSKLTVDKSRWQQGNVFSCSVMHEALHNHYTQKSLSLSPG

SEQ ID NO: 48 - protein, 1266 aa, synthetic construct
  REGION 1..1266: note = ObSp41BBc60PG; H chain: ObSp-H-41BB/knob/PGLALA (CD20/Vk-Ck)-(CD3/VH-CH1)-41BB
DIVMTQTPLSLPVTPGEPASISCRSSKSLLHSNGITYLYWYLQKPGQSPQLLIYQMSNLVSGVPDRFSGSGSGTDFTLKISRVEAEDVGVYYCAQNLELPYTFGGGTKVEIKRTVAAPSVFIFPPSDEQLKSGTASVVCLLNNFYPREAKVQWKVDNALQSGNSQESVTEQDSKDSTYSLSSTLTLSKADYEKHKVYACEVTHQGLSSPVTKSFNRGECDGGGGSGGGGSEVQLLESGGGLVQPGGSLRLSCAASGFTFSTYAMNWVRQAPGKGLEWVSRIRSKYNNYATYYADSVKGRFTISRDDSKNTLYLQMNSLRAEDTAVYYCVRHGNFGNSYVSWFAYWGQGTLVTVSSASTKGPSVFPLAPSSKSTSGGTAALGCLVKDYFPEPVTVSWNSGALTSGVHTFPAVLQSSGLYSLSSVVTVPSSSLGTQTYICNVNHKPSNTKVDKKVEPKSCDKTHTCPPCPAPEAAGGPSVFLFPPKPKDTLMISRTPEVTCVVVDVSHEDPEVKFNWYVDGVEVHNAKTKPREEQYNSTYRVVSVLTVLHQDWLNGKEYKCKVSNKALGAPIEKTISKAKGQPREPQVYTLPPCRDELTKNQVSLWCLVKGFYPSDIAVEWESNGQPENNYKTTPPVLDSDGSFFLYSKLTVDKSRWQQGNVFSCSVMHEALHNHYTQKSLSLSPGGGGGSGGGGSREGPELSPDDPAGLLDLRQGMFAQLVAQNVLLIDGPLSWYSDPGLAGVSLTGGLSYKEDTKELVVAKAGVYYVFFQLELRRVVAGEGSGSVSLALHLQPLRSAAGAAALALTVDLPPASSEARNSAFGFQGRLLHLSAGQRLGVHLHTEARARHAWQLTQGATVLGLFRVTPEIPAGLPSPRSEGGGGSGGGGSREGPELSPDDPAGLLDLRQGMFAQLVAQNVLLIDGPLSWYSDPGLAGVSLTGGLSYKEDTKELVVAKAGVYYVFFQLELRRVVAGEGSGSVSLALHLQPLRSAAGAAALALTVDLPPASSEARNSAFGFQGRLLHLSAGQRLGVHLHTEARARHAWQLTQGATVLGLFRVTPEIPAGLPSPRSEGGGGSGGGGSREGPELSPDDPAGLLDLRQGMFAQLVAQNVLLIDGPLSWYSDPGLAGVSLTGGLSYKEDTKELVVAKAGVYYVFFQLELRRVVAGEGSGSVSLALHLQPLRSAAGAAALALTVDLPPASSEARNSAFGFQGRLLHLSAGQRLGVHLHTEARARHAWQLTQGATVLGLFRVTPEIPAGLPSPRSE

SEQ ID NO: 49 - protein, 1030 aa, synthetic construct
  REGION 1..1030: note = Ob41BBc60PG; H chain: Ob-H-41BB/knob/PGLALA (CD20/VH-CH1)-41BB
QVQLVQSGAEVKKPGSSVKVSCKASGYAFSYSWINWVRQAPGQGLEWMGRIFPGDGDTDYNGKFKGRVTITADKSTSTAYMELSSLRSEDTAVYYCARNVFDGYWLVYWGQGTLVTVSSASTKGPSVFPLAPSSKSTSGGTAALGCLVKDYFPEPVTVSWNSGALTSGVHTFPAVLQSSGLYSLSSVVTVPSSSLGTQTYICNVNHKPSNTKVDKKVEPKSCDKTHTCPPCPAPEAAGGPSVFLFPPKPKDTLMISRTPEVTCVVVDVSHEDPEVKFNWYVDGVEVHNAKTKPREEQYNSTYRVVSVLTVLHQDWLNGKEYKCKVSNKALGAPIEKTISKAKGQPREPQVYTLPPCRDELTKNQVSLWCLVKGFYPSDIAVEWESNGQPENNYKTTPPVLDSDGSFFLYSKLTVDKSRWQQGNVFSCSVMHEALHNHYTQKSLSLSPGGGGGSGGGGSREGPELSPDDPAGLLDLRQGMFAQLVAQNVLLIDGPLSWYSDPGLAGVSLTGGLSYKEDTKELVVAKAGVYYVFFQLELRRVVAGEGSGSVSLALHLQPLRSAAGAAALALTVDLPPASSEARNSAFGFQGRLLHLSAGQRLGVHLHTEARARHAWQLTQGATVLGLFRVTPEIPAGLPSPRSEGGGGSGGGGSREGPELSPDDPAGLLDLRQGMFAQLVAQNVLLIDGPLSWYSDPGLAGVSLTGGLSYKEDTKELVVAKAGVYYVFFQLELRRVVAGEGSGSVSLALHLQPLRSAAGAAALALTVDLPPASSEARNSAFGFQGRLLHLSAGQRLGVHLHTEARARHAWQLTQGATVLGLFRVTPEIPAGLPSPRSEGGGGSGGGGSREGPELSPDDPAGLLDLRQGMFAQLVAQNVLLIDGPLSWYSDPGLAGVSLTGGLSYKEDTKELVVAKAGVYYVFFQLELRRVVAGEGSGSVSLALHLQPLRSAAGAAALALTVDLPPASSEARNSAFGFQGRLLHLSAGQRLGVHLHTEARARHAWQLTQGATVLGLFRVTPEIPAGLPSPRSE

SEQ ID NO: 50 - protein, 803 aa, synthetic construct
  REGION 1..803: note = ObSpc60PG-41BB-RF; Fc chain: Fc6CC-hole/PGLALA/RF/41BB
CPPCPAPEAAGGPSVFLFPPKPKDTLMISRTPEVTCVVVDVSHEDPEVKFNWYVDGVEVHNAKTKPREEQYNSTYRVVSVLTVLHQDWLNGKEYKCKVSNKALGAPIEKTISKAKGQPREPQVCTLPPSRDELTKNQVSLSCAVKGFYPSDIAVEWESNGQPENNYKTTPPVLDSDGSFFLVSKLTVDKSRWQQGNVFSCSVMHEALHNRFTQKSLSLSPGGGGGSGGGGSREGPELSPDDPAGLLDLRQGMFAQLVAQNVLLIDGPLSWYSDPGLAGVSLTGGLSYKEDTKELVVAKAGVYYVFFQLELRRVVAGEGSGSVSLALHLQPLRSAAGAAALALTVDLPPASSEARNSAFGFQGRLLHLSAGQRLGVHLHTEARARHAWQLTQGATVLGLFRVTPEIPAGLPSPRSEGGGGSGGGGSREGPELSPDDPAGLLDLRQGMFAQLVAQNVLLIDGPLSWYSDPGLAGVSLTGGLSYKEDTKELVVAKAGVYYVFFQLELRRVVAGEGSGSVSLALHLQPLRSAAGAAALALTVDLPPASSEARNSAFGFQGRLLHLSAGQRLGVHLHTEARARHAWQLTQGATVLGLFRVTPEIPAGLPSPRSEGGGGSGGGGSREGPELSPDDPAGLLDLRQGMFAQLVAQNVLLIDGPLSWYSDPGLAGVSLTGGLSYKEDTKELVVAKAGVYYVFFQLELRRVVAGEGSGSVSLALHLQPLRSAAGAAALALTVDLPPASSEARNSAFGFQGRLLHLSAGQRLGVHLHTEARARHAWQLTQGATVLGLFRVTPEIPAGLPSPRSE

SEQ ID NO: 51 - protein, 215 aa, synthetic construct
  REGION 1..215: note = Ci; L1 chain: Ci-L1 (CEA/V-kappa-C-kappa)
DIQMTQSPSSLSASVGDRVTITCKASAAVGTYVAWYQQKPGKAPKLLIYSASYRKRGVPSRFSGSGSGTDFTLTISSLQPEDFATYYCHQYYTYPLFTFGQGTKLEIKRTVAAPSVFIFPPSDEQLKSGTASVVCLLNNFYPREAKVQWKVDNALQSGNSQESVTEQDSKDSTYSLSSTLTLSKADYEKHKVYACEVTHQGLSSPVTKSFNRGEC

SEQ ID NO: 52 - protein, 214 aa, synthetic construct
  REGION 1..214: note = Ci; L2 chain: Ci-L2 (CD3/V-lambda-CH1)
QAVVTQEPSLTVSPGGTVTLTCGSSTGAVTTSNYANWVQEKPGQAFRGLIGGTNKRAPGTPARFSGSLLGGKAALTLSGAQPEDEAEYYCALWYSNLWVFGGGTKLTVLSSASTKGPSVFPLAPSSKSTSGGTAALGCLVKDYFPEPVTVSWNSGALTSGVHTFPAVLQSSGLYSLSSVVTVPSSSLGTQTYICNVNHKPSNTKVDKKVEPKSC

SEQ ID NO: 53 - protein, 693 aa, synthetic construct
  REGION 1..693: note = Ci; H1 chain: Ci-H1 (CEA/VH-CH1)-(CD3/VH-C-lambda)
QVQLVQSGAEVKKPGASVKVSCKASGYTFTEFGMNWVRQAPGQGLEWMGWINTKTGEATYVEEFKGRVTFTTDTSTSTAYMELRSLRSDDTAVYYCARWDFAYYVEAMDYWGQGTTVTVSSASTKGPSVFPLAPSSKSTSGGTAALGCLVKDYFPEPVTVSWNSGALTSGVHTFPAVLQSSGLYSLSSVVTVPSSSLGTQTYICNVNHKPSNTKVDKKVEPKSCDGGGGSGGGGSEVQLLESGGGLVQPGGSLRLSCAASGFTFSTYAMNWVRQAPGKGLEWVSRIRSKYNNYATYYADSVKGRFTISRDDSKNTLYLQMNSLRAEDTAVYYCVRHGNFGNSYVSWFAYWGQGTLVTVSSASVAAPSVFIFPPSDEQLKSGTASVVCLLNNFYPREAKVQWKVDNALQSGNSQESVTEQDSKDSTYSLSSTLTLSKADYEKHKVYACEVTHQGLSSPVTKSFNRGECDKTHTCPPCPAPEAAGGPSVFLFPPKPKDTLMISRTPEVTCVVVDVSHEDPEVKFNWYVDGVEVHNAKTKPREEQYNSTYRVVSVLTVLHQDWLNGKEYKCKVSNKALGAPIEKTISKAKGQPREPQVYTLPPCRDELTKNQVSLWCLVKGFYPSDIAVEWESNGQPENNYKTTPPVLDSDGSFFLYSKLTVDKSRWQQGNVFSCSVMHEALHNHYTQKSLSLSPG

SEQ ID NO: 54 - protein, 450 aa, synthetic construct
  REGION 1..450: note = Ci; H2 chain: Ci-H2 (CEA/VH-CH1)
QVQLVQSGAEVKKPGASVKVSCKASGYTFTEFGMNWVRQAPGQGLEWMGWINTKTGEATYVEEFKGRVTFTTDTSTSTAYMELRSLRSDDTAVYYCARWDFAYYVEAMDYWGQGTTVTVSSASTKGPSVFPLAPSSKSTSGGTAALGCLVKDYFPEPVTVSWNSGALTSGVHTFPAVLQSSGLYSLSSVVTVPSSSLGTQTYICNVNHKPSNTKVDKKVEPKSCDKTHTCPPCPAPEAAGGPSVFLFPPKPKDTLMISRTPEVTCVVVDVSHEDPEVKFNWYVDGVEVHNAKTKPREEQYNSTYRVVSVLTVLHQDWLNGKEYKCKVSNKALGAPIEKTISKAKGQPREPQVCTLPPSRDELTKNQVSLSCAVKGFYPSDIAVEWESNGQPENNYKTTPPVLDSDGSFFLVSKLTVDKSRWQQGNVFSCSVMHEALHNHYTQKSLSLSPG

SEQ ID NO: 55 - protein, 335 aa, synthetic construct
  REGION 1..335: note = CD3Ec60PG; H chain: CD3-epsilon/knob/PGLALA
DGNEEMGGITQTPYKVSISGTTVILTCPQYPGSEILWQHNDKNIGGDEDDKNIGSDEDHLSLKEFSELEQSGYYVCYPRGSKPEDANFYLYLRARVCENCMEMDEPKSSDKTHTCPPCPAPEAAGGPSVFLFPPKPKDTLMISRTPEVTCVVVDVSHEDPEVKFNWYVDGVEVHNAKTKPREEQYNSTYRVVSVLTVLHQDWLNGKEYKCKVSNKALGAPIEKTISKAKGQPREPQVYTLPPCRDELTKNQVSLWCLVKGFYPSDIAVEWESNGQPENNYKTTPPVLDSDGSFFLYSKLTVDKSRWQQGNVFSCSVMHEALHNHYTQKSLSLSPG

SEQ ID NO: 56 - protein, 394 aa, synthetic construct
  REGION 1..394: note = 41BBc60PG; 4-1BB/knob/PGLALA
LQDPCSNCPAGTFCDNNRNQICSPCPPNSFSSAGGQRTCDICRQCKGVFRTRKECSSTSNAECDCTPGFHCLGAGCSMCEQDCKQGQELTKKGCKDCCFGTFNDQKRGICRPWTNCSLDGKSVLVNGTKERDVVCGPSPADLSPGASSVTPPAPAREPGHSPQEPKSSDKTHTCPPCPAPEAAGGPSVFLFPPKPKDTLMISRTPEVTCVVVDVSHEDPEVKFNWYVDGVEVHNAKTKPREEQYNSTYRVVSVLTVLHQDWLNGKEYKCKVSNKALGAPIEKTISKAKGQPREPQVYTLPPCRDELTKNQVSLWCLVKGFYPSDIAVEWESNGQPENNYKTTPPVLDSDGSFFLYSKLTVDKSRWQQGNVFSCSVMHEALHNHYTQKSLSLSPG

SEQ ID NO: 57 - protein, 394 aa, synthetic construct
  REGION 1..394: note = 41BBFcPG; H chain: 4-1BB/PGLALA
LQDPCSNCPAGTFCDNNRNQICSPCPPNSFSSAGGQRTCDICRQCKGVFRTRKECSSTSNAECDCTPGFHCLGAGCSMCEQDCKQGQELTKKGCKDCCFGTFNDQKRGICRPWTNCSLDGKSVLVNGTKERDVVCGPSPADLSPGASSVTPPAPAREPGHSPQEPKSSDKTHTCPPCPAPEAAGGPSVFLFPPKPKDTLMISRTPEVTCVVVDVSHEDPEVKFNWYVDGVEVHNAKTKPREEQYNSTYRVVSVLTVLHQDWLNGKEYKCKVSNKALGAPIEKTISKAKGQPREPQVYTLPPSRDELTKNQVSLTCLVKGFYPSDIAVEWESNGQPENNYKTTPPVLDSDGSFFLYSKLTVDKSRWQQGNVFSCSVMHEALHNHYTQKSLSLSPG

SEQ ID NO: 58 - protein, 503 aa, synthetic construct
  REGION 1..503: note = CD19c60PG; H chain: CD19/knob/PGLALA
PEEPLVVKVEEGDNAVLQCLKGTSDGPTQQLTWSRESPLKPFLKLSLGLPGLGIHMRPLAIWLFIFNVSQQMGGFYLCQPGPPSEKAWQPGWTVNVEGSGELFRWNVSDLGGLGCGLKNRSSEGPSSPSGKLMSPKLYVWAKDRPEIWEGEPPCLPPRDSLNQSLSQDLTMAPGSTLWLSCGVPPDSVSRGPLSWTHVHPKGPKSLLSLELKDDRPARDMWVMETGLLLPRATAQDAGKYYCHRGNLTMSFHLEITARPVLWHWLLRTGGWKEPKSSDKTHTCPPCPAPEAAGGPSVFLFPPKPKDTLMISRTPEVTCVVVDVSHEDPEVKFNWYVDGVEVHNAKTKPREEQYNSTYRVVSVLTVLHQDWLNGKEYKCKVSNKALGAPIEKTISKAKGQPREPQVYTLPPCRDELTKNQVSLWCLVKGFYPSDIAVEWESNGQPENNYKTTPPVLDSDGSFFLYSKLTVDKSRWQQGNVFSCSVMHEALHNHYTQKSLSLSPG

SEQ ID NO: 59 - protein, 503 aa, synthetic construct
  REGION 1..503: note = CD19FcPG; H chain: CD19/PGLALA
PEEPLVVKVEEGDNAVLQCLKGTSDGPTQQLTWSRESPLKPFLKLSLGLPGLGIHMRPLAIWLFIFNVSQQMGGFYLCQPGPPSEKAWQPGWTVNVEGSGELFRWNVSDLGGLGCGLKNRSSEGPSSPSGKLMSPKLYVWAKDRPEIWEGEPPCLPPRDSLNQSLSQDLTMAPGSTLWLSCGVPPDSVSRGPLSWTHVHPKGPKSLLSLELKDDRPARDMWVMETGLLLPRATAQDAGKYYCHRGNLTMSFHLEITARPVLWHWLLRTGGWKEPKSSDKTHTCPPCPAPEAAGGPSVFLFPPKPKDTLMISRTPEVTCVVVDVSHEDPEVKFNWYVDGVEVHNAKTKPREEQYNSTYRVVSVLTVLHQDWLNGKEYKCKVSNKALGAPIEKTISKAKGQPREPQVYTLPPSRDELTKNQVSLTCLVKGFYPSDIAVEWESNGQPENNYKTTPPVLDSDGSFFLYSKLTVDKSRWQQGNVFSCSVMHEALHNHYTQKSLSLSPG

SEQ ID NO: 60 - protein, 882 aa, synthetic construct
  REGION 1..882: note = CEACAM5c60PG; H chain: CEACAM5/knob/PGLALA
KLTIESTPFNVAEGKEVLLLVHNLPQHLFGYSWYKGERVDGNRQIIGYVIGTQQATPGPAYSGREIIYPNASLLIQNIIQNDTGFYTLHVIKSDLVNEEATGQFRVYPELPKPSISSNNSKPVEDKDAVAFTCEPETQDATYLWWVNNQSLPVSPRLQLSNGNRTLTLFNVTRNDTASYKCETQNPVSARRSDSVILNVLYGPDAPTISPLNTSYRSGENLNLSCHAASNPPAQYSWFVNGTFQQSTQELFIPNITVNNSGSYTCQAHNSDTGLNRTTVTTITVYAEPPKPFITSNNSNPVEDEDAVALTCEPEIQNTTYLWWVNNQSLPVSPRLQLSNDNRTLTLLSVTRNDVGPYECGIQNKLSVDHSDPVILNVLYGPDDPTISPSYTYYRPGVNLSLSCHAASNPPAQYSWLIDGNIQQHTQELFISNITEKNSGLYTCQANNSASGHSRTTVKTITVSAELPKPSISSNNSKPVEDKDAVAFTCEPEAQNTTYLWWVNGQSLPVSPRLQLSNGNRTLTLFNVTRNDARAYVCGIQNSVSANRSDPVTLDVLYGPDTPIISPPDSSYLSGANLNLSCHSASNPSPQYSWRINGIPQQHTQVLFIAKITPNNNGTYACFVSNLATGRNNSIVKSITVSASGTSPGLSAEPKSSDKTHTCPPCPAPEAAGGPSVFLFPPKPKDTLMISRTPEVTCVVVDVSHEDPEVKFNWYVDGVEVHNAKTKPREEQYNSTYRVVSVLTVLHQDWLNGKEYKCKVSNKALGAPIEKTISKAKGQPREPQVYTLPPCRDELTKNQVSLWCLVKGFYPSDIAVEWESNGQPENNYKTTPPVLDSDGSFFLYSKLTVDKSRWQQGNVFSCSVMHEALHNHYTQKSLSLSPG

SEQ ID NO: 61 - protein, 882 aa, synthetic construct
  REGION 1..882: note = CEACAM5FcPG; H chain: CEACAM5/PGLALA
KLTIESTPFNVAEGKEVLLLVHNLPQHLFGYSWYKGERVDGNRQIIGYVIGTQQATPGPAYSGREIIYPNASLLIQNIIQNDTGFYTLHVIKSDLVNEEATGQFRVYPELPKPSISSNNSKPVEDKDAVAFTCEPETQDATYLWWVNNQSLPVSPRLQLSNGNRTLTLFNVTRNDTASYKCETQNPVSARRSDSVILNVLYGPDAPTISPLNTSYRSGENLNLSCHAASNPPAQYSWFVNGTFQQSTQELFIPNITVNNSGSYTCQAHNSDTGLNRTTVTTITVYAEPPKPFITSNNSNPVEDEDAVALTCEPEIQNTTYLWWVNNQSLPVSPRLQLSNDNRTLTLLSVTRNDVGPYECGIQNKLSVDHSDPVILNVLYGPDDPTISPSYTYYRPGVNLSLSCHAASNPPAQYSWLIDGNIQQHTQELFISNITEKNSGLYTCQANNSASGHSRTTVKTITVSAELPKPSISSNNSKPVEDKDAVAFTCEPEAQNTTYLWWVNGQSLPVSPRLQLSNGNRTLTLFNVTRNDARAYVCGIQNSVSANRSDPVTLDVLYGPDTPIISPPDSSYLSGANLNLSCHSASNPSPQYSWRINGIPQQHTQVLFIAKITPNNNGTYACFVSNLATGRNNSIVKSITVSASGTSPGLSAEPKSSDKTHTCPPCPAPEAAGGPSVFLFPPKPKDTLMISRTPEVTCVVVDVSHEDPEVKFNWYVDGVEVHNAKTKPREEQYNSTYRVVSVLTVLHQDWLNGKEYKCKVSNKALGAPIEKTISKAKGQPREPQVYTLPPSRDELTKNQVSLTCLVKGFYPSDIAVEWESNGQPENNYKTTPPVLDSDGSFFLYSKLTVDKSRWQQGNVFSCSVMHEALHNHYTQKSLSLSPG

SEQ ID NO: 62 - protein, 829 aa, synthetic construct
  REGION 1..829: note = ACE2-615/knob/PGLALA/R273Q
QSTIEEQAKTFLDKFNHEAEDLFYQSSLASWNYNTNITEENVQNMNNAGDKWSAFLKEQSTLAQMYPLQEIQNLTVKLQLQALQQNGSSVLSEDKSKRLNTILNTMSTIYSTGKVCNPDNPQECLLLEPGLNEIMANSLDYNERLWAWESWRSEVGKQLRPLYEEYVVLKNEMARANHYEDYGDYWRGDYEVNGVDGYDYSRGQLIEDVEHTFEEIKPLYEHLHAYVRAKLMNAYPSYISPIGCLPAHLLGDMWGQFWTNLYSLTVPFGQKPNIDVTDAMVDQAWDAQRIFKEAEKFFVSVGLPNMTQGFWENSMLTDPGNVQKAVCHPTAWDLGKGDFRILMCTKVTMDDFLTAHHEMGHIQYDMAYAAQPFLLRNGANEGFHEAVGEIMSLSAATPKHLKSIGLLSPDFQEDNETEINFLLKQALTIVGTLPFTYMLEKWRWMVFKGEIPKDQWMKKWWEMKREIVGVVEPVPHDETYCDPASLFHVSNDYSFIRYYTRTLYQFQFQEALCQAAKHEGPLHKCDISNSTEAGQKLFNMLRLGKSEPWTLALENVVGAKNMNVRPLLNYFEPLFTWLKDQNKNSFVGWSTDWSPYADEPKSSDKTHTCPPCPAPEAAGGPSVFLFPPKPKDTLMISRTPEVTCVVVDVSHEDPEVKFNWYVDGVEVHNAKTKPREEQYNSTYRVVSVLTVLHQDWLNGKEYKCKVSNKALGAPIEKTISKAKGQPREPQVYTLPPCRDELTKNQVSLWCLVKGFYPSDIAVEWESNGQPENNYKTTPPVLDSDGSFFLYSKLTVDKSRWQQGNVFSCSVMHEALHNHYTQKSLSLSPG

SEQ ID NO: 63 - protein, 829 aa, synthetic construct
  REGION 1..829: note = ACE2-615/SSS/knob/PGLALA/R273Q
QSTIEEQAKTFLDKFNHEAEDLFYQSSLASWNYNTNITEENVQNMNNAGDKWSAFLKEQSTLAQMYPLQEIQNLTVKLQLQALQQNGSSVLSEDKSKRLNTILNTMSTIYSTGKVCNPDNPQECLLLEPGLNEIMANSLDYNERLWAWESWRSEVGKQLRPLYEEYVVLKNEMARANHYEDYGDYWRGDYEVNGVDGYDYSRGQLIEDVEHTFEEIKPLYEHLHAYVRAKLMNAYPSYISPIGCLPAHLLGDMWGQFWTNLYSLTVPFGQKPNIDVTDAMVDQAWDAQRIFKEAEKFFVSVGLPNMTQGFWENSMLTDPGNVQKAVCHPTAWDLGKGDFRILMCTKVTMDDFLTAHHEMGHIQYDMAYAAQPFLLRNGANEGFHEAVGEIMSLSAATPKHLKSIGLLSPDFQEDNETEINFLLKQALTIVGTLPFTYMLEKWRWMVFKGEIPKDQWMKKWWEMKREIVGVVEPVPHDETYCDPASLFHVSNDYSFIRYYTRTLYQFQFQEALCQAAKHEGPLHKCDISNSTEAGQKLFNMLRLGKSEPWTLALENVVGAKNMNVRPLLNYFEPLFTWLKDQNKNSFVGWSTDWSPYADEPKSSDKTHTSPPSPAPEAAGGPSVFLFPPKPKDTLMISRTPEVTCVVVDVSHEDPEVKFNWYVDGVEVHNAKTKPREEQYNSTYRVVSVLTVLHQDWLNGKEYKCKVSNKALGAPIEKTISKAKGQPREPQVYTLPPCRDELTKNQVSLWCLVKGFYPSDIAVEWESNGQPENNYKTTPPVLDSDGSFFLYSKLTVDKSRWQQGNVFSCSVMHEALHNHYTQKSLSLSPG

SEQ ID NO: 64 - protein, 221 aa, synthetic construct
  REGION 1..221: note = FcPG-CS; Fc chain: Fc6CS-hole/PGLALA/delK
CPPSPAPEAAGGPSVFLFPPKPKDTLMISRTPEVTCVVVDVSHEDPEVKFNWYVDGVEVHNAKTKPREEQYNSTYRVVSVLTVLHQDWLNGKEYKCKVSNKALGAPIEKTISKAKGQPREPQVCTLPPSRDELTKNQVSLSCAVKGFYPSDIAVEWESNGQPENNYKTTPPVLDSDGSFFLVSKLTVDKSRWQQGNVFSCSVMHEALHNHYTQKSLSLSPG

SEQ ID NO: 65 - protein, 954 aa, synthetic construct
  REGION 1..954: note = ACE2-740/knob/PGLALA/R273Q
QSTIEEQAKTFLDKFNHEAEDLFYQSSLASWNYNTNITEENVQNMNNAGDKWSAFLKEQSTLAQMYPLQEIQNLTVKLQLQALQQNGSSVLSEDKSKRLNTILNTMSTIYSTGKVCNPDNPQECLLLEPGLNEIMANSLDYNERLWAWESWRSEVGKQLRPLYEEYVVLKNEMARANHYEDYGDYWRGDYEVNGVDGYDYSRGQLIEDVEHTFEEIKPLYEHLHAYVRAKLMNAYPSYISPIGCLPAHLLGDMWGQFWTNLYSLTVPFGQKPNIDVTDAMVDQAWDAQRIFKEAEKFFVSVGLPNMTQGFWENSMLTDPGNVQKAVCHPTAWDLGKGDFRILMCTKVTMDDFLTAHHEMGHIQYDMAYAAQPFLLRNGANEGFHEAVGEIMSLSAATPKHLKSIGLLSPDFQEDNETEINFLLKQALTIVGTLPFTYMLEKWRWMVFKGEIPKDQWMKKWWEMKREIVGVVEPVPHDETYCDPASLFHVSNDYSFIRYYTRTLYQFQFQEALCQAAKHEGPLHKCDISNSTEAGQKLFNMLRLGKSEPWTLALENVVGAKNMNVRPLLNYFEPLFTWLKDQNKNSFVGWSTDWSPYADQSIKVRISLKSALGDKAYEWNDNEMYLFRSSVAYAMRQYFLKVKNQMILFGEEDVRVANLKPRISFNFFVTAPKNVSDIIPRTEVEKAIRMSRSRINDAFRLNDNSLEFLGIQPTLGPPNQPPVSEPKSSDKTHTCPPCPAPEAAGGPSVFLFPPKPKDTLMISRTPEVTCVVVDVSHEDPEVKFNWYVDGVEVHNAKTKPREEQYNSTYRVVSVLTVLHQDWLNGKEYKCKVSNKALGAPIEKTISKAKGQPREPQVYTLPPCRDELTKNQVSLWCLVKGFYPSDIAVEWESNGQPENNYKTTPPVLDSDGSFFLYSKLTVDKSRWQQGNVFSCSVMHEALHNHYTQKSLSLSPG

SEQ ID NO: 66 - protein, 1011 aa, synthetic construct
  REGION 1..1011: note = ACE2-740/240/knob/PGLALA/R273Q
QSTIEEQAKTFLDKFNHEAEDLFYQSSLASWNYNTNITEENVQNMNNAGDKWSAFLKEQSTLAQMYPLQEIQNLTVKLQLQALQQNGSSVLSEDKSKRLNTILNTMSTIYSTGKVCNPDNPQECLLLEPGLNEIMANSLDYNERLWAWESWRSEVGKQLRPLYEEYVVLKNEMARANHYEDYGDYWRGDYEVNGVDGYDYSRGQLIEDVEHTFEEIKPLYEHLHAYVRAKLMNAYPSYISPIGCLPAHLLGDMWGQFWTNLYSLTVPFGQKPNIDVTDAMVDQAWDAQRIFKEAEKFFVSVGLPNMTQGFWENSMLTDPGNVQKAVCHPTAWDLGKGDFRILMCTKVTMDDFLTAHHEMGHIQYDMAYAAQPFLLRNGANEGFHEAVGEIMSLSAATPKHLKSIGLLSPDFQEDNETEINFLLKQALTIVGTLPFTYMLEKWRWMVFKGEIPKDQWMKKWWEMKREIVGVVEPVPHDETYCDPASLFHVSNDYSFIRYYTRTLYQFQFQEALCQAAKHEGPLHKCDISNSTEAGQKLFNMLRLGKSEPWTLALENVVGAKNMNVRPLLNYFEPLFTWLKDQNKNSFVGWSTDWSPYADQSIKVRISLKSALGDKAYEWNDNEMYLFRSSVAYAMRQYFLKVKNQMILFGEEDVRVANLKPRISFNFFVTAPKNVSDIIPRTEVEKAIRMSRSRINDAFRLNDNSLEFLGIQPTLGPPNQPPVSTSTSPTRSMAPGAVHLPQPVSTRSQHTQPTPEPSTAPSTSFLLPMGPSPPAEGSTGDEPKSSDKTHTCPPCPAPEAAGGPSVFLFPPKPKDTLMISRTPEVTCVVVDVSHEDPEVKFNWYVDGVEVHNAKTKPREEQYNSTYRVVSVLTVLHQDWLNGKEYKCKVSNKALGAPIEKTISKAKGQPREPQVYTLPPCRDELTKNQVSLWCLVKGFYPSDIAVEWESNGQPENNYKTTPPVLDSDGSFFLYSKLTVDKSRWQQGNVFSCSVMHEALHNHYTQKSLSLSPG

SEQ ID NO: 67 - protein, 1006 aa, synthetic construct
  REGION 1..1006: note = ACE2-740/235/knob/PGLALA/R273Q
QSTIEEQAKTFLDKFNHEAEDLFYQSSLASWNYNTNITEENVQNMNNAGDKWSAFLKEQSTLAQMYPLQEIQNLTVKLQLQALQQNGSSVLSEDKSKRLNTILNTMSTIYSTGKVCNPDNPQECLLLEPGLNEIMANSLDYNERLWAWESWRSEVGKQLRPLYEEYVVLKNEMARANHYEDYGDYWRGDYEVNGVDGYDYSRGQLIEDVEHTFEEIKPLYEHLHAYVRAKLMNAYPSYISPIGCLPAHLLGDMWGQFWTNLYSLTVPFGQKPNIDVTDAMVDQAWDAQRIFKEAEKFFVSVGLPNMTQGFWENSMLTDPGNVQKAVCHPTAWDLGKGDFRILMCTKVTMDDFLTAHHEMGHIQYDMAYAAQPFLLRNGANEGFHEAVGEIMSLSAATPKHLKSIGLLSPDFQEDNETEINFLLKQALTIVGTLPFTYMLEKWRWMVFKGEIPKDQWMKKWWEMKREIVGVVEPVPHDETYCDPASLFHVSNDYSFIRYYTRTLYQFQFQEALCQAAKHEGPLHKCDISNSTEAGQKLFNMLRLGKSEPWTLALENVVGAKNMNVRPLLNYFEPLFTWLKDQNKNSFVGWSTDWSPYADQSIKVRISLKSALGDKAYEWNDNEMYLFRSSVAYAMRQYFLKVKNQMILFGEEDVRVANLKPRISFNFFVTAPKNVSDIIPRTEVEKAIRMSRSRINDAFRLNDNSLEFLGIQPTLGPPNQPPVSTSTSPTRSMAPGAVHLPQPVSTRSQHTQPTPEPSTAPSTSFLLPMGPSPPAEGSTGDDKTHTCPPCPAPEAAGGPSVFLFPPKPKDTLMISRTPEVTCVVVDVSHEDPEVKFNWYVDGVEVHNAKTKPREEQYNSTYRVVSVLTVLHQDWLNGKEYKCKVSNKALGAPIEKTISKAKGQPREPQVYTLPPCRDELTKNQVSLWCLVKGFYPSDIAVEWESNGQPENNYKTTPPVLDSDGSFFLYSKLTVDKSRWQQGNVFSCSVMHEALHNHYTQKSLSLSPG

SEQ ID NO: 68 - protein, 983 aa, synthetic construct
  REGION 1..983: note = ACE2-740/212/knob/PGLALA/R273Q
QSTIEEQAKTFLDKFNHEAEDLFYQSSLASWNYNTNITEENVQNMNNAGDKWSAFLKEQSTLAQMYPLQEIQNLTVKLQLQALQQNGSSVLSEDKSKRLNTILNTMSTIYSTGKVCNPDNPQECLLLEPGLNEIMANSLDYNERLWAWESWRSEVGKQLRPLYEEYVVLKNEMARANHYEDYGDYWRGDYEVNGVDGYDYSRGQLIEDVEHTFEEIKPLYEHLHAYVRAKLMNAYPSYISPIGCLPAHLLGDMWGQFWTNLYSLTVPFGQKPNIDVTDAMVDQAWDAQRIFKEAEKFFVSVGLPNMTQGFWENSMLTDPGNVQKAVCHPTAWDLGKGDFRILMCTKVTMDDFLTAHHEMGHIQYDMAYAAQPFLLRNGANEGFHEAVGEIMSLSAATPKHLKSIGLLSPDFQEDNETEINFLLKQALTIVGTLPFTYMLEKWRWMVFKGEIPKDQWMKKWWEMKREIVGVVEPVPHDETYCDPASLFHVSNDYSFIRYYTRTLYQFQFQEALCQAAKHEGPLHKCDISNSTEAGQKLFNMLRLGKSEPWTLALENVVGAKNMNVRPLLNYFEPLFTWLKDQNKNSFVGWSTDWSPYADQSIKVRISLKSALGDKAYEWNDNEMYLFRSSVAYAMRQYFLKVKNQMILFGEEDVRVANLKPRISFNFFVTAPKNVSDIIPRTEVEKAIRMSRSRINDAFRLNDNSLEFLGIQPTLGPPNQPPVSTSTSPTRSMAPGAVHLPQPVSTRSQHTQPTPEPSDKTHTCPPCPAPEAAGGPSVFLFPPKPKDTLMISRTPEVTCVVVDVSHEDPEVKFNWYVDGVEVHNAKTKPREEQYNSTYRVVSVLTVLHQDWLNGKEYKCKVSNKALGAPIEKTISKAKGQPREPQVYTLPPCRDELTKNQVSLWCLVKGFYPSDIAVEWESNGQPENNYKTTPPVLDSDGSFFLYSKLTVDKSRWQQGNVFSCSVMHEALHNHYTQKSLSLSPG

SEQ ID NO: 69 - protein, 979 aa, synthetic construct
  REGION 1..979: note = ACE2-740/208/knob/PGLALA/R273Q
QSTIEEQAKTFLDKFNHEAEDLFYQSSLASWNYNTNITEENVQNMNNAGDKWSAFLKEQSTLAQMYPLQEIQNLTVKLQLQALQQNGSSVLSEDKSKRLNTILNTMSTIYSTGKVCNPDNPQECLLLEPGLNEIMANSLDYNERLWAWESWRSEVGKQLRPLYEEYVVLKNEMARANHYEDYGDYWRGDYEVNGVDGYDYSRGQLIEDVEHTFEEIKPLYEHLHAYVRAKLMNAYPSYISPIGCLPAHLLGDMWGQFWTNLYSLTVPFGQKPNIDVTDAMVDQAWDAQRIFKEAEKFFVSVGLPNMTQGFWENSMLTDPGNVQKAVCHPTAWDLGKGDFRILMCTKVTMDDFLTAHHEMGHIQYDMAYAAQPFLLRNGANEGFHEAVGEIMSLSAATPKHLKSIGLLSPDFQEDNETEINFLLKQALTIVGTLPFTYMLEKWRWMVFKGEIPKDQWMKKWWEMKREIVGVVEPVPHDETYCDPASLFHVSNDYSFIRYYTRTLYQFQFQEALCQAAKHEGPLHKCDISNSTEAGQKLFNMLRLGKSEPWTLALENVVGAKNMNVRPLLNYFEPLFTWLKDQNKNSFVGWSTDWSPYADQSIKVRISLKSALGDKAYEWNDNEMYLFRSSVAYAMRQYFLKVKNQMILFGEEDVRVANLKPRISFNFFVTAPKNVSDIIPRTEVEKAIRMSRSRINDAFRLNDNSLEFLGIQPTLGPPNQPPVSTSTSPTRSMAPGAVHLPQPVSTRSQHTQPTDKTHTCPPCPAPEAAGGPSVFLFPPKPKDTLMISRTPEVTCVVVDVSHEDPEVKFNWYVDGVEVHNAKTKPREEQYNSTYRVVSVLTVLHQDWLNGKEYKCKVSNKALGAPIEKTISKAKGQPREPQVYTLPPCRDELTKNQVSLWCLVKGFYPSDIAVEWESNGQPENNYKTTPPVLDSDGSFFLYSKLTVDKSRWQQGNVFSCSVMHEALHNHYTQKSLSLSPG

SEQ ID NO: 70 - protein, 969 aa, synthetic construct
  REGION 1..969: note = ACE2-740/198/knob/PGLALA/R273Q
QSTIEEQAKTFLDKFNHEAEDLFYQSSLASWNYNTNITEENVQNMNNAGDKWSAFLKEQSTLAQMYPLQEIQNLTVKLQLQALQQNGSSVLSEDKSKRLNTILNTMSTIYSTGKVCNPDNPQECLLLEPGLNEIMANSLDYNERLWAWESWRSEVGKQLRPLYEEYVVLKNEMARANHYEDYGDYWRGDYEVNGVDGYDYSRGQLIEDVEHTFEEIKPLYEHLHAYVRAKLMNAYPSYISPIGCLPAHLLGDMWGQFWTNLYSLTVPFGQKPNIDVTDAMVDQAWDAQRIFKEAEKFFVSVGLPNMTQGFWENSMLTDPGNVQKAVCHPTAWDLGKGDFRILMCTKVTMDDFLTAHHEMGHIQYDMAYAAQPFLLRNGANEGFHEAVGEIMSLSAATPKHLKSIGLLSPDFQEDNETEINFLLKQALTIVGTLPFTYMLEKWRWMVFKGEIPKDQWMKKWWEMKREIVGVVEPVPHDETYCDPASLFHVSNDYSFIRYYTRTLYQFQFQEALCQAAKHEGPLHKCDISNSTEAGQKLFNMLRLGKSEPWTLALENVVGAKNMNVRPLLNYFEPLFTWLKDQNKNSFVGWSTDWSPYADQSIKVRISLKSALGDKAYEWNDNEMYLFRSSVAYAMRQYFLKVKNQMILFGEEDVRVANLKPRISFNFFVTAPKNVSDIIPRTEVEKAIRMSRSRINDAFRLNDNSLEFLGIQPTLGPPNQPPVSTSTSPTRSMAPGAVHLPQPVDKTHTCPPCPAPEAAGGPSVFLFPPKPKDTLMISRTPEVTCVVVDVSHEDPEVKFNWYVDGVEVHNAKTKPREEQYNSTYRVVSVLTVLHQDWLNGKEYKCKVSNKALGAPIEKTISKAKGQPREPQVYTLPPCRDELTKNQVSLWCLVKGFYPSDIAVEWESNGQPENNYKTTPPVLDSDGSFFLYSKLTVDKSRWQQGNVFSCSVMHEALHNHYTQKSLSLSPG

SEQ ID NO: 71 - protein, 956 aa, synthetic construct
  REGION 1..956: note = ACE2-740/185/knob/PGLALA/R273Q
QSTIEEQAKTFLDKFNHEAEDLFYQSSLASWNYNTNITEENVQNMNNAGDKWSAFLKEQSTLAQMYPLQEIQNLTVKLQLQALQQNGSSVLSEDKSKRLNTILNTMSTIYSTGKVCNPDNPQECLLLEPGLNEIMANSLDYNERLWAWESWRSEVGKQLRPLYEEYVVLKNEMARANHYEDYGDYWRGDYEVNGVDGYDYSRGQLIEDVEHTFEEIKPLYEHLHAYVRAKLMNAYPSYISPIGCLPAHLLGDMWGQFWTNLYSLTVPFGQKPNIDVTDAMVDQAWDAQRIFKEAEKFFVSVGLPNMTQGFWENSMLTDPGNVQKAVCHPTAWDLGKGDFRILMCTKVTMDDFLTAHHEMGHIQYDMAYAAQPFLLRNGANEGFHEAVGEIMSLSAATPKHLKSIGLLSPDFQEDNETEINFLLKQALTIVGTLPFTYMLEKWRWMVFKGEIPKDQWMKKWWEMKREIVGVVEPVPHDETYCDPASLFHVSNDYSFIRYYTRTLYQFQFQEALCQAAKHEGPLHKCDISNSTEAGQKLFNMLRLGKSEPWTLALENVVGAKNMNVRPLLNYFEPLFTWLKDQNKNSFVGWSTDWSPYADQSIKVRISLKSALGDKAYEWNDNEMYLFRSSVAYAMRQYFLKVKNQMILFGEEDVRVANLKPRISFNFFVTAPKNVSDIIPRTEVEKAIRMSRSRINDAFRLNDNSLEFLGIQPTLGPPNQPPVSTSTSPTRDKTHTCPPCPAPEAAGGPSVFLFPPKPKDTLMISRTPEVTCVVVDVSHEDPEVKFNWYVDGVEVHNAKTKPREEQYNSTYRVVSVLTVLHQDWLNGKEYKCKVSNKALGAPIEKTISKAKGQPREPQVYTLPPCRDELTKNQVSLWCLVKGFYPSDIAVEWESNGQPENNYKTTPPVLDSDGSFFLYSKLTVDKSRWQQGNVFSCSVMHEALHNHYTQKSLSLSPG

SEQ ID NO: 72 - protein, 954 aa, synthetic construct; identical to SEQ ID NO: 65
  REGION 1..954: note = ACE2-740/knob/PGLALA/R273Q

SEQ ID NO: 73 - protein, 221 aa, synthetic construct
  REGION 1..221: note = Fc6CC-hole/PGLALA/RF
CPPCPAPEAAGGPSVFLFPPKPKDTLMISRTPEVTCVVVDVSHEDPEVKFNWYVDGVEVHNAKTKPREEQYNSTYRVVSVLTVLHQDWLNGKEYKCKVSNKALGAPIEKTISKAKGQPREPQVCTLPPSRDELTKNQVSLSCAVKGFYPSDIAVEWESNGQPENNYKTTPPVLDSDGSFFLVSKLTVDKSRWQQGNVFSCSVMHEALHNRFTQKSLSLSPG

SEQ ID NO: 74 - protein, 834 aa, synthetic construct
  REGION 1..834: note = ACE2-615/69/Fc/K
QSTIEEQAKTFLDKFNHEAEDLFYQSSLASWNYNTNITEENVQNMNNAGDKWSAFLKEQSTLAQMYPLQEIQNLTVKLQLQALQQNGSSVLSEDKSKRLNTILNTMSTIYSTGKVCNPDNPQECLLLEPGLNEIMANSLDYNERLWAWESWRSEVGKQLRPLYEEYVVLKNEMARANHYEDYGDYWRGDYEVNGVDGYDYSRGQLIEDVEHTFEEIKPLYEHLHAYVRAKLMNAYPSYISPIGCLPAHLLGDMWGRFWTNLYSLTVPFGQKPNIDVTDAMVDQAWDAQRIFKEAEKFFVSVGLPNMTQGFWENSMLTDPGNVQKAVCHPTAWDLGKGDFRILMCTKVTMDDFLTAHHEMGHIQYDMAYAAQPFLLRNGANEGFHEAVGEIMSLSAATPKHLKSIGLLSPDFQEDNETEINFLLKQALTIVGTLPFTYMLEKWRWMVFKGEIPKDQWMKKWWEMKREIVGVVEPVPHDETYCDPASLFHVSNDYSFIRYYTRTLYQFQFQEALCQAAKHEGPLHKCDISNSTEAGQKLFNMLRLGKSEPWTLALENVVGAKNMNVRPLLNYFEPLFTWLKDQNKNSFVGWSTDWSPYADGGGGAGGGGDKTHTCPPCPAPELLGGPSVFLFPPKPKDTLMISRTPEVTCVVVDVSHEDPEVKFNWYVDGVEVHNAKTKPREEQYNSTYRVVSVLTVLHQDWLNGKEYKCKVSNKALPAPIEKTISKAKGQPREPQVYTLPPSRDELTKNQVSLTCLVKGFYPSDIAVEWESNGQPENNYKTTPPVLDSDGSFFLYSKLTVDKSRWQQGNVFSCSVMHEALHNHYTQKSLSLSPGK

SEQ ID NO: 75 - protein, 959 aa, synthetic construct
  REGION 1..959: note = ACE2-740/G9/Fc/K
QSTIEEQAKTFLDKFNHEAEDLFYQSSLASWNYNTNITEENVQNMNNAGDKWSAFLKEQSTLAQMYPLQEIQNLTVKLQLQALQQNGSSVLSEDKSKRLNTILNTMSTIYSTGKVCNPDNPQECLLLEPGLNEIMANSLDYNERLWAWESWRSEVGKQLRPLYEEYVVLKNEMARANHYEDYGDYWRGDYEVNGVDGYDYSRGQLIEDVEHTFEEIKPLYEHLHAYVRAKLMNAYPSYISPIGCLPAHLLGDMWGRFWTNLYSLTVPFGQKPNIDVTDAMVDQAWDAQRIFKEAEKFFVSVGLPNMTQGFWENSMLTDPGNVQKAVCHPTAWDLGKGDFRILMCTKVTMDDFLTAHHEMGHIQYDMAYAAQPFLLRNGANEGFHEAVGEIMSLSAATPKHLKSIGLLSPDFQEDNETEINFLLKQALTIVGTLPFTYMLEKWRWMVFKGEIPKDQWMKKWWEMKREIVGVVEPVPHDETYCDPASLFHVSNDYSFIRYYTRTLYQFQFQEALCQAAKHEGPLHKCDISNSTEAGQKLFNMLRLGKSEPWTLALENVVGAKNMNVRPLLNYFEPLFTWLKDQNKNSFVGWSTDWSPYADQSIKVRISLKSALGDKAYEWNDNEMYLFRSSVAYAMRQYFLKVKNQMILFGEEDVRVANLKPRISFNFFVTAPKNVSDIIPRTEVEKAIRMSRSRINDAFRLNDNSLEFLGIQPTLGPPNQPPVSGGGGAGGGGDKTHTCPPCPAPELLGGPSVFLFPPKPKDTLMISRTPEVTCVVVDVSHEDPEVKFNWYVDGVEVHNAKTKPREEQYNSTYRVVSVLTVLHQDWLNGKEYKCKVSNKALPAPIEKTISKAKGQPREPQVYTLPPSRDELTKNQVSLTCLVKGFYPSDIAVEWESNGQPENNYKTTPPVLDSDGSFFLYSKLTVDKSRWQQGNVFSCSVMHEALHNHYTQKSLSLSPGK

SEQ ID NO: 76 - protein, 829 aa, synthetic construct
  REGION 1..829: note = ACE2-615/PGLALA/R273Q
QSTIEEQAKTFLDKFNHEAEDLFYQSSLASWNYNTNITEENVQNMNNAGDKWSAFLKEQSTLAQMYPLQEIQNLTVKLQLQALQQNGSSVLSEDKSKRLNTILNTMSTIYSTGKVCNPDNPQECLLLEPGLNEIMANSLDYNERLWAWESWRSEVGKQLRPLYEEYVVLKNEMARANHYEDYGDYWRGDYEVNGVDGYDYSRGQLIEDVEHTFEEIKPLYEHLHAYVRAKLMNAYPSYISPIGCLPAHLLGDMWGQFWTNLYSLTVPFGQKPNIDVTDAMVDQAWDAQRIFKEAEKFFVSVGLPNMTQGFWENSMLTDPGNVQKAVCHPTAWDLGKGDFRILMCTKVTMDDFLTAHHEMGHIQYDMAYAAQPFLLRNGANEGFHEAVGEIMSLSAATPKHLKSIGLLSPDFQEDNETEINFLLKQALTIVGTLPFTYMLEKWRWMVFKGEIPKDQWMKKWWEMKREIVGVVEPVPHDETYCDPASLFHVSNDYSFIRYYTRTLYQFQFQEALCQAAKHEGPLHKCDISNSTEAGQKLFNMLRLGKSEPWTLALENVVGAKNMNVRPLLNYFEPLFTWLKDQNKNSFVGWSTDWSPYADEPKSSDKTHTCPPCPAPEAAGGPSVFLFPPKPKDTLMISRTPEVTCVVVDVSHEDPEVKFNWYVDGVEVHNAKTKPREEQYNSTYRVVSVLTVLHQDWLNGKEYKCKVSNKALGAPIEKTISKAKGQPREPQVYTLPPSRDELTKNQVSLTCLVKGFYPSDIAVEWESNGQPENNYKTTPPVLDSDGSFFLYSKLTVDKSRWQQGNVFSCSVMHEALHNHYTQKSLSLSPG

SEQ ID NO: 77 - protein, 954 aa, synthetic construct
  REGION 1..954: note = ACE2-740/PGLALA/R273Q
QSTIEEQAKTFLDKFNHEAEDLFYQSSLASWNYNTNITEENVQNMNNAGDKWSAFLKEQSTLAQMYPLQEIQNLTVKLQLQALQQNGSSVLSEDKSKRLNTILNTMSTIYSTGKVCNPDNPQECLLLEPGLNEIMANSLDYNERLWAWESWRSEVGKQLRPLYEEYVVLKNEMARANHYEDYGDYWRGDYEVNGVDGYDYSRGQLIEDVEHTFEEIKPLYEHLHAYVRAKLMNAYPSYISPIGCLPAHLLGDMWGQFWTNLYSLTVPFGQKPNIDVTDAMVDQAWDAQRIFKEAEKFFVSVGLPNMTQGFWENSMLTDPGNVQKAVCHPTAWDLGKGDFRILMCTKVTMDDFLTAHHEMGHIQYDMAYAAQPFLLRNGANEGFHEAVGEIMSLSAATPKHLKSIGLLSPDFQEDNETEINFLLKQALTIVGTLPFTYMLEKWRWMVFKGEIPKDQWMKKWWEMKREIVGVVEPVPHDETYCDPASLFHVSNDYSFIRYYTRTLYQFQFQEALCQAAKHEGPLHKCDISNSTEAGQKLFNMLRLGKSEPWTLALENVVGAKNMNVRPLLNYFEPLFTWLKDQNKNSFVGWSTDWSPYADQSIKVRISLKSALGDKAYEWNDNEMYLFRSSVAYAMRQYFLKVKNQMILFGEEDVRVANLKPRISFNFFVTAPKNVSDIIPRTEVEKAIRMSRSRINDAFRLNDNSLEFLGIQPTLGPPNQPPVSEPKSSDKTHTCPPCPAPEAAGGPSVFLFPPKPKDTLMISRTPEVTCVVVDVSHEDPEVKFNWYVDGVEVHNAKTKPREEQYNSTYRVVSVLTVLHQDWLNGKEYKCKVSNKALGAPIEKTISKAKGQPREPQVYTLPPSRDELTKNQVSLTCLVKGFYPSDIAVEWESNGQPENNYKTTPPVLDSDGSFFLYSKLTVDKSRWQQGNVFSCSVMHEALHNHYTQKSLSLSPG

SEQ ID NO: 78 - protein, 958 aa, synthetic construct
  REGION 1..958: note = ACE2-740/G9/PGLALA/R273Q
QSTIEEQAKTFLDKFNHEAEDLFYQSSLASWNYNTNITEENVQNMNNAGDKWSAFLKEQSTLAQMYPLQEIQNLTVKLQLQALQQNGSSVLSEDKSKRLNTILNTMSTIYSTGKVCNPDNPQECLLLEPGLNEIMANSLDYNERLWAWESWRSEVGKQLRPLYEEYVVLKNEMARANHYEDYGDYWRGDYEVNGVDGYDYSRGQLIEDVEHTFEEIKPLYEHLHAYVRAKLMNAYPSYISPIGCLPAHLLGDMWGQFWTNLYSLTVPFGQKPNIDVTDAMVDQAWDAQRIFKEAEKFFVSVGLPNMTQGFWENSMLTDPGNVQKAVCHPTAWDLGKGDFRILMCTKVTMDDFLTAHHEMGHIQYDMAYAAQPFLLRNGANEGFHEAVGEIMSLSAATPKHLKSIGLLSPDFQEDNETEINFLLKQALTIVGTLPFTYMLEKWRWMVFKGEIPKDQWMKKWWEMKREIVGVVEPVPHDETYCDPASLFHVSNDYSFIRYYTRTLYQFQFQEALCQAAKHEGPLHKCDISNSTEAGQKLFNMLRLGKSEPWTLALENVVGAKNMNVRPLLNYFEPLFTWLKDQNKNSFVGWSTDWSPYADQSIKVRISLKSALGDKAYEWNDNEMYLFRSSVAYAMRQYFLKVKNQMILFGEEDVRVANLKPRISFNFFVTAPKNVSDIIPRTEVEKAIRMSRSRINDAFRLNDNSLEFLGIQPTLGPPNQPPVSGGGGAGGGGDKTHTCPPCPAPEAAGGPSVFLFPPKPKDTLMISRTPEVTCVVVDVSHEDPEVKFNWYVDGVEVHNAKTKPREEQYNSTYRVVSVLTVLHQDWLNGKEYKCKVSNKALGAPIEKTISKAKGQPREPQVYTLPPSRDELTKNQVSLTCLVKGFYPSDIAVEWESNGQPENNYKTTPPVLDSDGSFFLYSKLTVDKSRWQQGNVFSCSVMHEALHNHYTQKSLSLSPG

SEQ ID NO: 79 - protein, 958 aa, synthetic construct
  REGION 1..958: note = ACE2-740/G9/PGLALA
QSTIEEQAKTFLDKFNHEAEDLFYQSSLASWNYNTNITEENVQNMNNAGDKWSAFLKEQSTLAQMYPLQEIQNLTVKLQLQALQQNGSSVLSEDKSKRLNTILNTMSTIYSTGKVCNPDNPQECLLLEPGLNEIMANSLDYNERLWAWESWRSEVGKQLRPLYEEYVVLKNEMARANHYEDYGDYWRGDYEVNGVDGYDYSRGQLIEDVEHTFEEIKPLYEHLHAYVRAKLMNAYPSYISPIGCLPAHLLGDMWGRFWTNLYSLTVPFGQKPNIDVTDAMVDQAWDAQRIFKEAEKFFVSVGLPNMTQGFWENSMLTDPGNVQKAVCHPTAWDLGKGDFRILMCTKVTMDDFLTAHHEMGHIQYDMAYAAQPFLLRNGANEGFHEAVGEIMSLSAATPKHLKSIGLLSPDFQEDNETEINFLLKQALTIVGTLPFTYMLEKWRWMVFKGEIPKDQWMKKWWEMKREIVGVVEPVPHDETYCDPASLFHVSNDYSFIRYYTRTLYQFQFQEALCQAAKHEGPLHKCDISNSTEAGQKLFNMLRLGKSEPWTLALENVVGAKNMNVRPLLNYFEPLFTWLKDQNKNSFVGWSTDWSPYADQSIKVRISLKSALGDKAYEWNDNEMYLFRSSVAYAMRQYFLKVKNQMILFGEEDVRVANLKPRISFNFFVTAPKNVSDIIPRTEVEKAIRMSRSRINDAFRLNDNSLEFLGIQPTLGPPNQPPVSGGGGAGGGGDKTHTCPPCPAPEAAGGPSVFLFPPKPKDTLMISRTPEVTCVVVDVSHEDPEVKFNWYVDGVEVHNAKTKPREEQYNSTYRVVSVLTVLHQDWLNGKEYKCKVSNKALGAPIEKTISKAKGQPREPQVYTLPPSRDELTKNQVSLTCLVKGFYPSDIAVEWESNGQPENNYKTTPPVLDSDGSFFLYSKLTVDKSRWQQGNVFSCSVMHEALHNHYTQKSLSLSPG

SEQ ID NO: 80 - protein, 958 aa, synthetic construct
  REGION 1..958: note = ACE2-740/G9/R273Q
QSTIEEQAKTFLDKFNHEAEDLFYQSSLASWNYNTNITEENVQNMNNAGDKWSAFLKEQSTLAQMYPLQEIQNLTVKLQLQALQQNGSSVLSEDKSKRLNTILNTMSTIYSTGKVCNPDNPQECLLLEPGLNEIMANSLDYNERLWAWESWRSEVGKQLRPLYEEYVVLKNEMARANHYEDYGDYWRGDYEVNGVDGYDYSRGQLIEDVEHTFEEIKPLYEHLHAYVRAKLMNAYPSYISPIGCLPAHLLGDMWGQFWTNLYSLTVPFGQKPNIDVTDAMVDQAWDAQRIFKEAEKFFVSVGLPNMTQGFWENSMLTDPGNVQKAVCHPTAWDLGKGDFRILMCTKVTMDDFLTAHHEMGHIQYDMAYAAQPFLLRNGANEGFHEAVGEIMSLSAATPKHLKSIGLLSPDFQEDNETEINFLLKQALTIVGTLPFTYMLEKWRWMVFKGEIPKDQWMKKWWEMKREIVGVVEPVPHDETYCDPASLFHVSNDYSFIRYYTRTLYQFQFQEALCQAAKHEGPLHKCDISNSTEAGQKLFNMLRLGKSEPWTLALENVVGAKNMNVRPLLNYFEPLFTWLKDQNKNSFVGWSTDWSPYADQSIKVRISLKSALGDKAYEWNDNEMYLFRSSVAYAMRQYFLKVKNQMILFGEEDVRVANLKPRISFNFFVTAPKNVSDIIPRTEVEKAIRMSRSRINDAFRLNDNSLEFLGIQPTLGPPNQPPVSGGGGAGGGGDKTHTCPPCPAPELLGGPSVFLFPPKPKDTLMISRTPEVTCVVVDVSHEDPEVKFNWYVDGVEVHNAKTKPREEQYNSTYRVVSVLTVLHQDWLNGKEYKCKVSNKALPAPIEKTISKAKGQPREPQVYTLPPSRDELTKNQVSLTCLVKGFYPSDIAVEWESNGQPENNYKTTPPVLDSDGSFFLYSKLTVDKSRWQQGNVFSCSVMHEALHNHYTQKSLSLSPG

SEQ ID NO: 81 - protein, 958 aa, synthetic construct
  REGION 1..958: note = ACE2-740/G9
QSTIEEQAKTFLDKFNHEAEDLFYQSSLASWNYNTNITEENVQNMNNAGDKWSAFLKEQSTLAQMYPLQEIQNLTVKLQLQALQQNGSSVLSEDKSKRLNTILNTMSTIYSTGKVCNPDNPQECLLLEPGLNEIMANSLDYNERLWAWESWRSEVGKQLRPLYEEYVVLKNEMARANHYEDYGDYWRGDYEVNGVDGYDYSRGQLIEDVEHTFEEIKPLYEHLHAYVRAKLMNAYPSYISPIGCLPAHLLGDMWGRFWTNLYSLTVPFGQKPNIDVTDAMVDQAWDAQRIFKEAEKFFVSVGLPNMTQGFWENSMLTDPGNVQKAVCHPTAWDLGKGDFRILMCTKVTMDDFLTAHHEMGHIQYDMAYAAQPFLLRNGANEGFHEAVGEIMSLSAATPKHLKSIGLLSPDFQEDNETEINFLLKQALTIVGTLPFTYMLEKWRWMVFKGEIPKDQWMKKWWEMKREIVGVVEPVPHDETYCDPASLFHVSNDYSFIRYYTRTLYQFQFQEALCQAAKHEGPLHKCDISNSTEAGQKLFNMLRLGKSEPWTLALENVVGAKNMNVRPLLNYFEPLFTWLKDQNKNSFVGWSTDWSPYADQSIKVRISLKSALGDKAYEWNDNEMYLFRSSVAYAMRQYFLKVKNQMILFGEEDVRVANLKPRISFNFFVTAPKNVSDIIPRTEVEKAIRMSRSRINDAFRLNDNSLEFLGIQPTLGPPNQPPVSGGGGAGGGGDKTHTCPPCPAPELLGGPSVFLFPPKPKDTLMISRTPEVTCVVVDVSHEDPEVKFNWYVDGVEVHNAKTKPREEQYNSTYRVVSVLTVLHQDWLNGKEYKCKVSNKALPAPIEKTISKAKGQPREPQVYTLPPSRDELTKNQVSLTCLVKGFYPSDIAVEWESNGQPENNYKTTPPVLDSDGSFFLYSKLTVDKSRWQQGNVFSCSVMHEALHNHYTQKSLSLSPG

SEQ ID NO: 82 - protein, 320 aa, synthetic construct
  REGION 1..320: note = ACE2-106/knob/PGLALA
QSTIEEQAKTFLDKFNHEAEDLFYQSSLASWNYNTNITEENVQNMNNAGDKWSAFLKEQSTLAQMYPLQEIQNLTVKLQLQALQQNGSSEPKSSDKTHTCPPCPAPEAAGGPSVFLFPPKPKDTLMISRTPEVTCVVVDVSHEDPEVKFNWYVDGVEVHNAKTKPREEQYNSTYRVVSVLTVLHQDWLNGKEYKCKVSNKALGAPIEKTISKAKGQPREPQVYTLPPCRDELTKNQVSLWCLVKGFYPSDIAVEWESNGQPENNYKTTPPVLDSDGSFFLYSKLTVDKSRWQQGNVFSCSVMHEALHNHYTQKSLSLSPG

SEQ ID NO: 83 - protein, 320 aa, synthetic construct
  REGION 1..320: note = ACE2-106/PGLALA
QSTIEEQAKTFLDKFNHEAEDLFYQSSLASWNYNTNITEENVQNMNNAGDKWSAFLKEQSTLAQMYPLQEIQNLTVKLQLQALQQNGSSEPKSSDKTHTCPPCPAPEAAGGPSVFLFPPKPKDTLMISRTPEVTCVVVDVSHEDPEVKFNWYVDGVEVHNAKTKPREEQYNSTYRVVSVLTVLHQDWLNGKEYKCKVSNKALGAPIEKTISKAKGQPREPQVYTLPPSRDELTKNQVSLTCLVKGFYPSDIAVEWESNGQPENNYKTTPPVLDSDGSFFLYSKLTVDKSRWQQGNVFSCSVMHEALHNHYTQKSLSLSPG

SEQ ID NO: 84 - protein, 815 aa, synthetic construct
  REGION 1..815: note = ACE2-106x6/knob/PGLALA
QSTIEEQAKTFLDKFNHEAEDLFYQSSLASWNYNTNITEENVQNMNNAGDKWSAFLKEQSTLAQMYPLQEIQNLTVKLQLQALQQNGSSGGGGSGGGGSQSTIEEQAKTFLDKFNHEAEDLFYQSSLASWNYNTNITEENVQNMNNAGDKWSAFLKEQSTLAQMYPLQEIQNLTVKLQLQALQQNGSSGGGGSGGGGSQSTIEEQAKTFLDKFNHEAEDLFYQSSLASWNYNTNITEENVQNMNNAGDKWSAFLKEQSTLAQMYPLQEIQNLTVKLQLQALQQNGSSGGGGSGGGGSQSTIEEQAKTFLDKFNHEAEDLFYQSSLASWNYNTNITEENVQNMNNAGDKWSAFLKEQSTLAQMYPLQEIQNLTVKLQLQALQQNGSSGGGGSGGGGSQSTIEEQAKTFLDKFNHEAEDLFYQSSLASWNYNTNITEENVQNMNNAGDKWSAFLKEQSTLAQMYPLQEIQNLTVKLQLQALQQNGSSGGGGSGGGGSQSTIEEQAKTFLDKFNHEAEDLFYQSSLASWNYNTNITEENVQNMNNAGDKWSAFLKEQSTLAQMYPLQEIQNLTVKLQLQALQQNGSSEPKSSDKTHTCPPCPAPEAAGGPSVFLFPPKPKDTLMISRTPEVTCVVVDVSHEDPEVKFNWYVDGVEVHNAKTKPREEQYNSTYRVVSVLTVLHQDWLNGKEYKCKVSNKALGAPIEKTISKAKGQPREPQVYTLPPCRDELTKNQVSLWCLVKGFYPSDIAVEWESNGQPENNYKTTPPVLDSDGSFFLYSKLTVDKSRWQQGNVFSCSVMHEALHNHYTQKSLSLSPG

SEQ ID NO: 85 - protein, 815 aa, synthetic construct
  REGION 1..815: note = ACE2-106x6/PGLALA
QSTIEEQAKTFLDKFNHEAEDLFYQSSLASWNYNTNITEENVQNMNNAGDKWSAFLKEQSTLAQMYPLQEIQNLTVKLQLQALQQNGSSGGGGSGGGGSQSTIEEQAKTFLDKFNHEAEDLFYQSSLASWNYNTNITEENVQNMNNAGDKWSAFLKEQSTLAQMYPLQEIQNLTVKLQLQALQQNGSSGGGGSGGGGSQSTIEEQAKTFLDKFNHEAEDLFYQSSLASWNYNTNITEENVQNMNNAGDKWSAFLKEQSTLAQMYPLQEIQNLTVKLQLQALQQNGSSGGGGSGGGGSQSTIEEQAKTFLDKFNHEAEDLFYQSSLASWNYNTNITEENVQNMNNAGDKWSAFLKEQSTLAQMYPLQEIQNLTVKLQLQALQQNGSSGGGGSGGGGSQSTIEEQAKTFLDKFNHEAEDLFYQSSLASWNYNTNITEENVQNMNNAGDKWSAFLKEQSTLAQMYPLQEIQNLTVKLQLQALQQNGSSGGGGSGGGGSQSTIEEQAKTFLDKFNHEAEDLFYQSSLASWNYNTNITEENVQNMNNAGDKWSAFLKEQSTLAQMYPLQEIQNLTVKLQLQALQQNGSSEPKSSDKTHTCPPCPAPEAAGGPSVFLFPPKPKDTLMISRTPEVTCVVVDVSHEDPEVKFNWYVDGVEVHNAKTKPREEQYNSTYRVVSVLTVLHQDWLNGKEYKCKVSNKALGAPIEKTISKAKGQPREPQVYTLPPSRDELTKNQVSLTCLVKGFYPSDIAVEWESNGQPENNYKTTPPVLDSDGSFFLYSKLTVDKSRWQQGNVFSCSVMHEALHNHYTQKSLSLSPG

SEQ ID NO: 86 - protein, 899 aa, synthetic construct
  REGION 1..899: note = CoV2-680/knob/PGLALA
SQCVNLTTRTQLPPAYTNSFTRGVYYPDKVFRSSVLHSTQDLFLPFFSNVTWFHAIHVSGTNGTKRFDNPVLPFNDGVYFASTEKSNIIRGWIFGTTLDSKTQSLLIVNNATNVVIKVCEFQFCNDPFLGVYYHKNNKSWMESEFRVYSSANNCTFEYVSQPFLMDLEGKQGNFKNLREFVFKNIDGYFKIYSKHTPINLVRDLPQGFSALEPLVDLPIGINITRFQTLLALHRSYLTPGDSSSGWTAGAAAYYVGYLQPRTFLLKYNENGTITDAVDCALDPLSETKCTLKSFTVEKGIYQTSNFRVQPTESIVRFPNITNLCPFGEVFNATRFASVYAWNRKRISNCVADYSVLYNSASFSTFKCYGVSPTKLNDLCFTNVYADSFVIRGDEVRQIAPGQTGKIADYNYKLPDDFTGCVIAWNSNNLDSKVGGNYNYLYRLFRKSNLKPFERDISTEIYQAGSTPCNGVEGFNCYFPLQSYGFQPTNGVGYQPYRVVVLSFELLHAPATVCGPKKSTNLVKNKCVNFNFNGLTGTGVLTESNKKFLPFQQFGRDIADTTDAVRDPQTLEILDITPCSFGGVSVITPGTNTSNQVAVLYQDVNCTEVPVAIHADQLTPTWRVYSTGSNVFQTRAGCLIGAEHVNNSYECDIPIGAGICASYQTQTNSEPKSSDKTHTCPPCPAPEAAGGPSVFLFPPKPKDTLMISRTPEVTCVVVDVSHEDPEVKFNWYVDGVEVHNAKTKPREEQYNSTYRVVSVLTVLHQDWLNGKEYKCKVSNKALGAPIEKTISKAKGQPREPQVYTLPPCRDELTKNQVSLWCLVKGFYPSDIAVEWESNGQPENNYKTTPPVLDSDGSFFLYSKLTVDKSRWQQGNVFSCSVMHEALHNHYTQKSLSLSPG

SEQ ID NO: 87 - protein, 899 aa, synthetic construct
  REGION 1..899: note = CoV2-680/PGLALA
SQCVNLTTRTQLPPAYTNSFTRGVYYPDKVFRSSVLHSTQDLFLPFFSNVTWFHAIHVSGTNGTKRFDNPVLPFNDGVYFASTEKSNIIRGWIFGTTLDSKTQSLLIVNNATNVVIKVCEFQFCNDPFLGVYYHKNNKSWMESEFRVYSSANNCTFEYVSQPFLMDLEGKQGNFKNLREFVFKNIDGYFKIYSKHTPINLVRDLPQGFSALEPLVDLPIGINITRFQTLLALHRSYLTPGDSSSGWTAGAAAYYVGYLQPRTFLLKYNENGTITDAVDCALDPLSETKCTLKSFTVEKGIYQTSNFRVQPTESIVRFPNITNLCPFGEVFNATRFASVYAWNRKRISNCVADYSVLYNSASFSTFKCYGVSPTKLNDLCFTNVYADSFVIRGDEVRQIAPGQTGKIADYNYKLPDDFTGCVIAWNSNNLDSKVGGNYNYLYRLFRKSNLKPFERDISTEIYQAGSTPCNGVEGFNCYFPLQSYGFQPTNGVGYQPYRVVVLSFELLHAPATVCGPKKSTNLVKNKCVNFNFNGLTGTGVLTESNKKFLPFQQFGRDIADTTDAVRDPQTLEILDITPCSFGGVSVITPGTNTSNQVAVLYQDVNCTEVPVAIHADQLTPTWRVYSTGSNVFQTRAGCLIGAEHVNNSYECDIPIGAGICASYQTQTNSEPKSSDKTHTCPPCPAPEAAGGPSVFLFPPKPKDTLMISRTPEVTCVVVDVSHEDPEVKFNWYVDGVEVHNAKTKPREEQYNSTYRVVSVLTVLHQDWLNGKEYKCKVSNKALGAPIEKTISKAKGQPREPQVYTLPPSRDELTKNQVSLTCLVKGFYPSDIAVEWESNGQPENNYKTTPPVLDSDGSFFLYSKLTVDKSRWQQGNVFSCSVMHEALHNHYTQKSLSLSPG

SEQ ID NO: 88 - protein, 884 aa, synthetic construct
  REGION 1..884: note = SARS-666/knob/PGLALA
SDLDRCTTFDDVQAPNYTQHTSSMRGVYYPDEIFRSDTLYLTQDLFLPFYSNVTGFHTINHTFGNPVIPFKDGIYFAATEKSNVVRGWVFGSTMNNKSQSVIIINNSTNVVIRACNFELCDNPFFAVSKPMGTQTHTMIFDNAFNCTFEYISDAFSLDVSEKSGNFKHLREFVFKNKDGFLYVYKGYQPIDVVRDLPSGFNTLKPIFKLPLGINITNFRAILTAFSPAQDIWGTSAAAYFVGYLKPTTFMLKYDENGTITDAVDCSQNPLAELKCSVKSFEIDKGIYQTSNFRVVPSGDVVRFPNITNLCPFGEVFNATKFPSVYAWERKKISNCVADYSVLYNSTFFSTFKCYGVSATKLNDLCFSNVYADSFVVKGDDVRQIAPGQTGVIADYNYKLPDDFMGCVLAWNTRNIDATSTGNYNYKYRYLRHGKLRPFERDISNVPFSPDGKPCTPPALNCYWPLNDYGFYTTTGIGYQPYRVVVLSFELLNAPATVCGPKLSTDLIKNQCVNFNFNGLTGTGVLTPSSKRFQPFQQFGRDVSDFTDSVRDPKTSEILDISPCSFGGVSVITPGTNASSEVAVLYQDVNCTDVSTAIHADQLTPAWRIYSTGNNVFQTQAGCLIGAEHVDTSYECDIPIGAGICASYHTVSLLEPKSSDKTHTCPPCPAPEAAGGPSVFLFPPKPKDTLMISRTPEVTCVVVDVSHEDPEVKFNWYVDGVEVHNAKTKPREEQYNSTYRVVSVLTVLHQDWLNGKEYKCKVSNKALGAPIEKTISKAKGQPREPQVYTLPPCRDELTKNQVSLWCLVKGFYPSDIAVEWESNGQPENNYKTTPPVLDSDGSFFLYSKLTVDKSRWQQGNVFSCSVMHEALHNHYTQKSLSLSPG

SEQ ID NO: 89 - protein, 899 aa, synthetic construct
  REGION 1..899: note = RaTG13-680/knob/PGLALA
SQCVNLTTRTQLPPAYTNSSTRGVYYPDKVFRSSVLHLTQDLFLPFFSNVTWFHAIHVSGTNGIKRFDNPVLPFNDGVYFASTEKSNIIRGWIFGTTLDSKTQSLLIVNNATNVVIKVCEFQFCNDPFLGVYYHKNNKSWMESEFRVYSSANNCTFEYVSQPFLMDLEGKQGNFKNLREFVFKNIDGYFKIYSKHTPINLVRDLPPGFSALEPLVDLPIGINITRFQTLLALHRSYLTPGDSSSGWTAGAAAYYVGYLQPRTFLLKYNENGTITDAVDCALDPLSETKCTLKSFTVEKGIYQTSNFRVQPTDSIVRFPNITNLCPFGEVFNATTFASVYAWNRKRISNCVADYSVLYNSTSFSTFKCYGVSPTKLNDLCFTNVYADSFVITGDEVRQIAPGQTGKIADYNYKLPDDFTGCVIAWNSKHIDAKEGGNFNYLYRLFRKANLKPFERDISTEIYQAGSKPCNGQTGLNCYYPLYRYGFYPTDGVGHQPYRVVVLSFELLNAPATVCGPKKSTNLVKNKCVNFNFNGLTGTGVLTESNKKFLPFQQFGRDIADTTDAVRDPQTLEILDITPCSFGGVSVITPGTNASNQVAVLYQDVNCTEVPVAIHADQLTPTWRVYSTGSNVFQTRAGCLIGAEHVNNSYECDIPIGAGICASYQTQTNSEPKSSDKTHTCPPCPAPEAAGGPSVFLFPPKPKDTLMISRTPEVTCVVVDVSHEDPEVKFNWYVDGVEVHNAKTKPREEQYNSTYRVVSVLTVLHQDWLNGKEYKCKVSNKALGAPIEKTISKAKGQPREPQVYTLPPCRDELTKNQVSLWCLVKGFYPSDIAVEWESNGQPENNYKTTPPVLDSDGSFFLYSKLTVDKSRWQQGNVFSCSVMHEALHNHYTQKSLSLSPG

SEQ ID NO: 90 - protein, 1006 aa, synthetic construct
  REGION 1..1006: note = ACE2-740/235/PGLALA/R273Q
QSTIEEQAKTFLDKFNHEAEDLFYQSSLASWNYNTNITEENVQNMNNAGDKWSAFLKEQSTLAQMYPLQEIQNLTVKLQLQALQQNGSSVLSEDKSKRLNTILNTMSTIYSTGKVCNPDNPQECLLLEPGLNEIMANSLDYNERLWAWESWRSEVGKQLRPLYEEYVVLKNEMARANHYEDYGDYWRGDYEVNGVDGYDYSRGQLIEDVEHTFEEIKPLYEHLHAYVRAKLMNAYPSYISPIGCLPAHLLGDMWGQFWTNLYSLTVPFGQKPNIDVTDAMVDQAWDAQRIFKEAEKFFVSVGLPNMTQGFWENSMLTDPGNVQKAVCHPTAWDLGKGDFRILMCTKVTMDDFLTAHHEMGHIQYDMAYAAQPFLLRNGANEGFHEAVGEIMSLSAATPKHLKSIGLLSPDFQEDNETEINFLLKQALTIVGTLPFTYMLEKWRWMVFKGEIPKDQWMKKWWEMKREIVGVVEPVPHDETYCDPASLFHVSNDYSFIRYYTRTLYQFQFQEALCQAAKHEGPLHKCDISNSTEAGQKLFNMLRLGKSEPWTLALENVVGAKNMNVRPLLNYFEPLFTWLKDQNKNSFVGWSTDWSPYADQSIKVRISLKSALGDKAYEWNDNEMYLFRSSVAYAMRQYFLKVKNQMILFGEEDVRVANLKPRISFNFFVTAPKNVSDIIPRTEVEKAIRMSRSRINDAFRLNDNSLEFLGIQPTLGPPNQPPVSTSTSPTRSMAPGAVHLPQPVSTRSQHTQPTPEPSTAPSTSFLLPMGPSPPAEGSTGDDKTHTCPPCPAPEAAGGPSVFLFPPKPKDTLMISRTPEVTCVVVDVSHEDPEVKFNWYVDGVEVHNAKTKPREEQYNSTYRVVSVLTVLHQDWLNGKEYKCKVSNKALGAPIEKTISKAKGQPREPQVYTLPPSRDELTKNQVSLTCLVKGFYPSDIAVEWESNGQPENNYKTTPPVLDSDGSFFLYSKLTVDKSRWQQGNVFSCSVMHEALHNHYTQKSLSLSPG

SEQ ID NO: 91 - protein, 983 aa, synthetic construct
  REGION 1..983: note = ACE2-740/212/PGLALA/R273Q
QSTIEEQAKTFLDKFNHEAEDLFYQSSLASWNYNTNITEENVQNMNNAGDKWSAFLKEQSTLAQMYPLQEIQNLTVKLQLQALQQNGSSVLSEDKSKRLNTILNTMSTIYSTGKVCNPDNPQECLLLEPGLNEIMANSLDYNERLWAWESWRSEVGKQLRPLYEEYVVLKNEMARANHYEDYGDYWRGDYEVNGVDGYDYSRGQLIEDVEHTFEEIKPLYEHLHAYVRAKLMNAYPSYISPIGCLPAHLLGDMWGQFWTNLYSLTVPFGQKPNIDVTDAMVDQAWDAQRIFKEAEKFFVSVGLPNMTQGFWENSMLTDPGNVQKAVCHPTAWDLGKGDFRILMCTKVTMDDFLTAHHEMGHIQYDMAYAAQPFLLRNGANEGFHEAVGEIMSLSAATPKHLKSIGLLSPDFQEDNETEINFLLKQALTIVGTLPFTYMLEKWRWMVFKGEIPKDQWMKKWWEMKREIVGVVEPVPHDETYCDPASLFHVSNDYSFIRYYTRTLYQFQFQEALCQAAKHEGPLHKCDISNSTEAGQKLFNMLRLGKSEPWTLALENVVGAKNMNVRPLLNYFEPLFTWLKDQNKNSFVGWSTDWSPYADQSIKVRISLKSALGDKAYEWNDNEMYLFRSSVAYAMRQYFLKVKNQMILFGEEDVRVANLKPRISFNFFVTAPKNVSDIIPRTEVEKAIRMSRSRINDAFRLNDNSLEFLGIQPTLGPPNQPPVSTSTSPTRSMAPGAVHLPQPVSTRSQHTQPTPEPSDKTHTCPPCPAPEAAGGPSVFLFPPKPKDTLMISRTPEVTCVVVDVSHEDPEVKFNWYVDGVEVHNAKTKPREEQYNSTYRVVSVLTVLHQDWLNGKEYKCKVSNKALGAPIEKTISKAKGQPREPQVYTLPPSRDELTKNQVSLTCLVKGFYPSDIAVEWESNGQPENNYKTTPPVLDSDGSFFLYSKLTVDKSRWQQGNVFSCSVMHEALHNHYTQKSLSLSPG

SEQ ID NO: 92 - protein, 979 aa, synthetic construct
  REGION 1..979: note = ACE2-740/208/PGLALA/R273Q
QSTIEEQAKTFLDKFNHEAEDLFYQSSLASWNYNTNITEENVQNMNNAGDKWSAFLKEQSTLAQMYPLQEIQNLTVKLQLQALQQNGSSVLSEDKSKRLNTILNTMSTIYSTGKVCNPDNPQECLLLEPGLNEIMANSLDYNERLWAWESWRSEVGKQLRPLYEEYVVLKNEMARANHYEDYGDYWRGDYEVNGVDGYDYSRGQLIEDVEHTFEEIKPLYEHLHAYVRAKLMNAYPSYISPIGCLPAHLLGDMWGQFWTNLYSLTVPFGQKPNIDVTDAMVDQAWDAQRIFKEAEKFFVSVGLPNMTQGFWENSMLTDPGNVQKAVCHPTAWDLGKGDFRILMCTKVTMDDFLTAHHEMGHIQYDMAYAAQPFLLRNGANEGFHEAVGEIMSLSAATPKHLKSIGLLSPDFQEDNETEINFLLKQALTIVGTLPFTYMLEKWRWMVFKGEIPKDQWMKKWWEMKREIVGVVEPVPHDETYCDPASLFHVSNDYSFIRYYTRTLYQFQFQEALCQAAKHEGPLHKCDISNSTEAGQKLFNMLRLGKSEPWTLALENVVGAKNMNVRPLLNYFEPLFTWLKDQNKNSFVGWSTDWSPYADQSIKVRISLKSALGDKAYEWNDNEMYLFRSSVAYAMRQYFLKVKNQMILFGEEDVRVANLKPRISFNFFVTAPKNVSDIIPRTEVEKAIRMSRSRINDAFRLNDNSLEFLGIQPTLGPPNQPPVSTSTSPTRSMAPGAVHLPQPVSTRSQHTQPTDKTHTCPPCPAPEAAGGPSVFLFPPKPKDTLMISRTPEVTCVVVDVSHEDPEVKFNWYVDGVEVHNAKTKPREEQYNSTYRVVSVLTVLHQDWLNGKEYKCKVSNKALGAPIEKTISKAKGQPREPQVYTLPPSRDELTKNQVSLTCLVKGFYPSDIAVEWESNGQPENNYKTTPPVLDSDGSFFLYSKLTVDKSRWQQGNVFSCSVMHEALHNHYTQKSLSLSPG

SEQ ID NO: 93 - protein, 973 aa, synthetic construct
  REGION 1..973: note = ACE2-740/202/PGLALA/R273Q
QSTIEEQAKTFLDKFNHEAEDLFYQSSLASWNYNTNITEENVQNMNNAGDKWSAFLKEQSTLAQMYPLQEIQNLTVKLQLQALQQNGSSVLSEDKSKRLNTILNTMSTIYSTGKVCNPDNPQECLLLEPGLNEIMANSLDYNERLWAWESWRSEVGKQLRPLYEEYVVLKNEMARANHYEDYGDYWRGDYEVNGVDGYDYSRGQLIEDVEHTFEEIKPLYEHLHAYVRAKLMNAYPSYISPIGCLPAHLLGDMWGQFWTNLYSLTVPFGQKPNIDVTDAMVDQAWDAQRIFKEAEKFFVSVGLPNMTQGFWENSMLTDPGNVQKAVCHPTAWDLGKGDFRILMCTKVTMDDFLTAHHEMGHIQYDMAYAAQPFLLRNGANEGFHEAVGEIMSLSAATPKHLKSIGLLSPDFQEDNETEINFLLKQALTIVGTLPFTYMLEKWRWMVFKGEIPKDQWMKKWWEMKREIVGVVEPVPHDETYCDPASLFHVSNDYSFIRYYTRTLYQFQFQEALCQAAKHEGPLHKCDISNSTEAGQKLFNMLRLGKSEPWTLALENVVGAKNMNVRPLLNYFEPLFTWLKDQNKNSFVGWSTDWSPYADQSIKVRISLKSALGDKAYEWNDNEMYLFRSSVAYAMRQYFLKVKNQMILFGEEDVRVANLKPRISFNFFVTAPKNVSDIIPRTEVEKAIRMSRSRINDAFRLNDNSLEFLGIQPTLGPPNQPPVSTSTSPTRSMAPGAVHLPQPVSTRSDKTHTCPPCPAPEAAGGPSVFLFPPKPKDTLMISRTPEVTCVVVDVSHEDPEVKFNWYVDGVEVHNAKTKPREEQYNSTYRVVSVLTVLHQDWLNGKEYKCKVSNKALGAPIEKTISKAKGQPREPQVYTLPPSRDELTKNQVSLTCLVKGFYPSDIAVEWESNGQPENNYKTTPPVLDSDGSFFLYSKLTVDKSRWQQGNVFSCSVMHEALHNHYTQKSLSLSPG

SEQ ID NO: 94 - protein, 972 aa, synthetic construct
  REGION 1..972: note = ACE2-740/201/PGLALA/R273Q
QSTIEEQAKTFLDKFNHEAEDLFYQSSLASWNYNTNITEENVQNMNNAGDKWSAFLKEQSTLAQMYPLQEIQNLTVKLQLQALQQNGSSVLSEDKSKRLNTILNTMSTIYSTGKVCNPDNPQECLLLEPGLNEIMANSLDYNERLWAWESWRSEVGKQLRPLYEEYVVLKNEMARANHYEDYGDYWRGDYEVNGVDGYDYSRGQLIEDVEHTFEEIKPLYEHLHAYVRAKLMNAYPSYISPIGCLPAHLLGDMWGQFWTNLYSLTVPFGQKPNIDVTDAMVDQAWDAQRIFKEAEKFFVSVGLPNMTQGFWENSMLTDPGNVQKAVCHPTAWDLGKGDFRILMCTKVTMDDFLTAHHEMGHIQYDMAYAAQPFLLRNGANEGFHEAVGEIMSLSAATPKHLKSIGLLSPDFQEDNETEINFLLKQALTIVGTLPFTYMLEKWRWMVFKGEIPKDQWMKKWWEMKREIVGVVEPVPHDETYCDPASLFHVSNDYSFIRYYTRTLYQFQFQEALCQAAKHEGPLHKCDISNSTEAGQKLFNMLRLGKSEPWTLALENVVGAKNMNVRPLLNYFEPLFTWLKDQNKNSFVGWSTDWSPYADQSIKVRISLKSALGDKAYEWNDNEMYLFRSSVAYAMRQYFLKVKNQMILFGEEDVRVANLKPRISFNFFVTAPKNVSDIIPRTEVEKAIRMSRSRINDAFRLNDNSLEFLGIQPTLGPPNQPPVSTSTSPTRSMAPGAVHLPQPVSTRDKTHTCPPCPAPEAAGGPSVFLFPPKPKDTLMISRTPEVTCVVVDVSHEDPEVKFNWYVDGVEVHNAKTKPREEQYNSTYRVVSVLTVLHQDWLNGKEYKCKVSNKALGAPIEKTISKAKGQPREPQVYTLPPSRDELTKNQVSLTCLVKGFYPSDIAVEWESNGQPENNYKTTPPVLDSDGSFFLYSKLTVDKSRWQQGNVFSCSVMHEALHNHYTQKSLSLSPG

SEQ ID NO: 95 - protein, 971 aa, synthetic construct
  REGION 1..971: note = ACE2-740/200/PGLALA/R273Q
QSTIEEQAKTFLDKFNHEAEDLFYQSSLASWNYNTNITEENVQNMNNAGDKWSAFLKEQSTLAQMYPLQEIQNLTVKLQLQALQQNGSSVLSEDKSKRLNTILNTMSTIYSTGKVCNPDNPQECLLLEPGLNEIMANSLDYNERLWAWESWRSEVGKQLRPLYEEYVVLKNEMARANHYEDYGDYWRGDYEVNGVDGYDYSRGQLIEDVEHTFEEIKPLYEHLHAYVRAKLMNAYPSYISPIGCLPAHLLGDMWGQFWTNLYSLTVPFGQKPNIDVTDAMVDQAWDAQRIFKEAEKFFVSVGLPNMTQGFWENSMLTDPGNVQKAVCHPTAWDLGKGDFRILMCTKVTMDDFLTAHHEMGHIQYDMAYAAQPFLLRNGANEGFHEAVGEIMSLSAATPKHLKSIGLLSPDFQEDNETEINFLLKQALTIVGTLPFTYMLEKWRWMVFKGEIPKDQWMKKWWEMKREIVGVVEPVPHDETYCDPASLFHVSNDYSFIRYYTRTLYQFQFQEALCQAAKHEGPLHKCDISNSTEAGQKLFNMLRLGKSEPWTLALENVVGAKNMNVRPLLNYFEPLFTWLKDQNKNSFVGWSTDWSPYADQSIKVRISLKSALGDKAYEWNDNEMYLFRSSVAYAMRQYFLKVKNQMILFGEEDVRVANLKPRISFNFFVTAPKNVSDIIPRTEVEKAIRMSRSRINDAFRLNDNSLEFLGIQPTLGPPNQPPVSTSTSPTRSMAPGAVHLPQPVSTDKTHTCPPCPAPEAAGGPSVFLFPPKPKDTLMISRTPEVTCVVVDVSHEDPEVKFNWYVDGVEVHNAKTKPREEQYNSTYRVVSVLTVLHQDWLNGKEYKCKVSNKALGAPIEKTISKAKGQPREPQVYTLPPSRDELTKNQVSLTCLVKGFYPSDIAVEWESNGQPENNYKTTPPVLDSDGSFFLYSKLTVDKSRWQQGNVFSCSVMHEALHNHYTQKSLSLSPG

SEQ ID NO: 96 - protein, 970 aa, synthetic construct
  REGION 1..970: note = ACE2-740/199/PGLALA/R273Q
QSTIEEQAKTFLDKFNHEAEDLFYQSSLASWNYNTNITEENVQNMNNAGDKWSAFLKEQSTLAQMYPLQEIQNLTVKLQLQALQQNGSSVLSEDKSKRLNTILNTMSTIYSTGKVCNPDNPQECLLLEPGLNEIMANSLDYNERLWAWESWRSEVGKQLRPLYEEYVVLKNEMARANHYEDYGDYWRGDYEVNGVDGYDYSRGQLIEDVEHTFEEIKPLYEHLHAYVRAKLMNAYPSYISPIGCLPAHLLGDMWGQFWTNLYSLTVPFGQKPNIDVTDAMVDQAWDAQRIFKEAEKFFVSVGLPNMTQGFWENSMLTDPGNVQKAVCHPTAWDLGKGDFRILMCTKVTMDDFLTAHHEMGHIQYDMAYAAQPFLLRNGANEGFHEAVGEIMSLSAATPKHLKSIGLLSPDFQEDNETEINFLLKQALTIVGTLPFTYMLEKWRWMVFKGEIPKDQWMKKWWEMKREIVGVVEPVPHDETYCDPASLFHVSNDYSFIRYYTRTLYQFQFQEALCQAAKHEGPLHKCDISNSTEAGQKLFNMLRLGKSEPWTLALENVVGAKNMNVRPLLNYFEPLFTWLKDQNKNSFVGWSTDWSPYADQSIKVRISLKSALGDKAYEWNDNEMYLFRSSVAYAMRQYFLKVKNQMILFGEEDVRVANLKPRISFNFFVTAPKNVSDIIPRTEVEKAIRMSRSRINDAFRLNDNSLEFLGIQPTLGPPNQPPVSTSTSPTRSMAPGAVHLPQPVSDKTHTCPPCPAPEAAGGPSVFLFPPKPKDTLMISRTPEVTCVVVDVSHEDPEVKFNWYVDGVEVHNAKTKPREEQYNSTYRVVSVLTVLHQDWLNGKEYKCKVSNKALGAPIEKTISKAKGQPREPQVYTLPPSRDELTKNQVSLTCLVKGFYPSDIAVEWESNGQPENNYKTTPPVLDSDGSFFLYSKLTVDKSRWQQGNVFSCSVMHEALHNHYTQKSLSLSPG

SEQ ID NO: 97 - protein, 969 aa, synthetic construct
  REGION 1..969: note = ACE2-740/198/PGLALA/R273Q
QSTIEEQAKTFLDKFNHEAEDLFYQSSLASWNYNTNITEENVQNMNNAGDKWSAFLKEQSTLAQMYPLQEIQNLTVKLQLQALQQNGSSVLSEDKSKRLNTILNTMSTIYSTGKVCNPDNPQECLLLEPGLNEIMANSLDYNERLWAWESWRSEVGKQLRPLYEEYVVLKNEMARANHYEDYGDYWRGDYEVNGVDGYDYSRGQLIEDVEHTFEEIKPLYEHLHAYVRAKLMNAYPSYISPIGCLPAHLLGDMWGQFWTNLYSLTVPFGQKPNIDVTDAMVDQAWDAQRIFKEAEKFFVSVGLPNMTQGFWENSMLTDPGNVQKAVCHPTAWDLGKGDFRILMCTKVTMDDFLTAHHEMGHIQYDMAYAAQPFLLRNGANEGFHEAVGEIMSLSAATPKHLKSIGLLSPDFQEDNETEINFLLKQALTIVGTLPFTYMLEKWRWMVFKGEIPKDQWMKKWWEMKREIVGVVEPVPHDETYCDPASLFHVSNDYSFIRYYTRTLYQFQFQEALCQAAKHEGPLHKCDISNSTEAGQKLFNMLRLGKSEPWTLALENVVGAKNMNVRPLLNYFEPLFTWLKDQNKNSFVGWSTDWSPYADQSIKVRISLKSALGDKAYEWNDNEMYLFRSSVAYAMRQYFLKVKNQMILFGEEDVRVANLKPRISFNFFVTAPKNVSDIIPRTEVEKAIRMSRSRINDAFRLNDNSLEFLGIQPTLGPPNQPPVSTSTSPTRSMAPGAVHLPQPVDKTHTCPPCPAPEAAGGPSVFLFPPKPKDTLMISRTPEVTCVVVDVSHEDPEVKFNWYVDGVEVHNAKTKPREEQYNSTYRVVSVLTVLHQDWLNGKEYKCKVSNKALGAPIEKTISKAKGQPREPQVYTLPPSRDELTKNQVSLTCLVKGFYPSDIAVEWESNGQPENNYKTTPPVLDSDGSFFLYSKLTVDKSRWQQGNVFSCSVMHEALHNHYTQKSLSLSPG

SEQ ID NO: 98 - protein, 968 aa, synthetic construct
  REGION 1..968: note = ACE2-740/197/PGLALA/R273Q
QSTIEEQAKTFLDKFNHEAEDLFYQSSLASWNYNTNITEENVQNMNNAGDKWSAFLKEQSTLAQMYPLQEIQNLTVKLQLQALQQNGSSVLSEDKSKRLNTILNTMSTIYSTGKVCNPDNPQECLLLEPGLNEIMANSLDYNERLWAWESWRSEVGKQLRPLYEEYVVLKNEMARANHYEDYGDYWRGDYEVNGVDGYDYSRGQLIEDVEHTFEEIKPLYEHLHAYVRAKLMNAYPSYISPIGCLPAHLLGDMWGQFWTNLYSLTVPFGQKPNIDVTDAMVDQAWDAQRIFKEAEKFFVSVGLPNMTQGFWENSMLTDPGNVQKAVCHPTAWDLGKGDFRILMCTKVTMDDFLTAHHEMGHIQYDMAYAAQPFLLRNGANEGFHEAVGEIMSLSAATPKHLKSIGLLSPDFQEDNETEINFLLKQALTIVGTLPFTYMLEKWRWMVFKGEIPKDQWMKKWWEMKREIVGVVEPVPHDETYCDPASLFHVSNDYSFIRYYTRTLYQFQFQEALCQAAKHEGPLHKCDISNSTEAGQKLFNMLRLGKSEPWTLALENVVGAKNMNVRPLLNYFEPLFTWLKDQNKNSFVGWSTDWSPYADQSIKVRISLKSALGDKAYEWNDNEMYLFRSSVAYAMRQYFLKVKNQMILFGEEDVRVANLKPRISFNFFVTAPKNVSDIIPRTEVEKAIRMSRSRINDAFRLNDNSLEFLGIQPTLGPPNQPPVSTSTSPTRSMAPGAVHLPQPDKTHTCPPCPAPEAAGGPSVFLFPPKPKDTLMISRTPEVTCVVVDVSHEDPEVKFNWYVDGVEVHNAKTKPREEQYNSTYRVVSVLTVLHQDWLNGKEYKCKVSNKALGAPIEKTISKAKGQPREPQVYTLPPSRDELTKNQVSLTCLVKGFYPSDIAVEWESNGQPENNYKTTPPVLDSDGSFFLYSKLTVDKSRWQQGNVFSCSVMHEALHNHYTQKSLSLSPG

SEQ ID NO: 99 - protein, 967 aa, synthetic construct
  REGION 1..967: note = ACE2-740/196/PGLALA/R273Q
QSTIEEQAKTFLDKFNHEAEDLFYQSSLASWNYNTNITEENVQNMNNAGDKWSAFLKEQSTLAQMYPLQEIQNLTVKLQLQALQQNGSSVLSEDKSKRLNTILNTMSTIYSTGKVCNPDNPQECLLLEPGLNEIMANSLDYNERLWAWESWRSEVGKQLRPLYEEYVVLKNEMARANHYEDYGDYWRGDYEVNGVDGYDYSRGQLIEDVEHTFEEIKPLYEHLHAYVRAKLMNAYPSYISPIGCLPAHLLGDMWGQFWTNLYSLTVPFGQKPNIDVTDAMVDQAWDAQRIFKEAEKFFVSVGLPNMTQGFWENSMLTDPGNVQKAVCHPTAWDLGKGDFRILMCTKVTMDDFLTAHHEMGHIQYDMAYAAQPFLLRNGANEGFHEAVGEIMSLSAATPKHLKSIGLLSPDFQEDNETEINFLLKQALTIVGTLPFTYMLEKWRWMVFKGEIPKDQWMKKWWEMKREIVGVVEPVPHDETYCDPASLFHVSNDYSFIRYYTRTLYQFQFQEALCQAAKHEGPLHKCDISNSTEAGQKLFNMLRLGKSEPWTLALENVVGAKNMNVRPLLNYFEPLFTWLKDQNKNSFVGWSTDWSPYADQSIKVRISLKSALGDKAYEWNDNEMYLFRSSVAYAMRQYFLKVKNQMILFGEEDVRVANLKPRISFNFFVTAPKNVSDIIPRTEVEKAIRMSRSRINDAFRLNDNSLEFLGIQPTLGPPNQPPVSTSTSPTRSMAPGAVHLPQDKTHTCPPCPAPEAAGGPSVFLFPPKPKDTLMISRTPEVTCVVVDVSHEDPEVKFNWYVDGVEVHNAKTKPREEQYNSTYRVVSVLTVLHQDWLNGKEYKCKVSNKALGAPIEKTISKAKGQPREPQVYTLPPSRDELTKNQVSLTCLVKGFYPSDIAVEWESNGQPENNYKTTPPVLDSDGSFFLYSKLTVDKSRWQQGNVFSCSVMHEALHNHYTQKSLSLSPG

SEQ ID NO: 100 - protein, 966 aa, synthetic construct
  REGION 1..966: note = ACE2-740/196/PGLALA/R273Q
QSTIEEQAKTFLDKFNHEAEDLFYQSSLASWNYNTNITEENVQNMNNAGDKWSAFLKEQSTLAQMYPLQEIQNLTVKLQLQALQQNGSSVLSEDKSKRLNTILNTMSTIYSTGKVCNPDNPQECLLLEPGLNEIMANSLDYNERLWAWESWRSEVGKQLRPLYEEYVVLKNEMARANHYEDYGDYWRGDYEVNGVDGYDYSRGQLIEDVEHTFEEIKPLYEHLHAYVRAKLMNAYPSYISPIGCLPAHLLGDMWGQFWTNLYSLTVPFGQKPNIDVTDAMVDQAWDAQRIFKEAEKFFVSVGLPNMTQGFWENSMLTDPGNVQKAVCHPTAWDLGKGDFRILMCTKVTMDDFLTAHHEMGHIQYDMAYAAQPFLLRNGANEGFHEAVGEIMSLSAATPKHLKSIGLLSPDFQEDNETEINFLLKQALTIVGTLPFTYMLEKWRWMVFKGEIPKDQWMKKWWEMKREIVGVVEPVPHDETYCDPASLFHVSNDYSFIRYYTRTLYQFQFQEALCQAAKHEGPLHKCDISNSTEAGQKLFNMLRLGKSEPWTLALENVVGAKNMNVRPLLNYFEPLFTWLKDQNKNSFVGWSTDWSPYADQSIKVRISLKSALGDKAYEWNDNEMYLFRSSVAYAMRQYFLKVKNQMILFGEEDVRVANLKPRISFNFFVTAPKNVSDIIPRTEVEKAIRMSRSRINDAFRLNDNSLEFLGIQPTLGPPNQPPVSTSTSPTRSMAPGAVHLPDKTHTCPPCPAPEAAGGPSVFLFPPKPKDTLMISRTPEVTCVVVDVSHEDPEVKFNWYVDGVEVHNAKTKPREEQYNSTYRVVSVLTVLHQDWLNGKEYKCKVSNKALGAPIEKTISKAKGQPREPQVYTLPPSRDELTKNQVSLTCLVKGFYPSDIAVEWESNGQPENNYKTTPPVLDSDGSFFLYSKLTVDKSRWQQGNVFSCSVMHEALHNHYTQKSLSLSPG

SEQ ID NO: 101 - protein, 965 aa, synthetic construct
  REGION 1..965: note = ACE2-740/194/PGLALA/R273Q
QSTIEEQAKTFLDKFNHEAEDLFYQSSLASWNYNTNITEENVQNMNNAGDKWSAFLKEQSTLAQMYPLQEIQNLTVKLQLQALQQNGSSVLSEDKSKRLNTILNTMSTIYSTGKVCNPDNPQECLLLEPGLNEIMANSLDYNERLWAWESWRSEVGKQLRPLYEEYVVLKNEMARANHYEDYGDYWRGDYEVNGVDGYDYSRGQLIEDVEHTFEEIKPLYEHLHAYVRAKLMNAYPSYISPIGCLPAHLLGDMWGQFWTNLYSLTVPFGQKPNIDVTDAMVDQAWDAQRIFKEAEKFFVSVGLPNMTQGFWENSMLTDPGNVQKAVCHPTAWDLGKGDFRILMCTKVTMDDFLTAHHEMGHIQYDMAYAAQPFLLRNGANEGFHEAVGEIMSLSAATPKHLKSIGLLSPDFQEDNETEINFLLKQALTIVGTLPFTYMLEKWRWMVFKGEIPKDQWMKKWWEMKREIVGVVEPVPHDETYCDPASLFHVSNDYSFIRYYTRTLYQFQFQEALCQAAKHEGPLHKCDISNSTEAGQKLFNMLRLGKSEPWTLALENVVGAKNMNVRPLLNYFEPLFTWLKDQNKNSFVGWSTDWSPYADQSIKVRISLKSALGDKAYEWNDNEMYLFRSSVAYAMRQYFLKVKNQMILFGEEDVRVANLKPRISFNFFVTAPKNVSDIIPRTEVEKAIRMSRSRINDAFRLNDNSLEFLGIQPTLGPPNQPPVSTSTSPTRSMAPGAVHLDKTHTCPPCPAPEAAGGPSVFLFPPKPKDTLMISRTPEVTCVVVDVSHEDPEVKFNWYVDGVEVHNAKTKPREEQYNSTYRVVSVLTVLHQDWLNGKEYKCKVSNKALGAPIEKTISKAKGQPREPQVYTLPPSRDELTKNQVSLTCLVKGFYPSDIAVEWESNGQPENNYKTTPPVLDSDGSFFLYSKLTVDKSRWQQGNVFSCSVMHEALHNHYTQKSLSLSPG

SEQ ID NO: 102 - protein, 964 aa, synthetic construct
  REGION 1..964: note = ACE2-740/193/PGLALA/R273Q
QSTIEEQAKTFLDKFNHEAEDLFYQSSLASWNYNTNITEENVQNMNNAGDKWSAFLKEQSTLAQMYPLQEIQNLTVKLQLQALQQNGSSVLSEDKSKRLNTILNTMSTIYSTGKVCNPDNPQECLLLEPGLNEIMANSLDYNERLWAWESWRSEVGKQLRPLYEEYVVLKNEMARANHYEDYGDYWRGDYEVNGVDGYDYSRGQLIEDVEHTFEEIKPLYEHLHAYVRAKLMNAYPSYISPIGCLPAHLLGDMWGQFWTNLYSLTVPFGQKPNIDVTDAMVDQAWDAQRIFKEAEKFFVSVGLPNMTQGFWENSMLTDPGNVQKAVCHPTAWDLGKGDFRILMCTKVTMDDFLTAHHEMGHIQYDMAYAAQPFLLRNGANEGFHEAVGEIMSLSAATPKHLKSIGLLSPDFQEDNETEINFLLKQALTIVGTLPFTYMLEKWRWMVFKGEIPKDQWMKKWWEMKREIVGVVEPVPHDETYCDPASLFHVSNDYSFIRYYTRTLYQFQFQEALCQAAKHEGPLHKCDISNSTEAGQKLFNMLRLGKSEPWTLALENVVGAKNMNVRPLLNYFEPLFTWLKDQNKNSFVGWSTDWSPYADQSIKVRISLKSALGDKAYEWNDNEMYLFRSSVAYAMRQYFLKVKNQMILFGEEDVRVANLKPRISFNFFVTAPKNVSDIIPRTEVEKAIRMSRSRINDAFRLNDNSLEFLGIQPTLGPPNQPPVSTSTSPTRSMAPGAVHDKTHTCPPCPAPEAAGGPSVFLFPPKPKDTLMISRTPEVTCVVVDVSHEDPEVKFNWYVDGVEVHNAKTKPREEQYNSTYRVVSVLTVLHQDWLNGKEYKCKVSNKALGAPIEKTISKAKGQPREPQVYTLPPSRDELTKNQVSLTCLVKGFYPSDIAVEWESNGQPENNYKTTPPVLDSDGSFFLYSKLTVDKSRWQQGNVFSCSVMHEALHNHYTQKSLSLSPG

SEQ ID NO: 103 - protein, 963 aa, synthetic construct
  REGION 1..963: note = ACE2-740/192/PGLALA/R273Q
QSTIEEQAKTFLDKFNHEAEDLFYQSSLASWNYNTNITEENVQNMNNAGDKWSAFLKEQSTLAQMYPLQEIQNLTVKLQLQALQQNGSSVLSEDKSKRLNTILNTMSTIYSTGKVCNPDNPQECLLLEPGLNEIMANSLDYNERLWAWESWRSEVGKQLRPLYEEYVVLKNEMARANHYEDYGDYWRGDYEVNGVDGYDYSRGQLIEDVEHTFEEIKPLYEHLHAYVRAKLMNAYPSYISPIGCLPAHLLGDMWGQFWTNLYSLTVPFGQKPNIDVTDAMVDQAWDAQRIFKEAEKFFVSVGLPNMTQGFWENSMLTDPGNVQKAVCHPTAWDLGKGDFRILMCTKVTMDDFLTAHHEMGHIQYDMAYAAQPFLLRNGANEGFHEAVGEIMSLSAATPKHLKSIGLLSPDFQEDNETEINFLLKQALTIVGTLPFTYMLEKWRWMVFKGEIPKDQWMKKWWEMKREIVGVVEPVPHDETYCDPASLFHVSNDYSFIRYYTRTLYQFQFQEALCQAAKHEGPLHKCDISNSTEAGQKLFNMLRLGKSEPWTLALENVVGAKNMNVRPLLNYFEPLFTWLKDQNKNSFVGWSTDWSPYADQSIKVRISLKSALGDKAYEWNDNEMYLFRSSVAYAMRQYFLKVKNQMILFGEEDVRVANLKPRISFNFFVTAPKNVSDIIPRTEVEKAIRMSRSRINDAFRLNDNSLEFLGIQPTLGPPNQPPVSTSTSPTRSMAPGAVDKTHTCPPCPAPEAAGGPSVFLFPPKPKDTLMISRTPEVTCVVVDVSHEDPEVKFNWYVDGVEVHNAKTKPREEQYNSTYRVVSVLTVLHQDWLNGKEYKCKVSNKALGAPIEKTISKAKGQPREPQVYTLPPSRDELTKNQVSLTCLVKGFYPSDIAVEWESNGQPENNYKTTPPVLDSDGSFFLYSKLTVDKSRWQQGNVFSCSVMHEALHNHYTQKSLSLSPG

SEQ ID NO: 104 - protein, 962 aa, synthetic construct
  REGION 1..962: note = ACE2-740/191/PGLALA/R273Q
QSTIEEQAKTFLDKFNHEAEDLFYQSSLASWNYNTNITEENVQNMNNAGDKWSAFLKEQSTLAQMYPLQEIQNLTVKLQLQALQQNGSSVLSEDKSKRLNTILNTMSTIYSTGKVCNPDNPQECLLLEPGLNEIMANSLDYNERLWAWESWRSEVGKQLRPLYEEYVVLKNEMARANHYEDYGDYWRGDYEVNGVDGYDYSRGQLIEDVEHTFEEIKPLYEHLHAYVRAKLMNAYPSYISPIGCLPAHLLGDMWGQFWTNLYSLTVPFGQKPNIDVTDAMVDQAWDAQRIFKEAEKFFVSVGLPNMTQGFWENSMLTDPGNVQKAVCHPTAWDLGKGDFRILMCTKVTMDDFLTAHHEMGHIQYDMAYAAQPFLLRNGANEGFHEAVGEIMSLSAATPKHLKSIGLLSPDFQEDNETEINFLLKQALTIVGTLPFTYMLEKWRWMVFKGEIPKDQWMKKWWEMKREIVGVVEPVPHDETYCDPASLFHVSNDYSFIRYYTRTLYQFQFQEALCQAAKHEGPLHKCDISNSTEAGQKLFNMLRLGKSEPWTLALENVVGAKNMNVRPLLNYFEPLFTWLKDQNKNSFVGWSTDWSPYADQSIKVRISLKSALGDKAYEWNDNEMYLFRSSVAYAMRQYFLKVKNQMILFGEEDVRVANLKPRISFNFFVTAPKNVSDIIPRTEVEKAIRMSRSRINDAFRLNDNSLEFLGIQPTLGPPNQPPVSTSTSPTRSMAPGADKTHTCPPCPAPEAAGGPSVFLFPPKPKDTLMISRTPEVTCVVVDVSHEDPEVKFNWYVDGVEVHNAKTKPREEQYNSTYRVVSVLTVLHQDWLNGKEYKCKVSNKALGAPIEKTISKAKGQPREPQVYTLPPSRDELTKNQVSLTCLVKGFYPSDIAVEWESNGQPENNYKTTPPVLDSDGSFFLYSKLTVDKSRWQQGNVFSCSVMHEALHNHYTQKSLSLSPG

SEQ ID NO: 105 - protein, 961 aa, synthetic construct
  REGION 1..961: note = ACE2-740/190/PGLALA/R273Q
QSTIEEQAKTFLDKFNHEAEDLFYQSSLASWNYNTNITEENVQNMNNAGDKWSAFLKEQSTLAQMYPLQEIQNLTVKLQLQALQQNGSSVLSEDKSKRLNTILNTMSTIYSTGKVCNPDNPQECLLLEPGLNEIMANSLDYNERLWAWESWRSEVGKQLRPLYEEYVVLKNEMARANHYEDYGDYWRGDYEVNGVDGYDYSRGQLIEDVEHTFEEIKPLYEHLHAYVRAKLMNAYPSYISPIGCLPAHLLGDMWGQFWTNLYSLTVPFGQKPNIDVTDAMVDQAWDAQRIFKEAEKFFVSVGLPNMTQGFWENSMLTDPGNVQKAVCHPTAWDLGKGDFRILMCTKVTMDDFLTAHHEMGHIQYDMAYAAQPFLLRNGANEGFHEAVGEIMSLSAATPKHLKSIGLLSPDFQEDNETEINFLLKQALTIVGTLPFTYMLEKWRWMVFKGEIPKDQWMKKWWEMKREIVGVVEPVPHDETYCDPASLFHVSNDYSFIRYYTRTLYQFQFQEALCQAAKHEGPLHKCDISNSTEAGQKLFNMLRLGKSEPWTLALENVVGAKNMNVRPLLNYFEPLFTWLKDQNKNSFVGWSTDWSPYADQSIKVRISLKSALGDKAYEWNDNEMYLFRSSVAYAMRQYFLKVKNQMILFGEEDVRVANLKPRISFNFFVTAPKNVSDIIPRTEVEKAIRMSRSRINDAFRLNDNSLEFLGIQPTLGPPNQPPVSTSTSPTRSMAPGDKTHTCPPCPAPEAAGGPSVFLFPPKPKDTLMISRTPEVTCVVVDVSHEDPEVKFNWYVDGVEVHNAKTKPREEQYNSTYRVVSVLTVLHQDWLNGKEYKCKVSNKALGAPIEKTISKAKGQPREPQVYTLPPSRDELTKNQVSLTCLVKGFYPSDIAVEWESNGQPENNYKTTPPVLDSDGSFFLYSKLTVDKSRWQQGNVFSCSVMHEALHNHYTQKSLSLSPG

SEQ ID NO: 106 - protein, 960 aa, synthetic construct
  REGION 1..960: note = ACE2-740/189/PGLALA/R273Q
QSTIEEQAKTFLDKFNHEAEDLFYQSSLASWNYNTNITEENVQNMNNAGDKWSAFLKEQSTLAQMYPLQEIQNLTVKLQLQALQQNGSSVLSEDKSKRLNTILNTMSTIYSTGKVCNPDNPQECLLLEPGLNEIMANSLDYNERLWAWESWRSEVGKQLRPLYEEYVVLKNEMARANHYEDYGDYWRGDYEVNGVDGYDYSRGQLIEDVEHTFEEIKPLYEHLHAYVRAKLMNAYPSYISPIGCLPAHLLGDMWGQFWTNLYSLTVPFGQKPNIDVTDAMVDQAWDAQRIFKEAEKFFVSVGLPNMTQGFWENSMLTDPGNVQKAVCHPTAWDLGKGDFRILMCTKVTMDDFLTAHHEMGHIQYDMAYAAQPFLLRNGANEGFHEAVGEIMSLSAATPKHLKSIGLLSPDFQEDNETEINFLLKQALTIVGTLPFTYMLEKWRWMVFKGEIPKDQWMKKWWEMKREIVGVVEPVPHDETYCDPASLFHVSNDYSFIRYYTRTLYQFQFQEALCQAAKHEGPLHKCDISNSTEAGQKLFNMLRLGKSEPWTLALENVVGAKNMNVRPLLNYFEPLFTWLKDQNKNSFVGWSTDWSPYADQSIKVRISLKSALGDKAYEWNDNEMYLFRSSVAYAMRQYFLKVKNQMILFGEEDVRVANLKPRISFNFFVTAPKNVSDIIPRTEVEKAIRMSRSRINDAFRLNDNSLEFLGIQPTLGPPNQPPVSTSTSPTRSMAPDKTHTCPPCPAPEAAGGPSVFLFPPKPKDTLMISRTPEVTCVVVDVSHEDPEVKFNWYVDGVEVHNAKTKPREEQYNSTYRVVSVLTVLHQDWLNGKEYKCKVSNKALGAPIEKTISKAKGQPREPQVYTLPPSRDELTKNQVSLTCLVKGFYPSDIAVEWESNGQPENNYKTTPPVLDSDGSFFLYSKLTVDKSRWQQGNVFSCSVMHEALHNHYTQKSLSLSPG

SEQ ID NO: 107 - protein, 959 aa, synthetic construct
  REGION 1..959: note = ACE2-740/188/PGLALA/R273Q
QSTIEEQAKTFLDKFNHEAEDLFYQSSLASWNYNTNITEENVQNMNNAGDKWSAFLKEQSTLAQMYPLQEIQNLTVKLQLQALQQNGSSVLSEDKSKRLNTILNTMSTIYSTGKVCNPDNPQECLLLEPGLNEIMANSLDYNERLWAWESWRSEVGKQLRPLYEEYVVLKNEMARANHYEDYGDYWRGDYEVNGVDGYDYSRGQLIEDVEHTFEEIKPLYEHLHAYVRAKLMNAYPSYISPIGCLPAHLLGDMWGQFWTNLYSLTVPFGQKPNIDVTDAMVDQAWDAQRIFKEAEKFFVSVGLPNMTQGFWENSMLTDPGNVQKAVCHPTAWDLGKGDFRILMCTKVTMDDFLTAHHEMGHIQYDMAYAAQPFLLRNGANEGFHEAVGEIMSLSAATPKHLKSIGLLSPDFQEDNETEINFLLKQALTIVGTLPFTYMLEKWRWMVFKGEIPKDQWMKKWWEMKREIVGVVEPVPHDETYCDPASLFHVSNDYSFIRYYTRTLYQFQFQEALCQAAKHEGPLHKCDISNSTEAGQKLFNMLRLGKSEPWTLALENVVGAKNMNVRPLLNYFEPLFTWLKDQNKNSFVGWSTDWSPYADQSIKVRISLKSALGDKAYEWNDNEMYLFRSSVAYAMRQYFLKVKNQMILFGEEDVRVANLKPRISFNFFVTAPKNVSDIIPRTEVEKAIRMSRSRINDAFRLNDNSLEFLGIQPTLGPPNQPPVSTSTSPTRSMADKTHTCPPCPAPEAAGGPSVFLFPPKPKDTLMISRTPEVTCVVVDVSHEDPEVKFNWYVDGVEVHNAKTKPREEQYNSTYRVVSVLTVLHQDWLNGKEYKCKVSNKALGAPIEKTISKAKGQPREPQVYTLPPSRDELTKNQVSLTCLVKGFYPSDIAVEWESNGQPENNYKTTPPVLDSDGSFFLYSKLTVDKSRWQQGNVFSCSVMHEALHNHYTQKSLSLSPG

SEQ ID NO: 108 - protein, 958 aa, synthetic construct
  REGION 1..958: note = ACE2-740/187/PGLALA/R273Q
QSTIEEQAKTFLDKFNHEAEDLFYQSSLASWNYNTNITEENVQNMNNAGDKWSAFLKEQSTLAQMYPLQEIQNLTVKLQLQALQQNGSSVLSEDKSKRLNTILNTMSTIYSTGKVCNPDNPQECLLLEPGLNEIMANSLDYNERLWAWESWRSEVGKQLRPLYEEYVVLKNEMARANHYEDYGDYWRGDYEVNGVDGYDYSRGQLIEDVEHTFEEIKPLYEHLHAYVRAKLMNAYPSYISPIGCLPAHLLGDMWGQFWTNLYSLTVPFGQKPNIDVTDAMVDQAWDAQRIFKEAEKFFVSVGLPNMTQGFWENSMLTDPGNVQKAVCHPTAWDLGKGDFRILMCTKVTMDDFLTAHHEMGHIQYDMAYAAQPFLLRNGANEGFHEAVGEIMSLSAATPKHLKSIGLLSPDFQEDNETEINFLLKQALTIVGTLPFTYMLEKWRWMVFKGEIPKDQWMKKWWEMKREIVGVVEPVPHDETYCDPASLFHVSNDYSFIRYYTRTLYQFQFQEALCQAAKHEGPLHKCDISNSTEAGQKLFNMLRLGKSEPWTLALENVVGAKNMNVRPLLNYFEPLFTWLKDQNKNSFVGWSTDWSPYADQSIKVRISLKSALGDKAYEWNDNEMYLFRSSVAYAMRQYFLKVKNQMILFGEEDVRVANLKPRISFNFFVTAPKNVSDIIPRTEVEKAIRMSRSRINDAFRLNDNSLEFLGIQPTLGPPNQPPVSTSTSPTRSMDKTHTCPPCPAPEAAGGPSVFLFPPKPKDTLMISRTPEVTCVVVDVSHEDPEVKFNWYVDGVEVHNAKTKPREEQYNSTYRVVSVLTVLHQDWLNGKEYKCKVSNKALGAPIEKTISKAKGQPREPQVYTLPPSRDELTKNQVSLTCLVKGFYPSDIAVEWESNGQPENNYKTTPPVLDSDGSFFLYSKLTVDKSRWQQGNVFSCSVMHEALHNHYTQKSLSLSPG

SEQ ID NO: 109 - protein, 957 aa, synthetic construct
  REGION 1..957: note = ACE2-740/186/PGLALA/R273Q
QSTIEEQAKTFLDKFNHEAEDLFYQSSLASWNYNTNITEENVQNMNNAGDKWSAFLKEQSTLAQMYPLQEIQNLTVKLQLQALQQNGSSVLSEDKSKRLNTILNTMSTIYSTGKVCNPDNPQECLLLEPGLNEIMANSLDYNERLWAWESWRSEVGKQLRPLYEEYVVLKNEMARANHYEDYGDYWRGDYEVNGVDGYDYSRGQLIEDVEHTFEEIKPLYEHLHAYVRAKLMNAYPSYISPIGCLPAHLLGDMWGQFWTNLYSLTVPFGQKPNIDVTDAMVDQAWDAQRIFKEAEKFFVSVGLPNMTQGFWENSMLTDPGNVQKAVCHPTAWDLGKGDFRILMCTKVTMDDFLTAHHEMGHIQYDMAYAAQPFLLRNGANEGFHEAVGEIMSLSAATPKHLKSIGLLSPDFQEDNETEINFLLKQALTIVGTLPFTYMLEKWRWMVFKGEIPKDQWMKKWWEMKREIVGVVEPVPHDETYCDPASLFHVSNDYSFIRYYTRTLYQFQFQEALCQAAKHEGPLHKCDISNSTEAGQKLFNMLRLGKSEPWTLALENVVGAKNMNVRPLLNYFEPLFTWLKDQNKNSFVGWSTDWSPYADQSIKVRISLKSALGDKAYEWNDNEMYLFRSSVAYAMRQYFLKVKNQMILFGEEDVRVANLKPRISFNFFVTAPKNVSDIIPRTEVEKAIRMSRSRINDAFRLNDNSLEFLGIQPTLGPPNQPPVSTSTSPTRSDKTHTCPPCPAPEAAGGPSVFLFPPKPKDTLMISRTPEVTCVVVDVSHEDPEVKFNWYVDGVEVHNAKTKPREEQYNSTYRVVSVLTVLHQDWLNGKEYKCKVSNKALGAPIEKTISKAKGQPREPQVYTLPPSRDELTKNQVSLTCLVKGFYPSDIAVEWESNGQPENNYKTTPPVLDSDGSFFLYSKLTVDKSRWQQGNVFSCSVMHEALHNHYTQKSLSLSPG

SEQ ID NO: 110 - protein, 956 aa, synthetic construct
  REGION 1..956: note = ACE2-740/185/PGLALA/R273Q
QSTIEEQAKTFLDKFNHEAEDLFYQSSLASWNYNTNITEENVQNMNNAGDKWSAFLKEQSTLAQMYPLQEIQNLTVKLQLQALQQNGSSVLSEDKSKRLNTILNTMSTIYSTGKVCNPDNPQECLLLEPGLNEIMANSLDYNERLWAWESWRSEVGKQLRPLYEEYVVLKNEMARANHYEDYGDYWRGDYEVNGVDGYDYSRGQLIEDVEHTFEEIKPLYEHLHAYVRAKLMNAYPSYISPIGCLPAHLLGDMWGQFWTNLYSLTVPFGQKPNIDVTDAMVDQAWDAQRIFKEAEKFFVSVGLPNMTQGFWENSMLTDPGNVQKAVCHPTAWDLGKGDFRILMCTKVTMDDFLTAHHEMGHIQYDMAYAAQPFLLRNGANEGFHEAVGEIMSLSAATPKHLKSIGLLSPDFQEDNETEINFLLKQALTIVGTLPFTYMLEKWRWMVFKGEIPKDQWMKKWWEMKREIVGVVEPVPHDETYCDPASLFHVSNDYSFIRYYTRTLYQFQFQEALCQAAKHEGPLHKCDISNSTEAGQKLFNMLRLGKSEPWTLALENVVGAKNMNVRPLLNYFEPLFTWLKDQNKNSFVGWSTDWSPYADQSIKVRISLKSALGDKAYEWNDNEMYLFRSSVAYAMRQYFLKVKNQMILFGEEDVRVANLKPRISFNFFVTAPKNVSDIIPRTEVEKAIRMSRSRINDAFRLNDNSLEFLGIQPTLGPPNQPPVSTSTSPTRDKTHTCPPCPAPEAAGGPSVFLFPPKPKDTLMISRTPEVTCVVVDVSHEDPEVKFNWYVDGVEVHNAKTKPREEQYNSTYRVVSVLTVLHQDWLNGKEYKCKVSNKALGAPIEKTISKAKGQPREPQVYTLPPSRDELTKNQVSLTCLVKGFYPSDIAVEWESNGQPENNYKTTPPVLDSDGSFFLYSKLTVDKSRWQQGNVFSCSVMHEALHNHYTQKSLSLSPG

SEQ ID NO: 111 - protein, 955 aa, synthetic construct
  REGION 1..955: note = ACE2-740/184/PGLALA/R273Q
QSTIEEQAKTFLDKFNHEAEDLFYQSSLASWNYNTNITEENVQNMNNAGDKWSAFLKEQSTLAQMYPLQEIQNLTVKLQLQALQQNGSSVLSEDKSKRLNTILNTMSTIYSTGKVCNPDNPQECLLLEPGLNEIMANSLDYNERLWAWESWRSEVGKQLRPLYEEYVVLKNEMARANHYEDYGDYWRGDYEVNGVDGYDYSRGQLIEDVEHTFEEIKPLYEHLHAYVRAKLMNAYPSYISPIGCLPAHLLGDMWGQFWTNLYSLTVPFGQKPNIDVTDAMVDQAWDAQRIFKEAEKFFVSVGLPNMTQGFWENSMLTDPGNVQKAVCHPTAWDLGKGDFRILMCTKVTMDDFLTAHHEMGHIQYDMAYAAQPFLLRNGANEGFHEAVGEIMSLSAATPKHLKSIGLLSPDFQEDNETEINFLLKQALTIVGTLPFTYMLEKWRWMVFKGEIPKDQWMKKWWEMKREIVGVVEPVPHDETYCDPASLFHVSNDYSFIRYYTRTLYQFQFQEALCQAAKHEGPLHKCDISNSTEAGQKLFNMLRLGKSEPWTLALENVVGAKNMNVRPLLNYFEPLFTWLKDQNKNSFVGWSTDWSPYADQSIKVRISLKSALGDKAYEWNDNEMYLFRSSVAYAMRQYFLKVKNQMILFGEEDVRVANLKPRISFNFFVTAPKNVSDIIPRTEVEKAIRMSRSRINDAFRLNDNSLEFLGIQPTLGPPNQPPVSTSTSPTDKTHTCPPCPAPEAAGGPSVFLFPPKPKDTLMISRTPEVTCVVVDVSHEDPEVKFNWYVDGVEVHNAKTKPREEQYNSTYRVVSVLTVLHQDWLNGKEYKCKVSNKALGAPIEKTISKAKGQPREPQVYTLPPSRDELTKNQVSLTCLVKGFYPSDIAVEWESNGQPENNYKTTPPVLDSDGSFFLYSKLTVDKSRWQQGNVFSCSVMHEALHNHYTQKSLSLSPG

SEQ ID NO: 112 - protein, 954 aa, synthetic construct
  REGION 1..954: note = ACE2-740/183/PGLALA/R273Q
QSTIEEQAKTFLDKFNHEAEDLFYQSSLASWNYNTNITEENVQNMNNAGDKWSAFLKEQSTLAQMYPLQEIQNLTVKLQLQALQQNGSSVLSEDKSKRLNTILNTMSTIYSTGKVCNPDNPQECLLLEPGLNEIMANSLDYNERLWAWESWRSEVGKQLRPLYEEYVVLKNEMARANHYEDYGDYWRGDYEVNGVDGYDYSRGQLIEDVEHTFEEIKPLYEHLHAYVRAKLMNAYPSYISPIGCLPAHLLGDMWGQFWTNLYSLTVPFGQKPNIDVTDAMVDQAWDAQRIFKEAEKFFVSVGLPNMTQGFWENSMLTDPGNVQKAVCHPTAWDLGKGDFRILMCTKVTMDDFLTAHHEMGHIQYDMAYAAQPFLLRNGANEGFHEAVGEIMSLSAATPKHLKSIGLLSPDFQEDNETEINFLLKQALTIVGTLPFTYMLEKWRWMVFKGEIPKDQWMKKWWEMKREIVGVVEPVPHDETYCDPASLFHVSNDYSFIRYYTRTLYQFQFQEALCQAAKHEGPLHKCDISNSTEAGQKLFNMLRLGKSEPWTLALENVVGAKNMNVRPLLNYFEPLFTWLKDQNKNSFVGWSTDWSPYADQSIKVRISLKSALGDKAYEWNDNEMYLFRSSVAYAMRQYFLKVKNQMILFGEEDVRVANLKPRISFNFFVTAPKNVSDIIPRTEVEKAIRMSRSRINDAFRLNDNSLEFLGIQPTLGPPNQPPVSTSTSPDKTHTCPPCPAPEAAGGPSVFLFPPKPKDTLMISRTPEVTCVVVDVSHEDPEVKFNWYVDGVEVHNAKTKPREEQYNSTYRVVSVLTVLHQDWLNGKEYKCKVSNKALGAPIEKTISKAKGQPREPQVYTLPPSRDELTKNQVSLTCLVKGFYPSDIAVEWESNGQPENNYKTTPPVLDSDGSFFLYSKLTVDKSRWQQGNVFSCSVMHEALHNHYTQKSLSLSPG

SEQ ID NO: 113 - protein, 963 aa, synthetic construct
  REGION 1..963: note = ACE2-740/G14/PGLALA/R273Q
QSTIEEQAKTFLDKFNHEAEDLFYQSSLASWNYNTNITEENVQNMNNAGDKWSAFLKEQSTLAQMYPLQEIQNLTVKLQLQALQQNGSSVLSEDKSKRLNTILNTMSTIYSTGKVCNPDNPQECLLLEPGLNEIMANSLDYNERLWAWESWRSEVGKQLRPLYEEYVVLKNEMARANHYEDYGDYWRGDYEVNGVDGYDYSRGQLIEDVEHTFEEIKPLYEHLHAYVRAKLMNAYPSYISPIGCLPAHLLGDMWGQFWTNLYSLTVPFGQKPNIDVTDAMVDQAWDAQRIFKEAEKFFVSVGLPNMTQGFWENSMLTDPGNVQKAVCHPTAWDLGKGDFRILMCTKVTMDDFLTAHHEMGHIQYDMAYAAQPFLLRNGANEGFHEAVGEIMSLSAATPKHLKSIGLLSPDFQEDNETEINFLLKQALTIVGTLPFTYMLEKWRWMVFKGEIPKDQWMKKWWEMKREIVGVVEPVPHDETYCDPASLFHVSNDYSFIRYYTRTLYQFQFQEALCQAAKHEGPLHKCDISNSTEAGQKLFNMLRLGKSEPWTLALENVVGAKNMNVRPLLNYFEPLFTWLKDQNKNSFVGWSTDWSPYADQSIKVRISLKSALGDKAYEWNDNEMYLFRSSVAYAMRQYFLKVKNQMILFGEEDVRVANLKPRISFNFFVTAPKNVSDIIPRTEVEKAIRMSRSRINDAFRLNDNSLEFLGIQPTLGPPNQPPVSGGGGAGGGGAGGGGDKTHTCPPCPAPEAAGGPSVFLFPPKPKDTLMISRTPEVTCVVVDVSHEDPEVKFNWYVDGVEVHNAKTKPREEQYNSTYRVVSVLTVLHQDWLNGKEYKCKVSNKALGAPIEKTISKAKGQPREPQVYTLPPSRDELTKNQVSLTCLVKGFYPSDIAVEWESNGQPENNYKTTPPVLDSDGSFFLYSKLTVDKSRWQQGNVFSCSVMHEALHNHYTQKSLSLSPG

SEQ ID NO: 114 - protein, 961 aa, synthetic construct
  REGION 1..961: note = ACE2-740/G12/PGLALA/R273Q
QSTIEEQAKTFLDKFNHEAEDLFYQSSLASWNYNTNITEENVQNMNNAGDKWSAFLKEQSTLAQMYPLQEIQNLTVKLQLQALQQNGSSVLSEDKSKRLNTILNTMSTIYSTGKVCNPDNPQECLLLEPGLNEIMANSLDYNERLWAWESWRSEVGKQLRPLYEEYVVLKNEMARANHYEDYGDYWRGDYEVNGVDGYDYSRGQLIEDVEHTFEEIKPLYEHLHAYVRAKLMNAYPSYISPIGCLPAHLLGDMWGQFWTNLYSLTVPFGQKPNIDVTDAMVDQAWDAQRIFKEAEKFFVSVGLPNMTQGFWENSMLTDPGNVQKAVCHPTAWDLGKGDFRILMCTKVTMDDFLTAHHEMGHIQYDMAYAAQPFLLRNGANEGFHEAVGEIMSLSAATPKHLKSIGLLSPDFQEDNETEINFLLKQALTIVGTLPFTYMLEKWRWMVFKGEIPKDQWMKKWWEMKREIVGVVEPVPHDETYCDPASLFHVSNDYSFIRYYTRTLYQFQFQEALCQAAKHEGPLHKCDISNSTEAGQKLFNMLRLGKSEPWTLALENVVGAKNMNVRPLLNYFEPLFTWLKDQNKNSFVGWSTDWSPYADQSIKVRISLKSALGDKAYEWNDNEMYLFRSSVAYAMRQYFLKVKNQMILFGEEDVRVANLKPRISFNFFVTAPKNVSDIIPRTEVEKAIRMSRSRINDAFRLNDNSLEFLGIQPTLGPPNQPPVSGGAGGGGAGGGGDKTHTCPPCPAPEAAGGPSVFLFPPKPKDTLMISRTPEVTCVVVDVSHEDPEVKFNWYVDGVEVHNAKTKPREEQYNSTYRVVSVLTVLHQDWLNGKEYKCKVSNKALGAPIEKTISKAKGQPREPQVYTLPPSRDELTKNQVSLTCLVKGFYPSDIAVEWESNGQPENNYKTTPPVLDSDGSFFLYSKLTVDKSRWQQGNVFSCSVMHEALHNHYTQKSLSLSPG

SEQ ID NO: 115 - protein, 959 aa, synthetic construct
  REGION 1..959: note = ACE2-740/G10/PGLALA/R273Q
QSTIEEQAKTFLDKFNHEAEDLFYQSSLASWNYNTNITEENVQNMNNAGDKWSAFLKEQSTLAQMYPLQEIQNLTVKLQLQALQQNGSSVLSEDKSKRLNTILNTMSTIYSTGKVCNPDNPQECLLLEPGLNEIMANSLDYNERLWAWESWRSEVGKQLRPLYEEYVVLKNEMARANHYEDYGDYWRGDYEVNGVDGYDYSRGQLIEDVEHTFEEIKPLYEHLHAYVRAKLMNAYPSYISPIGCLPAHLLGDMWGQFWTNLYSLTVPFGQKPNIDVTDAMVDQAWDAQRIFKEAEKFFVSVGLPNMTQGFWENSMLTDPGNVQKAVCHPTAWDLGKGDFRILMCTKVTMDDFLTAHHEMGHIQYDMAYAAQPFLLRNGANEGFHEAVGEIMSLSAATPKHLKSIGLLSPDFQEDNETEINFLLKQALTIVGTLPFTYMLEKWRWMVFKGEIPKDQWMKKWWEMKREIVGVVEPVPHDETYCDPASLFHVSNDYSFIRYYTRTLYQFQFQEALCQAAKHEGPLHKCDISNSTEAGQKLFNMLRLGKSEPWTLALENVVGAKNMNVRPLLNYFEPLFTWLKDQNKNSFVGWSTDWSPYADQSIKVRISLKSALGDKAYEWNDNEMYLFRSSVAYAMRQYFLKVKNQMILFGEEDVRVANLKPRISFNFFVTAPKNVSDIIPRTEVEKAIRMSRSRINDAFRLNDNSLEFLGIQPTLGPPNQPPVSAGGGGAGGGGDKTHTCPPCPAPEAAGGPSVFLFPPKPKDTLMISRTPEVTCVVVDVSHEDPEVKFNWYVDGVEVHNAKTKPREEQYNSTYRVVSVLTVLHQDWLNGKEYKCKVSNKALGAPIEKTISKAKGQPREPQVYTLPPSRDELTKNQVSLTCLVKGFYPSDIAVEWESNGQPENNYKTTPPVLDSDGSFFLYSKLTVDKSRWQQGNVFSCSVMHEALHNHYTQKSLSLSPG

SEQ ID NO: 116 - protein, 957 aa, synthetic construct
  REGION 1..957: note = ACE2-740/G8/PGLALA/R273Q
QSTIEEQAKTFLDKFNHEAEDLFYQSSLASWNYNTNITEENVQNMNNAGDKWSAFLKEQSTLAQMYPLQEIQNLTVKLQLQALQQNGSSVLSEDKSKRLNTILNTMSTIYSTGKVCNPDNPQECLLLEPGLNEIMANSLDYNERLWAWESWRSEVGKQLRPLYEEYVVLKNEMARANHYEDYGDYWRGDYEVNGVDGYDYSRGQLIEDVEHTFEEIKPLYEHLHAYVRAKLMNAYPSYISPIGCLPAHLLGDMWGQFWTNLYSLTVPFGQKPNIDVTDAMVDQAWDAQRIFKEAEKFFVSVGLPNMTQGFWENSMLTDPGNVQKAVCHPTAWDLGKGDFRILMCTKVTMDDFLTAHHEMGHIQYDMAYAAQPFLLRNGANEGFHEAVGEIMSLSAATPKHLKSIGLLSPDFQEDNETEINFLLKQALTIVGTLPFTYMLEKWRWMVFKGEIPKDQWMKKWWEMKREIVGVVEPVPHDETYCDPASLFHVSNDYSFIRYYTRTLYQFQFQEALCQAAKHEGPLHKCDISNSTEAGQKLFNMLRLGKSEPWTLALENVVGAKNMNVRPLLNYFEPLFTWLKDQNKNSFVGWSTDWSPYADQSIKVRISLKSALGDKAYEWNDNEMYLFRSSVAYAMRQYFLKVKNQMILFGEEDVRVANLKPRISFNFFVTAPKNVSDIIPRTEVEKAIRMSRSRINDAFRLNDNSLEFLGIQPTLGPPNQPPVSGGGAGGGGDKTHTCPPCPAPEAAGGPSVFLFPPKPKDTLMISRTPEVTCVVVDVSHEDPEVKFNWYVDGVEVHNAKTKPREEQYNSTYRVVSVLTVLHQDWLNGKEYKCKVSNKALGAPIEKTISKAKGQPREPQVYTLPPSRDELTKNQVSLTCLVKGFYPSDIAVEWESNGQPENNYKTTPPVLDSDGSFFLYSKLTVDKSRWQQGNVFSCSVMHEALHNHYTQKSLSLSPG

SEQ ID NO: 117 - protein, 956 aa, synthetic construct
  REGION 1..956: note = ACE2-740/G7/PGLALA/R273Q
QSTIEEQAKTFLDKFNHEAEDLFYQSSLASWNYNTNITEENVQNMNNAGDKWSAFLKEQSTLAQMYPLQEIQNLTVKLQLQALQQNGSSVLSEDKSKRLNTILNTMSTIYSTGKVCNPDNPQECLLLEPGLNEIMANSLDYNERLWAWESWRSEVGKQLRPLYEEYVVLKNEMARANHYEDYGDYWRGDYEVNGVDGYDYSRGQLIEDVEHTFEEIKPLYEHLHAYVRAKLMNAYPSYISPIGCLPAHLLGDMWGQFWTNLYSLTVPFGQKPNIDVTDAMVDQAWDAQRIFKEAEKFFVSVGLPNMTQGFWENSMLTDPGNVQKAVCHPTAWDLGKGDFRILMCTKVTMDDFLTAHHEMGHIQYDMAYAAQPFLLRNGANEGFHEAVGEIMSLSAATPKHLKSIGLLSPDFQEDNETEINFLLKQALTIVGTLPFTYMLEKWRWMVFKGEIPKDQWMKKWWEMKREIVGVVEPVPHDETYCDPASLFHVSNDYSFIRYYTRTLYQFQFQEALCQAAKHEGPLHKCDISNSTEAGQKLFNMLRLGKSEPWTLALENVVGAKNMNVRPLLNYFEPLFTWLKDQNKNSFVGWSTDWSPYADQSIKVRISLKSALGDKAYEWNDNEMYLFRSSVAYAMRQYFLKVKNQMILFGEEDVRVANLKPRISFNFFVTAPKNVSDIIPRTEVEKAIRMSRSRINDAFRLNDNSLEFLGIQPTLGPPNQPPVSGGAGGGGDKTHTCPPCPAPEAAGGPSVFLFPPKPKDTLMISRTPEVTCVVVDVSHEDPEVKFNWYVDGVEVHNAKTKPREEQYNSTYRVVSVLTVLHQDWLNGKEYKCKVSNKALGAPIEKTISKAKGQPREPQVYTLPPSRDELTKNQVSLTCLVKGFYPSDIAVEWESNGQPENNYKTTPPVLDSDGSFFLYSKLTVDKSRWQQGNVFSCSVMHEALHNHYTQKSLSLSPG

SEQ ID NO: 118 - protein, 955 aa, synthetic construct
  REGION 1..955: note = ACE2-740/G6/PGLALA/R273Q
QSTIEEQAKTFLDKFNHEAEDLFYQSSLASWNYNTNITEENVQNMNNAGDKWSAFLKEQSTLAQMYPLQEIQNLTVKLQLQALQQNGSSVLSEDKSKRLNTILNTMSTIYSTGKVCNPDNPQECLLLEPGLNEIMANSLDYNERLWAWESWRSEVGKQLRPLYEEYVVLKNEMARANHYEDYGDYWRGDYEVNGVDGYDYSRGQLIEDVEHTFEEIKPLYEHLHAYVRAKLMNAYPSYISPIGCLPAHLLGDMWGQFWTNLYSLTVPFGQKPNIDVTDAMVDQAWDAQRIFKEAEKFFVSVGLPNMTQGFWENSMLTDPGNVQKAVCHPTAWDLGKGDFRILMCTKVTMDDFLTAHHEMGHIQYDMAYAAQPFLLRNGANEGFHEAVGEIMSLSAATPKHLKSIGLLSPDFQEDNETEINFLLKQALTIVGTLPFTYMLEKWRWMVFKGEIPKDQWMKKWWEMKREIVGVVEPVPHDETYCDPASLFHVSNDYSFIRYYTRTLYQFQFQEALCQAAKHEGPLHKCDISNSTEAGQKLFNMLRLGKSEPWTLALENVVGAKNMNVRPLLNYFEPLFTWLKDQNKNSFVGWSTDWSPYADQSIKVRISLKSALGDKAYEWNDNEMYLFRSSVAYAMRQYFLKVKNQMILFGEEDVRVANLKPRISFNFFVTAPKNVSDIIPRTEVEKAIRMSRSRINDAFRLNDNSLEFLGIQPTLGPPNQPPVSGAGGGGDKTHTCPPCPAPEAAGGPSVFLFPPKPKDTLMISRTPEVTCVVVDVSHEDPEVKFNWYVDGVEVHNAKTKPREEQYNSTYRVVSVLTVLHQDWLNGKEYKCKVSNKALGAPIEKTISKAKGQPREPQVYTLPPSRDELTKNQVSLTCLVKGFYPSDIAVEWESNGQPENNYKTTPPVLDSDGSFFLYSKLTVDKSRWQQGNVFSCSVMHEALHNHYTQKSLSLSPG

SEQ ID NO: 119 - protein, 954 aa, synthetic construct
  REGION 1..954: note = ACE2-740/G5/PGLALA/R273Q
QSTIEEQAKTFLDKFNHEAEDLFYQSSLASWNYNTNITEENVQNMNNAGDKWSAFLKEQSTLAQMYPLQEIQNLTVKLQLQALQQNGSSVLSEDKSKRLNTILNTMSTIYSTGKVCNPDNPQECLLLEPGLNEIMANSLDYNERLWAWESWRSEVGKQLRPLYEEYVVLKNEMARANHYEDYGDYWRGDYEVNGVDGYDYSRGQLIEDVEHTFEEIKPLYEHLHAYVRAKLMNAYPSYISPIGCLPAHLLGDMWGQFWTNLYSLTVPFGQKPNIDVTDAMVDQAWDAQRIFKEAEKFFVSVGLPNMTQGFWENSMLTDPGNVQKAVCHPTAWDLGKGDFRILMCTKVTMDDFLTAHHEMGHIQYDMAYAAQPFLLRNGANEGFHEAVGEIMSLSAATPKHLKSIGLLSPDFQEDNETEINFLLKQALTIVGTLPFTYMLEKWRWMVFKGEIPKDQWMKKWWEMKREIVGVVEPVPHDETYCDPASLFHVSNDYSFIRYYTRTLYQFQFQEALCQAAKHEGPLHKCDISNSTEAGQKLFNMLRLGKSEPWTLALENVVGAKNMNVRPLLNYFEPLFTWLKDQNKNSFVGWSTDWSPYADQSIKVRISLKSALGDKAYEWNDNEMYLFRSSVAYAMRQYFLKVKNQMILFGEEDVRVANLKPRISFNFFVTAPKNVSDIIPRTEVEKAIRMSRSRINDAFRLNDNSLEFLGIQPTLGPPNQPPVSAGGGGDKTHTCPPCPAPEAAGGPSVFLFPPKPKDTLMISRTPEVTCVVVDVSHEDPEVKFNWYVDGVEVHNAKTKPREEQYNSTYRVVSVLTVLHQDWLNGKEYKCKVSNKALGAPIEKTISKAKGQPREPQVYTLPPSRDELTKNQVSLTCLVKGFYPSDIAVEWESNGQPENNYKTTPPVLDSDGSFFLYSKLTVDKSRWQQGNVFSCSVMHEALHNHYTQKSLSLSPG

SEQ ID NO: 120 - protein, 228 aa, synthetic construct
  REGION 1..228: note = Human IgG1 Fc domain having the N-terminal sequence CDKTHTCPPCPAPE
CDKTHTCPPCPAPELLGGPSVFLFPPKPKDTLMISRTPEVTCVVVDVSHEDPEVKFNWYVDGVEVHNAKTKPREEQYNSTYRVVSVLTVLHQDWLNGKEYKCKVSNKALPAPIEKTISKAKGQPREPQVYTLPPSRDELTKNQVSLTCLVKGFYPSDIAVEWESNGQPENNYKTTPPVLDSDGSFFLYSKLTVDKSRWQQGNVFSCSVMHEALHNHYTQKSLSLSPGK

SEQ ID NO: 121 - DNA, 684 bp, synthetic construct
  misc_feature 1..684: note = DNA encoding human IgG1 Fc domain having the N-terminal sequence CDKTHTCPPCPAPE
  source 1..684: mol_type = other DNA
tgtgacaaaactcacacatgcccaccgtgcccagcacctgaactcctgggggggccctcagtcttcctcttccccccaaaacccaaggacaccctcatgatctcccggacccctgaggtcacatgcgtggtggtggacgtgagccacgaagaccctgaggtcaagttcaactggtacgtggacggcgtggaggtgcataatgccaagacaaagccgcgggaggagcagtacaacagcacgtaccgtgtggtcagcgtcctcaccgtcctgcaccaggactggctgaatggcaaggagtacaagtgcaaggtctccaacaaagccctcccagcccccatcgagaaaaccatctccaaagccaaagggcagccccgagaaccacaggtgtacaccctgcccccatcccgggatgagctgaccaagaaccaggtcagcctgacctgcctggtcaaaggcttctatcccagcgacatcgccgtggagtgggagagcaatgggcagccggagaacaactacaagaccacgcctcccgtgctggactccgacggctccttcttcctctacagcaagctcaccgtggacaagagcaggtggcagcaggggaacgtcttctcatgctccgtgatgcatgaggctctgcacaaccactacacgcagaagagcctctccctgtctccgggtaaa

SEQ ID NO: 122 - protein, 251 aa, synthetic construct
  REGION 1..251: note = pre-Fc chimeric polypeptide having SHH signal peptide
MLLLARCLLLVLVSSLLVCSGLACDKTHTCPPCPAPELLGGPSVFLFPPKPKDTLMISRTPEVTCVVVDVSHEDPEVKFNWYVDGVEVHNAKTKPREEQYNSTYRVVSVLTVLHQDWLNGKEYKCKVSNKALPAPIEKTISKAKGQPREPQVYTLPPSRDELTKNQVSLTCLVKGFYPSDIAVEWESNGQPENNYKTTPPVLDSDGSFFLYSKLTVDKSRWQQGNVFSCSVMHEALHNHYTQKSLSLSPGK

SEQ ID NO: 123 - DNA, 785 bp, synthetic construct
  misc_feature 1..785: note = DNA encoding pre-Fc chimeric polypeptide having SHH signal peptide
  source 1..785: mol_type = other DNA
aagcttgaattcccaccatgctgctgctggcgagatgtctgctgctagtcctcgtctcctcgctgctggtatgctcgggactggcgtgtgacaaaactcacacatgcccaccgtgcccagcacctgaactcctgggggggccctcagtcttcctcttccccccaaaacccaaggacaccctcatgatctcccggacccctgaggtcacatgcgtggtggtggacgtgagccacgaagaccctgaggtcaagttcaactggtacgtggacggcgtggaggtgcataatgccaagacaaagccgcgggaggagcagtacaacagcacgtaccgtgtggtcagcgtcctcaccgtcctgcaccaggactggctgaatggcaaggagtacaagtgcaaggtctccaacaaagccctcccagcccccatcgagaaaaccatctccaaagccaaagggcagccccgagaaccacaggtgtacaccctgcccccatcccgggatgagctgaccaagaaccaggtcagcctgacctgcctggtcaaaggcttctatcccagcgacatcgccgtggagtgggagagcaatgggcagccggagaacaactacaagaccacgcctcccgtgctggactccgacggctccttcttcctctacagcaagctcaccgtggacaagagcaggtggcagcaggggaacgtcttctcatgctccgtgatgcatgaggctctgcacaaccactacacgcagaagagcctctccctgtctccgggtaaatgactcgagcggccg

SEQ ID NO: 124 - protein, 251 aa, synthetic construct
  REGION 1..251: note = pre-Fc chimeric polypeptide having IFN signal peptide
MALTFALLVALLVLSCKSSCSVGCDKTHTCPPCPAPELLGGPSVFLFPPKPKDTLMISRTPEVTCVVVDVSHEDPEVKFNWYVDGVEVHNAKTKPREEQYNSTYRVVSVLTVLHQDWLNGKEYKCKVSNKALPAPIEKTISKAKGQPREPQVYTLPPSRDELTKNQVSLTCLVKGFYPSDIAVEWESNGQPENNYKTTPPVLDSDGSFFLYSKLTVDKSRWQQGNVFSCSVMHEALHNHYTQKSLSLSPGK

SEQ ID NO: 125 - DNA, 785 bp, synthetic construct
  misc_feature 1..785: note = DNA encoding pre-Fc chimeric polypeptide having IFN signal peptide
  source 1..785: mol_type = other DNA
aagcttgaattcccaccatggccttgacctttgctttactggtggccctcctggtgctcagctgcaagtcaagctgctctgtgggctgtgacaaaactcacacatgcccaccgtgcccagcacctgaactcctgggggggccctcagtcttcctcttccccccaaaacccaaggacaccctcatgatctcccggacccctgaggtcacatgcgtggtggtggacgtgagccacgaagaccctgaggtcaagttcaactggtacgtggacggcgtggaggtgcataatgccaagacaaagccgcgggaggagcagtacaacagcacgtaccgtgtggtcagcgtcctcaccgtcctgcaccaggactggctgaatggcaaggagtacaagtgcaaggtctccaacaaagccctcccagcccccatcgagaaaaccatctccaaagccaaagggcagccccgagaaccacaggtgtacaccctgcccccatcccgggatgagctgaccaagaaccaggtcagcctgacctgcctggtcaaaggcttctatcccagcgacatcgccgtggagtgggagagcaatgggcagccggagaacaactacaagaccacgcctcccgtgctggactccgacggctccttcttcctctacagcaagctcaccgtggacaagagcaggtggcagcaggggaacgtcttctcatgctccgtgatgcatgaggctctgcacaaccactacacgcagaagagcctctccctgtctccgggtaaatgactcgagcggccg

SEQ ID NO: 126 - protein, 245 aa, synthetic construct
  REGION 1..245: note = pre-Fc chimeric polypeptide having CETP signal peptide
MLAATVLTLALLGNAHACDKTHTCPPCPAPELLGGPSVFLFPPKPKDTLMISRTPEVTCVVVDVSHEDPEVKFNWYVDGVEVHNAKTKPREEQYNSTYRVVSVLTVLHQDWLNGKEYKCKVSNKALPAPIEKTISKAKGQPREPQVYTLPPSRDELTKNQVSLTCLVKGFYPSDIAVEWESNGQPENNYKTTPPVLDSDGSFFLYSKLTVDKSRWQQGNVFSCSVMHEALHNHYTQKSLSLSPGK

SEQ ID NO: 127 - DNA, 767 bp, synthetic construct
  misc_feature 1..767: note = DNA encoding pre-Fc chimeric polypeptide having CETP signal peptide
  source 1..767: mol_type = other DNA
aagcttgaattcccaccatgctggctgccacagtcctgaccctggccctgctgggcaatgcccatgcctgtgacaaaactcacacatgcccaccgtgcccagcacctgaactcctgggggggccctcagtcttcctcttccccccaaaacccaaggacaccctcatgatctcccggacccctgaggtcacatgcgtggtggtggacgtgagccacgaagaccctgaggtcaagttcaactggtacgtggacggcgtggaggtgcataatgccaagacaaagccgcgggaggagcagtacaacagcacgtaccgtgtggtcagcgtcctcaccgtcctgcaccaggactggctgaatggcaaggagtacaagtgcaaggtctccaacaaagccctcccagcccccatcgagaaaaccatctccaaagccaaagggcagccccgagaaccacaggtgtacaccctgcccccatcccgggatgagctgaccaagaaccaggtcagcctgacctgcctggtcaaaggcttctatcccagcgacatcgccgtggagtgggagagcaatgggcagccggagaacaactacaagaccacgcctcccgtgctggactccgacggctccttcttcctctacagcaagctcaccgtggacaagagcaggtggcagcaggggaacgtcttctcatgctccgtgatgcatgaggctctgcacaaccactacacgcagaagagcctctccctgtctccgggtaaatgactcgagcggccg

SEQ ID NO: 128 - protein, 222 aa, synthetic construct; identical to SEQ ID NO: 3
  REGION 1..222: note = Human IgG1 Fc domain having the N-terminal sequence CPPCPAPE

SEQ ID NO: 129 - DNA, 666 bp, synthetic construct
  misc_feature 1..666: note = DNA encoding human IgG1 Fc domain having the N-terminal sequence CPPCPAPE
  source 1..666: mol_type = other DNA
tgcccaccgtgcccagcacctgaactcctgggggggccctcagtcttcctcttccccccaaaacccaaggacaccctcatgatctcccggacccctgaggtcacatgcgtggtggtggacgtgagccacgaagaccctgaggtcaagttcaactggtacgtggacggcgtggaggtgcataatgccaagacaaagccgcgggaggagcagtacaacagcacgtaccgtgtggtcagcgtcctcaccgtcctgcaccaggactggctgaatggcaaggagtacaagtgcaaggtctccaacaaagccctcccagcccccatcgagaaaaccatctccaaagccaaagggcagccccgagaaccacaggtgtacaccctgcccccatcccgggatgagctgaccaagaaccaggtcagcctgacctgcctggtcaaaggcttctatcccagcgacatcgccgtggagtgggagagcaatgggcagccggagaacaactacaagaccacgcctcccgtgctggactccgacggctccttcttcctctacagcaagctcaccgtggacaagagcaggtggcagcaggggaacgtcttctcatgctccgtgatgcatgaggctctgcacaaccactacacgcagaagagcctctccctgtctccgggtaaa

SEQ ID NO: 130 - protein, 245 aa, synthetic construct
  REGION 1..245: note = pre-Fc chimeric polypeptide having SHH signal peptide
MLLLARCLLLVLVSSLLVCSGLACPPCPAPELLGGPSVFLFPPKPKDTLMISRTPEVTCVVVDVSHEDPEVKFNWYVDGVEVHNAKTKPREEQYNSTYRVVSVLTVLHQDWLNGKEYKCKVSNKALPAPIEKTISKAKGQPREPQVYTLPPSRDELTKNQVSLTCLVKGFYPSDIAVEWESNGQPENNYKTTPPVLDSDGSFFLYSKLTVDKSRWQQGNVFSCSVMHEALHNHYTQKSLSLSPGK

SEQ ID NO: 131 - DNA, 767 bp, synthetic construct
  misc_feature 1..767: note = DNA encoding pre-Fc chimeric polypeptide having SHH signal peptide
  source 1..767: mol_type = other DNA
aagcttgaattcccaccatgctgctgctggcgagatgtctgctgctagtcctcgtctcctcgctgctggtatgctcgggactggcgtgcccaccgtgcccagcacctgaactcctgggggggccctcagtcttcctcttccccccaaaacccaaggacaccctcatgatctcccggacccctgaggtcacatgcgtggtggtggacgtgagccacgaagaccctgaggtcaagttcaactggtacgtggacggcgtggaggtgcataatgccaagacaaagccgcgggaggagcagtacaacagcacgtaccgtgtggtcagcgtcctcaccgtcctgcaccaggactggctgaatggcaaggagtacaagtgcaaggtctccaacaaagccctcccagcccccatcgagaaaaccatctccaaagccaaagggcagccccgagaaccacaggtgtacaccctgcccccatcccgggatgagctgaccaagaaccaggtcagcctgacctgcctggtcaaaggcttctatcccagcgacatcgccgtggagtgggagagcaatgggcagccggagaacaactacaagaccacgcctcccgtgctggactccgacggctccttcttcctctacagcaagctcaccgtggacaagagcaggtggcagcaggggaacgtcttctcatgctccgtgatgcatgaggctctgcacaaccactacacgcagaagagcctctccctgtctccgggtaaatgactcgagcggccg

SEQ ID NO: 132 - protein, 245 aa, synthetic construct
  REGION 1..245: note = pre-Fc chimeric polypeptide having IFN signal peptide
MALTFALLVALLVLSCKSSCSVGCPPCPAPELLGGPSVFLFPPKPKDTLMISRTPEVTCVVVDVSHEDPEVKFNWYVDGVEVHNAKTKPREEQYNSTYRVVSVLTVLHQDWLNGKEYKCKVSNKALPAPIEKTISKAKGQPREPQVYTLPPSRDELTKNQVSLTCLVKGFYPSDIAVEWESNGQPENNYKTTPPVLDSDGSFFLYSKLTVDKSRWQQGNVFSCSVMHEALHNHYTQKSLSLSPGK

SEQ ID NO: 133 - DNA, 767 bp, synthetic construct
  misc_feature 1..767: note = DNA encoding pre-Fc chimeric polypeptide having IFN signal peptide
  source 1..767: mol_type = other DNA
aagcttgaattcccaccatggccttgacctttgctttactggtggccctcctggtgctcagctgcaagtcaagctgctctgtgggctgcccaccgtgcccagcacctgaactcctgggggggccctcagtcttcctcttccccccaaaacccaaggacaccctcatgatctcccggacccctgaggtcacatgcgtggtggtggacgtgagccacgaagaccctgaggtcaagttcaactggtacgtggacggcgtggaggtgcataatgccaagacaaagccgcgggaggagcagtacaacagcacgtaccgtgtggtcagcgtcctcaccgtcctgcaccaggactggctgaatggcaaggagtacaagtgcaaggtctccaacaaagccctcccagcccccatcgagaaaaccatctccaaagccaaagggcagccccgagaaccacaggtgtacaccctgcccccatcccgggatgagctgaccaagaaccaggtcagcctgacctgcctggtcaaaggcttctatcccagcgacatcgccgtggagtgggagagcaatgggcagccggagaacaactacaagaccacgcctcccgtgctggactccgacggctccttcttcctctacagcaagctcaccgtggacaagagcaggtggcagcaggggaacgtcttctcatgctccgtgatgcatgaggctctgcacaaccactacacgcagaagagcctctccctgtctccgggtaaatgactcgagcggccg

SEQ ID NO: 134 - protein, 239 aa, synthetic construct
  REGION 1..239: note = pre-Fc chimeric polypeptide having CETP signal peptide
MLAATVLTLALLGNAHACPPCPAPELLGGPSVFLFPPKPKDTLMISRTPEVTCVVVDVSHEDPEVKFNWYVDGVEVHNAKTKPREEQYNSTYRVVSVLTVLHQDWLNGKEYKCKVSNKALPAPIEKTISKAKGQPREPQVYTLPPSRDELTKNQVSLTCLVKGFYPSDIAVEWESNGQPENNYKTTPPVLDSDGSFFLYSKLTVDKSRWQQGNVFSCSVMHEALHNHYTQKSLSLSPGK

SEQ ID NO: 135 - DNA, 749 bp, synthetic construct
  misc_feature 1..749: note = DNA encoding pre-Fc chimeric polypeptide having CETP signal peptide
  source 1..749: mol_type = other DNA
aagcttgaattcccaccatgctggctgccacagtcctgaccctggccctgctgggcaatgcccatgcctgcccaccgtgcccagcacctgaactcctgggggggccctcagtcttcctcttccccccaaaacccaaggacaccctcatgatctcccggacccctgaggtcacatgcgtggtggtggacgtgagccacgaagaccctgaggtcaagttcaactggtacgtggacggcgtggaggtgcataatgccaagacaaagccgcgggaggagcagtacaacagcacgtaccgtgtggtcagcgtcctcaccgtcctgcaccaggactggctgaatggcaaggagtacaagtgcaaggtctccaacaaagccctcccagcccccatcgagaaaaccatctccaaagccaaagggcagccccgagaaccacaggtgtacaccctgcccccatcccgggatgagctgaccaagaaccaggtcagcctgacctgcctggtcaaaggcttctatcccagcgacatcgccgtggagtgggagagcaatgggcagccggagaacaactacaagaccacgcctcccgtgctggactccgacggctccttcttcctctacagcaagctcaccgtggacaagagcaggtggcagcaggggaacgtcttctcatgctccgtgatgcatgaggctctgcacaaccactacacgcagaagagcctctccctgtctccgggtaaatgactcgagcggccg

SEQ ID NO: 136 - protein, 219 aa, synthetic construct
  REGION 1..219: note = Human IgG1 Fc domain having the N-terminal sequence CPAPE
CPAPELLGGPSVFLFPPKPKDTLMISRTPEVTCVVVDVSHEDPEVKFNWYVDGVEVHNAKTKPREEQYNSTYRVVSVLTVLHQDWLNGKEYKCKVSNKALPAPIEKTISKAKGQPREPQVYTLPPSRDELTKNQVSLTCLVKGFYPSDIAVEWESNGQPENNYKTTPPVLDSDGSFFLYSKLTVDKSRWQQGNVFSCSVMHEALHNHYTQKSLSLSPGK

SEQ ID NO: 137 - DNA, 657 bp, synthetic construct
  misc_feature 1..657: note = DNA encoding human IgG1 Fc domain having the N-terminal sequence CPAPE
  source 1..657: mol_type = other DNA
tgcccagcacctgaactcctgggggggccctcagtcttcctcttccccccaaaacccaaggacaccctcatgatctcccggacccctgaggtcacatgcgtggtggtggacgtgagccacgaagaccctgaggtcaagttcaactggtacgtggacggcgtggaggtgcataatgccaagacaaagccgcgggaggagcagtacaacagcacgtaccgtgtggtcagcgtcctcaccgtcctgcaccaggactggctgaatggcaaggagtacaagtgcaaggtctccaacaaagccctcccagcccccatcgagaaaaccatctccaaagccaaagggcagccccgagaaccacaggtgtacaccctgcccccatcccgggatgagctgaccaagaaccaggtcagcctgacctgcctggtcaaaggcttctatcccagcgacatcgccgtggagtgggagagcaatgggcagccggagaacaactacaagaccacgcctcccgtgctggactccgacggctccttcttcctctacagcaagctcaccgtggacaagagcaggtggcagcaggggaacgtcttctcatgctccgtgatgcatgaggctctgcacaaccactacacgcagaagagcctctccctgtctccgggtaaa

SEQ ID NO: 138 - protein, 242 aa, synthetic construct
  REGION 1..242: note = pre-Fc chimeric polypeptide having SHH signal peptide
MLLLARCLLLVLVSSLLVCSGLACPAPELLGGPSVFLFPPKPKDTLMISRTPEVTCVVVDVSHEDPEVKFNWYVDGVEVHNAKTKPREEQYNSTYRVVSVLTVLHQDWLNGKEYKCKVSNKALPAPIEKTISKAKGQPREPQVYTLPPSRDELTKNQVSLTCLVKGFYPSDIAVEWESNGQPENNYKTTPPVLDSDGSFFLYSKLTVDKSRWQQGNVFSCSVMHEALHNHYTQKSLSLSPGK

SEQ ID NO: 139 - DNA, 758 bp, synthetic construct
  misc_feature 1..758: note = DNA encoding pre-Fc chimeric polypeptide having SHH signal peptide
  source 1..758: mol_type = other DNA
aagcttgaattcccaccatgctgctgctggcgagatgtctgctgctagtcctcgtctcctcgctgctggtatgctcgggactggcgtgcccagcacctgaactcctgggggggccctcagtcttcctcttccccccaaaacccaaggacaccctcatgatctcccggacccctgaggtcacatgcgtggtggtggacgtgagccacgaagaccctgaggtcaagttcaactggtacgtggacggcgtggaggtgcataatgccaagacaaagccgcgggaggagcagtacaacagcacgtaccgtgtggtcagcgtcctcaccgtcctgcaccaggactggctgaatggcaaggagtacaagtgcaaggtctccaacaaagccctcccagcccccatcgagaaaaccatctccaaagccaaagggcagccccgagaaccacaggtgtacaccctgcccccatcccgggatgagctgaccaagaaccaggtcagcctgacctgcctggtcaaaggcttctatcccagcgacatcgccgtggagtgggagagcaatgggcagccggagaacaactacaagaccacgcctcccgtgctggactccgacggctccttcttcctctacagcaagctcaccgtggacaagagcaggtggcagcaggggaacgtcttctcatgctccgtgatgcatgaggctctgcacaaccactacacgcagaagagcctctccctgtctccgggtaaatgactcgagcggccg

SEQ ID NO: 140 - protein, 242 aa, synthetic construct
  REGION 1..242: note = pre-Fc chimeric polypeptide having IFN signal peptide
MALTFALLVALLVLSCKSSCSVGCPAPELLGGPSVFLFPPKPKDTLMISRTPEVTCVVVDVSHEDPEVKFNWYVDGVEVHNAKTKPREEQYNSTYRVVSVLTVLHQDWLNGKEYKCKVSNKALPAPIEKTISKAKGQPREPQVYTLPPSRDELTKNQVSLTCLVKGFYPSDIAVEWESNGQPENNYKTTPPVLDSDGSFFLYSKLTVDKSRWQQGNVFSCSVMHEALHNHYTQKSLSLSPGK

SEQ ID NO: 141 - DNA, 758 bp, synthetic construct
  misc_feature 1..758: note = DNA encoding pre-Fc chimeric polypeptide having IFN signal peptide
  source 1..758: mol_type = other DNA
aagcttgaattcccaccatggccttgacctttgctttactggtggccctcctggtgctcagctgcaagtcaagctgctctgtgggctgcccagcacctgaactcctgggggggccctcagtcttcctcttccccccaaaacccaaggacaccctcatgatctcccggacccctgaggtcacatgcgtggtggtggacgtgagccacgaagaccctgaggtcaagttcaactggtacgtggacggcgtggaggtgcataatgccaagacaaagccgcgggaggagcagtacaacagcacgtaccgtgtggtcagcgtcctcaccgtcctgcaccaggactggctgaatggcaaggagtacaagtgcaaggtctccaacaaagccctcccagcccccatcgagaaaaccatctccaaagccaaagggcagccccgagaaccacaggtgtacaccctgcccccatcccgggatgagctgaccaagaaccaggtcagcctgacctgcctggtcaaaggcttctatcccagcgacatcgccgtggagtgggagagcaatgggcagccggagaacaactacaagaccacgcctcccgtgctggactccgacggctccttcttcctctacagcaagctcaccgtggacaagagcaggtggcagcaggggaacgtcttctcatgctccgtgatgcatgaggctctgcacaaccactacacgcagaagagcctctccctgtctccgggtaaatgactcgagcggccg

SEQ ID NO: 142 - protein, 236 aa, synthetic construct
  REGION 1..236: note = pre-Fc chimeric polypeptide having CETP signal peptide
MLAATVLTLALLGNAHACPAPELLGGPSVFLFPPKPKDTLMISRTPEVTCVVVDVSHEDPEVKFNWYVDGVEVHNAKTKPREEQYNSTYRVVSVLTVLHQDWLNGKEYKCKVSNKALPAPIEKTISKAKGQPREPQVYTLPPSRDELTKNQVSLTCLVKGFYPSDIAVEWESNGQPENNYKTTPPVLDSDGSFFLYSKLTVDKSRWQQGNVFSCSVMHEALHNHYTQKSLSLSPGK

SEQ ID NO: 143 - DNA, 740 bp, synthetic construct
  misc_feature 1..740: note = DNA encoding pre-Fc chimeric polypeptide having CETP signal peptide
  source 1..740: mol_type = other DNA
aagcttgaattcccaccatgctggctgccacagtcctgaccctggccctgctgggcaatgcccatgcctgcccagcacctgaactcctgggggggccctcagtcttcctcttccccccaaaacccaaggacaccctcatgatctcccggacccctgaggtcacatgcgtggtggtggacgtgagccacgaagaccctgaggtcaagttcaactggtacgtggacggcgtggaggtgcataatgccaagacaaagccgcgggaggagcagtacaacagcacgtaccgtgtggtcagcgtcctcaccgtcctgcaccaggactggctgaatggcaaggagtacaagtgcaaggtctccaacaaagccctcccagcccccatcgagaaaaccatctccaaagccaaagggcagccccgagaaccacaggtgtacaccctgcccccatcccgggatgagctgaccaagaaccaggtcagcctgacctgcctggtcaaaggcttctatcccagcgacatcgccgtggagtgggagagcaatgggcagccggagaacaactacaagaccacgcctcccgtgctggactccgacggctccttcttcctctacagcaagctcaccgtggacaagagcaggtggcagcaggggaacgtcttctcatgctccgtgatgcatgaggctctgcacaaccactacacgcagaagagcctctccctgtctccgggtaaatgactcgagcggccg

SEQ ID NO: 144 - protein, 225 aa, synthetic construct
  REGION 1..225: note = Human IgG2 Fc domain having the N-terminal sequence CCVECPPCPAPE
CCVECPPCPAPPVAGPSVFLFPPKPKDTLMISRTPEVTCVVVDVSHEDPEVQFNWYVDGVEVHNAKTKPREEQFNSTFRVVSVLTVVHQDWLNGKEYKCKVSNKGLPAPIEKTISKTKGQPREPQVYTLPPSREEMTKNQVSLTCLVKGFYPSDIAVEWESNGQPENNYKTTPPMLDSDGSFFLYSKLTVDKSRWQQGNVFSCSVMHEALHNHYTQKSLSLSPGK

SEQ ID NO: 145 - DNA, 675 bp, synthetic construct
  misc_feature 1..675: note = DNA encoding human IgG2 Fc domain having the N-terminal sequence CCVECPPCPAPE
  source 1..675: mol_type = other DNA
tgttgtgtcgagtgcccaccgtgcccagcaccacctgtggcaggaccgtcagtcttcctcttccccccaaaacccaaggacaccctcatgatctcccggacccctgaggtcacgtgcgtggtggtggacgtgagccacgaagaccccgaggtccagttcaactggtacgtggacggcgtggaggtgcataatgccaagacaaagccacgggaggagcagttcaacagcacgttccgtgtggtcagcgtcctcaccgttgtgcaccaggactggctgaacggcaaggagtacaagtgcaaggtctccaacaaaggcctcccagcccccatcgagaaaaccatctccaaaaccaaagggcagccccgagaaccacaggtgtacaccctgcccccatcccgggaggagatgaccaagaaccaggtcagcctgacctgcctggtcaaaggcttctaccccagcgacatcgccgtggagtgggagagcaatgggcagccggagaacaactacaagaccacacctcccatgctggactccgacggctccttcttcctctacagcaagctcaccgtggacaagagcaggtggcagcaggggaacgtcttctcatgctccgtgatgcatgaggctctgcacaaccactacacgcagaagagcctctccctgtctccgggtaaa

SEQ ID NO: 146 - protein, 248 aa, synthetic construct
  REGION 1..248: note = pre-Fc chimeric polypeptide having SHH signal peptide
MLLLARCLLLVLVSSLLVCSGLACCVECPPCPAPPVAGPSVFLFPPKPKDTLMISRTPEVTCVVVDVSHEDPEVQFNWYVDGVEVHNAKTKPREEQFNSTFRVVSVLTVVHQDWLNGKEYKCKVSNKGLPAPIEKTISKTKGQPREPQVYTLPPSREEMTKNQVSLTCLVKGFYPSDIAVEWESNGQPENNYKTTPPMLDSDGSFFLYSKLTVDKSRWQQGNVFSCSVMHEALHNHYTQKSLSLSPGK

SEQ ID NO: 147 - DNA, 776 bp, synthetic construct
  misc_feature 1..776: note = DNA encoding pre-Fc chimeric polypeptide having SHH signal peptide
  source 1..776: mol_type = other DNA
aagcttgaattcccaccatgctgctgctggcgagatgtctgctgctagtcctcgtctcctcgctgctggtatgctcgggactggcgtgttgtgtcgagtgcccaccgtgcccagcaccacctgtggcaggaccgtcagtcttcctcttccccccaaaacccaaggacaccctcatgatctcccggacccctgaggtcacgtgcgtggtggtggacgtgagccacgaagaccccgaggtccagttcaactggtacgtggacggcgtggaggtgcataatgccaagacaaagccacgggaggagcagttcaacagcacgttccgtgtggtcagcgtcctcaccgttgtgcaccaggactggctgaacggcaaggagtacaagtgcaaggtctccaacaaaggcctcccagcccccatcgagaaaaccatctccaaaaccaaagggcagccccgagaaccacaggtgtacaccctgcccccatcccgggaggagatgaccaagaaccaggtcagcctgacctgcctggtcaaaggcttctaccccagcgacatcgccgtggagtgggagagcaatgggcagccggagaacaactacaagaccacacctcccatgctggactccgacggctccttcttcctctacagcaagctcaccgtggacaagagcaggtggcagcaggggaacgtcttctcatgctccgtgatgcatgaggctctgcacaaccactacacgcagaagagcctctccctgtctccgggtaaatgactcgagcggccg

SEQ ID NO: 148 - protein, 248 aa, synthetic construct
  REGION 1..248: note = pre-Fc chimeric polypeptide having IFN signal peptide
MALTFALLVALLVLSCKSSCSVGCCVECPPCPAPPVAGPSVFLFPPKPKDTLMISRTPEVTCVVVDVSHEDPEVQFNWYVDGVEVHNAKTKPREEQFNSTFRVVSVLTVVHQDWLNGKEYKCKVSNKGLPAPIEKTISKTKGQPREPQVYTLPPSREEMTKNQVSLTCLVKGFYPSDIAVEWESNGQPENNYKTTPPMLDSDGSFFLYSKLTVDKSRWQQGNVFSCSVMHEALHNHYTQKSLSLSPGK

SEQ ID NO: 149 - DNA, 776 bp, synthetic construct
  misc_feature 1..776: note = DNA encoding pre-Fc chimeric polypeptide having IFN signal peptide
  source 1..776: mol_type = other DNA
aagcttgaattcccaccatggccttgacctttgctttactggtggccctcctggtgctcagctgcaagtcaagctgctctgtgggctgttgtgtcgagtgcccaccgtgcccagcaccacctgtggcaggaccgtcagtcttcctcttccccccaaaacccaaggacaccctcatgatctcccggacccctgaggtcacgtgcgtggtggtggacgtgagccacgaagaccccgaggtccagttcaactggtacgtggacggcgtggaggtgcataatgccaagacaaagccacgggaggagcagttcaacagcacgttccgtgtggtcagcgtcctcaccgttgtgcaccaggactggctgaacggcaaggagtacaagtgcaaggtctccaacaaaggcctcccagcccccatcgagaaaaccatctccaaaaccaaagggcagccccgagaaccacaggtgtacaccctgcccccatcccgggaggagatgaccaagaaccaggtcagcctgacctgcctggtcaaaggcttctaccccagcgacatcgccgtggagtgggagagcaatgggcagccggagaacaactacaagaccacacctcccatgctggactccgacggctccttcttcctctacagcaagctcaccgtggacaagagcaggtggcagcaggggaacgtcttctcatgctccgtgatgcatgaggctctgcacaaccactacacgcagaagagcctctccctgtctccgggtaaatgactcgagcggccg

SEQ ID NO: 150 - protein, 242 aa, synthetic construct
  REGION 1..242: note = pre-Fc chimeric polypeptide having CETP signal peptide
MLAATVLTLALLGNAHACCVECPPCPAPPVAGPSVFLFPPKPKDTLMISRTPEVTCVVVDVSHEDPEVQFNWYVDGVEVHNAKTKPREEQFNSTFRVVSVLTVVHQDWLNGKEYKCKVSNKGLPAPIEKTISKTKGQPREPQVYTLPPSREEMTKNQVSLTCLVKGFYPSDIAVEWESNGQPENNYKTTPPMLDSDGSFFLYSKLTVDKSRWQQGNVFSCSVMHEALHNHYTQKSLSLSPGK

SEQ ID NO: 151 - DNA, 758 bp, synthetic construct
  misc_feature 1..758: note = DNA encoding pre-Fc chimeric polypeptide having CETP signal peptide
  source 1..758: mol_type = other DNA
aagcttgaattcccaccatgctggctgccacagtcctgaccctggccctgctgggcaatgcccatgcctgttgtgtcgagtgcccaccgtgcccagcaccacctgtggcaggaccgtcagtcttcctcttccccccaaaacccaaggacaccctcatgatctcccggacccctgaggtcacgtgcgtggtggtggacgtgagccacgaagaccccgaggtccagttcaactggtacgtggacggcgtggaggtgcataatgccaagacaaagccacgggaggagcagttcaacagcacgttccgtgtggtcagcgtcctcaccgttgtgcaccaggactggctgaacggcaaggagtacaagtgcaaggtctccaacaaaggcctcccagcccccatcgagaaaaccatctccaaaaccaaagggcagccccgagaaccacaggtgtacaccctgcccccatcccgggaggagatgaccaagaaccaggtcagcctgacctgcctggtcaaaggcttctaccccagcgacatcgccgtggagtgggagagcaatgggcagccggagaacaactacaagaccacacctcccatgctggactccgacggctccttcttcctctacagcaagctcaccgtggacaagagcaggtggcagcaggggaacgtcttctcatgctccgtgatgcatgaggctctgcacaaccactacacgcagaagagcctctccctgtctccgggtaaatgactcgagcggccg

SEQ ID NO: 152 - protein, 224 aa, synthetic construct
  REGION 1..224: note = Human IgG2 Fc domain having the N-terminal sequence CVECPPCPAPE
CVECPPCPAPPVAGPSVFLFPPKPKDTLMISRTPEVTCVVVDVSHEDPEVQFNWYVDGVEVHNAKTKPREEQFNSTFRVVSVLTVVHQDWLNGKEYKCKVSNKGLPAPIEKTISKTKGQPREPQVYTLPPSREEMTKNQVSLTCLVKGFYPSDIAVEWESNGQPENNYKTTPPMLDSDGSFFLYSKLTVDKSRWQQGNVFSCSVMHEALHNHYTQKSLSLSPGK

SEQ ID NO: 153 - DNA, 672 bp, synthetic construct
  misc_feature 1..672: note = DNA encoding human IgG2 Fc domain having the N-terminal sequence CVECPPCPAPE
  source 1..672: mol_type = other DNA
tgtgtcgagtgcccaccgtgcccagcaccacctgtggcaggaccgtcagtcttcctcttccccccaaaacccaaggacaccctcatgatctcccggacccctgaggtcacgtgcgtggtggtggacgtgagccacgaagaccccgaggtccagttcaactggtacgtggacggcgtggaggtgcataatgccaagacaaagccacgggaggagcagttcaacagcacgttccgtgtggtcagcgtcctcaccgttgtgcaccaggactggctgaacggcaaggagtacaagtgcaaggtctccaacaaaggcctcccagcccccatcgagaaaaccatctccaaaaccaaagggcagccccgagaaccacaggtgtacaccctgcccccatcccgggaggagatgaccaagaaccaggtcagcctgacctgcctggtcaaaggcttctaccccagcgacatcgccgtggagtgggagagcaatgggcagccggagaacaactacaagaccacacctcccatgctggactccgacggctccttcttcctctacagcaagctcaccgtggacaagagcaggtggcagcaggggaacgtcttctcatgctccgtgatgcatgaggctctgcacaaccactacacgcagaagagcctctccctgtctccgggtaaa

SEQ ID NO: 154 - protein, 247 aa, synthetic construct
  REGION 1..247: note = pre-Fc chimeric polypeptide having SHH signal peptide
MLLLARCLLLVLVSSLLVCSGLACVECPPCPAPPVAGPSVFLFPPKPKDTLMISRTPEVTCVVVDVSHEDPEVQFNWYVDGVEVHNAKTKPREEQFNSTFRVVSVLTVVHQDWLNGKEYKCKVSNKGLPAPIEKTISKTKGQPREPQVYTLPPSREEMTKNQVSLTCLVKGFYPSDIAVEWESNGQPENNYKTTPPMLDSDGSFFLYSKLTVDKSRWQQGNVFSCSVMHEALHNHYTQKSLSLSPGK

SEQ ID NO: 155 - DNA, 773 bp, synthetic construct
  misc_feature 1..773: note = DNA encoding pre-Fc chimeric polypeptide having SHH signal peptide
  source 1..773: mol_type = other DNA
aagcttgaattcccaccatgctgctgctggcgagatgtctgctgctagtcctcgtctcctcgctgctggtatgctcgggactggcgtgtgtcgagtgcccaccgtgcccagcaccacctgtggcaggaccgtcagtcttcctcttccccccaaaacccaaggacaccctcatgatctcccggacccctgaggtcacgtgcgtggtggtggacgtgagccacgaagaccccgaggtccagttcaactggtacgtggacggcgtggaggtgcataatgccaagacaaagccacgggaggagcagttcaacagcacgttccgtgtggtcagcgtcctcaccgttgtgcaccaggactggctgaacggcaaggagtacaagtgcaaggtctccaacaaaggcctcccagcccccatcgagaaaaccatctccaaaaccaaagggcagccccgagaaccacaggtgtacaccctgcccccatcccgggaggagatgaccaagaaccaggtcagcctgacctgcctggtcaaaggcttctaccccagcgacatcgccgtggagtgggagagcaatgggcagccggagaacaactacaagaccacacctcccatgctggactccgacggctccttcttcctctacagcaagctcaccgtggacaagagcaggtggcagcaggggaacgtcttctcatgctccgtgatgcatgaggctctgcacaaccactacacgcagaagagcctctccctgtctccgggtaaatgactcgagcggccg

SEQ ID NO: 156 - protein, 247 aa, synthetic construct
  REGION 1..247: note = pre-Fc chimeric polypeptide having IFN signal peptide
MALTFALLVALLVLSCKSSCSVGCVECPPCPAPPVAGPSVFLFPPKPKDTLMISRTPEVTCVVVDVSHEDPEVQFNWYVDGVEVHNAKTKPREEQFNSTFRVVSVLTVVHQDWLNGKEYKCKVSNKGLPAPIEKTISKTKGQPREPQVYTLPPSREEMTKNQVSLTCLVKGFYPSDIAVEWESNGQPENNYKTTPPMLDSDGSFFLYSKLTVDKSRWQQGNVFSCSVMHEALHNHYTQKSLSLSPGK

SEQ ID NO: 157 - DNA, 773 bp, synthetic construct
  misc_feature 1..773: note = DNA encoding pre-Fc chimeric polypeptide having IFN signal peptide
  source 1..773: mol_type = other DNA
aagcttgaattcccaccatggccttgacctttgctttactggtggccctcctggtgctcagctgcaagtcaagctgctctgtgggctgtgtcgagtgcccaccgtgcccagcaccacctgtggcaggaccgtcagtcttcctcttccccccaaaacccaaggacaccctcatgatctcccggacccctgaggtcacgtgcgtggtggtggacgtgagccacgaagaccccgaggtccagttcaactggtacgtggacggcgtggaggtgcataatgccaagacaaagccacgggaggagcagttcaacagcacgttccgtgtggtcagcgtcctcaccgttgtgcaccaggactggctgaacggcaaggagtacaagtgcaaggtctccaacaaaggcctcccagcccccatcgagaaaaccatctccaaaaccaaagggcagccccgagaaccacaggtgtacaccctgcccccatcccgggaggagatgaccaagaaccaggtcagcctgacctgcctggtcaaaggcttctaccccagcgacatcgccgtggagtgggagagcaatgggcagccggagaacaactacaagaccacacctcccatgctggactccgacggctccttcttcctctacagcaagctcaccgtggacaagagcaggtggcagcaggggaacgtcttctcatgctccgtgatgcatgaggctctgcacaaccactacacgcagaagagcctctccctgtctccgggtaaatgactcgagcggccg

SEQ ID NO: 158 - protein, 241 aa, synthetic construct
  REGION 1..241: note = pre-Fc chimeric polypeptide having CETP signal peptide
MLAATVLTLALLGNAHACVECPPCPAPPVAGPSVFLFPPKPKDTLMISRTPEVTCVVVDVSHEDPEVQFNWYVDGVEVHNAKTKPREEQFNSTFRVVSVLTVVHQDWLNGKEYKCKVSNKGLPAPIEKTISKTKGQPREPQVYTLPPSREEMTKNQVSLTCLVKGFYPSDIAVEWESNGQPENNYKTTPPMLDSDGSFFLYSKLTVDKSRWQQGNVFSCSVMHEALHNHYTQKSLSLSPGK

SEQ ID NO: 159 - DNA, 755 bp, synthetic construct
  misc_feature 1..755: note = DNA encoding pre-Fc chimeric polypeptide having CETP signal peptide
  source 1..755: mol_type = other DNA
aagcttgaattcccaccatgctggctgccacagtcctgaccctggccctgctgggcaatgcccatgcctgtgtcgagtgcccaccgtgcccagcaccacctgtggcaggaccgtcagtcttcctcttccccccaaaacccaaggacaccctcatgatctcccggacccctgaggtcacgtgcgtggtggtggacgtgagccacgaagaccccgaggtccagttcaactggtacgtggacggcgtggaggtgcataatgccaagacaaagccacgggaggagcagttcaacagcacgttccgtgtggtcagcgtcctcaccgttgtgcaccaggactggctgaacggcaaggagtacaagtgcaaggtctccaacaaaggcctcccagcccccatcgagaaaaccatctccaaaaccaaagggcagccccgagaaccacaggtgtacaccctgcccccatcccgggaggagatgaccaagaaccaggtcagcctgacctgcctggtcaaaggcttctaccccagcgacatcgccgtggagtgggagagcaatgggcagccggagaacaactacaagaccacacctcccatgctggactccgacggctccttcttcctctacagcaagctcaccgtggacaagagcaggtggcagcaggggaacgtcttctcatgctccgtgatgcatgaggctctgcacaaccactacacgcagaagagcctctccctgtctccgggtaaatgactcgagcggccg

SEQ ID NO: 160 - protein, 221 aa, synthetic construct
  REGION 1..221: note = Human IgG2 Fc domain having the N-terminal sequence CPPCPAPE
CPPCPAPPVAGPSVFLFPPKPKDTLMISRTPEVTCVVVDVSHEDPEVQFNWYVDGVEVHNAKTKPREEQFNSTFRVVSVLTVVHQDWLNGKEYKCKVSNKGLPAPIEKTISKTKGQPREPQVYTLPPSREEMTKNQVSLTCLVKGFYPSDIAVEWESNGQPENNYKTTPPMLDSDGSFFLYSKLTVDKSRWQQGNVFSCSVMHEALHNHYTQKSLSLSPGK

SEQ ID NO: 161 - DNA, 663 bp, synthetic construct
  misc_feature 1..663: note = DNA encoding human IgG2 Fc domain having the N-terminal sequence CPPCPAPE
  source 1..663: mol_type = other DNA
tgcccaccgtgcccagcaccacctgtggcaggaccgtcagtcttcctcttccccccaaaacccaaggacaccctcatgatctcccggacccctgaggtcacgtgcgtggtggtggacgtgagccacgaagaccccgaggtccagttcaactggtacgtggacggcgtggaggtgcataatgccaagacaaagccacgggaggagcagttcaacagcacgttccgtgtggtcagcgtcctcaccgttgtgcaccaggactggctgaacggcaaggagtacaagtgcaaggtctccaacaaaggcctcccagcccccatcgagaaaaccatctccaaaaccaaagggcagccccgagaaccacaggtgtacaccctgcccccatcccgggaggagatgaccaagaaccaggtcagcctgacctgcctggtcaaaggcttctaccccagcgacatcgccgtggagtgggagagcaatgggcagccggagaacaactacaagaccacacctcccatgctggactccgacggctccttcttcctctacagcaagctcaccgtggacaagagcaggtggcagcaggggaacgtcttctcatgctccgtgatgcatgaggctctgcacaaccactacacgcagaagagcctctccctgtctccgggtaaa

SEQ ID NO: 162 - protein, 244 aa, synthetic construct
  REGION 1..244: note = pre-Fc chimeric polypeptide having SHH signal peptide
MLLLARCLLLVLVSSLLVCSGLACPPCPAPPVAGPSVFLFPPKPKDTLMISRTPEVTCVVVDVSHEDPEVQFNWYVDGVEVHNAKTKPREEQFNSTFRVVSVLTVVHQDWLNGKEYKCKVSNKGLPAPIEKTISKTKGQPREPQVYTLPPSREEMTKNQVSLTCLVKGFYPSDIAVEWESNGQPENNYKTTPPMLDSDGSFFLYSKLTVDKSRWQQGNVFSCSVMHEALHNHYTQKSLSLSPGK

SEQ ID NO: 163 - DNA, 764 bp, synthetic construct
  misc_feature 1..764: note = DNA encoding pre-Fc chimeric polypeptide having SHH signal peptide
  source 1..764: mol_type = other DNA
aagcttgaattcccaccatgctgctgctggcgagatgtctgctgctagtcctcgtctcctcgctgctggtatgctcgggactggcgtgcccaccgtgcccagcaccacctgtggcaggaccgtcagtcttcctcttccccccaaaacccaaggacaccctcatgatctcccggacccctgaggtcacgtgcgtggtggtggacgtgagccacgaagaccccgaggtccagttcaactggtacgtggacggcgtggaggtgcataatgccaagacaaagccacgggaggagcagttcaacagcacgttccgtgtggtcagcgtcctcaccgttgtgcaccaggactggctgaacggcaaggagtacaagtgcaaggtctccaacaaaggcctcccagcccccatcgagaaaaccatctccaaaaccaaagggcagccccgagaaccacaggtgtacaccctgcccccatcccgggaggagatgaccaagaaccaggtcagcctgacctgcctggtcaaaggcttctaccccagcgacatcgccgtggagtgggagagcaatgggcagccggagaacaactacaagaccacacctcccatgctggactccgacggctccttcttcctctacagcaagctcaccgtggacaagagcaggtggcagcaggggaacgtcttctcatgctccgtgatgcatgaggctctgcacaaccactacacgcagaagagcctctccctgtctccgggtaaatgactcgagcggccg

SEQ ID NO: 164 - protein, 244 aa, synthetic construct
  REGION 1..244: note = pre-Fc chimeric polypeptide having IFN signal peptide
MALTFALLVALLVLSCKSSCSVGCPPCPAPPVAGPSVFLFPPKPKDTLMISRTPEVTCVVVDVSHEDPEVQFNWYVDGVEVHNAKTKPREEQFNSTFRVVSVLTVVHQDWLNGKEYKCKVSNKGLPAPIEKTISKTKGQPREPQVYTLPPSREEMTKNQVSLTCLVKGFYPSDIAVEWESNGQPENNYKTTPPMLDSDGSFFLYSKLTVDKSRWQQGNVFSCSVMHEALHNHYTQKSLSLSPGK

SEQ ID NO: 165 - DNA, 764 bp, synthetic construct
  misc_feature 1..764: note = DNA encoding pre-Fc chimeric polypeptide having IFN signal peptide
  source 1..764: mol_type = other DNA
aagcttgaattcccaccatggccttgacctttgctttactggtggccctcctggtgctcagctgcaagtcaagctgctctgtgggctgcccaccgtgcccagcaccacctgtggcaggaccgtcagtcttcctcttccccccaaaacccaaggacaccctcatgatctcccggacccctgaggtcacgtgcgtggtggtggacgtgagccacgaagaccccgaggtccagttcaactggtacgtggacggcgtggaggtgcataatgccaagacaaagccacgggaggagcagttcaacagcacgttccgtgtggtcagcgtcctcaccgttgtgcaccaggactggctgaacggcaaggagtacaagtgcaaggtctccaacaaaggcctcccagcccccatcgagaaaaccatctccaaaaccaaagggcagccccgagaaccacaggtgtacaccctgcccccatcccgggaggagatgaccaagaaccaggtcagcctgacctgcctggtcaaaggcttctaccccagcgacatcgccgtggagtgggagagcaatgggcagccggagaacaactacaagaccacacctcccatgctggactccgacggctccttcttcctctacagcaagctcaccgtggacaagagcaggtggcagcaggggaacgtcttctcatgctccgtgatgcatgaggctctgcacaaccactacacgcagaagagcctctccctgtctccgggtaaatgactcgagcggccg

SEQ ID NO: 166 - protein, 238 aa, synthetic construct
  REGION 1..238: note = pre-Fc chimeric polypeptide having CETP signal peptide
MLAATVLTLALLGNAHACPPCPAPPVAGPSVFLFPPKPKDTLMISRTPEVTCVVVDVSHEDPEVQFNWYVDGVEVHNAKTKPREEQFNSTFRVVSVLTVVHQDWLNGKEYKCKVSNKGLPAPIEKTISKTKGQPREPQVYTLPPSREEMTKNQVSLTCLVKGFYPSDIAVEWESNGQPENNYKTTPPMLDSDGSFFLYSKLTVDKSRWQQGNVFSCSVMHEALHNHYTQKSLSLSPGK

SEQ ID NO: 167 - DNA, 746 bp, synthetic construct
  misc_feature 1..746: note = DNA encoding pre-Fc chimeric polypeptide having CETP signal peptide
  source 1..746: mol_type = other DNA
aagcttgaattcccaccatgctggctgccacagtcctgaccctggccctgctgggcaatgcccatgcctgcccaccgtgcccagcaccacctgtggcaggaccgtcagtcttcctcttccccccaaaacccaaggacaccctcatgatctcccggacccctgaggtcacgtgcgtggtggtggacgtgagccacgaagaccccgaggtccagttcaactggtacgtggacggcgtggaggtgcataatgccaagacaaagccacgggaggagcagttcaacagcacgttccgtgtggtcagcgtcctcaccgttgtgcaccaggactggctgaacggcaaggagtacaagtgcaaggtctccaacaaaggcctcccagcccccatcgagaaaaccatctccaaaaccaaagggcagccccgagaaccacaggtgtacaccctgcccccatcccgggaggagatgaccaagaaccaggtcagcctgacctgcctggtcaaaggcttctaccccagcgacatcgccgtggagtgggagagcaatgggcagccggagaacaactacaagaccacacctcccatgctggactccgacggctccttcttcctctacagcaagctcaccgtggacaagagcaggtggcagcaggggaacgtcttctcatgctccgtgatgcatgaggctctgcacaaccactacacgcagaagagcctctccctgtctccgggtaaatgactcgagcggccg

SEQ ID NO: 168 - protein, 218 aa, synthetic construct
  REGION 1..218: note = Human IgG2 Fc domain having the N-terminal sequence CPAPE
CPAPPVAGPSVFLFPPKPKDTLMISRTPEVTCVVVDVSHEDPEVQFNWYVDGVEVHNAKTKPREEQFNSTFRVVSVLTVVHQDWLNGKEYKCKVSNKGLPAPIEKTISKTKGQPREPQVYTLPPSREEMTKNQVSLTCLVKGFYPSDIAVEWESNGQPENNYKTTPPMLDSDGSFFLYSKLTVDKSRWQQGNVFSCSVMHEALHNHYTQKSLSLSPGK

SEQ ID NO: 169 - DNA, 654 bp, synthetic construct
  misc_feature 1..654: note = DNA encoding human IgG2 Fc domain having the N-terminal sequence CPAPE
  source 1..654: mol_type = other DNA
tgcccagcaccacctgtggcaggaccgtcagtcttcctcttccccccaaaacccaaggacaccctcatgatctcccggacccctgaggtcacgtgcgtggtggtggacgtgagccacgaagaccccgaggtccagttcaactggtacgtggacggcgtggaggtgcataatgccaagacaaagccacgggaggagcagttcaacagcacgttccgtgtggtcagcgtcctcaccgttgtgcaccaggactggctgaacggcaaggagtacaagtgcaaggtctccaacaaaggcctcccagcccccatcgagaaaaccatctccaaaaccaaagggcagccccgagaaccacaggtgtacaccctgcccccatcccgggaggagatgaccaagaaccaggtcagcctgacctgcctggtcaaaggcttctaccccagcgacatcgccgtggagtgggagagcaatgggcagccggagaacaactacaagaccacacctcccatgctggactccgacggctccttcttcctctacagcaagctcaccgtggacaagagcaggtggcagcaggggaacgtcttctcatgctccgtgatgcatgaggctctgcacaaccactacacgcagaagagcctctccctgtctccgggtaaa

SEQ ID NO: 170 - protein, 241 aa, synthetic construct
  REGION 1..241: note = pre-Fc chimeric polypeptide having SHH signal peptide
MLLLARCLLLVLVSSLLVCSGLACPAPPVAGPSVFLFPPKPKDTLMISRTPEVTCVVVDVSHEDPEVQFNWYVDGVEVHNAKTKPREEQFNSTFRVVSVLTVVHQDWLNGKEYKCKVSNKGLPAPIEKTISKTKGQPREPQVYTLPPSREEMTKNQVSLTCLVKGFYPSDIAVEWESNGQPENNYKTTPPMLDSDGSFFLYSKLTVDKSRWQQGNVFSCSVMHEALHNHYTQKSLSLSPGK

SEQ ID NO: 171 - DNA, 755 bp, synthetic construct
  misc_feature 1..755: note = DNA encoding pre-Fc chimeric polypeptide having SHH signal peptide
  source 1..755: mol_type = other DNA
aagcttgaattcccaccatgctgctgctggcgagatgtctgctgctagtcctcgtctcctcgctgctggtatgctcgggactggcgtgcccagcaccacctgtggcaggaccgtcagtcttcctcttccccccaaaacccaaggacaccctcatgatctcccggacccctgaggtcacgtgcgtggtggtggacgtgagccacgaagaccccgaggtccagttcaactggtacgtggacggcgtggaggtgcataatgccaagacaaagccacgggaggagcagttcaacagcacgttccgtgtggtcagcgtcctcaccgttgtgcaccaggactggctgaacggcaaggagtacaagtgcaaggtctccaacaaaggcctcccagcccccatcgagaaaaccatctccaaaaccaaagggcagccccgagaaccacaggtgtacaccctgcccccatcccgggaggagatgaccaagaaccaggtcagcctgacctgcctggtcaaaggcttctaccccagcgacatcgccgtggagtgggagagcaatgggcagccggagaacaactacaagaccacacctcccatgctggactccgacggctccttcttcctctacagcaagctcaccgtggacaagagcaggtggcagcaggggaacgtcttctcatgctccgtgatgcatgaggctctgcacaaccactacacgcagaagagcctctccctgtctccgggtaaatgactcgagcggccg

SEQ ID NO: 172 - protein, 241 aa, synthetic construct
  REGION 1..241: note = pre-Fc chimeric polypeptide having IFN signal peptide
MALTFALLVALLVLSCKSSCSVGCPAPPVAGPSVFLFPPKPKDTLMISRTPEVTCVVVDVSHEDPEVQFNWYVDGVEVHNAKTKPREEQFNSTFRVVSVLTVVHQDWLNGKEYKCKVSNKGLPAPIEKTISKTKGQPREPQVYTLPPSREEMTKNQVSLTCLVKGFYPSDIAVEWESNGQPENNYKTTPPMLDSDGSFFLYSKLTVDKSRWQQGNVFSCSVMHEALHNHYTQKSLSLSPGK

SEQ ID NO: 173 - DNA, 755 bp, synthetic construct
  misc_feature 1..755: note = DNA encoding pre-Fc chimeric polypeptide having IFN signal peptide
  source 1..755: mol_type = other DNA
aagcttgaattcccaccatggccttgacctttgctttactggtggccctcctggtgctcagctgcaagtcaagctgctctgtgggctgcccagcaccacctgtggcaggaccgtcagtcttcctcttccccccaaaacccaaggacaccctcatgatctcccggacccctgaggtcacgtgcgtggtggtggacgtgagccacgaagaccccgaggtccagttcaactggtacgtggacggcgtggaggtgcataatgccaagacaaagccacgggaggagcagttcaacagcacgttccgtgtggtcagcgtcctcaccgttgtgcaccaggactggctgaacggcaaggagtacaagtgcaaggtctccaacaaaggcctcccagcccccatcgagaaaaccatctccaaaaccaaagggcagccccgagaaccacaggtgtacaccctgcccccatcccgggaggagatgaccaagaaccaggtcagcctgacctgcctggtcaaaggcttctaccccagcgacatcgccgtggagtgggagagcaatgggcagccggagaacaactacaagaccacacctcccatgctggactccgacggctccttcttcctctacagcaagctcaccgtggacaagagcaggtggcagcaggggaacgtcttctcatgctccgtgatgcatgaggctctgcacaaccactacacgcagaagagcctctccctgtctccgggtaaatgactcgagcggccg

SEQ ID NO: 174 - protein, 235 aa, synthetic construct
  REGION 1..235: note = pre-Fc chimeric polypeptide having CETP signal peptide
MLAATVLTLALLGNAHACPAPPVAGPSVFLFPPKPKDTLMISRTPEVTCVVVDVSHEDPEVQFNWYVDGVEVHNAKTKPREEQFNSTFRVVSVLTVVHQDWLNGKEYKCKVSNKGLPAPIEKTISKTKGQPREPQVYTLPPSREEMTKNQVSLTCLVKGFYPSDIAVEWESNGQPENNYKTTPPMLDSDGSFFLYSKLTVDKSRWQQGNVFSCSVMHEALHNHYTQKSLSLSPGK

SEQ ID NO: 175 - DNA, 737 bp, synthetic construct
  misc_feature 1..737: note = DNA encoding pre-Fc chimeric polypeptide having CETP signal peptide
  source 1..737: mol_type = other DNA
aagcttgaattcccaccatgctggctgccacagtcctgaccctggccctgctgggcaatgcccatgcctgcccagcaccacctgtggcaggaccgtcagtcttcctcttccccccaaaacccaaggacaccctcatgatctcccggacccctgaggtcacgtgcgtggtggtggacgtgagccacgaagaccccgaggtccagttcaactggtacgtggacggcgtggaggtgcataatgccaagacaaagccacgggaggagcagttcaacagcacgttccgtgtggtcagcgtcctcaccgttgtgcaccaggactggctgaacggcaaggagtacaagtgcaaggtctccaacaaaggcctcccagcccccatcgagaaaaccatctccaaaaccaaagggcagccccgagaaccacaggtgtacaccctgcccccatcccgggaggagatgaccaagaaccaggtcagcctgacctgcctggtcaaaggcttctaccccagcgacatcgccgtggagtgggagagcaatgggcagccggagaacaactacaagaccacacctcccatgctggactccgacggctccttcttcctctacagcaagctcaccgtggacaagagcaggtggcagcaggggaacgtcttctcatgctccgtgatgcatgaggctctgcacaaccactacacgcagaagagcctctccctgtctccgggtaaatgactcgagcggccg

SEQ ID NO: 176 - protein, 267 aa, synthetic construct
  REGION 1..267: note = Human IgG3 Fc domain having the N-terminal sequence (CPRCPEPKSDTPPP)3-CPRCPAPE
CPRCPEPKSCDTPPPCPRCPEPKSCDTPPPCPRCPEPKSCDTPPPCPRCPAPELLGGPSVFLFPPKPKDTLMISRTPEVTCVVVDVSHEDPEVQFKWYVDGVEVHNAKTKPREEQYNSTFRVVSVLTVLHQDWLNGKEYKCKVSNKALPAPIEKTISKTKGQPREPQVYTLPPSREEMTKNQVSLTCLVKGFYPSDIAVEWESSGQPENNYNTTPPMLDSDGSFFLYSKLTVDKSRWQQGNIFSCSVMHEALHNRFTQKSLSLSPGK

SEQ ID NO: 177 - DNA, 801 bp, synthetic construct
  misc_feature 1..801: note = DNA encoding human IgG3 Fc domain having the N-terminal sequence (CPRCPEPKSDTPPP)3-CPRCPAPE
  source 1..801: mol_type = other DNA
tgcccacggtgcccagagcccaaatcttgtgacacacctcccccgtgcccacggtgcccagagcccaaatcttgtgacacacctcccccatgcccacggtgcccagagcccaaatcttgtgacacacctcccccgtgcccaaggtgcccagcacctgaactcctgggaggaccgtcagtcttcctcttccccccaaaacccaaggatacccttatgatttcccggacccctgaggtcacgtgcgtggtggtggacgtgagccacgaagaccccgaggtccagttcaagtggtacgtggacggcgtggaggtgcataatgccaagacaaagccgcgggaggagcagtacaacagcacgttccgtgtggtcagcgtcctcaccgtcctgcaccaggactggctgaacggcaaggagtacaagtgcaaggtctccaacaaagccctcccagcccccatcgagaaaaccatctccaaaaccaaaggacagccccgagaaccacaggtgtacaccctgcccccatcccgggaggagatgaccaagaaccaggtcagcctgacctgcctggtcaaaggcttctaccccagcgacatcgccgtggagtgggagagcagcgggcagccggagaacaactacaacaccacgcctcccatgctggactccgacggctccttcttcctctacagcaagctcaccgtggacaagagcaggtggcagcaggggaacatcttctcatgctccgtgatgcatgaggctctgcacaaccgcttcacgcagaagagcctctccctgtctccgggtaaa

SEQ ID NO: 178 - protein, 290 aa, synthetic construct
  REGION 1..290: note = pre-Fc chimeric polypeptide having SHH signal peptide
MLLLARCLLLVLVSSLLVCSGLACPRCPEPKSCDTPPPCPRCPEPKSCDTPPPCPRCPEPKSCDTPPPCPRCPAPELLGGPSVFLFPPKPKDTLMISRTPEVTCVVVDVSHEDPEVQFKWYVDGVEVHNAKTKPREEQYNSTFRVVSVLTVLHQDWLNGKEYKCKVSNKALPAPIEKTISKTKGQPREPQVYTLPPSREEMTKNQVSLTCLVKGFYPSDIAVEWESSGQPENNYNTTPPMLDSDGSFFLYSKLTVDKSRWQQGNIFSCSVMHEALHNRFTQKSLSLSPGK

SEQ ID NO: 179 - DNA, 902 bp, synthetic construct
  misc_feature 1..902: note = DNA encoding pre-Fc chimeric polypeptide having SHH signal peptide
  source 1..902: mol_type = other DNA
aagcttgaattcccaccatgctgctgctggcgagatgtctgctgctagtcctcgtctcctcgctgctggtatgctcgggactggcgtgcccacggtgcccagagcccaaatcttgtgacacacctcccccgtgcccacggtgcccagagcccaaatcttgtgacacacctcccccatgcccacggtgcccagagcccaaatcttgtgacacacctcccccgtgcccaaggtgcccagcacctgaactcctgggaggaccgtcagtcttcctcttccccccaaaacccaaggatacccttatgatttcccggacccctgaggtcacgtgcgtggtggtggacgtgagccacgaagaccccgaggtccagttcaagtggtacgtggacggcgtggaggtgcataatgccaagacaaagccgcgggaggagcagtacaacagcacgttccgtgtggtcagcgtcctcaccgtcctgcaccaggactggctgaacggcaaggagtacaagtgcaaggtctccaacaaagccctcccagcccccatcgagaaaaccatctccaaaaccaaaggacagccccgagaaccacaggtgtacaccctgcccccatcccgggaggagatgaccaagaaccaggtcagcctgacctgcctggtcaaaggcttctaccccagcgacatcgccgtggagtgggagagcagcgggcagccggagaacaactacaacaccacgcctcccatgctggactccgacggctccttcttcctctacagcaagctcaccgtggacaagagcaggtggcagcaggggaacatcttctcatgctccgtgatgcatgaggctctgcacaaccgcttcacgcagaagagcctctccctgtctccgggtaaatgactcgagcggccg

SEQ ID NO: 180 - protein, 290 aa, synthetic construct
  REGION 1..290: note = pre-Fc chimeric polypeptide having IFN signal peptide
MALTFALLVALLVLSCKSSCSVGCPRCPEPKSCDTPPPCPRCPEPKSCDTPPPCPRCPEPKSCDTPPPCPRCPAPELLGGPSVFLFPPKPKDTLMISRTPEVTCVVVDVSHEDPEVQFKWYVDGVEVHNAKTKPREEQYNSTFRVVSVLTVLHQDWLNGKEYKCKVSNKALPAPIEKTISKTKGQPREPQVYTLPPSREEMTKNQVSLTCLVKGFYPSDIAVEWESSGQPENNYNTTPPMLDSDGSFFLYSKLTVDKSRWQQGNIFSCSVMHEALHNRFTQKSLSLSPGK

SEQ ID NO: 181 - DNA, 902 bp, synthetic construct
  misc_feature 1..902: note = DNA encoding pre-Fc chimeric polypeptide having IFN signal peptide
  source 1..902: mol_type = other DNA
aagcttgaattcccaccatggccttgacctttgctttactggtggccctcctggtgctcagctgcaagtcaagctgctctgtgggctgcccacggtgcccagagcccaaatcttgtgacacacctcccccgtgcccacggtgcccagagcccaaatcttgtgacacacctcccccatgcccacggtgcccagagcccaaatcttgtgacacacctcccccgtgcccaaggtgcccagcacctgaactcctgggaggaccgtcagtcttcctcttccccccaaaacccaaggatacccttatgatttcccggacccctgaggtcacgtgcgtggtggtggacgtgagccacgaagaccccgaggtccagttcaagtggtacgtggacggcgtggaggtgcataatgccaagacaaagccgcgggaggagcagtacaacagcacgttccgtgtggtcagcgtcctcaccgtcctgcaccaggactggctgaacggcaaggagtacaagtgcaaggtctccaacaaagccctcccagcccccatcgagaaaaccatctccaaaaccaaaggacagccccgagaaccacaggtgtacaccctgcccccatcccgggaggagatgaccaagaaccaggtcagcctgacctgcctggtcaaaggcttctaccccagcgacatcgccgtggagtgggagagcagcgggcagccggagaacaactacaacaccacgcctcccatgctggactccgacggctccttcttcctctacagcaagctcaccgtggacaagagcaggtggcagcaggggaacatcttctcatgctccgtgatgcatgaggctctgcacaaccgcttcacgcagaagagcctctccctgtctccgggtaaatgactcgagcggccg

SEQ ID NO: 182 - protein, 284 aa, synthetic construct
  REGION 1..284: note = pre-Fc chimeric polypeptide having CETP signal peptide
MLAATVLTLALLGNAHACPRCPEPKSCDTPPPCPRCPEPKSCDTPPPCPRCPEPKSCDTPPPCPRCPAPELLGGPSVFLFPPKPKDTLMISRTPEVTCVVVDVSHEDPEVQFKWYVDGVEVHNAKTKPREEQYNSTFRVVSVLTVLHQDWLNGKEYKCKVSNKALPAPIEKTISKTKGQPREPQVYTLPPSREEMTKNQVSLTCLVKGFYPSDIAVEWESSGQPENNYNTTPPMLDSDGSFFLYSKLTVDKSRWQQGNIFSCSVMHEALHNRFTQKSLSLSPGK

SEQ ID NO: 183 - DNA, 884 bp, synthetic construct
  misc_feature 1..884: note = DNA encoding pre-Fc chimeric polypeptide having CETP signal peptide
  source 1..884: mol_type = other DNA
aagcttgaattcccaccatgctggctgccacagtcctgaccctggccctgctgggcaatgcccatgcctgcccacggtgcccagagcccaaatcttgtgacacacctcccccgtgcccacggtgcccagagcccaaatcttgtgacacacctcccccatgcccacggtgcccagagcccaaatcttgtgacacacctcccccgtgcccaaggtgcccagcacctgaactcctgggaggaccgtcagtcttcctcttccccccaaaacccaaggatacccttatgatttcccggacccctgaggtcacgtgcgtggtggtggacgtgagccacgaagaccccgaggtccagttcaagtggtacgtggacggcgtggaggtgcataatgccaagacaaagccgcgggaggagcagtacaacagcacgttccgtgtggtcagcgtcctcaccgtcctgcaccaggactggctgaacggcaaggagtacaagtgcaaggtctccaacaaagccctcccagcccccatcgagaaaaccatctccaaaaccaaaggacagccccgagaaccacaggtgtacaccctgcccccatcccgggaggagatgaccaagaaccaggtcagcctgacctgcctggtcaaaggcttctaccccagcgacatcgccgtggagtgggagagcagcgggcagccggagaacaactacaacaccacgcctcccatgctggactccgacggctccttcttcctctacagcaagctcaccgtggacaagagcaggtggcagcaggggaacatcttctcatgctccgtgatgcatgaggctctgcacaaccgcttcacgcagaagagcctctccctgtctccgggtaaatgactcgagcggccg

SEQ ID NO: 184 - protein, 222 aa, synthetic construct
  REGION 1..222: note = Human IgG3 Fc domain having the N-terminal sequence CPRCPAPE
CPRCPAPELLGGPSVFLFPPKPKDTLMISRTPEVTCVVVDVSHEDPEVQFKWYVDGVEVHNAKTKPREEQYNSTFRVVSVLTVLHQDWLNGKEYKCKVSNKALPAPIEKTISKTKGQPREPQVYTLPPSREEMTKNQVSLTCLVKGFYPSDIAVEWESSGQPENNYNTTPPMLDSDGSFFLYSKLTVDKSRWQQGNIFSCSVMHEALHNRFTQKSLSLSPGK

SEQ ID NO: 185 - DNA, 681 bp, synthetic construct
  misc_feature 1..681: note = DNA encoding human IgG3 Fc domain having the N-terminal sequence CPRCPAPE
  source 1..681: mol_type = other DNA
tgcccaaggtgcccagcacctgaactcctgggaggaccgtcagtcttcctcttccccccaaaacccaaggatacccttatgatttcccggacccctgaggtcacgtgcgtggtggtggacgtgagccacgaagaccccgaggtccagttcaagtggtacgtggacggcgtggaggtgcataatgccaagacaaagccgcgggaggagcagtacaacagcacgttccgtgtggtcagcgtcctcaccgtcctgcaccaggactggctgaacggcaaggagtacaagtgcaaggtctccaacaaagccctcccagcccccatcgagaaaaccatctccaaaaccaaaggacagccccgagaaccacaggtgtacaccctgcccccatcccgggaggagatgaccaagaaccaggtcagcctgacctgcctggtcaaaggcttctaccccagcgacatcgccgtggagtgggagagcagcgggcagccggagaacaactacaacaccacgcctcccatgctggactccgacggctccttcttcctctacagcaagctcaccgtggacaagagcaggtggcagcaggggaacatcttctcatgctccgtgatgcatgaggctctgcacaaccgcttcacgcagaagagcctctccctgtctccgggtaaatgactcgagcggccg

SEQ ID NO: 186 - protein, 245 aa, synthetic construct
  REGION 1..245: note = pre-Fc chimeric polypeptide having SHH signal peptide
MLLLARCLLLVLVSSLLVCSGLACPRCPAPELLGGPSVFLFPPKPKDTLMISRTPEVTCVVVDVSHEDPEVQFKWYVDGVEVHNAKTKPREEQYNSTFRVVSVLTVLHQDWLNGKEYKCKVSNKALPAPIEKTISKTKGQPREPQVYTLPPSREEMTKNQVSLTCLVKGFYPSDIAVEWESSGQPENNYNTTPPMLDSDGSFFLYSKLTVDKSRWQQGNIFSCSVMHEALHNRFTQKSLSLSPGK

SEQ ID NO: 187 - DNA, 767 bp, synthetic construct
  misc_feature 1..767: note = DNA encoding pre-Fc chimeric polypeptide having SHH signal peptide
  source 1..767: mol_type = other DNA
aagcttgaattcccaccatgctgctgctggcgagatgtctgctgctagtcctcgtctcctcgctgctggtatgctcgggactggcgtgcccaaggtgcccagcacctgaactcctgggaggaccgtcagtcttcctcttccccccaaaacccaaggatacccttatgatttcccggacccctgaggtcacgtgcgtggtggtggacgtgagccacgaagaccccgaggtccagttcaagtggtacgtggacggcgtggaggtgcataatgccaagacaaagccgcgggaggagcagtacaacagcacgttccgtgtggtcagcgtcctcaccgtcctgcaccaggactggctgaacggcaaggagtacaagtgcaaggtctccaacaaagccctcccagcccccatcgagaaaaccatctccaaaaccaaaggacagccccgagaaccacaggtgtacaccctgcccccatcccgggaggagatgaccaagaaccaggtcagcctgacctgcctggtcaaaggcttctaccccagcgacatcgccgtggagtgggagagcagcgggcagccggagaacaactacaacaccacgcctcccatgctggactccgacggctccttcttcctctacagcaagctcaccgtggacaagagcaggtggcagcaggggaacatcttctcatgctccgtgatgcatgaggctctgcacaaccgcttcacgcagaagagcctctccctgtctccgggtaaatgactcgagcggccg

SEQ ID NO: 188 - protein, 245 aa, synthetic construct
  REGION 1..245: note = pre-Fc chimeric polypeptide having IFN signal peptide
MALTFALLVALLVLSCKSSCSVGCPRCPAPELLGGPSVFLFPPKPKDTLMISRTPEVTCVVVDVSHEDPEVQFKWYVDGVEVHNAKTKPREEQYNSTFRVVSVLTVLHQDWLNGKEYKCKVSNKALPAPIEKTISKTKGQPREPQVYTLPPSREEMTKNQVSLTCLVKGFYPSDIAVEWESSGQPENNYNTTPPMLDSDGSFFLYSKLTVDKSRWQQGNIFSCSVMHEALHNRFTQKSLSLSPGK

SEQ ID NO: 189 - DNA, 767 bp, synthetic construct
  misc_feature 1..767: note = DNA encoding pre-Fc chimeric polypeptide having IFN signal peptide
  source 1..767: mol_type = other DNA
aagcttgaattcccaccatggccttgacctttgctttactggtggccctcctggtgctcagctgcaagtcaagctgctctgtgggctgcccaaggtgcccagcacctgaactcctgggaggaccgtcagtcttcctcttccccccaaaacccaaggatacccttatgatttcccggacccctgaggtcacgtgcgtggtggtggacgtgagccacgaagaccccgaggtccagttcaagtggtacgtggacggcgtggaggtgcataatgccaagacaaagccgcgggaggagcagtacaacagcacgttccgtgtggtcagcgtcctcaccgtcctgcaccaggactggctgaacggcaaggagtacaagtgcaaggtctccaacaaagccctcccagcccccatcgagaaaaccatctccaaaaccaaaggacagccccgagaaccacaggtgtacaccctgcccccatcccgggaggagatgaccaagaaccaggtcagcctgacctgcctggtcaaaggcttctaccccagcgacatcgccgtggagtgggagagcagcgggcagccggagaacaactacaacaccacgcctcccatgctggactccgacggctccttcttcctctacagcaagctcaccgtggacaagagcaggtggcagcaggggaacatcttctcatgctccgtgatgcatgaggctctgcacaaccgcttcacgcagaagagcctctccctgtctccgggtaaatgactcgagcggccg

SEQ ID NO: 190 - protein, 239 aa, synthetic construct
  REGION 1..239: note = pre-Fc chimeric polypeptide having CETP signal peptide
MLAATVLTLALLGNAHACPRCPAPELLGGPSVFLFPPKPKDTLMISRTPEVTCVVVDVSHEDPEVQFKWYVDGVEVHNAKTKPREEQYNSTFRVVSVLTVLHQDWLNGKEYKCKVSNKALPAPIEKTISKTKGQPREPQVYTLPPSREEMTKNQVSLTCLVKGFYPSDIAVEWESSGQPENNYNTTPPMLDSDGSFFLYSKLTVDKSRWQQGNIFSCSVMHEALHNRFTQKSLSLSPGK

SEQ ID NO: 191 - DNA, 749 bp, synthetic construct
  misc_feature 1..749: note = DNA encoding pre-Fc chimeric polypeptide having CETP signal peptide
  source 1..749: mol_type = other DNA
aagcttgaattcccaccatgctggctgccacagtcctgaccctggccctgctgggcaatgcccatgcctgcccaaggtgcccagcacctgaactcctgggaggaccgtcagtcttcctcttccccccaaaacccaaggatacccttatgatttcccggacccctgaggtcacgtgcgtggtggtggacgtgagccacgaagaccccgaggtccagttcaagtggtacgtggacggcgtggaggtgcataatgccaagacaaagccgcgggaggagcagtacaacagcacgttccgtgtggtcagcgtcctcaccgtcctgcaccaggactggctgaacggcaaggagtacaagtgcaaggtctccaacaaagccctcccagcccccatcgagaaaaccatctccaaaaccaaaggacagccccgagaaccacaggtgtacaccctgcccccatcccgggaggagatgaccaagaaccaggtcagcctgacctgcctggtcaaaggcttctaccccagcgacatcgccgtggagtgggagagcagcgggcagccggagaacaactacaacaccacgcctcccatgctggactccgacggctccttcttcctctacagcaagctcaccgtggacaagagcaggtggcagcaggggaacatcttctcatgctccgtgatgcatgaggctctgcacaaccgcttcacgcagaagagcctctccctgtctccgggtaaatgactcgagcggccg

SEQ ID NO: 192 - protein, 219 aa, synthetic construct
  REGION 1..219: note = Human IgG3 Fc domain having the N-terminal sequence CPAPE
CPAPELLGGPSVFLFPPKPKDTLMISRTPEVTCVVVDVSHEDPEVQFKWYVDGVEVHNAKTKPREEQYNSTFRVVSVLTVLHQDWLNGKEYKCKVSNKALPAPIEKTISKTKGQPREPQVYTLPPSREEMTKNQVSLTCLVKGFYPSDIAVEWESSGQPENNYNTTPPMLDSDGSFFLYSKLTVDKSRWQQGNIFSCSVMHEALHNRFTQKSLSLSPGK

SEQ ID NO: 193 - DNA, 672 bp, synthetic construct
  misc_feature 1..672: note = DNA encoding human IgG3 Fc domain having the N-terminal sequence CPAPE
  source 1..672: mol_type = other DNA
tgcccagcacctgaactcctgggaggaccgtcagtcttcctcttccccccaaaacccaaggatacccttatgatttcccggacccctgaggtcacgtgcgtggtggtggacgtgagccacgaagaccccgaggtccagttcaagtggtacgtggacggcgtggaggtgcataatgccaagacaaagccgcgggaggagcagtacaacagcacgttccgtgtggtcagcgtcctcaccgtcctgcaccaggactggctgaacggcaaggagtacaagtgcaaggtctccaacaaagccctcccagcccccatcgagaaaaccatctccaaaaccaaaggacagccccgagaaccacaggtgtacaccctgcccccatcccgggaggagatgaccaagaaccaggtcagcctgacctgcctggtcaaaggcttctaccccagcgacatcgccgtggagtgggagagcagcgggcagccggagaacaactacaacaccacgcctcccatgctggactccgacggctccttcttcctctacagcaagctcaccgtggacaagagcaggtggcagcaggggaacatcttctcatgctccgtgatgcatgaggctctgcacaaccgcttcacgcagaagagcctctccctgtctccgggtaaatgactcgagcggccg

SEQ ID NO: 194 - protein, 242 aa, synthetic construct
  REGION 1..242: note = pre-Fc chimeric polypeptide having SHH signal peptide
MLLLARCLLLVLVSSLLVCSGLACPAPELLGGPSVFLFPPKPKDTLMISRTPEVTCVVVDVSHEDPEVQFKWYVDGVEVHNAKTKPREEQYNSTFRVVSVLTVLHQDWLNGKEYKCKVSNKALPAPIEKTISKTKGQPREPQVYTLPPSREEMTKNQVSLTCLVKGFYPSDIAVEWESSGQPENNYNTTPPMLDSDGSFFLYSKLTVDKSRWQQGNIFSCSVMHEALHNRFTQKSLSLSPGK

SEQ ID NO: 195 - DNA, 758 bp, synthetic construct
  misc_feature 1..758: note = DNA encoding pre-Fc chimeric polypeptide having SHH signal peptide
  source 1..758: mol_type = other DNA
aagcttgaattcccaccatgctgctgctggcgagatgtctgctgctagtcctcgtctcctcgctgctggtatgctcgggactggcgtgcccagcacctgaactcctgggaggaccgtcagtcttcctcttccccccaaaacccaaggatacccttatgatttcccggacccctgaggtcacgtgcgtggtggtggacgtgagccacgaagaccccgaggtccagttcaagtggtacgtggacggcgtggaggtgcataatgccaagacaaagccgcgggaggagcagtacaacagcacgttccgtgtggtcagcgtcctcaccgtcctgcaccaggactggctgaacggcaaggagtacaagtgcaaggtctccaacaaagccctcccagcccccatcgagaaaaccatctccaaaaccaaaggacagccccgagaaccacaggtgtacaccctgcccccatcccgggaggagatgaccaagaaccaggtcagcctgacctgcctggtcaaaggcttctaccccagcgacatcgccgtggagtgggagagcagcgggcagccggagaacaactacaacaccacgcctcccatgctggactccgacggctccttcttcctctacagcaagctcaccgtggacaagagcaggtggcagcaggggaacatcttctcatgctccgtgatgcatgaggctctgcacaaccgcttcacgcagaagagcctctccctgtctccgggtaaatgactcgagcggccg

SEQ ID NO: 196 - protein, 242 aa, synthetic construct
  REGION 1..242: note = pre-Fc chimeric polypeptide having IFN signal peptide
MALTFALLVALLVLSCKSSCSVGCPAPELLGGPSVFLFPPKPKDTLMISRTPEVTCVVVDVSHEDPEVQFKWYVDGVEVHNAKTKPREEQYNSTFRVVSVLTVLHQDWLNGKEYKCKVSNKALPAPIEKTISKTKGQPREPQVYTLPPSREEMTKNQVSLTCLVKGFYPSDIAVEWESSGQPENNYNTTPPMLDSDGSFFLYSKLTVDKSRWQQGNIFSCSVMHEALHNRFTQKSLSLSPGK

SEQ ID NO: 197 - DNA, 758 bp, synthetic construct
  misc_feature 1..758: note = DNA encoding pre-Fc chimeric polypeptide having IFN signal peptide
  source 1..758: mol_type = other DNA
aagcttgaattcccaccatggccttgacctttgctttactggtggccctcctggtgctcagctgcaagtcaagctgctctgtgggctgcccagcacctgaactcctgggaggaccgtcagtcttcctcttccccccaaaacccaaggatacccttatgatttcccggacccctgaggtcacgtgcgtggtggtggacgtgagccacgaagaccccgaggtccagttcaagtggtacgtggacggcgtggaggtgcataatgccaagacaaagccgcgggaggagcagtacaacagcacgttccgtgtggtcagcgtcctcaccgtcctgcaccaggactggctgaacggcaaggagtacaagtgcaaggtctccaacaaagccctcccagcccccatcgagaaaaccatctccaaaaccaaaggacagccccgagaaccacaggtgtacaccctgcccccatcccgggaggagatgaccaagaaccaggtcagcctgacctgcctggtcaaaggcttctaccccagcgacatcgccgtggagtgggagagcagcgggcagccggagaacaactacaacaccacgcctcccatgctggactccgacggctccttcttcctctacagcaagctcaccgtggacaagagcaggtggcagcaggggaacatcttctcatgctccgtgatgcatgaggctctgcacaaccgcttcacgcagaagagcctctccctgtctccgggtaaatgactcgagcggccg

SEQ ID NO: 198 - protein, 235 aa, synthetic construct
  REGION 1..235: note = pre-Fc chimeric polypeptide having CETP signal peptide
MLAATVLTLALLGNAHACPAPELLGGPSVFLFPPKPKDTLMISRTPEVTCVVVDVSHEDPEVQFKWYVDGVEVHNAKTKPREEQYNSTFRVVSVLTVLHQDWLNGKEYKCKVSNKALPAPIEKTISKTKGQPREPQVYTLPPSREEMTKNQVSLTCLVKGFYPSDIAVEWESSGQPENNYNTTPPMLDSDGSFFLYSKLTVDKSRWQQGNIFSCSVMHEALHNRFTQKSLSLSPG

SEQ ID NO: 199 - DNA, 740 bp, synthetic construct
  misc_feature 1..740: note = DNA encoding pre-Fc chimeric polypeptide having CETP signal peptide
  source 1..740: mol_type = other DNA
aagcttgaattcccaccatgctggctgccacagtcctgaccctggccctgctgggcaatgcccatgcctgcccagcacctgaactcctgggaggaccgtcagtcttcctcttccccccaaaacccaaggatacccttatgatttcccggacccctgaggtcacgtgcgtggtggtggacgtgagccacgaagaccccgaggtccagttcaagtggtacgtggacggcgtggaggtgcataatgccaagacaaagccgcgggaggagcagtacaacagcacgttccgtgtggtcagcgtcctcaccgtcctgcaccaggactggctgaacggcaaggagtacaagtgcaaggtctccaacaaagccctcccagcccccatcgagaaaaccatctccaaaaccaaaggacagccccgagaaccacaggtgtacaccctgcccccatcccgggaggagatgaccaagaaccaggtcagcctgacctgcctggtcaaaggcttctaccccagcgacatcgccgtggagtgggagagcagcgggcagccggagaacaactacaacaccacgcctcccatgctggactccgacggctccttcttcctctacagcaagctcaccgtggacaagagcaggtggcagcaggggaacatcttctcatgctccgtgatgcatgaggctctgcacaaccgcttcacgcagaagagcctctccctgtctccgggtaaatgactcgagcggccg

SEQ ID NO: 200 - protein, 222 aa, synthetic construct
  REGION 1..222: note = Human IgG4 Fc domain having the N-terminal sequence CPSCPAPE
CPSCPAPEFLGGPSVFLFPPKPKDTLMISRTPEVTCVVVDVSQEDPEVQFNWYVDGVEVHNAKTKPREEQFNSTYRVVSVLTVLHQDWLNGKEYKCKVSNKGLPSSIEKTISKAKGQPREPQVYTLPPSQEEMTKNQVSLTCLVKGFYPSDIAVEWESNGQPENNYKTTPPVLDSDGSFFLYSRLTVDKSRWQEGNVFSCSVMHEALHNHYTQKSLSLSLGK

SEQ ID NO: 201 - DNA, 666 bp, synthetic construct
  misc_feature 1..666: note = DNA encoding human IgG4 Fc domain having the N-terminal sequence CPSCPAPE
  source 1..666: mol_type = other DNA
tgcccatcatgcccagcacctgagttcctggggggaccatcagtcttcctgttccccccaaaacccaaggacactctcatgatctcccggacccctgaggtcacgtgcgtggtggtggacgtgagccaggaagaccccgaggtccagttcaactggtacgtggatggcgtggaggtgcataatgccaagacaaagccgcgggaggagcagttcaacagcacgtaccgtgtggtcagcgtcctcaccgtcctgcaccaggactggctgaacggcaaggagtacaagtgcaaggtctccaacaaaggcctcccgtcctccatcgagaaaaccatctccaaagccaaagggcagccccgagagccacaggtgtacaccctgcccccatcccaggaggagatgaccaagaaccaggtcagcctgacctgcctggtcaaaggcttctaccccagcgacatcgccgtggagtgggagagcaatgggcagccggagaacaactacaagaccacgcctcccgtgctggactccgacggctccttcttcctctacagcaggctaaccgtggacaagagcaggtggcaggaggggaatgtcttctcatgctccgtgatgcatgaggctctgcacaaccactacacacagaagagcctctccctgtctctgggtaaa

SEQ ID NO: 202 - protein, 245 aa, synthetic construct
  REGION 1..245: note = pre-Fc chimeric polypeptide having a SHH signal peptide
MLLLARCLLLVLVSSLLVCSGLACPSCPAPEFLGGPSVFLFPPKPKDTLMISRTPEVTCVVVDVSQEDPEVQFNWYVDGVEVHNAKTKPREEQFNSTYRVVSVLTVLHQDWLNGKEYKCKVSNKGLPSSIEKTISKAKGQPREPQVYTLPPSQEEMTKNQVSLTCLVKGFYPSDIAVEWESNGQPENNYKTTPPVLDSDGSFFLYSRLTVDKSRWQEGNVFSCSVMHEALHNHYTQKSLSLSLGK

SEQ ID NO: 203 - DNA, 767 bp, synthetic construct
  misc_feature 1..767: note = DNA encoding pre-Fc chimeric polypeptide having a SHH signal peptide
  source 1..767: mol_type = other DNA
aagcttgaattcccaccatgctgctgctggcgagatgtctgctgctagtcctcgtctcctcgctgctggtatgctcgggactggcgtgcccatcatgcccagcacctgagttcctggggggaccatcagtcttcctgttccccccaaaacccaaggacactctcatgatctcccggacccctgaggtcacgtgcgtggtggtggacgtgagccaggaagaccccgaggtccagttcaactggtacgtggatggcgtggaggtgcataatgccaagacaaagccgcgggaggagcagttcaacagcacgtaccgtgtggtcagcgtcctcaccgtcctgcaccaggactggctgaacggcaaggagtacaagtgcaaggtctccaacaaaggcctcccgtcctccatcgagaaaaccatctccaaagccaaagggcagccccgagagccacaggtgtacaccctgcccccatcccaggaggagatgaccaagaaccaggtcagcctgacctgcctggtcaaaggcttctaccccagcgacatcgccgtggagtgggagagcaatgggcagccggagaacaactacaagaccacgcctcccgtgctggactccgacggctccttcttcctctacagcaggctaaccgtggacaagagcaggtggcaggaggggaatgtcttctcatgctccgtgatgcatgaggctctgcacaaccactacacacagaagagcctctccctgtctctgggtaaatgactcgagcggccg

SEQ ID NO: 204 - protein, 245 aa, synthetic construct
  REGION 1..245: note = pre-Fc chimeric polypeptide having a IFN signal peptide
MALTFALLVALLVLSCKSSCSVGCPSCPAPEFLGGPSVFLFPPKPKDTLMISRTPEVTCVVVDVSQEDPEVQFNWYVDGVEVHNAKTKPREEQFNSTYRVVSVLTVLHQDWLNGKEYKCKVSNKGLPSSIEKTISKAKGQPREPQVYTLPPSQEEMTKNQVSLTCLVKGFYPSDIAVEWESNGQPENNYKTTPPVLDSDGSFFLYSRLTVDKSRWQEGNVFSCSVMHEALHNHYTQKSLSLSLGK

SEQ ID NO: 205 - DNA, 767 bp, synthetic construct
  misc_feature 1..767: note = DNA encoding pre-Fc chimeric polypeptide having a IFN signal peptide
  source 1..767: mol_type = other DNA
aagcttgaattcccaccatggccttgacctttgctttactggtggccctcctggtgctcagctgcaagtcaagctgctctgtgggctgcccatcatgcccagcacctgagttcctggggggaccatcagtcttcctgttccccccaaaacccaaggacactctcatgatctcccggacccctgaggtcacgtgcgtggtggtggacgtgagccaggaagaccccgaggtccagttcaactggtacgtggatggcgtggaggtgcataatgccaagacaaagccgcgggaggagcagttcaacagcacgtaccgtgtggtcagcgtcctcaccgtcctgcaccaggactggctgaacggcaaggagtacaagtgcaaggtctccaacaaaggcctcccgtcctccatcgagaaaaccatctccaaagccaaagggcagccccgagagccacaggtgtacaccctgcccccatcccaggaggagatgaccaagaaccaggtcagcctgacctgcctggtcaaaggcttctaccccagcgacatcgccgtggagtgggagagcaatgggcagccggagaacaactacaagaccacgcctcccgtgctggactccgacggctccttcttcctctacagcaggctaaccgtggacaagagcaggtggcaggaggggaatgtcttctcatgctccgtgatgcatgaggctctgcacaaccactacacacagaagagcctctccctgtctctgggtaaatgactcgagcggccg

SEQ ID NO: 206 - protein, 239 aa, synthetic construct
  REGION 1..239: note = pre-Fc chimeric polypeptide having a CETP signal peptide
MLAATVLTLALLGNAHACPSCPAPEFLGGPSVFLFPPKPKDTLMISRTPEVTCVVVDVSQEDPEVQFNWYVDGVEVHNAKTKPREEQFNSTYRVVSVLTVLHQDWLNGKEYKCKVSNKGLPSSIEKTISKAKGQPREPQVYTLPPSQEEMTKNQVSLTCLVKGFYPSDIAVEWESNGQPENNYKTTPPVLDSDGSFFLYSRLTVDKSRWQEGNVFSCSVMHEALHNHYTQKSLSLSLGK

SEQ ID NO: 207 - DNA, 749 bp, synthetic construct
  misc_feature 1..749: note = DNA encoding pre-Fc chimeric polypeptide having a CETP signal peptide
  source 1..749: mol_type = other DNA
aagcttgaattcccaccatgctggctgccacagtcctgaccctggccctgctgggcaatgcccatgcctgcccatcatgcccagcacctgagttcctggggggaccatcagtcttcctgttccccccaaaacccaaggacactctcatgatctcccggacccctgaggtcacgtgcgtggtggtggacgtgagccaggaagaccccgaggtccagttcaactggtacgtggatggcgtggaggtgcataatgccaagacaaagccgcgggaggagcagttcaacagcacgtaccgtgtggtcagcgtcctcaccgtcctgcaccaggactggctgaacggcaaggagtacaagtgcaaggtctccaacaaaggcctcccgtcctccatcgagaaaaccatctccaaagccaaagggcagccccgagagccacaggtgtacaccctgcccccatcccaggaggagatgaccaagaaccaggtcagcctgacctgcctggtcaaaggcttctaccccagcgacatcgccgtggagtgggagagcaatgggcagccggagaacaactacaagaccacgcctcccgtgctggactccgacggctccttcttcctctacagcaggctaaccgtggacaagagcaggtggcaggaggggaatgtcttctcatgctccgtgatgcatgaggctctgcacaaccactacacacagaagagcctctccctgtctctgggtaaatgactcgagcggccg

SEQ ID NO: 208 - protein, 219 aa, synthetic construct
  REGION 1..219: note = Human IgG4 Fc domain having the N-terminal sequence CPAPE
CPAPEFLGGPSVFLFPPKPKDTLMISRTPEVTCVVVDVSQEDPEVQFNWYVDGVEVHNAKTKPREEQFNSTYRVVSVLTVLHQDWLNGKEYKCKVSNKGLPSSIEKTISKAKGQPREPQVYTLPPSQEEMTKNQVSLTCLVKGFYPSDIAVEWESNGQPENNYKTTPPVLDSDGSFFLYSRLTVDKSRWQEGNVFSCSVMHEALHNHYTQKSLSLSLGK

SEQ ID NO: 209 - DNA, 657 bp, synthetic construct
  misc_feature 1..657: note = DNA encoding human IgG4 Fc domain having the N-terminal sequence CPAPE
  source 1..657: mol_type = other DNA
tgcccagcacctgagttcctggggggaccatcagtcttcctgttccccccaaaacccaaggacactctcatgatctcccggacccctgaggtcacgtgcgtggtggtggacgtgagccaggaagaccccgaggtccagttcaactggtacgtggatggcgtggaggtgcataatgccaagacaaagccgcgggaggagcagttcaacagcacgtaccgtgtggtcagcgtcctcaccgtcctgcaccaggactggctgaacggcaaggagtacaagtgcaaggtctccaacaaaggcctcccgtcctccatcgagaaaaccatctccaaagccaaagggcagccccgagagccacaggtgtacaccctgcccccatcccaggaggagatgaccaagaaccaggtcagcctgacctgcctggtcaaaggcttctaccccagcgacatcgccgtggagtgggagagcaatgggcagccggagaacaactacaagaccacgcctcccgtgctggactccgacggctccttcttcctctacagcaggctaaccgtggacaagagcaggtggcaggaggggaatgtcttctcatgctccgtgatgcatgaggctctgcacaaccactacacacagaagagcctctccctgtctctgggtaaa

SEQ ID NO: 210 - protein, 242 aa, synthetic construct
  REGION 1..242: note = pre-Fc chimeric polypeptide having a SHH signal peptide
MLLLARCLLLVLVSSLLVCSGLACPAPEFLGGPSVFLFPPKPKDTLMISRTPEVTCVVVDVSQEDPEVQFNWYVDGVEVHNAKTKPREEQFNSTYRVVSVLTVLHQDWLNGKEYKCKVSNKGLPSSIEKTISKAKGQPREPQVYTLPPSQEEMTKNQVSLTCLVKGFYPSDIAVEWESNGQPENNYKTTPPVLDSDGSFFLYSRLTVDKSRWQEGNVFSCSVMHEALHNHYTQKSLSLSLGK

SEQ ID NO: 211 - DNA, 758 bp, synthetic construct
  misc_feature 1..758: note = DNA encoding pre-Fc chimeric polypeptide having a SHH signal peptide
  source 1..758: mol_type = other DNA
aagcttgaattcccaccatgctgctgctggcgagatgtctgctgctagtcctcgtctcctcgctgctggtatgctcgggactggcgtgcccagcacctgagttcctggggggaccatcagtcttcctgttccccccaaaacccaaggacactctcatgatctcccggacccctgaggtcacgtgcgtggtggtggacgtgagccaggaagaccccgaggtccagttcaactggtacgtggatggcgtggaggtgcataatgccaagacaaagccgcgggaggagcagttcaacagcacgtaccgtgtggtcagcgtcctcaccgtcctgcaccaggactggctgaacggcaaggagtacaagtgcaaggtctccaacaaaggcctcccgtcctccatcgagaaaaccatctccaaagccaaagggcagccccgagagccacaggtgtacaccctgcccccatcccaggaggagatgaccaagaaccaggtcagcctgacctgcctggtcaaaggcttctaccccagcgacatcgccgtggagtgggagagcaatgggcagccggagaacaactacaagaccacgcctcccgtgctggactccgacggctccttcttcctctacagcaggctaaccgtggacaagagcaggtggcaggaggggaatgtcttctcatgctccgtgatgcatgaggctctgcacaaccactacacacagaagagcctctccctgtctctgggtaaatgactcgagcggccg

SEQ ID NO: 212 - protein, 242 aa, synthetic construct
  REGION 1..242: note = pre-Fc chimeric polypeptide having a IFN signal peptide
MALTFALLVALLVLSCKSSCSVGCPAPEFLGGPSVFLFPPKPKDTLMISRTPEVTCVVVDVSQEDPEVQFNWYVDGVEVHNAKTKPREEQFNSTYRVVSVLTVLHQDWLNGKEYKCKVSNKGLPSSIEKTISKAKGQPREPQVYTLPPSQEEMTKNQVSLTCLVKGFYPSDIAVEWESNGQPENNYKTTPPVLDSDGSFFLYSRLTVDKSRWQEGNVFSCSVMHEALHNHYTQKSLSLSLGK

SEQ ID NO: 213 - DNA, 758 bp, synthetic construct
  misc_feature 1..758: note = DNA encoding pre-Fc chimeric polypeptide having a IFN signal peptide
  source 1..758: mol_type = other DNA
aagcttgaattcccaccatggccttgacctttgctttactggtggccctcctggtgctcagctgcaagtcaagctgctctgtgggctgcccagcacctgagttcctggggggaccatcagtcttcctgttccccccaaaacccaaggacactctcatgatctcccggacccctgaggtcacgtgcgtggtggtggacgtgagccaggaagaccccgaggtccagttcaactggtacgtggatggcgtggaggtgcataatgccaagacaaagccgcgggaggagcagttcaacagcacgtaccgtgtggtcagcgtcctcaccgtcctgcaccaggactggctgaacggcaaggagtacaagtgcaaggtctccaacaaaggcctcccgtcctccatcgagaaaaccatctccaaagccaaagggcagccccgagagccacaggtgtacaccctgcccccatcccaggaggagatgaccaagaaccaggtcagcctgacctgcctggtcaaaggcttctaccccagcgacatcgccgtggagtgggagagcaatgggcagccggagaacaactacaagaccacgcctcccgtgctggactccgacggctccttcttcctctacagcaggctaaccgtggacaagagcaggtggcaggaggggaatgtcttctcatgctccgtgatgcatgaggctctgcacaaccactacacacagaagagcctctccctgtctctgggtaaatgactcgagcggccg

SEQ ID NO: 214 - protein, 236 aa, synthetic construct
  REGION 1..236: note = pre-Fc chimeric polypeptide having a CETP signal peptide
MLAATVLTLALLGNAHACPAPEFLGGPSVFLFPPKPKDTLMISRTPEVTCVVVDVSQEDPEVQFNWYVDGVEVHNAKTKPREEQFNSTYRVVSVLTVLHQDWLNGKEYKCKVSNKGLPSSIEKTISKAKGQPREPQVYTLPPSQEEMTKNQVSLTCLVKGFYPSDIAVEWESNGQPENNYKTTPPVLDSDGSFFLYSRLTVDKSRWQEGNVFSCSVMHEALHNHYTQKSLSLSLGK

SEQ ID NO: 215 - DNA, 740 bp, synthetic construct
  misc_feature 1..740: note = DNA encoding pre-Fc chimeric polypeptide having a CETP signal peptide
  source 1..740: mol_type = other DNA
aagcttgaattcccaccatgctggctgccacagtcctgaccctggccctgctgggcaatgcccatgcctgcccagcacctgagttcctggggggaccatcagtcttcctgttccccccaaaacccaaggacactctcatgatctcccggacccctgaggtcacgtgcgtggtggtggacgtgagccaggaagaccccgaggtccagttcaactggtacgtggatggcgtggaggtgcataatgccaagacaaagccgcgggaggagcagttcaacagcacgtaccgtgtggtcagcgtcctcaccgtcctgcaccaggactggctgaacggcaaggagtacaagtgcaaggtctccaacaaaggcctcccgtcctccatcgagaaaaccatctccaaagccaaagggcagccccgagagccacaggtgtacaccctgcccccatcccaggaggagatgaccaagaaccaggtcagcctgacctgcctggtcaaaggcttctaccccagcgacatcgccgtggagtgggagagcaatgggcagccggagaacaactacaagaccacgcctcccgtgctggactccgacggctccttcttcctctacagcaggctaaccgtggacaagagcaggtggcaggaggggaatgtcttctcatgctccgtgatgcatgaggctctgcacaaccactacacacagaagagcctctccctgtctctgggtaaatgactcgagcggccg

SEQ ID NO: 216 - DNA, 5428 bp, synthetic construct
  misc_feature 1..5428: note = pCDNA3.1(+)
  source 1..5428: mol_type = other DNA
gacggatcgggagatctcccgatcccctatggtgcactctcagtacaatctgctctgatgccgcatagttaagccagtatctgctccctgcttgtgtgttggaggtcgctgagtagtgcgcgagcaaaatttaagctacaacaaggcaaggcttgaccgacaattgcatgaagaatctgcttagggttaggcgttttgcgctgcttcgcgatgtacgggccagatatacgcgttgacattgattattgactagttattaatagtaatcaattacggggtcattagttcatagcccatatatggagttccgcgttacataacttacggtaaatggcccgcctggctgaccgcccaacgacccccgcccattgacgtcaataatgacgtatgttcccatagtaacgccaatagggactttccattgacgtcaatgggtggagtatttacggtaaactgcccacttggcagtacatcaagtgtatcatatgccaagtacgccccctattgacgtcaatgacggtaaatggcccgcctggcattatgcccagtacatgaccttatgggactttcctacttggcagtacatctacgtattagtcatcgctattaccatggtgatgcggttttggcagtacatcaatgggcgtggatagcggtttgactcacggggatttccaagtctccaccccattgacgtcaatgggagtttgttttggcaccaaaatcaacgggactttccaaaatgtcgtaacaactccgccccattgacgcaaatgggcggtaggcgtgtacggtgggaggtctatataagcagagctctctggctaactagagaacccactgcttactggcttatcgaaattaatacgactcactatagggagacccaagctggctagcgtttaaacttaagcttggtaccgagctcggatccactagtccagtgtggtggaattctgcagatatccagcacagtggcggccgctcgagtctagagggcccgtttaaacccgctgatcagcctcgactgtgccttctagttgccagccatctgttgtttgcccctcccccgtgccttccttgaccctggaaggtgccactcccactgtcctttcctaataaaatgaggaaattgcatcgcattgtctgagtaggtgtcattctattctggggggtggggtggggcaggacagcaagggggaggattgggaagacaatagcaggcatgctggggatgcggtgggctctatggcttctgaggcggaaagaaccagctggggctctagggggtatccccacgcgccctgtagcggcgcattaagcgcggcgggtgtggtggttacgcgcagcgtgaccgctacacttgccagcgccctagcgcccgctcctttcgctttcttcccttcctttctcgccacgttcgccggctttccccgtcaagctctaaatcgggggctccctttagggttccgatttagtgctttacggcacctcgaccccaaaaaacttgattagggtgatggttcacgtagtgggccatcgccctgatagacggtttttcgccctttgacgttggagtccacgttctttaatagtggactcttgttccaaactggaacaacactcaaccctatctcggtctattcttttgatttataagggattttgccgatttcggcctattggttaaaaaatgagctgatttaacaaaaatttaacgcgaattaattctgtggaatgtgtgtcagttagggtgtggaaagtccccaggctccccagcaggcagaagtatgcaaagcatgcatctcaattagtcagcaaccaggtgtggaaagtccccaggctccccagcaggcagaagtatgcaaagcatgcatctcaattagtcagcaaccatagtcccgcccctaactccgcccatcccgcccctaactccgcccagttccgcccattctccgccccatggctgactaattttttttatttatgcagaggccgaggccgcctctgcctctgagctattccagaagtagtgaggaggcttttttggaggcctaggcttttgcaaaaagctcccgggagcttgtatatccattttcggatctgatcaagagacaggatgaggatcgtttcgcatgattgaacaagatggattgcacgcaggttctccggccgcttgggtggagaggctattcggctatgactgggcacaacagacaatcggctgctctgatgccgccgtgttccggctgtcagcgcaggggcgcccggttctttttgtcaagaccgacctgtccggtgccctgaatgaactgcaggacgaggcagcgcggctatcgtggctggccacgacgggcgttccttgcgcagctgtgctcgacgttgtcactgaagcgggaagggactggctgctattgggcgaagtgccggggcaggatctcctgtcatctcaccttgctcctgccgagaaagtatccatcatggctgatgcaatgcggcggctgcatacgcttgatccggctacctgcccattcgaccaccaagcgaaacatcgcatcgagcgagcacgtactcggatggaagccggtcttgtcgatcaggatgatctggacgaagagcatcaggggctcgcgccagccgaactgttcgccaggctcaaggcgcgcatgcccgacggcgaggatctcgtcgtgacccatggcgatgcctgcttgccgaatatcatggtggaaaatggccgcttttctggattcatcgactgtggccggctgggtgtggcggaccgctatcaggacatagcgttggctacccgtgatattgctgaagagcttggcggcgaatgggctgaccgcttcctcgtgctttacggtatcgccgctcccgattcgcagcgcatcgccttctatcgccttcttgacgagttcttctgagcgggactctggggttcgaaatgaccgaccaagcgacgcccaacctgccatcacgagatttcgattccaccgccgccttctatgaaaggttgggcttcggaatcgttttccgggacgccggctggatgatcctccagcgcggggatctcatgctggagttcttcgcccaccccaacttgtttattgcagcttataatggttacaaataaagcaatagcatcacaaatttcacaaataaagcatttttttcactgcattctagttgtggtttgtccaaactcatcaatgtatcttatcatgtctgtataccgtcgacctctagctagagcttggcgtaatcatggtcatagctgtttcctgtgtgaaattgttatccgctcacaattccacacaacatacgagccggaagcataaagtgtaaagcctggggtgcctaatgagtgagctaactcacattaattgcgttgcgctcactgcccgctttccagtcgggaaacctgtcgtgccagctgcattaatgaatcggccaacgcgcggggagaggcggtttgcgtattgggcgctcttccgcttcctcgctcactgactcgctgcgctcggtcgttcggctgcggcgagcggtatcagctcactcaaaggcggtaatacggttatccacagaatcaggggataacgcaggaaagaacatgtgagcaaaaggccagcaaaaggccaggaaccgtaaaaaggccgcgttgctggcgtttttccataggctccgcccccctgacgagcatcacaaaaatcgacgctcaagtcagaggtggcgaaacccgacaggactataaagataccaggcgtttccccctggaagctccctcgtgcgctctcctgttccgaccctgccgcttaccggatacctgtccgcctttctcccttcgggaagcgtggcgctttctcatagctcacgctgtaggtatctcagttcggtgtaggtcgttcgctccaagctgggctgtgtgcacgaaccccccgttcagcccgaccgctgcgccttatccggtaactatcgtcttgagtccaacccggtaagacacgacttatcgccactggcagcagccactggtaacaggattagcagagcgaggtatgtaggcggtgctacagagttcttgaagtggtggcctaactacggctacactagaagaacagtatttggtatctgcgctctgctgaagccagttaccttcggaaaaagagttggtagctcttgatccggcaaacaaaccaccgctggtagcggtttttttgtttgcaagcagcagattacgcgcagaaaaaaaggatctcaagaagatcctttgatcttttctacggggtctgacgctcagtggaacgaaaactcacgttaagggattttggtcatgagattatcaaaaaggatcttcacctagatccttttaaattaaaaatgaagttttaaatcaatctaaagtatatatgagtaaacttggtctgacagttaccaatgcttaatcagtgaggcacctatctcagcgatctgtctatttcgttcatccatagttgcctgactccccgtcgtgtagataactacgatacgggagggcttaccatctggccccagtgctgcaatgataccgcgagacccacgctcaccggctccagatttatcagcaataaaccagccagccggaagggccgagcgcagaagtggtcctgcaactttatccgcctccatccagtctattaattgttgccgggaagctagagtaagtagttcgccagttaatagtttgcgcaacgttgttgccattgctacaggcatcgtggtgtcacgctcgtcgtttggtatggcttcattcagctccggttcccaacgatcaaggcgagttacatgatcccccatgttgtgcaaaaaagcggttagctccttcggtcctccgatcgttgtcagaagtaagttggccgcagtgttatcactcatggttatggcagcactgcataattctcttactgtcatgccatccgtaagatgcttttctgtgactggtgagtactcaaccaagtcattctgagaatagtgtatgcggcgaccgagttgctcttgcccggcgtcaatacgggataataccgcgccacatagcagaactttaaaagtgctcatcattggaaaacgttcttcggggcgaaaactctcaaggatcttaccgctgttgagatccagttcgatgtaacccactcgtgcacccaactgatcttcagcatcttttactttcaccagcgtttctgggtgagcaaaaacaggaaggcaaaatgccgcaaaaaagggaataagggcgacacggaaatgttgaatactcatactcttcctttttcaatattattgaagcatttatcagggttattgtctcatgagcggatacatatttgaatgtatttagaaaaataaacaaataggggttccgcgcacatttccccgaaaagtgccacctgacgtc

SEQ ID NO: 217 - DNA, 4195 bp, synthetic construct
  misc_feature 1..4195: note = pSA
  source 1..4195: mol_type = other DNA
ctaaattgtaagcgttaatattttgttaaaattcgcgttaaatttttgttaaatcagctcattttttaaccaataggccgaaatcggcaaaatcccttataaatcaaaagaatagaccgagatagggttgagtgttgttccagtttggaacaagagtccactattaaagaacgtggactccaacgtcaaagggcgaaaaaccgtctatcagggcgatggcccactacgtgaaccatcaccctaatcaagttttttggggtcgaggtgccgtaaagcactaaatcggaaccctaaagggagcccccgatttagagcttgacggggaaagccggcgaacgtggcgagaaaggaagggaagaaagcgaaaggagcgggcgctagggcgctggcaagtgtagcggtcacgctgcgcgtaaccaccacacccgccgcgcttaatgcgccgctacagggcgcgtcccattcgccattcaggctgcgcaactgttgggaagggcgatcggtgcgggcctcttcgctattacgccagctggcgaaagggggatgtgctgcaaggcgattaagttgggtaacgccagggttttcccagtcacgacgttgtaaaacgacggccagtgagcgcgcaagcggccgcaacccgggaaaagcttggccattgcatacgttgtatccatatcataatatgtacatttatattggctcatgtccaacattaccgccatgttgacattgattattgactagttattaatagtaatcaattacggggtcattagttcatagcccatatatggagttccgcgttacataacttacggtaaatggcccgcctggctgaccgcccaacgacccccgcccattgacgtcaataatgacgtatgttcccatagtaacgccaatagggactttccattgacgtcaatgggtggagtatttacggtaaactgcccacttggcagtacatcaagtgtatcatatgccaagtacgccccctattgacgtcaatgacggtaaatggcccgcctggcattatgcccagtacatgaccttatgggactttcctacttggcagtacatctacgtattagtcatcgctattaccatggtgatgcggttttggcagtacatcaatgggcgtggatagcggtttgactcacggggatttccaagtctccaccccattgacgtcaatgggagtttgttttggcaccaaaatcaacgggactttccaaaatgtcgtaacaactccgccccattgacgcaaatgggcggtaggcgtgtacggtgggaggtctatataagcagagctcgtttagtgaaccgtcagatcgcctggagacgccatccacgctgttttgacctccatagaagacaccgggaccgatccagcctccgcggccgggaacggtgcattggaacgcggattccccgtgccaagagtgacgtaagtaccgcctatagagtctataggcccacccccttggcttcttatgcatgctcccctgctccgacccgggctcctcgcccgcccggacccacaggccaccctcaaccgtcctggccccggacccaaaccccacccctcactctgcttctccccgcaggagaattcaatcgcgaaagggcccaaagatctgccataccacatttgtagaggttttacttgctttaaaaaacctcccacacctccccctgaacctgaaacataaaatgaatgcaattgttgttgttaacttgtttattgcagcttataatggttacaaataaagcaatagcatcacaaatttcacaaataaagcatttttttcactgcattctagttgtggtttgtccaaactcatcaatgtatcttatcatgtctggagctagcatcccgcccctaactccgccctgttccgcccattctccgccccatggctgactaattttttttatttatgcagaggccgaggccgcctcggcctctgagctattccagaagtagtgaggaggcttttttggaggcctaggcttttgcgtcgagaagcgcgcttggcgtaatcatggtcatagctgtttcctgtgtgaaattgttatccgctcacaattccacacaacatacgagccggaagcataaagtgtaaagcctggggtgcctaatgagtgagctaactcacattaattgcgttgcgctcactgcccgctttccagtcgggaaacctgtcgtgccagctgcattaatgaatcggccaacgcgcggggagaggcggtttgcgtattgggcgctcttccgcttcctcgctcactgactcgctgcgctcggtcgttcggctgcggcgagcggtatcagctcactcaaaggcggtaatacggttatccacagaatcaggggataacgcaggaaagaacatgtgagcaaaaggccagcaaaaggccaggaaccgtaaaaaggccgcgttgctggcgtttttccataggctccgcccccctgacgagcatcacaaaaatcgacgctcaagtcagaggtggcgaaacccgacaggactataaagataccaggcgtttccccctggaagctccctcgtgcgctctcctgttccgaccctgccgcttaccggatacctgtccgcctttctcccttcgggaagcgtggcgctttctcatagctcacgctgtaggtatctcagttcggtgtaggtcgttcgctccaagctgggctgtgtgcacgaaccccccgttcagcccgaccgctgcgccttatccggtaactatcgtcttgagtccaacccggtaagacacgacttatcgccactggcagcagccactggtaacaggattagcagagcgaggtatgtaggcggtgctacagagttcttgaagtggtggcctaactacggctacactagaaggacagtatttggtatctgcgctctgctgaagccagttaccttcggaaaaagagttggtagctcttgatccggcaaacaaaccaccgctggtagcggtggtttttttgtttgcaagcagcagattacgcgcagaaaaaaaggatctcaagaagatcctttgatcttttctacggggtctgacgctcagtggaacgaaaactcacgttaagggattttggtcatgagattatcaaaaaggatcttcacctagatccttttaaattaaaaatgaagttttaaatcaatctaaagtatatatgagtaaacttggtctgacagttaccaatgcttaatcagtgaggcacctatctcagcgatctgtctatttcgttcatccatagttgcctgactccccgtcgtgtagataactacgatacgggagggcttaccatctggccccagtgctgcaatgataccgcgagacccacgctcaccggctccagatttatcagcaataaaccagccagccggaagggccgagcgcagaagtggtcctgcaactttatccgcctccatccagtctattaattgttgccgggaagctagagtaagtagttcgccagttaatagtttgcgcaacgttgttgccattgctacaggcatcgtggtgtcacgctcgtcgtttggtatggcttcattcagctccggttcccaacgatcaaggcgagttacatgatcccccatgttgtgcaaaaaagcggttagctccttcggtcctccgatcgttgtcagaagtaagttggccgcagtgttatcactcatggttatggcagcactgcataattctcttactgtcatgccatccgtaagatgcttttctgtgactggtgagtactcaaccaagtcattctgagaatagtgtatgcggcgaccgagttgctcttgcccggcgtcaatacgggataataccgcgccacatagcagaactttaaaagtgctcatcattggaaaacgttcttcggggcgaaaactctcaaggatcttaccgctgttgagatccagttcgatgtaacccactcgtgcacccaactgatcttcagcatcttttactttcaccagcgtttctgggtgagcaaaaacaggaaggcaaaatgccgcaaaaaagggaataagggcgacacggaaatgttgaatactcatactcttcctttttcaatattattgaagcatttatcagggttattgtctcatgagcggatacatatttgaatgtatttagaaaaataaacaaataggggttccgcgcacatttccccgaaaagtgccac

SEQ ID NO: 218 - DNA, 824 bp, synthetic construct
  misc_feature 1..824: note = Artificial Construct
  source 1..824: mol_type = other DNA
gttaacgaattcccaccatgattgaacaagatggattgcacgcaggttctccggccgcttgggtggagaggctattcggctatgactgggcacaacagacaatcggctgctctgatgccgccgtgttccggctgtcagcgcaggggcgcccggttctttttgtcaagaccgacctgtccggtgccctgaatgaactgcaggacgaggcagcgcggctatcgtggctggccacgacgggcgttccttgcgcagctgtgctcgacgttgtcactgaagcgggaagggactggctgctattgggcgaagtgccggggcaggatctcctgtcatctcaccttgctcctgccgagaaagtatccatcatggctgatgcaatgcggcggctgcatacgcttgatccggctacctgcccattcgaccaccaagcgaaacatcgcatcgagcgagcacgtactcggatggaagccggtcttgtcgatcaggatgatctggacgaagagcatcaggggctcgcgccagccgaactgttcgccaggctcaaggcgcgcatgcccgacggcgaggatctcgtcgtgacccatggcgatgcctgcttgccgaatatcatggtggaaaatggccgcttttctggattcatcgactgtggccggctgggtgtggcggaccgctatcaggacatagcgttggctacccgtgatattgctgaagagcttggcggcgaatgggctgaccgcttcctcgtgctttacggtatcgccgctcccgattcgcagcgcatcgccttctatcgccttcttgacgagttcttctgaagatctgttaac

SEQ ID NO: 219 - DNA, 6739 bp, synthetic construct
  misc_feature 1..6739: note = pCDNA3-TNR1B-Mth
  source 1..6739: mol_type = other DNA
gacggatcgggagatctcccgatcccctatggtgcactctcagtacaatctgctctgatgccgcatagttaagccagtatctgctccctgcttgtgtgttggaggtcgctgagtagtgcgcgagcaaaatttaagctacaacaaggcaaggcttgaccgacaattgcatgaagaatctgcttagggttaggcgttttgcgctgcttcgcgatgtacgggccagatatacgcgttgacattgattattgactagttattaatagtaatcaattacggggtcattagttcatagcccatatatggagttccgcgttacataacttacggtaaatggcccgcctggctgaccgcccaacgacccccgcccattgacgtcaataatgacgtatgttcccatagtaacgccaatagggactttccattgacgtcaatgggtggagtatttacggtaaactgcccacttggcagtacatcaagtgtatcatatgccaagtacgccccctattgacgtcaatgacggtaaatggcccgcctggcattatgcccagtacatgaccttatgggactttcctacttggcagtacatctacgtattagtcatcgctattaccatggtgatgcggttttggcagtacatcaatgggcgtggatagcggtttgactcacggggatttccaagtctccaccccattgacgtcaatgggagtttgttttggcaccaaaatcaacgggactttccaaaatgtcgtaacaactccgccccattgacgcaaatgggcggtaggcgtgtacggtgggaggtctatataagcagagctctctggctaactagagaacccactgcttactggcttatcgaaattaatacgactcactatagggagacccaagctggctagcgtttaaacttaagcttgaattcccaccatggcgcccgtcgccgtctgggccgcgctggccgtcggactggagctctgggctgcggcgcacgccttgcccgcccaggtggcatttacaccctacgccccggagcccgggagcacatgccggctcagagaatactatgaccagacagctcagatgtgctgcagcaaatgctcgccgggccaacatgcaaaagtcttctgtaccaagacctcggacaccgtgtgtgactcctgtgaggacagcacatacacccagctctggaactgggttcccgagtgcttgagctgtggctcccgctgtagctctgaccaggtggaaactcaagcctgcactcgggaacagaaccgcatctgcacctgcaggcccggctggtactgcgcgctgagcaagcaggaggggtgccggctgtgcgcgccgctgcgcaagtgccgcccgggcttcggcgtggccagaccaggaactgaaacatcagacgtggtgtgcaagccctgtgccccggggacgttctccaacacgacttcatccacggatatttgcaggccccaccagatctgtaacgtggtggccatccctgggaatgcaagcatggatgcagtctgcacgtccacgtcccccacccggagtatggccccaggggcagtacacttaccccagccagtgtccacacgatcccaacacacgcagccaactccagaacccagcactgctccaagcacctccttcctgctcccaatggggcccagccccccagctgaagggagcactggcgacgggtgcgtatccggtgacaccattgtaatgactagtggcgggccccgcactgtggctgaactggagggcaaaccgttcaccgcactgattcgcggctctggctacccatgcccctcaggtttcttccgcacctgtgaacgtgacgtatatgatctgcgtacacgtgagggtcattgcttacgtttgacccatgatcaccgtgttctggtgatggatggtggcctggaatggcgtgccgcgggtgaactggaacgcggcgaccgcctggtgatggatgatgcagctggcgagtttccggcactggcaaccttccgtggcctgcgtggcgctggccgccaggatgtttatgacgctactgtttacggtgctagcgcattcactgctaatggcttcattgtacacgcatgtggcgagcagcccgggaccggtctgaactcaggcctcacgacaaatcctggtgtatccgcttggcaggtcaacacagcttatactgcgggacaattggtcacatataacggcaagacgtataaatgtttgcagccccacacctccttggcaggatgggaaccatccaacgttcctgccttgtggcagcttcaatgactcgagcggcccgtttaaacccgctgatcagcctcgactgtgccttctagttgccagccatctgttgtttgcccctcccccgtgccttccttgaccctggaaggtgccactcccactgtcctttcctaataaaatgaggaaattgcatcgcattgtctgagtaggtgtcattctattctggggggtggggtggggcaggacagcaagggggaggattgggaagacaatagcaggcatgctggggatgcggtgggctctatggcttctgaggcggaaagaaccagctggggctctagggggtatccccacgcgccctgtagcggcgcattaagcgcggcgggtgtggtggttacgcgcagcgtgaccgctacacttgccagcgccctagcgcccgctcctttcgctttcttcccttcctttctcgccacgttcgccggctttccccgtcaagctctaaatcgggggctccctttagggttccgatttagtgctttacggcacctcgaccccaaaaaacttgattagggtgatggttcacgtagtgggccatcgccctgatagacggtttttcgccctttgacgttggagtccacgttctttaatagtggactcttgttccaaactggaacaacactcaaccctatctcggtctattcttttgatttataagggattttgccgatttcggcctattggttaaaaaatgagctgatttaacaaaaatttaacgcgaattaattctgtggaatgtgtgtcagttagggtgtggaaagtccccaggctccccagcaggcagaagtatgcaaagcatgcatctcaattagtcagcaaccaggtgtggaaagtccccaggctccccagcaggcagaagtatgcaaagcatgcatctcaattagtcagcaaccatagtcccgcccctaactccgcccatcccgcccctaactccgcccagttccgcccattctccgccccatggctgactaattttttttatttatgcagaggccgaggccgcctctgcctctgagctattccagaagtagtgaggaggcttttttggaggcctaggcttttgcaaaaagctcccgggagcttgtatatccattttcggatctgatcaagagacaggatgaggatcgtttcgcatgattgaacaagatggattgcacgcaggttctccggccgcttgggtggagaggctattcggctatgactgggcacaacagacaatcggctgctctgatgccgccgtgttccggctgtcagcgcaggggcgcccggttctttttgtcaagaccgacctgtccggtgccctgaatgaactgcaggacgaggcagcgcggctatcgtggctggccacgacgggcgttccttgcgcagctgtgctcgacgttgtcactgaagcgggaagggactggctgctattgggcgaagtgccggggcaggatctcctgtcatctcaccttgctcctgccgagaaagtatccatcatggctgatgcaatgcggcggctgcatacgcttgatccggctacctgcccattcgaccaccaagcgaaacatcgcatcgagcgagcacgtactcggatggaagccggtcttgtcgatcaggatgatctggacgaagagcatcaggggctcgcgccagccgaactgttcgccaggctcaaggcgcgcatgcccgacggcgaggatctcgtcgtgacccatggcgatgcctgcttgccgaatatcatggtggaaaatggccgcttttctggattcatcgactgtggccggctgggtgtggcggaccgctatcaggacatagcgttggctacccgtgatattgctgaagagcttggcggcgaatgggctgaccgcttcctcgtgctttacggtatcgccgctcccgattcgcagcgcatcgccttctatcgccttcttgacgagttcttctgagcgggactctggggttcgaaatgaccgaccaagcgacgcccaacctgccatcacgagatttcgattccaccgccgccttctatgaaaggttgggcttcggaatcgttttccgggacgccggctggatgatcctccagcgcggggatctcatgctggagttcttcgcccaccccaacttgtttattgcagcttataatggttacaaataaagcaatagcatcacaaatttcacaaataaagcatttttttcactgcattctagttgtggtttgtccaaactcatcaatgtatcttatcatgtctgtataccgtcgacctctagctagagcttggcgtaatcatggtcatagctgtttcctgtgtgaaattgttatccgctcacaattccacacaacatacgagccggaagcataaagtgtaaagcctggggtgcctaatgagtgagctaactcacattaattgcgttgcgctcactgcccgctttccagtcgggaaacctgtcgtgccagctgcattaatgaatcggccaacgcgcggggagaggcggtttgcgtattgggcgctcttccgcttcctcgctcactgactcgctgcgctcggtcgttcggctgcggcgagcggtatcagctcactcaaaggcggtaatacggttatccacagaatcaggggataacgcaggaaagaacatgtgagcaaaaggccagcaaaaggccaggaaccgtaaaaaggccgcgttgctggcgtttttccataggctccgcccccctgacgagcatcacaaaaatcgacgctcaagtcagaggtggcgaaacccgacaggactataaagataccaggcgtttccccctggaagctccctcgtgcgctctcctgttccgaccctgccgcttaccggatacctgtccgcctttctcccttcgggaagcgtggcgctttctcatagctcacgctgtaggtatctcagttcggtgtaggtcgttcgctccaagctgggctgtgtgcacgaaccccccgttcagcccgaccgctgcgccttatccggtaactatcgtcttgagtccaacccggtaagacacgacttatcgccactggcagcagccactggtaacaggattagcagagcgaggtatgtaggcggtgctacagagttcttgaagtggtggcctaactacggctacactagaagaacagtatttggtatctgcgctctgctgaagccagttaccttcggaaaaagagttggtagctcttgatccggcaaacaaaccaccgctggtagcggtttttttgtttgcaagcagcagattacgcgcagaaaaaaaggatctcaagaagatcctttgatcttttctacggggtctgacgctcagtggaacgaaaactcacgttaagggattttggtcatgagattatcaaaaaggatcttcacctagatccttttaaattaaaaatgaagttttaaatcaatctaaagtatatatgagtaaacttggtctgacagttaccaatgcttaatcagtgaggcacctatctcagcgatctgtctatttcgttcatccatagttgcctgactccccgtcgtgtagataactacgatacgggagggcttaccatctggccccagtgctgcaatgataccgcgagacccacgctcaccggctccagatttatcagcaataaaccagccagccggaagggccgagcgcagaagtggtcctgcaactttatccgcctccatccagtctattaattgttgccgggaagctagagtaagtagttcgccagttaatagtttgcgcaacgttgttgccattgctacaggcatcgtggtgtcacgctcgtcgtttggtatggcttcattcagctccggttcccaacgatcaaggcgagttacatgatcccccatgttgtgcaaaaaagcggttagctccttcggtcctccgatcgttgtcagaagtaagttggccgcagtgttatcactcatggttatggcagcactgcataattctcttactgtcatgccatccgtaagatgcttttctgtgactggtgagtactcaaccaagtcattctgagaatagtgtatgcggcgaccgagttgctcttgcccggcgtcaatacgggataataccgcgccacatagcagaactttaaaagtgctcatcattggaaaacgttcttcggggcgaaaactctcaaggatcttaccgctgttgagatccagttcgatgtaacccactcgtgcacccaactgatcttcagcatcttttactttcaccagcgtttctgggtgagcaaaaacaggaaggcaaaatgccgcaaaaaagggaataagggcgacacggaaatgttgaatactcatactcttcctttttcaatattattgaagcatttatcagggttattgtctcatgagcggatacatatttgaatgtatttagaaaaataaacaaataggggttccgcgcacatttccccgaaaagtgccacctgacgtc

SEQ ID NO: 220 - protein, 457 aa, synthetic construct
  REGION 1..457: note = pre-TNR1B-intein chimeric polypeptide
MAPVAVWAALAVGLELWAAAHALPAQVAFTPYAPEPGSTCRLREYYDQTAQMCCSKCSPGQHAKVFCTKTSDTVCDSCEDSTYTQLWNWVPECLSCGSRCSSDQVETQACTREQNRICTCRPGWYCALSKQEGCRLCAPLRKCRPGFGVARPGTETSDVVCKPCAPGTFSNTTSSTDICRPHQICNVVAIPGNASMDAVCTSTSPTRSMAPGAVHLPQPVSTRSQHTQPTPEPSTAPSTSFLLPMGPSPPAEGSTGDGCVSGDTIVMTSGGPRTVAELEGKPFTALIRGSGYPCPSGFFRTCERDVYDLRTREGHCLRLTHDHRVLVMDGGLEWRAAGELERGDRLVMDDAAGEFPALATFRGLRGAGRQDVYDATVYGASAFTANGFIVHACGEQPGTGLNSGLTTNPGVSAWQVNTAYTAGQLVTYNGKTYKCLQPHTSLAGWEPSNVPALWQLQ

SEQ ID NO: 221 - protein, 435 aa, synthetic construct
  REGION 1..435: note = mature TNR1B-intein fusion protein
LPAQVAFTPYAPEPGSTCRLREYYDQTAQMCCSKCSPGQHAKVFCTKTSDTVCDSCEDSTYTQLWNWVPECLSCGSRCSSDQVETQACTREQNRICTCRPGWYCALSKQEGCRLCAPLRKCRPGFGVARPGTETSDVVCKPCAPGTFSNTTSSTDICRPHQICNVVAIPGNASMDAVCTSTSPTRSMAPGAVHLPQPVSTRSQHTQPTPEPSTAPSTSFLLPMGPSPPAEGSTGDGCVSGDTIVMTSGGPRTVAELEGKPFTALIRGSGYPCPSGFFRTCERDVYDLRTREGHCLRLTHDHRVLVMDGGLEWRAAGELERGDRLVMDDAAGEFPALATFRGLRGAGRQDVYDATVYGASAFTANGFIVHACGEQPGTGLNSGLTTNPGVSAWQVNTAYTAGQLVTYNGKTYKCLQPHTSLAGWEPSNVPALWQLQ

SEQ ID NO: 222 - DNA, 6103 bp, synthetic construct
  misc_feature 1..6103: note = pCDNA3-SHH-IgG1-Fc11
  source 1..6103: mol_type = other DNA
gacggatcgggagatctcccgatcccctatggtgcactctcagtacaatctgctctgatgccgcatagttaagccagtatctgctccctgcttgtgtgttggaggtcgctgagtagtgcgcgagcaaaatttaagctacaacaaggcaaggcttgaccgacaattgcatgaagaatctgcttagggttaggcgttttgcgctgcttcgcgatgtacgggccagatatacgcgttgacattgattattgactagttattaatagtaatcaattacggggtcattagttcatagcccatatatggagttccgcgttacataacttacggtaaatggcccgcctggctgaccgcccaacgacccccgcccattgacgtcaataatgacgtatgttcccatagtaacgccaatagggactttccattgacgtcaatgggtggagtatttacggtaaactgcccacttggcagtacatcaagtgtatcatatgccaagtacgccccctattgacgtcaatgacggtaaatggcccgcctggcattatgcccagtacatgaccttatgggactttcctacttggcagtacatctacgtattagtcatcgctattaccatggtgatgcggttttggcagtacatcaatgggcgtggatagcggtttgactcacggggatttccaagtctccaccccattgacgtcaatgggagtttgttttggcaccaaaatcaacgggactttccaaaatgtcgtaacaactccgccccattgacgcaaatgggcggtaggcgtgtacggtgggaggtctatataagcagagctctctggctaactagagaacccactgcttactggcttatcgaaattaatacgactcactatagggagacccaagctggctagcgtttaaacttaagcttgaattcccaccatgctgctgctggcgagatgtctgctgctagtcctcgtctcctcgctgctggtatgctcgggactggcgtgcccaccgtgcccagcacctgaactcctgggggggccctcagtcttcctcttccccccaaaacccaaggacaccctcatgatctcccggacccctgaggtcacatgcgtggtggtggacgtgagccacgaagaccctgaggtcaagttcaactggtacgtggacggcgtggaggtgcataatgccaagacaaagccgcgggaggagcagtacaacagcacgtaccgtgtggtcagcgtcctcaccgtcctgcaccaggactggctgaatggcaaggagtacaagtgcaaggtctccaacaaagccctcccagcccccatcgagaaaaccatctccaaagccaaagggcagccccgagaaccacaggtgtacaccctgcccccatcccgggatgagctgaccaagaaccaggtcagcctgacctgcctggtcaaaggcttctatcccagcgacatcgccgtggagtgggagagcaatgggcagccggagaacaactacaagaccacgcctcccgtgctggactccgacggctccttcttcctctacagcaagctcaccgtggacaagagcaggtggcagcaggggaacgtcttctcatgctccgtgatgcatgaggctctgcacaaccactacacgcagaagagcctctccctgtctccgggtaaatgactcgagcggcccgtttaaacccgctgatcagcctcgactgtgccttctagttgccagccatctgttgtttgcccctcccccgtgccttccttgaccctggaaggtgccactcccactgtcctttcctaataaaatgaggaaattgcatcgcattgtctgagtaggtgtcattctattctggggggtggggtggggcaggacagcaagggggaggattgggaagacaatagcaggcatgctggggatgcggtgggctctatggcttctgaggcggaaagaaccagctggggctctagggggtatccccacgcgccctgtagcggcgcattaagcgcggcgggtgtggtggttacgcgcagcgtgaccgctacacttgccagcgccctagcgcccgctcctttcgctttcttcccttcctttctcgccacgttcgccggctttccccgtcaagctctaaatcgggggctccctttagggttccgatttagtgctttacggcacctcgaccccaaaaaacttgattagggtgatggttcacgtagtgggccatcgccctgatagacggtttttcgccctttgacgttggagtccacgttctttaatagtggactcttgttccaaactggaacaacactcaaccctatctcggtctattcttttgatttataagggattttgccgatttcggcctattggttaaaaaatgagctgatttaacaaaaatttaacgcgaattaattctgtggaatgtgtgtcagttagggtgtggaaagtccccaggctccccagcaggcagaagtatgcaaagcatgcatctcaattagtcagcaaccaggtgtggaaagtccccaggctccccagcaggcagaagtatgcaaagcatgcatctcaattagtcagcaaccatagtcccgcccctaactccgcccatcccgcccctaactccgcccagttccgcccattctccgccccatggctgactaattttttttatttatgcagaggccgaggccgcctctgcctctgagctattccagaagtagtgaggaggcttttttggaggcctaggcttttgcaaaaagctcccgggagcttgtatatccattttcggatctgatcaagagacaggatgaggatcgtttcgcatgattgaacaagatggattgcacgcaggttctccggccgcttgggtggagaggctattcggctatgactgggcacaacagacaatcggctgctctgatgccgccgtgttccggctgtcagcgcaggggcgcccggttctttttgtcaagaccgacctgtccggtgccctgaatgaactgcaggacgaggcagcgcggctatcgtggctggccacgacgggcgttccttgcgcagctgtgctcgacgttgtcactgaagcgggaagggactggctgctattgggcgaagtgccggggcaggatctcctgtcatctcaccttgctcctgccgagaaagtatccatcatggctgatgcaatgcggcggctgcatacgcttgatccggctacctgcccattcgaccaccaagcgaaacatcgcatcgagcgagcacgtactcggatggaagccggtcttgtcgatcaggatgatctggacgaagagcatcaggggctcgcgccagccgaactgttcgccaggctcaaggcgcgcatgcccgacggcgaggatctcgtcgtgacccatggcgatgcctgcttgccgaatatcatggtggaaaatggccgcttttctggattcatcgactgtggccggctgggtgtggcggaccgctatcaggacatagcgttggctacccgtgatattgctgaagagcttggcggcgaatgggctgaccgcttcctcgtgctttacggtatcgccgctcccgattcgcagcgcatcgccttctatcgccttcttgacgagttcttctgagcgggactctggggttcgaaatgaccgaccaagcgacgcccaacctgccatcacgagatttcgattccaccgccgccttctatgaaaggttgggcttcggaatcgttttccgggacgccggctggatgatcctccagcgcggggatctcatgctggagttcttcgcccaccccaacttgtttattgcagcttataatggttacaaataaagcaatagcatcacaaatttcacaaataaagcatttttttcactgcattctagttgtggtttgtccaaactcatcaatgtatcttatcatgtctgtataccgtcgacctctagctagagcttggcgtaatcatggtcatagctgtttcctgtgtgaaattgttatccgctcacaattccacacaacatacgagccggaagcataaagtgtaaagcctggggtgcctaatgagtgagctaactcacattaattgcgttgcgctcactgcccgctttccagtcgggaaacctgtcgtgccagctgcattaatgaatcggccaacgcgcggggagaggcggtttgcgtattgggcgctcttccgcttcctcgctcactgactcgctgcgctcggtcgttcggctgcggcgagcggtatcagctcactcaaaggcggtaatacggttatccacagaatcaggggataacgcaggaaagaacatgtgagcaaaaggccagcaaaaggccaggaaccgtaaaaaggccgcgttgctggcgtttttccataggctccgcccccctgacgagcatcacaaaaatcgacgctcaagtcagaggtggcgaaacccgacaggactataaagataccaggcgtttccccctggaagctccctcgtgcgctctcctgttccgaccctgccgcttaccggatacctgtccgcctttctcccttcgggaagcgtggcgctttctcatagctcacgctgtaggtatctcagttcggtgtaggtcgttcgctccaagctgggctgtgtgcacgaaccccccgttcagcccgaccgctgcgccttatccggtaactatcgtcttgagtccaacccggtaagacacgacttatcgccactggcagcagccactggtaacaggattagcagagcgaggtatgtaggcggtgctacagagttcttgaagtggtggcctaactacggctacactagaagaacagtatttggtatctgcgctctgctgaagccagttaccttcggaaaaagagttggtagctcttgatccggcaaacaaaccaccgctggtagcggtttttttgtttgcaagcagcagattacgcgcagaaaaaaaggatctcaagaagatcctttgatcttttctacggggtctgacgctcagtggaacgaaaactcacgttaagggattttggtcatgagattatcaaaaaggatcttcacctagatccttttaaattaaaaatgaagttttaaatcaatctaaagtatatatgagtaaacttggtctgacagttaccaatgcttaatcagtgaggcacctatctcagcgatctgtctatttcgttcatccatagttgcctgactccccgtcgtgtagataactacgatacgggagggcttaccatctggccccagtgctgcaatgataccgcgagacccacgctcaccggctccagatttatcagcaataaaccagccagccggaagggccgagcgcagaagtggtcctgcaactttatccgcctccatccagtctattaattgttgccgggaagctagagtaagtagttcgccagttaatagtttgcgcaacgttgttgccattgctacaggcatcgtggtgtcacgctcgtcgtttggtatggcttcattcagctccggttcccaacgatcaaggcgagttacatgatcccccatgttgtgcaaaaaagcggttagctccttcggtcctccgatcgttgtcagaagtaagttggccgcagtgttatcactcatggttatggcagcactgcataattctcttactgtcatgccatccgtaagatgcttttctgtgactggtgagtactcaaccaagtcattctgagaatagtgtatgcggcgaccgagttgctcttgcccggcgtcaatacgggataataccgcgccacatagcagaactttaaaagtgctcatcattggaaaacgttcttcggggcgaaaactctcaaggatcttaccgctgttgagatccagttcgatgtaacccactcgtgcacccaactgatcttcagcatcttttactttcaccagcgtttctgggtgagcaaaaacaggaaggcaaaatgccgcaaaaaagggaataagggcgacacggaaatgttgaatactcatactcttcctttttcaatattattgaagcatttatcagggttattgtctcatgagcggatacatatttgaatgtatttagaaaaataaacaaataggggttccgcgcacatttccccgaaaagtgccacctgacgtc

SEQ ID NO: 223 - protein, 245 aa, synthetic construct; identical to SEQ ID NO: 130
  REGION 1..245: note = pre-Fc6 polypeptide

SEQ ID NO: 224 - protein, 222 aa, synthetic construct; identical to SEQ ID NO: 3
  REGION 1..222: note = mature Fc6 protein

SEQ ID NO: 225 - protein, 237 aa, synthetic construct
  REGION 1..237: note = cleaved alkyne-modified TNR1B
  SITE 237: note = Xaa = cysteine-alkyne
LPAQVAFTPYAPEPGSTCRLREYYDQTAQMCCSKCSPGQHAKVFCTKTSDTVCDSCEDSTYTQLWNWVPECLSCGSRCSSDQVETQACTREQNRICTCRPGWYCALSKQEGCRLCAPLRKCRPGFGVARPGTETSDVVCKPCAPGTFSNTTSSTDICRPHQICNVVAIPGNASMDAVCTSTSPTRSMAPGAVHLPQPVSTRSQHTQPTPEPSTAPSTSFLLPMGPSPPAEGSTGDGX

SEQ ID NO: 226 - protein, 237 aa, synthetic construct; identical to SEQ ID NO: 225
  REGION 1..237: note = azide-modified TNR1B protein
  SITE 237: note = Xaa = cysteine-azide

SEQ ID NO: 227 - protein, 237 aa, synthetic construct
  REGION 1..237: note = cysteine-modified TNR1B
LPAQVAFTPYAPEPGSTCRLREYYDQTAQMCCSKCSPGQHAKVFCTKTSDTVCDSCEDSTYTQLWNWVPECLSCGSRCSSDQVETQACTREQNRICTCRPGWYCALSKQEGCRLCAPLRKCRPGFGVARPGTETSDVVCKPCAPGTFSNTTSSTDICRPHQICNVVAIPGNASMDAVCTSTSPTRSMAPGAVHLPQPVSTRSQHTQPTPEPSTAPSTSFLLPMGPSPPAEGSTGDGC

SEQ ID NO: 228 - protein, 236 aa, synthetic construct
  REGION 1..236: note = thioester-modified TNR1B
  SITE 236: note = Xaa = glycine-thioester
LPAQVAFTPYAPEPGSTCRLREYYDQTAQMCCSKCSPGQHAKVFCTKTSDTVCDSCEDSTYTQLWNWVPECLSCGSRCSSDQVETQACTREQNRICTCRPGWYCALSKQEGCRLCAPLRKCRPGFGVARPGTETSDVVCKPCAPGTFSNTTSSTDICRPHQICNVVAIPGNASMDAVCTSTSPTRSMAPGAVHLPQPVSTRSQHTQPTPEPSTAPSTSFLLPMGPSPPAEGSTGDX

SEQ ID NO: 229 - protein, 227 aa, synthetic construct
  REGION 1..227: note = Az-DKTHT-Fc6 protein
  SITE 1: note = Xaa = azide-aspartic acid
XKTHTCPPCPAPELLGGPSVFLFPPKPKDTLMISRTPEVTCVVVDVSHEDPEVKFNWYVDGVEVHNAKTKPREEQYNSTYRVVSVLTVLHQDWLNGKEYKCKVSNKALPAPIEKTISKAKGQPREPQVYTLPPSRDELTKNQVSLTCLVKGFYPSDIAVEWESNGQPENNYKTTPPVLDSDGSFFLYSKLTVDKSRWQQGNVFSCSVMHEALHNHYTQKSLSLSPGK

SEQ ID NO: 230 - protein, 227 aa, synthetic construct; identical to SEQ ID NO: 229
  REGION 1..227: note = Az-PEG4-DKTHT-Fc6
  SITE 1: note = Xaa = azide-PEG4-aspartic acid

SEQ ID NO: 231 - protein, 465 aa, synthetic construct
  REGION 1..465: note = Polypeptide with internal non-peptidyl moiety. TNR1B-alkyne-azide-Fc6
  SITE 238: note = Xaa = non-peptidyl moiety
LPAQVAFTPYAPEPGSTCRLREYYDQTAQMCCSKCSPGQHAKVFCTKTSDTVCDSCEDSTYTQLWNWVPECLSCGSRCSSDQVETQACTREQNRICTCRPGWYCALSKQEGCRLCAPLRKCRPGFGVARPGTETSDVVCKPCAPGTFSNTTSSTDICRPHQICNVVAIPGNASMDAVCTSTSPTRSMAPGAVHLPQPVSTRSQHTQPTPEPSTAPSTSFLLPMGPSPPAEGSTGDGCXDKTHTCPPCPAPELLGGPSVFLFPPKPKDTLMISRTPEVTCVVVDVSHEDPEVKFNWYVDGVEVHNAKTKPREEQYNSTYRVVSVLTVLHQDWLNGKEYKCKVSNKALPAPIEKTISKAKGQPREPQVYTLPPSRDELTKNQVSLTCLVKGFYPSDIAVEWESNGQPENNYKTTPPVLDSDGSFFLYSKLTVDKSRWQQGNVFSCSVMHEALHNHYTQKSLSLSPGK

SEQ ID NO: 232 - protein, 465 aa, synthetic construct; identical to SEQ ID NO: 231
  REGION 1..465: note = Polypeptide with internal non-peptidyl moiety. TNR1B-alkyne-azide-PEG4-Fc6
  SITE 238: note = Xaa = non-peptidyl moiety containing PEG4 linker

SEQ ID NO: 233 - protein, 467 aa, synthetic construct
  REGION 1..467: note = Etanercept
LPAQVAFTPYAPEPGSTCRLREYYDQTAQMCCSKCSPGQHAKVFCTKTSDTVCDSCEDSTYTQLWNWVPECLSCGSRCSSDQVETQACTREQNRICTCRPGWYCALSKQEGCRLCAPLRKCRPGFGVARPGTETSDVVCKPCAPGTFSNTTSSTDICRPHQICNVVAIPGNASMDAVCTSTSPTRSMAPGAVHLPQPVSTRSQHTQPTPEPSTAPSTSFLLPMGPSPPAEGSTGDEPKSCDKTHTCPPCPAPELLGGPSVFLFPPKPKDTLMISRTPEVTCVVVDVSHEDPEVKFNWYVDGVEVHNAKTKPREEQYNSTYRVVSVLTVLHQDWLNGKEYKCKVSNKALPAPIEKTISKAKGQPREPQVYTLPPSRDELTKNQVSLTCLVKGFYPSDIAVEWESNGQPENNYKTTPPVLDSDGSFFLYSKLTVDKSRWQQGNVFSCSVMHEALHNHYTQKSLSLSPGK

SEQ ID NO: 234 - DNA, 4175 bp, synthetic construct
  misc_feature 1..4175: note = pFUSE2ss-DE27-V -CLIg-hk
  source 1..4175: mol_type = other DNA
ggatctgcgatcgctccggtgcccgtcagtgggcagagcgcacatcgcccacagtccccgagaagttggggggaggggtcggcaattgaacgggtgcctagagaaggtggcgcggggtaaactgggaaagtgatgtcgtgtactggctccgcctttttcccgagggtgggggagaaccgtatataagtgcagtagtcgccgtgaacgttctttttcgcaacgggtttgccgccagaacacagctgaagcttcgaggggctcgcatctctccttcacgcgcccgccgccctacctgaggccgccatccacgccggttgagtcgcgttctgccgcctcccgcctgtggtgcctcctgaactgcgtccgccgtctaggtaagtttaaagctcaggtcgagaccgggcctttgtccggcgctcccttggagcctacctagactcagccggctctccacgctttgcctgaccctgcttgctcaactctacgtctttgtttcgttttctgttctgcgccgttacagatccaagctgtgaccggcgcctacctgagatcaacatgtacaggatgcaactcctgtcttgcattgcactaagtcttgcacttgtcacgaattcagacatccagatgacccagtctccatcctccctgtctgcatctgtaggggacagagtcaccatcacttgtcgggcaagtcagggcatcagaaattacttagcctggtatcagcaaaaaccagggaaagcccctaagctcctgatctatgctgcatccactttgcaatcaggggtcccatctcggttcagtggcagtggatctgggacagatttcactctcaccatcagcagcctacagcctgaagatgttgcaacttattactgtcaaaggtataaccgtgcaccgtatacttttggccaggggaccaaggtggaaatcaaacgtacggtggctgcaccatctgtcttcatcttcccgccatctgatgagcagttgaaatctggaactgcctctgttgtgtgcctgctgaataacttctatcccagagaggccaaagtacagtggaaggtggataacgccctccaatcgggtaactcccaggagagtgtcacagagcaggacagcaaggacagcacctacagcctcagcagcaccctgacgctgagcaaagcagactacgagaaacacaaagtctacgcctgcgaagtcacccatcagggcctgagctcgcccgtcacaaagagcttcaacaggggagagtgttagagggagctagctcgacatgataagatacattgatgagtttggacaaaccacaactagaatgcagtgaaaaaaatgctttatttgtgaaatttgtgatgctattgctttatttgtgaaatttgtgatgctattgctttatttgtaaccattataagctgcaataaacaagttaacaacaacaattgcattcattttatgtttcaggttcagggggaggtgtgggaggttttttaaagcaagtaaaacctctacaaatgtggtatggaattaattctaaaatacagcatagcaaaactttaacctccaaatcaagcctctacttgaatccttttctgagggatgaataaggcataggcatcaggggctgttgccaatgtgcattagctgtttgcagcctcaccttctttcatggagtttaagatatagtgtattttcccaaggtttgaactagctcttcatttctttatgttttaaatgcactgacctcccacattccctttttagtaaaatattcagaaataatttaaatacatcattgcaatgaaaataaatgttttttattaggcagaatccagatgctcaaggcccttcataatatcccccagtttagtagttggacttagggaacaaaggaacctttaatagaaattggacagcaagaaagcgagcttctagctttagttcctggtgtacttgagggggatgagttcctcaatggtggttttgaccagcttgccattcatctcaatgagcacaaagcagtcaggagcatagtcagagatgagctctctgcacatgccacaggggctgaccaccctgatggatctgtccacctcatcagagtaggggtgcctgacagccacaatggtgtcaaagtccttctgcccgttgctcacagcagacccaatggcaatggcttcagcacagacagtgaccctgccaatgtaggcctcaatgtggacagcagagatgatctccccagtcttggtcctgatggccgccccgacatggtgcttgttgtcctcatagagcatggtgatcttctcagtggcgacctccaccagctccagatcctgctgagagatgttgaaggtcttcatgatggctcctcctgtcaggagaggaaagagaagaaggttagtacaattgctatagtgagttgtattatactatgcttatgattaattgtcaaactagggctgcagggttcatagtgccacttttcctgcactgccccatctcctgcccaccctttcccaggcatagacagtcagtgacttaccaaactcacaggagggagaaggcagaagcttgagacagacccgcgggaccgccgaactgcgaggggacgtggctagggcggcttcttttatggtgcgccggccctcggaggcagggcgctcggggaggcctagcggccaatctgcggtggcaggaggcggggccgaaggccgtgcctgaccaatccggagcacataggagtctcagccccccgccccaaagcaaggggaagtcacgcgcctgtagcgccagcgtgttgtgaaatgggggcttgggggggttggggccctgactagtcaaaacaaactcccattgacgtcaatggggtggagacttggaaatccccgtgagtcaaaccgctatccacgcccattgatgtactgccaaaaccgcatcatcatggtaatagcgatgactaatacgtagatgtactgccaagtaggaaagtcccataaggtcatgtactgggcataatgccaggcgggccatttaccgtcattgacgtcaatagggggcgtacttggcatatgatacacttgatgtactgccaagtgggcagtttaccgtaaatactccacccattgacgtcaatggaaagtccctattggcgttactatgggaacatacgtcattattgacgtcaatgggcgggggtcgttgggcggtcagccaggcgggccatttaccgtaagttatgtaacgcctgcaggttaattaagaacatgtgagcaaaaggccagcaaaaggccaggaaccgtaaaaaggccgcgttgctggcgtttttccataggctccgcccccctgacgagcatcacaaaaatcgacgctcaagtcagaggtggcgaaacccgacaggactataaagataccaggcgtttccccctggaagctccctcgtgcgctctcctgttccgaccctgccgcttaccggatacctgtccgcctttctcccttcgggaagcgtggcgctttctcatagctcacgctgtaggtatctcagttcggtgtaggtcgttcgctccaagctgggctgtgtgcacgaaccccccgttcagcccgaccgctgcgccttatccggtaactatcgtcttgagtccaacccggtaagacacgacttatcgccactggcagcagccactggtaacaggattagcagagcgaggtatgtaggcggtgctacagagttcttgaagtggtggcctaactacggctacactagaagaacagtatttggtatctgcgctctgctgaagccagttaccttcggaaaaagagttggtagctcttgatccggcaaacaaaccaccgctggtagcggtggtttttttgtttgcaagcagcagattacgcgcagaaaaaaaggatctcaagaagatcctttgatcttttctacggggtctgacgctcagtggaacgaaaactcacgttaagggattttggtcatggctagttaattaacatttaaatcagcggccgcaataaaatatctttattttcattacatctgtgtgttggttttttgtgtgaatcgtaactaacatacgctctccatcaaaacaaaacgaaacaaaacaaactagcaaaataggctgtccccagtgcaagtgcaggtgccagaacatttctctatcgaa

SEQ ID NO: 235 - DNA, 4776 bp, synthetic construct
  misc_feature 1..4776: note = pPUSEss-DE27-V 1-CHIg-hG1-Mth-1
  source 1..4776: mol_type = other DNA
ggatctgcgatcgctccggtgcccgtcagtgggcagagcgcacatcgcccacagtccccgagaagttggggggaggggtcggcaattgaacgggtgcctagagaaggtggcgcggggtaaactgggaaagtgatgtcgtgtactggctccgcctttttcccgagggtgggggagaaccgtatataagtgcagtagtcgccgtgaacgttctttttcgcaacgggtttgccgccagaacacagctgaagcttcgaggggctcgcatctctccttcacgcgcccgccgccctacctgaggccgccatccacgccggttgagtcgcgttctgccgcctcccgcctgtggtgcctcctgaactgcgtccgccgtctaggtaagtttaaagctcaggtcgagaccgggcctttgtccggcgctcccttggagcctacctagactcagccggctctccacgctttgcctgaccctgcttgctcaactctacgtctttgtttcgttttctgttctgcgccgttacagatccaagctgtgaccggcgcctacctgagatcaccggcgaaggagggccaccatgtacaggatgcaactcctgtcttgcattgcactaagtcttgcacttgtcacgaattcggaggtgcagctggtggagtctgggggaggcttggtacagcccggcaggtccctgagactctcctgtgcggcctctggattcacctttgatgattatgccatgcactgggtccggcaagctccagggaagggcctggaatgggtctcagctatcacttggaatagtggtcacatagactatgcggactctgtggagggccgattcaccatctccagagacaacgccaagaactccctgtatctgcaaatgaacagtctgagagctgaggatacggccgtatattactgtgcgaaagtctcgtaccttagcaccgcgtcctcccttgactattggggccaaggtaccctggtcaccgtctcgagtgctagcaccaagggcccatcggtcttccccctggcaccctcctccaagagcacctctgggggcacagcggccctgggctgcctggtcaaggactacttccccgaaccggtgacggtgtcgtggaactcaggcgccctgaccagcggcgtgcacaccttcccggctgtcctacagtcctcaggactctactccctcagcagcgtggtgaccgtgccctccagcagcttgggcacccagacctacatctgcaacgtgaatcacaagcccagcaacaccaaggtggacaagaaagttgagcccaaatcttgtgacaaaactcacacatgcgtatccggtgacaccattgtaatgactagtggcgggccccgcactgtggctgaactggagggcaaaccgttcaccgcactgattcgcggctctggctacccatgcccctcaggtttcttccgcacctgtgaacgtgacgtatatgatctgcgtacacgtgagggtcattgcttacgtttgacccatgatcaccgtgttctggtgatggatggtggcctggaatggcgtgccgcgggtgaactggaacgcggcgaccgcctggtgatggatgatgcagctggcgagtttccggcactggcaaccttccgtggcctgcgtggcgctggccgccaggatgtttatgacgctactgtttacggtgctagcgcattcactgctaatggcttcattgtacacgcatgtggcgagcagcccgggaccggtctgaactcaggcctcacgacaaatcctggtgtatccgcttggcaggtcaacacagcttatactgcgggacaattggtcacatataacggcaagacgtataaatgtttgcagccccacacctccttggcaggatgggaaccatccaacgttcctgccttgtggcagcttcaatgagtcctagctggccagacatgataagatacattgatgagtttggacaaaccacaactagaatgcagtgaaaaaaatgctttatttgtgaaatttgtgatgctattgctttatttgtaaccattataagctgcaataaacaagttaacaacaacaattgcattcattttatgtttcaggttcagggggaggtgtgggaggttttttaaagcaagtaaaacctctacaaatgtggtatggaattaattctaaaatacagcatagcaaaactttaacctccaaatcaagcctctacttgaatccttttctgagggatgaataaggcataggcatcaggggctgttgccaatgtgcattagctgtttgcagcctcaccttctttcatggagtttaagatatagtgtattttcccaaggtttgaactagctcttcatttctttatgttttaaatgcactgacctcccacattccctttttagtaaaatattcagaaataatttaaatacatcattgcaatgaaaataaatgttttttattaggcagaatccagatgctcaaggcccttcataatatcccccagtttagtagttggacttagggaacaaaggaacctttaatagaaattggacagcaagaaagcgagcttctagcttatcctcagtcctgctcctctgccacaaagtgcacgcagttgccggccgggtcgcgcagggcgaactcccgcccccacggctgctcgccgatctcggtcatggccggcccggaggcgtcccggaagttcgtggacacgacctccgaccactcggcgtacagctcgtccaggccgcgcacccacacccaggccagggtgttgtccggcaccacctggtcctggaccgcgctgatgaacagggtcacgtcgtcccggaccacaccggcgaagtcgtcctccacgaagtcccgggagaacccgagccggtcggtccagaactcgaccgctccggcgacgtcgcgcgcggtgagcaccggaacggcactggtcaacttggccatgatggctcctcctgtcaggagaggaaagagaagaaggttagtacaattgctatagtgagttgtattatactatgcagatatactatgccaatgattaattgtcaaactagggctgcagggttcatagtgccacttttcctgcactgccccatctcctgcccaccctttcccaggcatagacagtcagtgacttaccaaactcacaggagggagaaggcagaagcttgagacagacccgcgggaccgccgaactgcgaggggacgtggctagggcggcttcttttatggtgcgccggccctcggaggcagggcgctcggggaggcctagcggccaatctgcggtggcaggaggcggggccgaaggccgtgcctgaccaatccggagcacataggagtctcagccccccgccccaaagcaaggggaagtcacgcgcctgtagcgccagcgtgttgtgaaatgggggcttgggggggttggggccctgactagtcaaaacaaactcccattgacgtcaatggggtggagacttggaaatccccgtgagtcaaaccgctatccacgcccattgatgtactgccaaaaccgcatcatcatggtaatagcgatgactaatacgtagatgtactgccaagtaggaaagtcccataaggtcatgtactgggcataatgccaggcgggccatttaccgtcattgacgtcaatagggggcgtacttggcatatgatacacttgatgtactgccaagtgggcagtttaccgtaaatactccacccattgacgtcaatggaaagtccctattggcgttactatgggaacatacgtcattattgacgtcaatgggcgggggtcgttgggcggtcagccaggcgggccatttaccgtaagttatgtaacgcctgcaggttaattaagaacatgtgagcaaaaggccagcaaaaggccaggaaccgtaaaaaggccgcgttgctggcgtttttccataggctccgcccccctgacgagcatcacaaaaatcgacgctcaagtcagaggtggcgaaacccgacaggactataaagataccaggcgtttccccctggaagctccctcgtgcgctctcctgttccgaccctgccgcttaccggatacctgtccgcctttctcccttcgggaagcgtggcgctttctcatagctcacgctgtaggtatctcagttcggtgtaggtcgttcgctccaagctgggctgtgtgcacgaaccccccgttcagcccgaccgctgcgccttatccggtaactatcgtcttgagtccaacccggtaagacacgacttatcgccactggcagcagccactggtaacaggattagcagagcgaggtatgtaggcggtgctacagagttcttgaagtggtggcctaactacggctacactagaagaacagtatttggtatctgcgctctgctgaagccagttaccttcggaaaaagagttggtagctcttgatccggcaaacaaaccaccgctggtagcggtggtttttttgtttgcaagcagcagattacgcgcagaaaaaaaggatctcaagaagatcctttgatcttttctacggggtctgacgctcagtggaacgaaaactcacgttaagggattttggtcatggctagttaattaacatttaaatcagcggccgcaataaaatatctttattttcattacatctgtgtgttggttttttgtgtgaatcgtaactaacatacgctctccatcaaaacaaaacgaaacaaaacaaactagcaaaataggctgtccccagtgcaagtgcaggtgccagaacatttctctatcgaa

SEQ ID NO: 236 - DNA, 4779 bp, synthetic construct
  misc_feature 1..4779: note = pFUSEss-DE27-V 1-CHIg-hG1-Mth-2
  source 1..4779: mol_type = other DNA
ggatctgcgatcgctccggtgcccgtcagtgggcagagcgcacatcgcccacagtccccgagaagttggggggaggggtcggcaattgaacgggtgcctagagaaggtggcgcggggtaaactgggaaagtgatgtcgtgtactggctccgcctttttcccgagggtgggggagaaccgtatataagtgcagtagtcgccgtgaacgttctttttcgcaacgggtttgccgccagaacacagctgaagcttcgaggggctcgcatctctccttcacgcgcccgccgccctacctgaggccgccatccacgccggttgagtcgcgttctgccgcctcccgcctgtggtgcctcctgaactgcgtccgccgtctaggtaagtttaaagctcaggtcgagaccgggcctttgtccggcgctcccttggagcctacctagactcagccggctctccacgctttgcctgaccctgcttgctcaactctacgtctttgtttcgttttctgttctgcgccgttacagatccaagctgtgaccggcgcctacctgagatcaccggcgaaggagggccaccatgtacaggatgcaactcctgtcttgcattgcactaagtcttgcacttgtcacgaattcggaggtgcagctggtggagtctgggggaggcttggtacagcccggcaggtccctgagactctcctgtgcggcctctggattcacctttgatgattatgccatgcactgggtccggcaagctccagggaagggcctggaatgggtctcagctatcacttggaatagtggtcacatagactatgcggactctgtggagggccgattcaccatctccagagacaacgccaagaactccctgtatctgcaaatgaacagtctgagagctgaggatacggccgtatattactgtgcgaaagtctcgtaccttagcaccgcgtcctcccttgactattggggccaaggtaccctggtcaccgtctcgagtgctagcaccaagggcccatcggtcttccccctggcaccctcctccaagagcacctctgggggcacagcggccctgggctgcctggtcaaggactacttccccgaaccggtgacggtgtcgtggaactcaggcgccctgaccagcggcgtgcacaccttcccggctgtcctacagtcctcaggactctactccctcagcagcgtggtgaccgtgccctccagcagcttgggcacccagacctacatctgcaacgtgaatcacaagcccagcaacaccaaggtggacaagaaagttgagcccaaatcttgtgacaaaactcacacagggtgcgtatccggtgacaccattgtaatgactagtggcgggccccgcactgtggctgaactggagggcaaaccgttcaccgcactgattcgcggctctggctacccatgcccctcaggtttcttccgcacctgtgaacgtgacgtatatgatctgcgtacacgtgagggtcattgcttacgtttgacccatgatcaccgtgttctggtgatggatggtggcctggaatggcgtgccgcgggtgaactggaacgcggcgaccgcctggtgatggatgatgcagctggcgagtttccggcactggcaaccttccgtggcctgcgtggcgctggccgccaggatgtttatgacgctactgtttacggtgctagcgcattcactgctaatggcttcattgtacacgcatgtggcgagcagcccgggaccggtctgaactcaggcctcacgacaaatcctggtgtatccgcttggcaggtcaacacagcttatactgcgggacaattggtcacatataacggcaagacgtataaatgtttgcagccccacacctccttggcaggatgggaaccatccaacgttcctgccttgtggcagcttcaatgagtcctagctggccagacatgataagatacattgatgagtttggacaaaccacaactagaatgcagtgaaaaaaatgctttatttgtgaaatttgtgatgctattgctttatttgtaaccattataagctgcaataaacaagttaacaacaacaattgcattcattttatgtttcaggttcagggggaggtgtgggaggttttttaaagcaagtaaaacctctacaaatgtggtatggaattaattctaaaatacagcatagcaaaactttaacctccaaatcaagcctctacttgaatccttttctgagggatgaataaggcataggcatcaggggctgttgccaatgtgcattagctgtttgcagcctcaccttctttcatggagtttaagatatagtgtattttcccaaggtttgaactagctcttcatttctttatgttttaaatgcactgacctcccacattccctttttagtaaaatattcagaaataatttaaatacatcattgcaatgaaaataaatgttttttattaggcagaatccagatgctcaaggcccttcataatatcccccagtttagtagttggacttagggaacaaaggaacctttaatagaaattggacagcaagaaagcgagcttctagcttatcctcagtcctgctcctctgccacaaagtgcacgcagttgccggccgggtcgcgcagggcgaactcccgcccccacggctgctcgccgatctcggtcatggccggcccggaggcgtcccggaagttcgtggacacgacctccgaccactcggcgtacagctcgtccaggccgcgcacccacacccaggccagggtgttgtccggcaccacctggtcctggaccgcgctgatgaacagggtcacgtcgtcccggaccacaccggcgaagtcgtcctccacgaagtcccgggagaacccgagccggtcggtccagaactcgaccgctccggcgacgtcgcgcgcggtgagcaccggaacggcactggtcaacttggccatgatggctcctcctgtcaggagaggaaagagaagaaggttagtacaattgctatagtgagttgtattatactatgcagatatactatgccaatgattaattgtcaaactagggctgcagggttcatagtgccacttttcctgcactgccccatctcctgcccaccctttcccaggcatagacagtcagtgacttaccaaactcacaggagggagaaggcagaagcttgagacagacccgcgggaccgccgaactgcgaggggacgtggctagggcggcttcttttatggtgcgccggccctcggaggcagggcgctcggggaggcctagcggccaatctgcggtggcaggaggcggggccgaaggccgtgcctgaccaatccggagcacataggagtctcagccccccgccccaaagcaaggggaagtcacgcgcctgtagcgccagcgtgttgtgaaatgggggcttgggggggttggggccctgactagtcaaaacaaactcccattgacgtcaatggggtggagacttggaaatccccgtgagtcaaaccgctatccacgcccattgatgtactgccaaaaccgcatcatcatggtaatagcgatgactaatacgtagatgtactgccaagtaggaaagtcccataaggtcatgtactgggcataatgccaggcgggccatttaccgtcattgacgtcaatagggggcgtacttggcatatgatacacttgatgtactgccaagtgggcagtttaccgtaaatactccacccattgacgtcaatggaaagtccctattggcgttactatgggaacatacgtcattattgacgtcaatgggcgggggtcgttgggcggtcagccaggcgggccatttaccgtaagttatgtaacgcctgcaggttaattaagaacatgtgagcaaaaggccagcaaaaggccaggaaccgtaaaaaggccgcgttgctggcgtttttccataggctccgcccccctgacgagcatcacaaaaatcgacgctcaagtcagaggtggcgaaacccgacaggactataaagataccaggcgtttccccctggaagctccctcgtgcgctctcctgttccgaccctgccgcttaccggatacctgtccgcctttctcccttcgggaagcgtggcgctttctcatagctcacgctgtaggtatctcagttcggtgtaggtcgttcgctccaagctgggctgtgtgcacgaaccccccgttcagcccgaccgctgcgccttatccggtaactatcgtcttgagtccaacccggtaagacacgacttatcgccactggcagcagccactggtaacaggattagcagagcgaggtatgtaggcggtgctacagagttcttgaagtggtggcctaactacggctacactagaagaacagtatttggtatctgcgctctgctgaagccagttaccttcggaaaaagagttggtagctcttgatccggcaaacaaaccaccgctggtagcggtggtttttttgtttgcaagcagcagattacgcgcagaaaaaaaggatctcaagaagatcctttgatcttttctacggggtctgacgctcagtggaacgaaaactcacgttaagggattttggtcatggctagttaattaacatttaaatcagcggccgcaataaaatatctttattttcattacatctgtgtgttggttttttgtgtgaatcgtaactaacatacgctctccatcaaaacaaaacgaaacaaaacaaactagcaaaataggctgtccccagtgcaagtgcaggtgccagaacatttctctatcgaa

SEQ ID NO: 237 - protein, 234 aa, synthetic construct
  REGION 1..234: note = pre-kappa light chain of adalimumab
MYRMQLLSCIALSLALVTNSDIQMTQSPSSLSASVGDRVTITCRASQGIRNYLAWYQQKPGKAPKLLIYAASTLQSGVPSRFSGSGSGTDFTLTISSLQPEDVATYYCQRYNRAPYTFGQGTKVEIKRTVAAPSVFIFPPSDEQLKSGTASVVCLLNNFYPREAKVQWKVDNALQSGNSQESVTEQDSKDSTYSLSSTLTLSKADYEKHKVYACEVTHQGLSSPVTKSFNRGEC

SEQ ID NO: 238 - protein, 214 aa, synthetic construct
  REGION 1..214: note = mature kappa light chain of adalimumab
DIQMTQSPSSLSASVGDRVTITCRASQGIRNYLAWYQQKPGKAPKLLIYAASTLQSGVPSRFSGSGSGTDFTLTISSLQPEDVATYYCQRYNRAPYTFGQGTKVEIKRTVAAPSVFIFPPSDEQLKSGTASVVCLLNNFYPREAKVQWKVDNALQSGNSQESVTEQDSKDSTYSLSSTLTLSKADYEKHKVYACEVTHQGLSSPVTKSFNRGEC

SEQ ID NO: 239 - protein, 448 aa, synthetic construct
  REGION 1..448: note = pre-heavy chain-intein chimeric polypeptide
MYRMQLLSCIALSLALVTNSEVQLVESGGGLVQPGRSLRLSCAASGFTFDDYAMHWVRQAPGKGLEWVSAITWNSGHIDYADSVEGRFTISRDNAKNSLYLQMNSLRAEDTAVYYCAKVSYLSTASSLDYWGQGTLVTVSSASTKGPSVFPLAPSSKSTSGGTAALGCLVKDYFPEPVTVSWNSGALTSGVHTFPAVLQSSGLYSLSSVVTVPSSSLGTQTYICNVNHKPSNTKVDKKVEPKSCDKTHTCVSGDTIVMTSGGPRTVAELEGKPFTALIRGSGYPCPSGFFRTCERDVYDLRTREGHCLRLTHDHRVLVMDGGLEWRAAGELERGDRLVMDDAAGEFPALATFRGLRGAGRQDVYDATVYGASAFTANGFIVHACGEQPGTGLNSGLTTNPGVSAWQVNTAYTAGQLVTYNGKTYKCLQPHTSLAGWEPSNVPALWQLQ

SEQ ID NO: 240 - protein, 428 aa, synthetic construct
  REGION 1..428: note = mature heavy chain-intein fusion protein
EVQLVESGGGLVQPGRSLRLSCAASGFTFDDYAMHWVRQAPGKGLEWVSAITWNSGHIDYADSVEGRFTISRDNAKNSLYLQMNSLRAEDTAVYYCAKVSYLSTASSLDYWGQGTLVTVSSASTKGPSVFPLAPSSKSTSGGTAALGCLVKDYFPEPVTVSWNSGALTSGVHTFPAVLQSSGLYSLSSVVTVPSSSLGTQTYICNVNHKPSNTKVDKKVEPKSCDKTHTCVSGDTIVMTSGGPRTVAELEGKPFTALIRGSGYPCPSGFFRTCERDVYDLRTREGHCLRLTHDHRVLVMDGGLEWRAAGELERGDRLVMDDAAGEFPALATFRGLRGAGRQDVYDATVYGASAFTANGFIVHACGEQPGTGLNSGLTTNPGVSAWQVNTAYTAGQLVTYNGKTYKCLQPHTSLAGWEPSNVPALWQLQ

SEQ ID NO: 241 - protein, 449 aa, synthetic construct
  REGION 1..449: note = pre-heavy chain-intein chimeric polypeptide
MYRMQLLSCIALSLALVTNSEVQLVESGGGLVQPGRSLRLSCAASGFTFDDYAMHWVRQAPGKGLEWVSAITWNSGHIDYADSVEGRFTISRDNAKNSLYLQMNSLRAEDTAVYYCAKVSYLSTASSLDYWGQGTLVTVSSASTKGPSVFPLAPSSKSTSGGTAALGCLVKDYFPEPVTVSWNSGALTSGVHTFPAVLQSSGLYSLSSVVTVPSSSLGTQTYICNVNHKPSNTKVDKKVEPKSCDKTHTGCVSGDTIVMTSGGPRTVAELEGKPFTALIRGSGYPCPSGFFRTCERDVYDLRTREGHCLRLTHDHRVLVMDGGLEWRAAGELERGDRLVMDDAAGEFPALATFRGLRGAGRQDVYDATVYGASAFTANGFIVHACGEQPGTGLNSGLTTNPGVSAWQVNTAYTAGQLVTYNGKTYKCLQPHTSLAGWEPSNVPALWQLQ

SEQ ID NO: 242 - protein, 429 aa, synthetic construct
  REGION 1..429: note = mature heavy chain-intein fusion protein
EVQLVESGGGLVQPGRSLRLSCAASGFTFDDYAMHWVRQAPGKGLEWVSAITWNSGHIDYADSVEGRFTISRDNAKNSLYLQMNSLRAEDTAVYYCAKVSYLSTASSLDYWGQGTLVTVSSASTKGPSVFPLAPSSKSTSGGTAALGCLVKDYFPEPVTVSWNSGALTSGVHTFPAVLQSSGLYSLSSVVTVPSSSLGTQTYICNVNHKPSNTKVDKKVEPKSCDKTHTGCVSGDTIVMTSGGPRTVAELEGKPFTALIRGSGYPCPSGFFRTCERDVYDLRTREGHCLRLTHDHRVLVMDGGLEWRAAGELERGDRLVMDDAAGEFPALATFRGLRGAGRQDVYDATVYGASAFTANGFIVHACGEQPGTGLNSGLTTNPGVSAWQVNTAYTAGQLVTYNGKTYKCLQPHTSLAGWEPSNVPALWQLQ

SEQ ID NO: 243 - protein, 230 aa, synthetic construct
  REGION 1..230: note = Part of alkyne-modified adalimumab Fab-1 protein. Modified at C-Terminus.
  SITE 230: note = Xaa = cysteine-alkyne
EVQLVESGGGLVQPGRSLRLSCAASGFTFDDYAMHWVRQAPGKGLEWVSAITWNSGHIDYADSVEGRFTISRDNAKNSLYLQMNSLRAEDTAVYYCAKVSYLSTASSLDYWGQGTLVTVSSASTKGPSVFPLAPSSKSTSGGTAALGCLVKDYFPEPVTVSWNSGALTSGVHTFPAVLQSSGLYSLSSVVTVPSSSLGTQTYICNVNHKPSNTKVDKKVEPKSCDKTHTX

SEQ ID NO: 244 - protein, 231 aa, synthetic construct
  REGION 1..231: note = Part of alkyne-modified adalimumab Fab-2 protein. Motified at C-Terminus
  SITE 131: note = Xaa = cysteine-alkyne
  SITE 231: note = misc_feature - Xaa can be any naturally occurring amino acid
EVQLVESGGGLVQPGRSLRLSCAASGFTFDDYAMHWVRQAPGKGLEWVSAITWNSGHIDYADSVEGRFTISRDNAKNSLYLQMNSLRAEDTAVYYCAKVSYLSTASSLDYWGQGTLVTVSSASTKGPSVFPLAPSSKSTSGGTAALGCLVKDYFPEPVTVSWNSGALTSGVHTFPAVLQSSGLYSLSSVVTVPSSSLGTQTYICNVNHKPSNTKVDKKVEPKSCDKTHTGX

SEQ ID NO: 245 - protein, 230 aa, synthetic construct; identical to SEQ ID NO: 243
  REGION 1..230: note = Part of azide-modified adalimumab Fab-1 protein. Modified C-Terminus
  SITE 230: note = Xaa = cysteine-azide

SEQ ID NO: 246 - protein, 231 aa, synthetic construct; identical to SEQ ID NO: 244
  REGION 1..231: note = Part of azide-modified adalimumab Fab-2 protein. Modified C-Terminus
  SITE 231: note = Xaa = cysteine-azide

SEQ ID NO: 247 - protein, 214 aa, Homo sapiens
DIQMTQSPSSLSASVGDRVTITCRASQDVNTAVAWYQQKPGKAPKLLIYSASFLYSGVPSRFSGSRSGTDFTLTISSLQPEDFATYYCQQHYTTPPTFGQGTKVEIKRTVAAPSVFIFPPSDEQLKSGTASVVCLLNNFYPREAKVQWKVDNALQSGNSQESVTEQDSKDSTYSLSSTLTLSKADYEKHKVYACEVTHQGLSSPVTKSFNRGEC

SEQ ID NO: 248 - protein, 450 aa, Homo sapiens
EVQLVESGGGLVQPGGSLRLSCAASGFNIKDTYIHWVRQAPGKGLEWVARIYPTNGYTRYADSVKGRFTISADTSKNTAYLQMNSLRAEDTAVYYCSRWGGDGFYAMDYWGQGTLVTVSSASTKGPSVFPLAPSSKSTSGGTAALGCLVKDYFPEPVTVSWNSGALTSGVHTFPAVLQSSGLYSLSSVVTVPSSSLGTQTYICNVNHKPSNTKVDKKVEPKSCDKTHTCPPCPAPELLGGPSVFLFPPKPKDTLMISRTPEVTCVVVDVSHEDPEVKFNWYVDGVEVHNAKTKPREEQYNSTYRVVSVLTVLHQDWLNGKEYKCKVSNKALPAPIEKTISKAKGQPREPQVYTLPPSRDELTKNQVSLTCLVKGFYPSDIAVEWESNGQPENNYKTTPPVLDSDGSFFLYSKLTVDKSRWQQGNVFSCSVMHEALHNHYTQKSLSLSPGK

SEQ ID NO: 249 - protein, 215 aa, synthetic construct
  REGION 1..215: note = Trastuzumab light chain having the N-terminal sequence C
CDIQMTQSPSSLSASVGDRVTITCRASQDVNTAVAWYQQKPGKAPKLLIYSASFLYSGVPSRFSGSRSGTDFTLTISSLQPEDFATYYCQQHYTTPPTFGQGTKVEIKRTVAAPSVFIFPPSDEQLKSGTASVVCLLNNFYPREAKVQWKVDNALQSGNSQESVTEQDSKDSTYSLSSTLTLSKADYEKHKVYACEVTHQGLSSPVTKSFNRGEC

SEQ ID NO: 250 - protein, 238 aa, synthetic construct
  REGION 1..238: note = pre-light chimeric polypeptide having SHH signal peptide
MLLLARCLLLVLVSSLLVCSGLACDIQMTQSPSSLSASVGDRVTITCRASQDVNTAVAWYQQKPGKAPKLLIYSASFLYSGVPSRFSGSRSGTDFTLTISSLQPEDFATYYCQQHYTTPPTFGQGTKVEIKRTVAAPSVFIFPPSDEQLKSGTASVVCLLNNFYPREAKVQWKVDNALQSGNSQESVTEQDSKDSTYSLSSTLTLSKADYEKHKVYACEVTHQGLSSPVTKSFNRGEC

SEQ ID NO: 251 - protein, 238 aa, synthetic construct
  REGION 1..238: note = pre-light chimeric polypeptide having IFN signal peptide
MALTFALLVALLVLSCKSSCSVGCDIQMTQSPSSLSASVGDRVTITCRASQDVNTAVAWYQQKPGKAPKLLIYSASFLYSGVPSRFSGSRSGTDFTLTISSLQPEDFATYYCQQHYTTPPTFGQGTKVEIKRTVAAPSVFIFPPSDEQLKSGTASVVCLLNNFYPREAKVQWKVDNALQSGNSQESVTEQDSKDSTYSLSSTLTLSKADYEKHKVYACEVTHQGLSSPVTKSFNRGEC

SEQ ID NO: 252 - protein, 232 aa, synthetic construct
  REGION 1..232: note = pre-light chimeric polypeptide having CETP signal peptide
MLAATVLTLALLGNAHACDIQMTQSPSSLSASVGDRVTITCRASQDVNTAVAWYQQKPGKAPKLLIYSASFLYSGVPSRFSGSRSGTDFTLTISSLQPEDFATYYCQQHYTTPPTFGQGTKVEIKRTVAAPSVFIFPPSDEQLKSGTASVVCLLNNFYPREAKVQWKVDNALQSGNSQESVTEQDSKDSTYSLSSTLTLSKADYEKHKVYACEVTHQGLSSPVTKSFNRGEC

SEQ ID NO: 253 - protein, 216 aa, synthetic construct
  REGION 1..216: note = Trastuzumab light chain having the N-terminal sequence CP
CPDIQMTQSPSSLSASVGDRVTITCRASQDVNTAVAWYQQKPGKAPKLLIYSASFLYSGVPSRFSGSRSGTDFTLTISSLQPEDFATYYCQQHYTTPPTFGQGTKVEIKRTVAAPSVFIFPPSDEQLKSGTASVVCLLNNFYPREAKVQWKVDNALQSGNSQESVTEQDSKDSTYSLSSTLTLSKADYEKHKVYACEVTHQGLSSPVTKSFNRGEC

SEQ ID NO: 254 - protein, 239 aa, synthetic construct
  REGION 1..239: note = pre-light chimeric polypeptide having SHH signal peptide
MLLLARCLLLVLVSSLLVCSGLACPDIQMTQSPSSLSASVGDRVTITCRASQDVNTAVAWYQQKPGKAPKLLIYSASFLYSGVPSRFSGSRSGTDFTLTISSLQPEDFATYYCQQHYTTPPTFGQGTKVEIKRTVAAPSVFIFPPSDEQLKSGTASVVCLLNNFYPREAKVQWKVDNALQSGNSQESVTEQDSKDSTYSLSSTLTLSKADYEKHKVYACEVTHQGLSSPVTKSFNRGEC

SEQ ID NO: 255 - protein, 239 aa, synthetic construct
  REGION 1..239: note = pre-light chimeric polypeptide having IFN signal peptide
MALTFALLVALLVLSCKSSCSVGCPDIQMTQSPSSLSASVGDRVTITCRASQDVNTAVAWYQQKPGKAPKLLIYSASFLYSGVPSRFSGSRSGTDFTLTISSLQPEDFATYYCQQHYTTPPTFGQGTKVEIKRTVAAPSVFIFPPSDEQLKSGTASVVCLLNNFYPREAKVQWKVDNALQSGNSQESVTEQDSKDSTYSLSSTLTLSKADYEKHKVYACEVTHQGLSSPVTKSFNRGEC

SEQ ID NO: 256 - protein, 233 aa, synthetic construct
  REGION 1..233: note = pre-light chimeric polypeptide having CETP signal peptide
MLAATVLTLALLGNAHACPDIQMTQSPSSLSASVGDRVTITCRASQDVNTAVAWYQQKPGKAPKLLIYSASFLYSGVPSRFSGSRSGTDFTLTISSLQPEDFATYYCQQHYTTPPTFGQGTKVEIKRTVAAPSVFIFPPSDEQLKSGTASVVCLLNNFYPREAKVQWKVDNALQSGNSQESVTEQDSKDSTYSLSSTLTLSKADYEKHKVYACEVTHQGLSSPVTKSFNRGEC

SEQ ID NO: 257 - protein, 217 aa, synthetic construct
  REGION 1..217: note = Trastuzumab light chain having the N-terminal sequence CPP
CPPDIQMTQSPSSLSASVGDRVTITCRASQDVNTAVAWYQQKPGKAPKLLIYSASFLYSGVPSRFSGSRSGTDFTLTISSLQPEDFATYYCQQHYTTPPTFGQGTKVEIKRTVAAPSVFIFPPSDEQLKSGTASVVCLLNNFYPREAKVQWKVDNALQSGNSQESVTEQDSKDSTYSLSSTLTLSKADYEKHKVYACEVTHQGLSSPVTKSFNRGEC

SEQ ID NO: 258 - protein, 240 aa, synthetic construct
  REGION 1..240: note = pre-light chimeric polypeptide having SHH signal peptide
MLLLARCLLLVLVSSLLVCSGLACPPDIQMTQSPSSLSASVGDRVTITCRASQDVNTAVAWYQQKPGKAPKLLIYSASFLYSGVPSRFSGSRSGTDFTLTISSLQPEDFATYYCQQHYTTPPTFGQGTKVEIKRTVAAPSVFIFPPSDEQLKSGTASVVCLLNNFYPREAKVQWKVDNALQSGNSQESVTEQDSKDSTYSLSSTLTLSKADYEKHKVYACEVTHQGLSSPVTKSFNRGEC

SEQ ID NO: 259 - protein, 240 aa, synthetic construct
  REGION 1..240: note = pre-light chimeric polypeptide having IFN signal peptide
MALTFALLVALLVLSCKSSCSVGCPPDIQMTQSPSSLSASVGDRVTITCRASQDVNTAVAWYQQKPGKAPKLLIYSASFLYSGVPSRFSGSRSGTDFTLTISSLQPEDFATYYCQQHYTTPPTFGQGTKVEIKRTVAAPSVFIFPPSDEQLKSGTASVVCLLNNFYPREAKVQWKVDNALQSGNSQESVTEQDSKDSTYSLSSTLTLSKADYEKHKVYACEVTHQGLSSPVTKSFNRGEC

SEQ ID NO: 260 - protein, 234 aa, synthetic construct
  REGION 1..234: note = pre-light chimeric polypeptide having CETP signal peptide
MLAATVLTLALLGNAHACPPDIQMTQSPSSLSASVGDRVTITCRASQDVNTAVAWYQQKPGKAPKLLIYSASFLYSGVPSRFSGSRSGTDFTLTISSLQPEDFATYYCQQHYTTPPTFGQGTKVEIKRTVAAPSVFIFPPSDEQLKSGTASVVCLLNNFYPREAKVQWKVDNALQSGNSQESVTEQDSKDSTYSLSSTLTLSKADYEKHKVYACEVTHQGLSSPVTKSFNRGEC

SEQ ID NO: 261 - protein, 217 aa, synthetic construct
  REGION 1..217: note = Trastuzumab light chain having the N-terminal sequence CPR
CPRDIQMTQSPSSLSASVGDRVTITCRASQDVNTAVAWYQQKPGKAPKLLIYSASFLYSGVPSRFSGSRSGTDFTLTISSLQPEDFATYYCQQHYTTPPTFGQGTKVEIKRTVAAPSVFIFPPSDEQLKSGTASVVCLLNNFYPREAKVQWKVDNALQSGNSQESVTEQDSKDSTYSLSSTLTLSKADYEKHKVYACEVTHQGLSSPVTKSFNRGEC

SEQ ID NO: 262 - protein, 240 aa, synthetic construct
  REGION 1..240: note = pre-light chimeric polypeptide having SHH signal peptide
MLLLARCLLLVLVSSLLVCSGLACPRDIQMTQSPSSLSASVGDRVTITCRASQDVNTAVAWYQQKPGKAPKLLIYSASFLYSGVPSRFSGSRSGTDFTLTISSLQPEDFATYYCQQHYTTPPTFGQGTKVEIKRTVAAPSVFIFPPSDEQLKSGTASVVCLLNNFYPREAKVQWKVDNALQSGNSQESVTEQDSKDSTYSLSSTLTLSKADYEKHKVYACEVTHQGLSSPVTKSFNRGEC

SEQ ID NO: 263 - protein, 240 aa, synthetic construct
  REGION 1..240: note = pre-light chimeric polypeptide having IFN signal peptide
MALTFALLVALLVLSCKSSCSVGCPRDIQMTQSPSSLSASVGDRVTITCRASQDVNTAVAWYQQKPGKAPKLLIYSASFLYSGVPSRFSGSRSGTDFTLTISSLQPEDFATYYCQQHYTTPPTFGQGTKVEIKRTVAAPSVFIFPPSDEQLKSGTASVVCLLNNFYPREAKVQWKVDNALQSGNSQESVTEQDSKDSTYSLSSTLTLSKADYEKHKVYACEVTHQGLSSPVTKSFNRGEC

SEQ ID NO: 264 - protein, 234 aa, synthetic construct
  REGION 1..234: note = pre-light chimeric polypeptide having CETP signal peptide
MLAATVLTLALLGNAHACPRDIQMTQSPSSLSASVGDRVTITCRASQDVNTAVAWYQQKPGKAPKLLIYSASFLYSGVPSRFSGSRSGTDFTLTISSLQPEDFATYYCQQHYTTPPTFGQGTKVEIKRTVAAPSVFIFPPSDEQLKSGTASVVCLLNNFYPREAKVQWKVDNALQSGNSQESVTEQDSKDSTYSLSSTLTLSKADYEKHKVYACEVTHQGLSSPVTKSFNRGEC

SEQ ID NO: 265 - protein, 217 aa, synthetic construct
  REGION 1..217: note = Trastuzumab light chain having the N-terminal sequence CPS
CPSDIQMTQSPSSLSASVGDRVTITCRASQDVNTAVAWYQQKPGKAPKLLIYSASFLYSGVPSRFSGSRSGTDFTLTISSLQPEDFATYYCQQHYTTPPTFGQGTKVEIKRTVAAPSVFIFPPSDEQLKSGTASVVCLLNNFYPREAKVQWKVDNALQSGNSQESVTEQDSKDSTYSLSSTLTLSKADYEKHKVYACEVTHQGLSSPVTKSFNRGEC

SEQ ID NO: 266 - protein, 240 aa, synthetic construct
  REGION 1..240: note = pre-light chimeric polypeptide having SHH signal peptide
MLLLARCLLLVLVSSLLVCSGLACPSDIQMTQSPSSLSASVGDRVTITCRASQDVNTAVAWYQQKPGKAPKLLIYSASFLYSGVPSRFSGSRSGTDFTLTISSLQPEDFATYYCQQHYTTPPTFGQGTKVEIKRTVAAPSVFIFPPSDEQLKSGTASVVCLLNNFYPREAKVQWKVDNALQSGNSQESVTEQDSKDSTYSLSSTLTLSKADYEKHKVYACEVTHQGLSSPVTKSFNRGEC

SEQ ID NO: 267 - protein, 240 aa, synthetic construct
  REGION 1..240: note = pre-light chimeric polypeptide having IFN signal peptide
MALTFALLVALLVLSCKSSCSVGCPSDIQMTQSPSSLSASVGDRVTITCRASQDVNTAVAWYQQKPGKAPKLLIYSASFLYSGVPSRFSGSRSGTDFTLTISSLQPEDFATYYCQQHYTTPPTFGQGTKVEIKRTVAAPSVFIFPPSDEQLKSGTASVVCLLNNFYPREAKVQWKVDNALQSGNSQESVTEQDSKDSTYSLSSTLTLSKADYEKHKVYACEVTHQGLSSPVTKSFNRGEC

SEQ ID NO: 268 - protein, 234 aa, synthetic construct
  REGION 1..234: note = pre-light chimeric polypeptide having CETP signal peptide
MLAATVLTLALLGNAHACPSDIQMTQSPSSLSASVGDRVTITCRASQDVNTAVAWYQQKPGKAPKLLIYSASFLYSGVPSRFSGSRSGTDFTLTISSLQPEDFATYYCQQHYTTPPTFGQGTKVEIKRTVAAPSVFIFPPSDEQLKSGTASVVCLLNNFYPREAKVQWKVDNALQSGNSQESVTEQDSKDSTYSLSSTLTLSKADYEKHKVYACEVTHQGLSSPVTKSFNRGEC

SEQ ID NO: 269 - protein, 218 aa, synthetic construct
  REGION 1..218: note = Trastuzumab light chain having the N-terminal sequence CDKT
CDKTDIQMTQSPSSLSASVGDRVTITCRASQDVNTAVAWYQQKPGKAPKLLIYSASFLYSGVPSRFSGSRSGTDFTLTISSLQPEDFATYYCQQHYTTPPTFGQGTKVEIKRTVAAPSVFIFPPSDEQLKSGTASVVCLLNNFYPREAKVQWKVDNALQSGNSQESVTEQDSKDSTYSLSSTLTLSKADYEKHKVYACEVTHQGLSSPVTKSFNRGEC

SEQ ID NO: 270 - protein, 241 aa, synthetic construct
  REGION 1..241: note = pre-light chimeric polypeptide having SHH signal peptide
MLLLARCLLLVLVSSLLVCSGLACDKTDIQMTQSPSSLSASVGDRVTITCRASQDVNTAVAWYQQKPGKAPKLLIYSASFLYSGVPSRFSGSRSGTDFTLTISSLQPEDFATYYCQQHYTTPPTFGQGTKVEIKRTVAAPSVFIFPPSDEQLKSGTASVVCLLNNFYPREAKVQWKVDNALQSGNSQESVTEQDSKDSTYSLSSTLTLSKADYEKHKVYACEVTHQGLSSPVTKSFNRGEC

SEQ ID NO: 271 - protein, 241 aa, synthetic construct
  REGION 1..241: note = pre-light chimeric polypeptide having IFN signal peptide
MALTFALLVALLVLSCKSSCSVGCDKTDIQMTQSPSSLSASVGDRVTITCRASQDVNTAVAWYQQKPGKAPKLLIYSASFLYSGVPSRFSGSRSGTDFTLTISSLQPEDFATYYCQQHYTTPPTFGQGTKVEIKRTVAAPSVFIFPPSDEQLKSGTASVVCLLNNFYPREAKVQWKVDNALQSGNSQESVTEQDSKDSTYSLSSTLTLSKADYEKHKVYACEVTHQGLSSPVTKSFNRGEC

SEQ ID NO: 272 - protein, 235 aa, synthetic construct
  REGION 1..235: note = pre-light chimeric polypeptide having CETP signal peptide
MLAATVLTLALLGNAHACDKTDIQMTQSPSSLSASVGDRVTITCRASQDVNTAVAWYQQKPGKAPKLLIYSASFLYSGVPSRFSGSRSGTDFTLTISSLQPEDFATYYCQQHYTTPPTFGQGTKVEIKRTVAAPSVFIFPPSDEQLKSGTASVVCLLNNFYPREAKVQWKVDNALQSGNSQESVTEQDSKDSTYSLSSTLTLSKADYEKHKVYACEVTHQGLSSPVTKSFNRGEC

SEQ ID NO: 273 - protein, 220 aa, synthetic construct
  REGION 1..220: note = Trastuzumab light chain having the N-terminal sequence CDKTHT
CDKTHTDIQMTQSPSSLSASVGDRVTITCRASQDVNTAVAWYQQKPGKAPKLLIYSASFLYSGVPSRFSGSRSGTDFTLTISSLQPEDFATYYCQQHYTTPPTFGQGTKVEIKRTVAAPSVFIFPPSDEQLKSGTASVVCLLNNFYPREAKVQWKVDNALQSGNSQESVTEQDSKDSTYSLSSTLTLSKADYEKHKVYACEVTHQGLSSPVTKSFNRGEC

SEQ ID NO: 274 - protein, 243 aa, synthetic construct
  REGION 1..243: note = pre-light chimeric polypeptide having SHH signal peptide
MLLLARCLLLVLVSSLLVCSGLACDKTHTDIQMTQSPSSLSASVGDRVTITCRASQDVNTAVAWYQQKPGKAPKLLIYSASFLYSGVPSRFSGSRSGTDFTLTISSLQPEDFATYYCQQHYTTPPTFGQGTKVEIKRTVAAPSVFIFPPSDEQLKSGTASVVCLLNNFYPREAKVQWKVDNALQSGNSQESVTEQDSKDSTYSLSSTLTLSKADYEKHKVYACEVTHQGLSSPVTKSFNRGEC

SEQ ID NO: 275 - protein, 243 aa, synthetic construct
  REGION 1..243: note = pre-light chimeric polypeptide having IFN signal peptide
MALTFALLVALLVLSCKSSCSVGCDKTHTDIQMTQSPSSLSASVGDRVTITCRASQDVNTAVAWYQQKPGKAPKLLIYSASFLYSGVPSRFSGSRSGTDFTLTISSLQPEDFATYYCQQHYTTPPTFGQGTKVEIKRTVAAPSVFIFPPSDEQLKSGTASVVCLLNNFYPREAKVQWKVDNALQSGNSQESVTEQDSKDSTYSLSSTLTLSKADYEKHKVYACEVTHQGLSSPVTKSFNRGEC

SEQ ID NO: 276 - protein, 237 aa, synthetic construct
  REGION 1..237: note = pre-light chimeric polypeptide having CETP signal peptide
MLAATVLTLALLGNAHACDKTHTDIQMTQSPSSLSASVGDRVTITCRASQDVNTAVAWYQQKPGKAPKLLIYSASFLYSGVPSRFSGSRSGTDFTLTISSLQPEDFATYYCQQHYTTPPTFGQGTKVEIKRTVAAPSVFIFPPSDEQLKSGTASVVCLLNNFYPREAKVQWKVDNALQSGNSQESVTEQDSKDSTYSLSSTLTLSKADYEKHKVYACEVTHQGLSSPVTKSFNRGEC

SEQ ID NO: 277 - protein, 217 aa, synthetic construct
  REGION 1..217: note = Trastuzumab light chain having the N-terminal sequence CVE
CVEDIQMTQSPSSLSASVGDRVTITCRASQDVNTAVAWYQQKPGKAPKLLIYSASFLYSGVPSRFSGSRSGTDFTLTISSLQPEDFATYYCQQHYTTPPTFGQGTKVEIKRTVAAPSVFIFPPSDEQLKSGTASVVCLLNNFYPREAKVQWKVDNALQSGNSQESVTEQDSKDSTYSLSSTLTLSKADYEKHKVYACEVTHQGLSSPVTKSFNRGEC

SEQ ID NO: 278 - protein, 240 aa, synthetic construct
  REGION 1..240: note = pre-light chimeric polypeptide having SHH signal peptide
MLLLARCLLLVLVSSLLVCSGLACVEDIQMTQSPSSLSASVGDRVTITCRASQDVNTAVAWYQQKPGKAPKLLIYSASFLYSGVPSRFSGSRSGTDFTLTISSLQPEDFATYYCQQHYTTPPTFGQGTKVEIKRTVAAPSVFIFPPSDEQLKSGTASVVCLLNNFYPREAKVQWKVDNALQSGNSQESVTEQDSKDSTYSLSSTLTLSKADYEKHKVYACEVTHQGLSSPVTKSFNRGEC

SEQ ID NO: 279 - protein, 240 aa, synthetic construct
  REGION 1..240: note = pre-light chimeric polypeptide having IFN signal peptide
MALTFALLVALLVLSCKSSCSVGCVEDIQMTQSPSSLSASVGDRVTITCRASQDVNTAVAWYQQKPGKAPKLLIYSASFLYSGVPSRFSGSRSGTDFTLTISSLQPEDFATYYCQQHYTTPPTFGQGTKVEIKRTVAAPSVFIFPPSDEQLKSGTASVVCLLNNFYPREAKVQWKVDNALQSGNSQESVTEQDSKDSTYSLSSTLTLSKADYEKHKVYACEVTHQGLSSPVTKSFNRGEC

SEQ ID NO: 280 - protein, 234 aa, synthetic construct
  REGION 1..234: note = pre-light chimeric polypeptide having CETP signal peptide
MLAATVLTLALLGNAHACVEDIQMTQSPSSLSASVGDRVTITCRASQDVNTAVAWYQQKPGKAPKLLIYSASFLYSGVPSRFSGSRSGTDFTLTISSLQPEDFATYYCQQHYTTPPTFGQGTKVEIKRTVAAPSVFIFPPSDEQLKSGTASVVCLLNNFYPREAKVQWKVDNALQSGNSQESVTEQDSKDSTYSLSSTLTLSKADYEKHKVYACEVTHQGLSSPVTKSFNRGEC

SEQ ID NO: 281 - protein, 220 aa, synthetic construct
  REGION 1..220: note = Trastuzumab light chain having the N-terminal sequence CDTPPP
CDTPPPDIQMTQSPSSLSASVGDRVTITCRASQDVNTAVAWYQQKPGKAPKLLIYSASFLYSGVPSRFSGSRSGTDFTLTISSLQPEDFATYYCQQHYTTPPTFGQGTKVEIKRTVAAPSVFIFPPSDEQLKSGTASVVCLLNNFYPREAKVQWKVDNALQSGNSQESVTEQDSKDSTYSLSSTLTLSKADYEKHKVYACEVTHQGLSSPVTKSFNRGEC

SEQ ID NO: 282 - protein, 243 aa, synthetic construct
  REGION 1..243: note = pre-light chimeric polypeptide having SHH signal peptide
MLLLARCLLLVLVSSLLVCSGLACDTPPPDIQMTQSPSSLSASVGDRVTITCRASQDVNTAVAWYQQKPGKAPKLLIYSASFLYSGVPSRFSGSRSGTDFTLTISSLQPEDFATYYCQQHYTTPPTFGQGTKVEIKRTVAAPSVFIFPPSDEQLKSGTASVVCLLNNFYPREAKVQWKVDNALQSGNSQESVTEQDSKDSTYSLSSTLTLSKADYEKHKVYACEVTHQGLSSPVTKSFNRGEC

SEQ ID NO: 283 - protein, 243 aa, synthetic construct
  REGION 1..243: note = pre-light chimeric polypeptide having IFN signal peptide
MALTFALLVALLVLSCKSSCSVGCDTPPPDIQMTQSPSSLSASVGDRVTITCRASQDVNTAVAWYQQKPGKAPKLLIYSASFLYSGVPSRFSGSRSGTDFTLTISSLQPEDFATYYCQQHYTTPPTFGQGTKVEIKRTVAAPSVFIFPPSDEQLKSGTASVVCLLNNFYPREAKVQWKVDNALQSGNSQESVTEQDSKDSTYSLSSTLTLSKADYEKHKVYACEVTHQGLSSPVTKSFNRGEC

SEQ ID NO: 284 - protein, 237 aa, synthetic construct
  REGION 1..237: note = pre-light chimeric polypeptide having CETP signal peptide
MLAATVLTLALLGNAHACDTPPPDIQMTQSPSSLSASVGDRVTITCRASQDVNTAVAWYQQKPGKAPKLLIYSASFLYSGVPSRFSGSRSGTDFTLTISSLQPEDFATYYCQQHYTTPPTFGQGTKVEIKRTVAAPSVFIFPPSDEQLKSGTASVVCLLNNFYPREAKVQWKVDNALQSGNSQESVTEQDSKDSTYSLSSTLTLSKADYEKHKVYACEVTHQGLSSPVTKSFNRGEC

SEQ ID NO: 285 - protein, 451 aa, synthetic construct
  REGION 1..451: note = Trastuzumab heavy chain having the N-terminal sequence C
CEVQLVESGGGLVQPGGSLRLSCAASGFNIKDTYIHWVRQAPGKGLEWVARIYPTNGYTRYADSVKGRFTISADTSKNTAYLQMNSLRAEDTAVYYCSRWGGDGFYAMDYWGQGTLVTVSSASTKGPSVFPLAPSSKSTSGGTAALGCLVKDYFPEPVTVSWNSGALTSGVHTFPAVLQSSGLYSLSSVVTVPSSSLGTQTYICNVNHKPSNTKVDKKVEPKSCDKTHTCPPCPAPELLGGPSVFLFPPKPKDTLMISRTPEVTCVVVDVSHEDPEVKFNWYVDGVEVHNAKTKPREEQYNSTYRVVSVLTVLHQDWLNGKEYKCKVSNKALPAPIEKTISKAKGQPREPQVYTLPPSRDELTKNQVSLTCLVKGFYPSDIAVEWESNGQPENNYKTTPPVLDSDGSFFLYSKLTVDKSRWQQGNVFSCSVMHEALHNHYTQKSLSLSPGK

SEQ ID NO: 286 - protein, 474 aa, synthetic construct
  REGION 1..474: note = pre-heavy chain chimeric polypeptide having SHH signal peptide
MLLLARCLLLVLVSSLLVCSGLACEVQLVESGGGLVQPGGSLRLSCAASGFNIKDTYIHWVRQAPGKGLEWVARIYPTNGYTRYADSVKGRFTISADTSKNTAYLQMNSLRAEDTAVYYCSRWGGDGFYAMDYWGQGTLVTVSSASTKGPSVFPLAPSSKSTSGGTAALGCLVKDYFPEPVTVSWNSGALTSGVHTFPAVLQSSGLYSLSSVVTVPSSSLGTQTYICNVNHKPSNTKVDKKVEPKSCDKTHTCPPCPAPELLGGPSVFLFPPKPKDTLMISRTPEVTCVVVDVSHEDPEVKFNWYVDGVEVHNAKTKPREEQYNSTYRVVSVLTVLHQDWLNGKEYKCKVSNKALPAPIEKTISKAKGQPREPQVYTLPPSRDELTKNQVSLTCLVKGFYPSDIAVEWESNGQPENNYKTTPPVLDSDGSFFLYSKLTVDKSRWQQGNVFSCSVMHEALHNHYTQKSLSLSPGK

SEQ ID NO: 287 - protein, 474 aa, synthetic construct
  REGION 1..474: note = pre-heavy chain chimeric polypeptide having IFN signal peptide
MALTFALLVALLVLSCKSSCSVGCEVQLVESGGGLVQPGGSLRLSCAASGFNIKDTYIHWVRQAPGKGLEWVARIYPTNGYTRYADSVKGRFTISADTSKNTAYLQMNSLRAEDTAVYYCSRWGGDGFYAMDYWGQGTLVTVSSASTKGPSVFPLAPSSKSTSGGTAALGCLVKDYFPEPVTVSWNSGALTSGVHTFPAVLQSSGLYSLSSVVTVPSSSLGTQTYICNVNHKPSNTKVDKKVEPKSCDKTHTCPPCPAPELLGGPSVFLFPPKPKDTLMISRTPEVTCVVVDVSHEDPEVKFNWYVDGVEVHNAKTKPREEQYNSTYRVVSVLTVLHQDWLNGKEYKCKVSNKALPAPIEKTISKAKGQPREPQVYTLPPSRDELTKNQVSLTCLVKGFYPSDIAVEWESNGQPENNYKTTPPVLDSDGSFFLYSKLTVDKSRWQQGNVFSCSVMHEALHNHYTQKSLSLSPGK

SEQ ID NO: 288 - protein, 468 aa, synthetic construct
  REGION 1..468: note = pre-heavy chain chimeric polypeptide having CETP signal peptide
MLAATVLTLALLGNAHACEVQLVESGGGLVQPGGSLRLSCAASGFNIKDTYIHWVRQAPGKGLEWVARIYPTNGYTRYADSVKGRFTISADTSKNTAYLQMNSLRAEDTAVYYCSRWGGDGFYAMDYWGQGTLVTVSSASTKGPSVFPLAPSSKSTSGGTAALGCLVKDYFPEPVTVSWNSGALTSGVHTFPAVLQSSGLYSLSSVVTVPSSSLGTQTYICNVNHKPSNTKVDKKVEPKSCDKTHTCPPCPAPELLGGPSVFLFPPKPKDTLMISRTPEVTCVVVDVSHEDPEVKFNWYVDGVEVHNAKTKPREEQYNSTYRVVSVLTVLHQDWLNGKEYKCKVSNKALPAPIEKTISKAKGQPREPQVYTLPPSRDELTKNQVSLTCLVKGFYPSDIAVEWESNGQPENNYKTTPPVLDSDGSFFLYSKLTVDKSRWQQGNVFSCSVMHEALHNHYTQKSLSLSPGK

SEQ ID NO: 289 - protein, 452 aa, synthetic construct
  REGION 1..452: note = Trastuzumab heavy chain having the N-terminal sequence CP
CPEVQLVESGGGLVQPGGSLRLSCAASGFNIKDTYIHWVRQAPGKGLEWVARIYPTNGYTRYADSVKGRFTISADTSKNTAYLQMNSLRAEDTAVYYCSRWGGDGFYAMDYWGQGTLVTVSSASTKGPSVFPLAPSSKSTSGGTAALGCLVKDYFPEPVTVSWNSGALTSGVHTFPAVLQSSGLYSLSSVVTVPSSSLGTQTYICNVNHKPSNTKVDKKVEPKSCDKTHTCPPCPAPELLGGPSVFLFPPKPKDTLMISRTPEVTCVVVDVSHEDPEVKFNWYVDGVEVHNAKTKPREEQYNSTYRVVSVLTVLHQDWLNGKEYKCKVSNKALPAPIEKTISKAKGQPREPQVYTLPPSRDELTKNQVSLTCLVKGFYPSDIAVEWESNGQPENNYKTTPPVLDSDGSFFLYSKLTVDKSRWQQGNVFSCSVMHEALHNHYTQKSLSLSPGK

SEQ ID NO: 290 - protein, 475 aa, synthetic construct
  REGION 1..475: note = pre-heavy chain chimeric polypeptide having SHH signal peptide
MLLLARCLLLVLVSSLLVCSGLACPEVQLVESGGGLVQPGGSLRLSCAASGFNIKDTYIHWVRQAPGKGLEWVARIYPTNGYTRYADSVKGRFTISADTSKNTAYLQMNSLRAEDTAVYYCSRWGGDGFYAMDYWGQGTLVTVSSASTKGPSVFPLAPSSKSTSGGTAALGCLVKDYFPEPVTVSWNSGALTSGVHTFPAVLQSSGLYSLSSVVTVPSSSLGTQTYICNVNHKPSNTKVDKKVEPKSCDKTHTCPPCPAPELLGGPSVFLFPPKPKDTLMISRTPEVTCVVVDVSHEDPEVKFNWYVDGVEVHNAKTKPREEQYNSTYRVVSVLTVLHQDWLNGKEYKCKVSNKALPAPIEKTISKAKGQPREPQVYTLPPSRDELTKNQVSLTCLVKGFYPSDIAVEWESNGQPENNYKTTPPVLDSDGSFFLYSKLTVDKSRWQQGNVFSCSVMHEALHNHYTQKSLSLSPGK

SEQ ID NO: 291 - protein, 475 aa, synthetic construct
  REGION 1..475: note = pre-heavy chain chimeric polypeptide having IFN signal peptide
MALTFALLVALLVLSCKSSCSVGCPEVQLVESGGGLVQPGGSLRLSCAASGFNIKDTYIHWVRQAPGKGLEWVARIYPTNGYTRYADSVKGRFTISADTSKNTAYLQMNSLRAEDTAVYYCSRWGGDGFYAMDYWGQGTLVTVSSASTKGPSVFPLAPSSKSTSGGTAALGCLVKDYFPEPVTVSWNSGALTSGVHTFPAVLQSSGLYSLSSVVTVPSSSLGTQTYICNVNHKPSNTKVDKKVEPKSCDKTHTCPPCPAPELLGGPSVFLFPPKPKDTLMISRTPEVTCVVVDVSHEDPEVKFNWYVDGVEVHNAKTKPREEQYNSTYRVVSVLTVLHQDWLNGKEYKCKVSNKALPAPIEKTISKAKGQPREPQVYTLPPSRDELTKNQVSLTCLVKGFYPSDIAVEWESNGQPENNYKTTPPVLDSDGSFFLYSKLTVDKSRWQQGNVFSCSVMHEALHNHYTQKSLSLSPGK

SEQ ID NO: 292 - protein, 469 aa, synthetic construct
  REGION 1..469: note = pre-heavy chain chimeric polypeptide having CETP signal peptide
MLAATVLTLALLGNAHACPEVQLVESGGGLVQPGGSLRLSCAASGFNIKDTYIHWVRQAPGKGLEWVARIYPTNGYTRYADSVKGRFTISADTSKNTAYLQMNSLRAEDTAVYYCSRWGGDGFYAMDYWGQGTLVTVSSASTKGPSVFPLAPSSKSTSGGTAALGCLVKDYFPEPVTVSWNSGALTSGVHTFPAVLQSSGLYSLSSVVTVPSSSLGTQTYICNVNHKPSNTKVDKKVEPKSCDKTHTCPPCPAPELLGGPSVFLFPPKPKDTLMISRTPEVTCVVVDVSHEDPEVKFNWYVDGVEVHNAKTKPREEQYNSTYRVVSVLTVLHQDWLNGKEYKCKVSNKALPAPIEKTISKAKGQPREPQVYTLPPSRDELTKNQVSLTCLVKGFYPSDIAVEWESNGQPENNYKTTPPVLDSDGSFFLYSKLTVDKSRWQQGNVFSCSVMHEALHNHYTQKSLSLSPGK

SEQ ID NO: 293 - protein, 453 aa, synthetic construct
  REGION 1..453: note = Trastuzumab heavy chain having the N-terminal sequence CPP
CPPEVQLVESGGGLVQPGGSLRLSCAASGFNIKDTYIHWVRQAPGKGLEWVARIYPTNGYTRYADSVKGRFTISADTSKNTAYLQMNSLRAEDTAVYYCSRWGGDGFYAMDYWGQGTLVTVSSASTKGPSVFPLAPSSKSTSGGTAALGCLVKDYFPEPVTVSWNSGALTSGVHTFPAVLQSSGLYSLSSVVTVPSSSLGTQTYICNVNHKPSNTKVDKKVEPKSCDKTHTCPPCPAPELLGGPSVFLFPPKPKDTLMISRTPEVTCVVVDVSHEDPEVKFNWYVDGVEVHNAKTKPREEQYNSTYRVVSVLTVLHQDWLNGKEYKCKVSNKALPAPIEKTISKAKGQPREPQVYTLPPSRDELTKNQVSLTCLVKGFYPSDIAVEWESNGQPENNYKTTPPVLDSDGSFFLYSKLTVDKSRWQQGNVFSCSVMHEALHNHYTQKSLSLSPGK

SEQ ID NO: 294 - protein, 476 aa, synthetic construct
  REGION 1..476: note = pre-heavy chain chimeric polypeptide having SHH signal peptide
MLLLARCLLLVLVSSLLVCSGLACPPEVQLVESGGGLVQPGGSLRLSCAASGFNIKDTYIHWVRQAPGKGLEWVARIYPTNGYTRYADSVKGRFTISADTSKNTAYLQMNSLRAEDTAVYYCSRWGGDGFYAMDYWGQGTLVTVSSASTKGPSVFPLAPSSKSTSGGTAALGCLVKDYFPEPVTVSWNSGALTSGVHTFPAVLQSSGLYSLSSVVTVPSSSLGTQTYICNVNHKPSNTKVDKKVEPKSCDKTHTCPPCPAPELLGGPSVFLFPPKPKDTLMISRTPEVTCVVVDVSHEDPEVKFNWYVDGVEVHNAKTKPREEQYNSTYRVVSVLTVLHQDWLNGKEYKCKVSNKALPAPIEKTISKAKGQPREPQVYTLPPSRDELTKNQVSLTCLVKGFYPSDIAVEWESNGQPENNYKTTPPVLDSDGSFFLYSKLTVDKSRWQQGNVFSCSVMHEALHNHYTQKSLSLSPGK

SEQ ID NO: 295 - protein, 476 aa, synthetic construct
  REGION 1..476: note = pre-heavy chain chimeric polypeptide having IFN signal peptide
MALTFALLVALLVLSCKSSCSVGCPPEVQLVESGGGLVQPGGSLRLSCAASGFNIKDTYIHWVRQAPGKGLEWVARIYPTNGYTRYADSVKGRFTISADTSKNTAYLQMNSLRAEDTAVYYCSRWGGDGFYAMDYWGQGTLVTVSSASTKGPSVFPLAPSSKSTSGGTAALGCLVKDYFPEPVTVSWNSGALTSGVHTFPAVLQSSGLYSLSSVVTVPSSSLGTQTYICNVNHKPSNTKVDKKVEPKSCDKTHTCPPCPAPELLGGPSVFLFPPKPKDTLMISRTPEVTCVVVDVSHEDPEVKFNWYVDGVEVHNAKTKPREEQYNSTYRVVSVLTVLHQDWLNGKEYKCKVSNKALPAPIEKTISKAKGQPREPQVYTLPPSRDELTKNQVSLTCLVKGFYPSDIAVEWESNGQPENNYKTTPPVLDSDGSFFLYSKLTVDKSRWQQGNVFSCSVMHEALHNHYTQKSLSLSPGK

SEQ ID NO: 296 - protein, 470 aa, synthetic construct
  REGION 1..470: note = pre-heavy chain chimeric polypeptide having CETP signal peptide
MLAATVLTLALLGNAHACPPEVQLVESGGGLVQPGGSLRLSCAASGFNIKDTYIHWVRQAPGKGLEWVARIYPTNGYTRYADSVKGRFTISADTSKNTAYLQMNSLRAEDTAVYYCSRWGGDGFYAMDYWGQGTLVTVSSASTKGPSVFPLAPSSKSTSGGTAALGCLVKDYFPEPVTVSWNSGALTSGVHTFPAVLQSSGLYSLSSVVTVPSSSLGTQTYICNVNHKPSNTKVDKKVEPKSCDKTHTCPPCPAPELLGGPSVFLFPPKPKDTLMISRTPEVTCVVVDVSHEDPEVKFNWYVDGVEVHNAKTKPREEQYNSTYRVVSVLTVLHQDWLNGKEYKCKVSNKALPAPIEKTISKAKGQPREPQVYTLPPSRDELTKNQVSLTCLVKGFYPSDIAVEWESNGQPENNYKTTPPVLDSDGSFFLYSKLTVDKSRWQQGNVFSCSVMHEALHNHYTQKSLSLSPGK

SEQ ID NO: 297 - protein, 453 aa, synthetic construct
  REGION 1..453: note = Trastuzumab heavy chain having the N-terminal sequence CPR
CPREVQLVESGGGLVQPGGSLRLSCAASGFNIKDTYIHWVRQAPGKGLEWVARIYPTNGYTRYADSVKGRFTISADTSKNTAYLQMNSLRAEDTAVYYCSRWGGDGFYAMDYWGQGTLVTVSSASTKGPSVFPLAPSSKSTSGGTAALGCLVKDYFPEPVTVSWNSGALTSGVHTFPAVLQSSGLYSLSSVVTVPSSSLGTQTYICNVNHKPSNTKVDKKVEPKSCDKTHTCPPCPAPELLGGPSVFLFPPKPKDTLMISRTPEVTCVVVDVSHEDPEVKFNWYVDGVEVHNAKTKPREEQYNSTYRVVSVLTVLHQDWLNGKEYKCKVSNKALPAPIEKTISKAKGQPREPQVYTLPPSRDELTKNQVSLTCLVKGFYPSDIAVEWESNGQPENNYKTTPPVLDSDGSFFLYSKLTVDKSRWQQGNVFSCSVMHEALHNHYTQKSLSLSPGK

SEQ ID NO: 298 - protein, 476 aa, synthetic construct
  REGION 1..476: note = pre-heavy chain chimeric polypeptide having SHH signal peptide
MLLLARCLLLVLVSSLLVCSGLACPREVQLVESGGGLVQPGGSLRLSCAASGFNIKDTYIHWVRQAPGKGLEWVARIYPTNGYTRYADSVKGRFTISADTSKNTAYLQMNSLRAEDTAVYYCSRWGGDGFYAMDYWGQGTLVTVSSASTKGPSVFPLAPSSKSTSGGTAALGCLVKDYFPEPVTVSWNSGALTSGVHTFPAVLQSSGLYSLSSVVTVPSSSLGTQTYICNVNHKPSNTKVDKKVEPKSCDKTHTCPPCPAPELLGGPSVFLFPPKPKDTLMISRTPEVTCVVVDVSHEDPEVKFNWYVDGVEVHNAKTKPREEQYNSTYRVVSVLTVLHQDWLNGKEYKCKVSNKALPAPIEKTISKAKGQPREPQVYTLPPSRDELTKNQVSLTCLVKGFYPSDIAVEWESNGQPENNYKTTPPVLDSDGSFFLYSKLTVDKSRWQQGNVFSCSVMHEALHNHYTQKSLSLSPGK

SEQ ID NO: 299 - protein, 476 aa, synthetic construct
  REGION 1..476: note = pre-heavy chain chimeric polypeptide having IFN signal peptide
MALTFALLVALLVLSCKSSCSVGCPREVQLVESGGGLVQPGGSLRLSCAASGFNIKDTYIHWVRQAPGKGLEWVARIYPTNGYTRYADSVKGRFTISADTSKNTAYLQMNSLRAEDTAVYYCSRWGGDGFYAMDYWGQGTLVTVSSASTKGPSVFPLAPSSKSTSGGTAALGCLVKDYFPEPVTVSWNSGALTSGVHTFPAVLQSSGLYSLSSVVTVPSSSLGTQTYICNVNHKPSNTKVDKKVEPKSCDKTHTCPPCPAPELLGGPSVFLFPPKPKDTLMISRTPEVTCVVVDVSHEDPEVKFNWYVDGVEVHNAKTKPREEQYNSTYRVVSVLTVLHQDWLNGKEYKCKVSNKALPAPIEKTISKAKGQPREPQVYTLPPSRDELTKNQVSLTCLVKGFYPSDIAVEWESNGQPENNYKTTPPVLDSDGSFFLYSKLTVDKSRWQQGNVFSCSVMHEALHNHYTQKSLSLSPGK

SEQ ID NO: 300 - protein, 470 aa, synthetic construct
  REGION 1..470: note = pre-heavy chain chimeric polypeptide having CETP signal peptide
MLAATVLTLALLGNAHACPREVQLVESGGGLVQPGGSLRLSCAASGFNIKDTYIHWVRQAPGKGLEWVARIYPTNGYTRYADSVKGRFTISADTSKNTAYLQMNSLRAEDTAVYYCSRWGGDGFYAMDYWGQGTLVTVSSASTKGPSVFPLAPSSKSTSGGTAALGCLVKDYFPEPVTVSWNSGALTSGVHTFPAVLQSSGLYSLSSVVTVPSSSLGTQTYICNVNHKPSNTKVDKKVEPKSCDKTHTCPPCPAPELLGGPSVFLFPPKPKDTLMISRTPEVTCVVVDVSHEDPEVKFNWYVDGVEVHNAKTKPREEQYNSTYRVVSVLTVLHQDWLNGKEYKCKVSNKALPAPIEKTISKAKGQPREPQVYTLPPSRDELTKNQVSLTCLVKGFYPSDIAVEWESNGQPENNYKTTPPVLDSDGSFFLYSKLTVDKSRWQQGNVFSCSVMHEALHNHYTQKSLSLSPGK

SEQ ID NO: 301 - protein, 453 aa, synthetic construct
  REGION 1..453: note = Trastuzumab heavy chain having the N-terminal sequence CPS
CPSEVQLVESGGGLVQPGGSLRLSCAASGFNIKDTYIHWVRQAPGKGLEWVARIYPTNGYTRYADSVKGRFTISADTSKNTAYLQMNSLRAEDTAVYYCSRWGGDGFYAMDYWGQGTLVTVSSASTKGPSVFPLAPSSKSTSGGTAALGCLVKDYFPEPVTVSWNSGALTSGVHTFPAVLQSSGLYSLSSVVTVPSSSLGTQTYICNVNHKPSNTKVDKKVEPKSCDKTHTCPPCPAPELLGGPSVFLFPPKPKDTLMISRTPEVTCVVVDVSHEDPEVKFNWYVDGVEVHNAKTKPREEQYNSTYRVVSVLTVLHQDWLNGKEYKCKVSNKALPAPIEKTISKAKGQPREPQVYTLPPSRDELTKNQVSLTCLVKGFYPSDIAVEWESNGQPENNYKTTPPVLDSDGSFFLYSKLTVDKSRWQQGNVFSCSVMHEALHNHYTQKSLSLSPGK

SEQ ID NO: 302 - protein, 476 aa, synthetic construct
  REGION 1..476: note = pre-heavy chain chimeric polypeptide having SHH signal peptide
MLLLARCLLLVLVSSLLVCSGLACPSEVQLVESGGGLVQPGGSLRLSCAASGFNIKDTYIHWVRQAPGKGLEWVARIYPTNGYTRYADSVKGRFTISADTSKNTAYLQMNSLRAEDTAVYYCSRWGGDGFYAMDYWGQGTLVTVSSASTKGPSVFPLAPSSKSTSGGTAALGCLVKDYFPEPVTVSWNSGALTSGVHTFPAVLQSSGLYSLSSVVTVPSSSLGTQTYICNVNHKPSNTKVDKKVEPKSCDKTHTCPPCPAPELLGGPSVFLFPPKPKDTLMISRTPEVTCVVVDVSHEDPEVKFNWYVDGVEVHNAKTKPREEQYNSTYRVVSVLTVLHQDWLNGKEYKCKVSNKALPAPIEKTISKAKGQPREPQVYTLPPSRDELTKNQVSLTCLVKGFYPSDIAVEWESNGQPENNYKTTPPVLDSDGSFFLYSKLTVDKSRWQQGNVFSCSVMHEALHNHYTQKSLSLSPGK

SEQ ID NO: 303 - protein, 476 aa, synthetic construct
  REGION 1..476: note = pre-heavy chain chimeric polypeptide having IFN signal peptide
MALTFALLVALLVLSCKSSCSVGCPSEVQLVESGGGLVQPGGSLRLSCAASGFNIKDTYIHWVRQAPGKGLEWVARIYPTNGYTRYADSVKGRFTISADTSKNTAYLQMNSLRAEDTAVYYCSRWGGDGFYAMDYWGQGTLVTVSSASTKGPSVFPLAPSSKSTSGGTAALGCLVKDYFPEPVTVSWNSGALTSGVHTFPAVLQSSGLYSLSSVVTVPSSSLGTQTYICNVNHKPSNTKVDKKVEPKSCDKTHTCPPCPAPELLGGPSVFLFPPKPKDTLMISRTPEVTCVVVDVSHEDPEVKFNWYVDGVEVHNAKTKPREEQYNSTYRVVSVLTVLHQDWLNGKEYKCKVSNKALPAPIEKTISKAKGQPREPQVYTLPPSRDELTKNQVSLTCLVKGFYPSDIAVEWESNGQPENNYKTTPPVLDSDGSFFLYSKLTVDKSRWQQGNVFSCSVMHEALHNHYTQKSLSLSPGK

SEQ ID NO: 304 - protein, 470 aa, synthetic construct
  REGION 1..470: note = pre-heavy chain chimeric polypeptide having CETP signal peptide
MLAATVLTLALLGNAHACPSEVQLVESGGGLVQPGGSLRLSCAASGFNIKDTYIHWVRQAPGKGLEWVARIYPTNGYTRYADSVKGRFTISADTSKNTAYLQMNSLRAEDTAVYYCSRWGGDGFYAMDYWGQGTLVTVSSASTKGPSVFPLAPSSKSTSGGTAALGCLVKDYFPEPVTVSWNSGALTSGVHTFPAVLQSSGLYSLSSVVTVPSSSLGTQTYICNVNHKPSNTKVDKKVEPKSCDKTHTCPPCPAPELLGGPSVFLFPPKPKDTLMISRTPEVTCVVVDVSHEDPEVKFNWYVDGVEVHNAKTKPREEQYNSTYRVVSVLTVLHQDWLNGKEYKCKVSNKALPAPIEKTISKAKGQPREPQVYTLPPSRDELTKNQVSLTCLVKGFYPSDIAVEWESNGQPENNYKTTPPVLDSDGSFFLYSKLTVDKSRWQQGNVFSCSVMHEALHNHYTQKSLSLSPGK

SEQ ID NO: 305 - protein, 454 aa, synthetic construct
  REGION 1..454: note = Trastuzumab heavy chain having the N-terminal sequence CDKT
CDKTEVQLVESGGGLVQPGGSLRLSCAASGFNIKDTYIHWVRQAPGKGLEWVARIYPTNGYTRYADSVKGRFTISADTSKNTAYLQMNSLRAEDTAVYYCSRWGGDGFYAMDYWGQGTLVTVSSASTKGPSVFPLAPSSKSTSGGTAALGCLVKDYFPEPVTVSWNSGALTSGVHTFPAVLQSSGLYSLSSVVTVPSSSLGTQTYICNVNHKPSNTKVDKKVEPKSCDKTHTCPPCPAPELLGGPSVFLFPPKPKDTLMISRTPEVTCVVVDVSHEDPEVKFNWYVDGVEVHNAKTKPREEQYNSTYRVVSVLTVLHQDWLNGKEYKCKVSNKALPAPIEKTISKAKGQPREPQVYTLPPSRDELTKNQVSLTCLVKGFYPSDIAVEWESNGQPENNYKTTPPVLDSDGSFFLYSKLTVDKSRWQQGNVFSCSVMHEALHNHYTQKSLSLSPGK

SEQ ID NO: 306 - protein, 477 aa, synthetic construct
  REGION 1..477: note = pre-heavy chain chimeric polypeptide having SHH signal peptide
MLLLARCLLLVLVSSLLVCSGLACDKTEVQLVESGGGLVQPGGSLRLSCAASGFNIKDTYIHWVRQAPGKGLEWVARIYPTNGYTRYADSVKGRFTISADTSKNTAYLQMNSLRAEDTAVYYCSRWGGDGFYAMDYWGQGTLVTVSSASTKGPSVFPLAPSSKSTSGGTAALGCLVKDYFPEPVTVSWNSGALTSGVHTFPAVLQSSGLYSLSSVVTVPSSSLGTQTYICNVNHKPSNTKVDKKVEPKSCDKTHTCPPCPAPELLGGPSVFLFPPKPKDTLMISRTPEVTCVVVDVSHEDPEVKFNWYVDGVEVHNAKTKPREEQYNSTYRVVSVLTVLHQDWLNGKEYKCKVSNKALPAPIEKTISKAKGQPREPQVYTLPPSRDELTKNQVSLTCLVKGFYPSDIAVEWESNGQPENNYKTTPPVLDSDGSFFLYSKLTVDKSRWQQGNVFSCSVMHEALHNHYTQKSLSLSPGK

SEQ ID NO: 307 - protein, 477 aa, synthetic construct
  REGION 1..477: note = pre-heavy chain chimeric polypeptide having IFN signal peptide
MALTFALLVALLVLSCKSSCSVGCDKTEVQLVESGGGLVQPGGSLRLSCAASGFNIKDTYIHWVRQAPGKGLEWVARIYPTNGYTRYADSVKGRFTISADTSKNTAYLQMNSLRAEDTAVYYCSRWGGDGFYAMDYWGQGTLVTVSSASTKGPSVFPLAPSSKSTSGGTAALGCLVKDYFPEPVTVSWNSGALTSGVHTFPAVLQSSGLYSLSSVVTVPSSSLGTQTYICNVNHKPSNTKVDKKVEPKSCDKTHTCPPCPAPELLGGPSVFLFPPKPKDTLMISRTPEVTCVVVDVSHEDPEVKFNWYVDGVEVHNAKTKPREEQYNSTYRVVSVLTVLHQDWLNGKEYKCKVSNKALPAPIEKTISKAKGQPREPQVYTLPPSRDELTKNQVSLTCLVKGFYPSDIAVEWESNGQPENNYKTTPPVLDSDGSFFLYSKLTVDKSRWQQGNVFSCSVMHEALHNHYTQKSLSLSPGK

SEQ ID NO: 308 - protein, 471 aa, synthetic construct
  REGION 1..471: note = pre-heavy chain chimeric polypeptide having CETP signal peptide
MLAATVLTLALLGNAHACDKTEVQLVESGGGLVQPGGSLRLSCAASGFNIKDTYIHWVRQAPGKGLEWVARIYPTNGYTRYADSVKGRFTISADTSKNTAYLQMNSLRAEDTAVYYCSRWGGDGFYAMDYWGQGTLVTVSSASTKGPSVFPLAPSSKSTSGGTAALGCLVKDYFPEPVTVSWNSGALTSGVHTFPAVLQSSGLYSLSSVVTVPSSSLGTQTYICNVNHKPSNTKVDKKVEPKSCDKTHTCPPCPAPELLGGPSVFLFPPKPKDTLMISRTPEVTCVVVDVSHEDPEVKFNWYVDGVEVHNAKTKPREEQYNSTYRVVSVLTVLHQDWLNGKEYKCKVSNKALPAPIEKTISKAKGQPREPQVYTLPPSRDELTKNQVSLTCLVKGFYPSDIAVEWESNGQPENNYKTTPPVLDSDGSFFLYSKLTVDKSRWQQGNVFSCSVMHEALHNHYTQKSLSLSPGK

SEQ ID NO: 309 - protein, 456 aa, synthetic construct
  REGION 1..456: note = Trastuzumab heavy chain having the N-terminal sequence CDKTHT
CDKTHTEVQLVESGGGLVQPGGSLRLSCAASGFNIKDTYIHWVRQAPGKGLEWVARIYPTNGYTRYADSVKGRFTISADTSKNTAYLQMNSLRAEDTAVYYCSRWGGDGFYAMDYWGQGTLVTVSSASTKGPSVFPLAPSSKSTSGGTAALGCLVKDYFPEPVTVSWNSGALTSGVHTFPAVLQSSGLYSLSSVVTVPSSSLGTQTYICNVNHKPSNTKVDKKVEPKSCDKTHTCPPCPAPELLGGPSVFLFPPKPKDTLMISRTPEVTCVVVDVSHEDPEVKFNWYVDGVEVHNAKTKPREEQYNSTYRVVSVLTVLHQDWLNGKEYKCKVSNKALPAPIEKTISKAKGQPREPQVYTLPPSRDELTKNQVSLTCLVKGFYPSDIAVEWESNGQPENNYKTTPPVLDSDGSFFLYSKLTVDKSRWQQGNVFSCSVMHEALHNHYTQKSLSLSPGK

SEQ ID NO: 310 - protein, 479 aa, synthetic construct
  REGION 1..479: note = pre-heavy chain chimeric polypeptide having SHH signal peptide
MLLLARCLLLVLVSSLLVCSGLACDKTHTEVQLVESGGGLVQPGGSLRLSCAASGFNIKDTYIHWVRQAPGKGLEWVARIYPTNGYTRYADSVKGRFTISADTSKNTAYLQMNSLRAEDTAVYYCSRWGGDGFYAMDYWGQGTLVTVSSASTKGPSVFPLAPSSKSTSGGTAALGCLVKDYFPEPVTVSWNSGALTSGVHTFPAVLQSSGLYSLSSVVTVPSSSLGTQTYICNVNHKPSNTKVDKKVEPKSCDKTHTCPPCPAPELLGGPSVFLFPPKPKDTLMISRTPEVTCVVVDVSHEDPEVKFNWYVDGVEVHNAKTKPREEQYNSTYRVVSVLTVLHQDWLNGKEYKCKVSNKALPAPIEKTISKAKGQPREPQVYTLPPSRDELTKNQVSLTCLVKGFYPSDIAVEWESNGQPENNYKTTPPVLDSDGSFFLYSKLTVDKSRWQQGNVFSCSVMHEALHNHYTQKSLSLSPGK

SEQ ID NO: 311 - protein, 479 aa, synthetic construct
  REGION 1..479: note = pre-heavy chain chimeric polypeptide having IFN signal peptide
MALTFALLVALLVLSCKSSCSVGCDKTHTEVQLVESGGGLVQPGGSLRLSCAASGFNIKDTYIHWVRQAPGKGLEWVARIYPTNGYTRYADSVKGRFTISADTSKNTAYLQMNSLRAEDTAVYYCSRWGGDGFYAMDYWGQGTLVTVSSASTKGPSVFPLAPSSKSTSGGTAALGCLVKDYFPEPVTVSWNSGALTSGVHTFPAVLQSSGLYSLSSVVTVPSSSLGTQTYICNVNHKPSNTKVDKKVEPKSCDKTHTCPPCPAPELLGGPSVFLFPPKPKDTLMISRTPEVTCVVVDVSHEDPEVKFNWYVDGVEVHNAKTKPREEQYNSTYRVVSVLTVLHQDWLNGKEYKCKVSNKALPAPIEKTISKAKGQPREPQVYTLPPSRDELTKNQVSLTCLVKGFYPSDIAVEWESNGQPENNYKTTPPVLDSDGSFFLYSKLTVDKSRWQQGNVFSCSVMHEALHNHYTQKSLSLSPGK

SEQ ID NO: 312 - protein, 473 aa, synthetic construct
  REGION 1..473: note = pre-heavy chain chimeric polypeptide having CETP signal peptide
MLAATVLTLALLGNAHACDKTHTEVQLVESGGGLVQPGGSLRLSCAASGFNIKDTYIHWVRQAPGKGLEWVARIYPTNGYTRYADSVKGRFTISADTSKNTAYLQMNSLRAEDTAVYYCSRWGGDGFYAMDYWGQGTLVTVSSASTKGPSVFPLAPSSKSTSGGTAALGCLVKDYFPEPVTVSWNSGALTSGVHTFPAVLQSSGLYSLSSVVTVPSSSLGTQTYICNVNHKPSNTKVDKKVEPKSCDKTHTCPPCPAPELLGGPSVFLFPPKPKDTLMISRTPEVTCVVVDVSHEDPEVKFNWYVDGVEVHNAKTKPREEQYNSTYRVVSVLTVLHQDWLNGKEYKCKVSNKALPAPIEKTISKAKGQPREPQVYTLPPSRDELTKNQVSLTCLVKGFYPSDIAVEWESNGQPENNYKTTPPVLDSDGSFFLYSKLTVDKSRWQQGNVFSCSVMHEALHNHYTQKSLSLSPGK

SEQ ID NO: 313 - protein, 453 aa, synthetic construct
  REGION 1..453: note = Trastuzumab heavy chain having the N-terminal sequence CVE
CVEEVQLVESGGGLVQPGGSLRLSCAASGFNIKDTYIHWVRQAPGKGLEWVARIYPTNGYTRYADSVKGRFTISADTSKNTAYLQMNSLRAEDTAVYYCSRWGGDGFYAMDYWGQGTLVTVSSASTKGPSVFPLAPSSKSTSGGTAALGCLVKDYFPEPVTVSWNSGALTSGVHTFPAVLQSSGLYSLSSVVTVPSSSLGTQTYICNVNHKPSNTKVDKKVEPKSCDKTHTCPPCPAPELLGGPSVFLFPPKPKDTLMISRTPEVTCVVVDVSHEDPEVKFNWYVDGVEVHNAKTKPREEQYNSTYRVVSVLTVLHQDWLNGKEYKCKVSNKALPAPIEKTISKAKGQPREPQVYTLPPSRDELTKNQVSLTCLVKGFYPSDIAVEWESNGQPENNYKTTPPVLDSDGSFFLYSKLTVDKSRWQQGNVFSCSVMHEALHNHYTQKSLSLSPGK

SEQ ID NO: 314 - protein, 476 aa, synthetic construct
  REGION 1..476: note = pre-heavy chain chimeric polypeptide having SHH signal peptide
MLLLARCLLLVLVSSLLVCSGLACVEEVQLVESGGGLVQPGGSLRLSCAASGFNIKDTYIHWVRQAPGKGLEWVARIYPTNGYTRYADSVKGRFTISADTSKNTAYLQMNSLRAEDTAVYYCSRWGGDGFYAMDYWGQGTLVTVSSASTKGPSVFPLAPSSKSTSGGTAALGCLVKDYFPEPVTVSWNSGALTSGVHTFPAVLQSSGLYSLSSVVTVPSSSLGTQTYICNVNHKPSNTKVDKKVEPKSCDKTHTCPPCPAPELLGGPSVFLFPPKPKDTLMISRTPEVTCVVVDVSHEDPEVKFNWYVDGVEVHNAKTKPREEQYNSTYRVVSVLTVLHQDWLNGKEYKCKVSNKALPAPIEKTISKAKGQPREPQVYTLPPSRDELTKNQVSLTCLVKGFYPSDIAVEWESNGQPENNYKTTPPVLDSDGSFFLYSKLTVDKSRWQQGNVFSCSVMHEALHNHYTQKSLSLSPGK

SEQ ID NO: 315 - protein, 476 aa, synthetic construct
  REGION 1..476: note = pre-heavy chain chimeric polypeptide having IFN signal peptide
MALTFALLVALLVLSCKSSCSVGCVEEVQLVESGGGLVQPGGSLRLSCAASGFNIKDTYIHWVRQAPGKGLEWVARIYPTNGYTRYADSVKGRFTISADTSKNTAYLQMNSLRAEDTAVYYCSRWGGDGFYAMDYWGQGTLVTVSSASTKGPSVFPLAPSSKSTSGGTAALGCLVKDYFPEPVTVSWNSGALTSGVHTFPAVLQSSGLYSLSSVVTVPSSSLGTQTYICNVNHKPSNTKVDKKVEPKSCDKTHTCPPCPAPELLGGPSVFLFPPKPKDTLMISRTPEVTCVVVDVSHEDPEVKFNWYVDGVEVHNAKTKPREEQYNSTYRVVSVLTVLHQDWLNGKEYKCKVSNKALPAPIEKTISKAKGQPREPQVYTLPPSRDELTKNQVSLTCLVKGFYPSDIAVEWESNGQPENNYKTTPPVLDSDGSFFLYSKLTVDKSRWQQGNVFSCSVMHEALHNHYTQKSLSLSPGK

SEQ ID NO: 316 - protein, 470 aa, synthetic construct
  REGION 1..470: note = pre-heavy chain chimeric polypeptide having CETP signal peptide
MLAATVLTLALLGNAHACVEEVQLVESGGGLVQPGGSLRLSCAASGFNIKDTYIHWVRQAPGKGLEWVARIYPTNGYTRYADSVKGRFTISADTSKNTAYLQMNSLRAEDTAVYYCSRWGGDGFYAMDYWGQGTLVTVSSASTKGPSVFPLAPSSKSTSGGTAALGCLVKDYFPEPVTVSWNSGALTSGVHTFPAVLQSSGLYSLSSVVTVPSSSLGTQTYICNVNHKPSNTKVDKKVEPKSCDKTHTCPPCPAPELLGGPSVFLFPPKPKDTLMISRTPEVTCVVVDVSHEDPEVKFNWYVDGVEVHNAKTKPREEQYNSTYRVVSVLTVLHQDWLNGKEYKCKVSNKALPAPIEKTISKAKGQPREPQVYTLPPSRDELTKNQVSLTCLVKGFYPSDIAVEWESNGQPENNYKTTPPVLDSDGSFFLYSKLTVDKSRWQQGNVFSCSVMHEALHNHYTQKSLSLSPGK

SEQ ID NO: 317 - protein, 456 aa, synthetic construct
  REGION 1..456: note = Trastuzumab heavy chain having the N-terminal sequence CDTPPP
CDTPPPEVQLVESGGGLVQPGGSLRLSCAASGFNIKDTYIHWVRQAPGKGLEWVARIYPTNGYTRYADSVKGRFTISADTSKNTAYLQMNSLRAEDTAVYYCSRWGGDGFYAMDYWGQGTLVTVSSASTKGPSVFPLAPSSKSTSGGTAALGCLVKDYFPEPVTVSWNSGALTSGVHTFPAVLQSSGLYSLSSVVTVPSSSLGTQTYICNVNHKPSNTKVDKKVEPKSCDKTHTCPPCPAPELLGGPSVFLFPPKPKDTLMISRTPEVTCVVVDVSHEDPEVKFNWYVDGVEVHNAKTKPREEQYNSTYRVVSVLTVLHQDWLNGKEYKCKVSNKALPAPIEKTISKAKGQPREPQVYTLPPSRDELTKNQVSLTCLVKGFYPSDIAVEWESNGQPENNYKTTPPVLDSDGSFFLYSKLTVDKSRWQQGNVFSCSVMHEALHNHYTQKSLSLSPGK

SEQ ID NO: 318 - protein, 479 aa, synthetic construct
  REGION 1..479: note = pre-heavy chain chimeric polypeptide having SHH signal peptide
MLLLARCLLLVLVSSLLVCSGLACDTPPPEVQLVESGGGLVQPGGSLRLSCAASGFNIKDTYIHWVRQAPGKGLEWVARIYPTNGYTRYADSVKGRFTISADTSKNTAYLQMNSLRAEDTAVYYCSRWGGDGFYAMDYWGQGTLVTVSSASTKGPSVFPLAPSSKSTSGGTAALGCLVKDYFPEPVTVSWNSGALTSGVHTFPAVLQSSGLYSLSSVVTVPSSSLGTQTYICNVNHKPSNTKVDKKVEPKSCDKTHTCPPCPAPELLGGPSVFLFPPKPKDTLMISRTPEVTCVVVDVSHEDPEVKFNWYVDGVEVHNAKTKPREEQYNSTYRVVSVLTVLHQDWLNGKEYKCKVSNKALPAPIEKTISKAKGQPREPQVYTLPPSRDELTKNQVSLTCLVKGFYPSDIAVEWESNGQPENNYKTTPPVLDSDGSFFLYSKLTVDKSRWQQGNVFSCSVMHEALHNHYTQKSLSLSPGK

SEQ ID NO: 319 - protein, 479 aa, synthetic construct
  REGION 1..479: note = pre-heavy chain chimeric polypeptide having IFN signal peptide
MALTFALLVALLVLSCKSSCSVGCDTPPPEVQLVESGGGLVQPGGSLRLSCAASGFNIKDTYIHWVRQAPGKGLEWVARIYPTNGYTRYADSVKGRFTISADTSKNTAYLQMNSLRAEDTAVYYCSRWGGDGFYAMDYWGQGTLVTVSSASTKGPSVFPLAPSSKSTSGGTAALGCLVKDYFPEPVTVSWNSGALTSGVHTFPAVLQSSGLYSLSSVVTVPSSSLGTQTYICNVNHKPSNTKVDKKVEPKSCDKTHTCPPCPAPELLGGPSVFLFPPKPKDTLMISRTPEVTCVVVDVSHEDPEVKFNWYVDGVEVHNAKTKPREEQYNSTYRVVSVLTVLHQDWLNGKEYKCKVSNKALPAPIEKTISKAKGQPREPQVYTLPPSRDELTKNQVSLTCLVKGFYPSDIAVEWESNGQPENNYKTTPPVLDSDGSFFLYSKLTVDKSRWQQGNVFSCSVMHEALHNHYTQKSLSLSPGK

SEQ ID NO: 320 - protein, 473 aa, synthetic construct
  REGION 1..473: note = pre-heavy chain chimeric polypeptide having CETP signal peptide
MLAATVLTLALLGNAHACDTPPPEVQLVESGGGLVQPGGSLRLSCAASGFNIKDTYIHWVRQAPGKGLEWVARIYPTNGYTRYADSVKGRFTISADTSKNTAYLQMNSLRAEDTAVYYCSRWGGDGFYAMDYWGQGTLVTVSSASTKGPSVFPLAPSSKSTSGGTAALGCLVKDYFPEPVTVSWNSGALTSGVHTFPAVLQSSGLYSLSSVVTVPSSSLGTQTYICNVNHKPSNTKVDKKVEPKSCDKTHTCPPCPAPELLGGPSVFLFPPKPKDTLMISRTPEVTCVVVDVSHEDPEVKFNWYVDGVEVHNAKTKPREEQYNSTYRVVSVLTVLHQDWLNGKEYKCKVSNKALPAPIEKTISKAKGQPREPQVYTLPPSRDELTKNQVSLTCLVKGFYPSDIAVEWESNGQPENNYKTTPPVLDSDGSFFLYSKLTVDKSRWQQGNVFSCSVMHEALHNHYTQKSLSLSPGK

SEQ ID NO: 321 - protein, 31 aa, Homo sapiens
HGEGTFTSDVSSYLEEQAAKEFIAWLVKGRG

SEQ ID NO: 322 - DNA, 22 bp, Homo sapiens
  source 1..22: mol_type = genomic DNA
agaggtagtaggttgcatagtt

SEQ ID NO: 323 - protein, 237 aa, synthetic construct; identical to SEQ ID NO: 227
  REGION 1..237: note = TNR1B

SEQ ID NO: 324 - protein, 222 aa, synthetic construct; identical to SEQ ID NO: 3
  REGION 1..222: note = Fc6

SEQ ID NO: 325 - protein, 5 aa, synthetic construct
  REGION 1..5: note = N-Terminus Sequence
CPPCP

SEQ ID NO: 326 - protein, 5 aa, synthetic construct
  REGION 1..5: note = N-Terminal Sequence
CPRCP

SEQ ID NO: 327 - protein, 5 aa, synthetic construct
  REGION 1..5: note = N-Terminal Sequence
CPSCP

SEQ ID NO: 328 - protein, 11 aa, synthetic construct
  REGION 1..11: note = N-Terminal Sequence
CDKTHTCPPCP

SEQ ID NO: 329 - protein, 8 aa, synthetic construct
  REGION 1..8: note = N-Terminal Sequence
CVECPPCP

SEQ ID NO: 330 - protein, 9 aa, synthetic construct
  REGION 1..9: note = N-Terminal Sequence
CCVECPPCP

SEQ ID NO: 331 - protein, 11 aa, synthetic construct
  REGION 1..11: note = N-Terminal Sequence
CDTPPPCPRCP

SEQ ID NO: 332 - protein, 15 aa, synthetic construct
  REGION 1..15: note = Sequence of component "B"
EPKSCDKTHTCPPCP

SEQ ID NO: 333 - protein, 12 aa, synthetic construct
  REGION 1..12: note = Sequence of component "B"
ERKCCVECPPCP

SEQ ID NO: 334 - protein, 62 aa, synthetic construct
  REGION 1..62: note = Sequence of component "B"
ELKTPLGDTTHTCPRCPEPKSCDTPPPCPRCPEPKSCDTPPPCPRCPEPKSCDTPPPCPRCP

SEQ ID NO: 335 - protein, 12 aa, synthetic construct
  REGION 1..12: note = Sequence of component "B"
ESKYGPPCPSCP

SEQ ID NO: 336 - protein, 6 aa, synthetic construct
  REGION 1..6: note = Sequence in linker
DKTHTC

SEQ ID NO: 337 - protein, 5 aa, synthetic construct
  REGION 1..5: note = Sequence in adalimumab Fab
CDKTH

SEQ ID NO: 338 - protein, 957 aa, synthetic construct
  REGION 1..957: note = ACE2-740/186/knob/PGLALA/R273Q
QSTIEEQAKTFLDKFNHEAEDLFYQSSLASWNYNTNITEENVQNMNNAGDKWSAFLKEQSTLAQMYPLQEIQNLTVKLQLQALQQNGSSVLSEDKSKRLNTILNTMSTIYSTGKVCNPDNPQECLLLEPGLNEIMANSLDYNERLWAWESWRSEVGKQLRPLYEEYVVLKNEMARANHYEDYGDYWRGDYEVNGVDGYDYSRGQLIEDVEHTFEEIKPLYEHLHAYVRAKLMNAYPSYISPIGCLPAHLLGDMWGQFWTNLYSLTVPFGQKPNIDVTDAMVDQAWDAQRIFKEAEKFFVSVGLPNMTQGFWENSMLTDPGNVQKAVCHPTAWDLGKGDFRILMCTKVTMDDFLTAHHEMGHIQYDMAYAAQPFLLRNGANEGFHEAVGEIMSLSAATPKHLKSIGLLSPDFQEDNETEINFLLKQALTIVGTLPFTYMLEKWRWMVFKGEIPKDQWMKKWWEMKREIVGVVEPVPHDETYCDPASLFHVSNDYSFIRYYTRTLYQFQFQEALCQAAKHEGPLHKCDISNSTEAGQKLFNMLRLGKSEPWTLALENVVGAKNMNVRPLLNYFEPLFTWLKDQNKNSFVGWSTDWSPYADQSIKVRISLKSALGDKAYEWNDNEMYLFRSSVAYAMRQYFLKVKNQMILFGEEDVRVANLKPRISFNFFVTAPKNVSDIIPRTEVEKAIRMSRSRINDAFRLNDNSLEFLGIQPTLGPPNQPPVSTSTSPTRSDKTHTCPPCPAPEAAGGPSVFLFPPKPKDTLMISRTPEVTCVVVDVSHEDPEVKFNWYVDGVEVHNAKTKPREEQYNSTYRVVSVLTVLHQDWLNGKEYKCKVSNKALGAPIEKTISKAKGQPREPQVYTLPPCRDELTKNQVSLWCLVKGFYPSDIAVEWESNGQPENNYKTTPPVLDSDGSFFLYSKLTVDKSRWQQGNVFSCSVMHEALHNHYTQKSLSLSPG

SEQ ID NO: 339 - protein, 965 aa, synthetic construct
  REGION 1..965: note = ACE2-740/194/knob/PGLALA/R273Q
QSTIEEQAKTFLDKFNHEAEDLFYQSSLASWNYNTNITEENVQNMNNAGDKWSAFLKEQSTLAQMYPLQEIQNLTVKLQLQALQQNGSSVLSEDKSKRLNTILNTMSTIYSTGKVCNPDNPQECLLLEPGLNEIMANSLDYNERLWAWESWRSEVGKQLRPLYEEYVVLKNEMARANHYEDYGDYWRGDYEVNGVDGYDYSRGQLIEDVEHTFEEIKPLYEHLHAYVRAKLMNAYPSYISPIGCLPAHLLGDMWGQFWTNLYSLTVPFGQKPNIDVTDAMVDQAWDAQRIFKEAEKFFVSVGLPNMTQGFWENSMLTDPGNVQKAVCHPTAWDLGKGDFRILMCTKVTMDDFLTAHHEMGHIQYDMAYAAQPFLLRNGANEGFHEAVGEIMSLSAATPKHLKSIGLLSPDFQEDNETEINFLLKQALTIVGTLPFTYMLEKWRWMVFKGEIPKDQWMKKWWEMKREIVGVVEPVPHDETYCDPASLFHVSNDYSFIRYYTRTLYQFQFQEALCQAAKHEGPLHKCDISNSTEAGQKLFNMLRLGKSEPWTLALENVVGAKNMNVRPLLNYFEPLFTWLKDQNKNSFVGWSTDWSPYADQSIKVRISLKSALGDKAYEWNDNEMYLFRSSVAYAMRQYFLKVKNQMILFGEEDVRVANLKPRISFNFFVTAPKNVSDIIPRTEVEKAIRMSRSRINDAFRLNDNSLEFLGIQPTLGPPNQPPVSTSTSPTRSMAPGAVHLDKTHTCPPCPAPEAAGGPSVFLFPPKPKDTLMISRTPEVTCVVVDVSHEDPEVKFNWYVDGVEVHNAKTKPREEQYNSTYRVVSVLTVLHQDWLNGKEYKCKVSNKALGAPIEKTISKAKGQPREPQVYTLPPCRDELTKNQVSLWCLVKGFYPSDIAVEWESNGQPENNYKTTPPVLDSDGSFFLYSKLTVDKSRWQQGNVFSCSVMHEALHNHYTQKSLSLSPG

SEQ ID NO: 340 - protein, 972 aa, synthetic construct
  REGION 1..972: note = ACE2-740/201/knob/PGLALA/R273Q
QSTIEEQAKTFLDKFNHEAEDLFYQSSLASWNYNTNITEENVQNMNNAGDKWSAFLKEQSTLAQMYPLQEIQNLTVKLQLQALQQNGSSVLSEDKSKRLNTILNTMSTIYSTGKVCNPDNPQECLLLEPGLNEIMANSLDYNERLWAWESWRSEVGKQLRPLYEEYVVLKNEMARANHYEDYGDYWRGDYEVNGVDGYDYSRGQLIEDVEHTFEEIKPLYEHLHAYVRAKLMNAYPSYISPIGCLPAHLLGDMWGQFWTNLYSLTVPFGQKPNIDVTDAMVDQAWDAQRIFKEAEKFFVSVGLPNMTQGFWENSMLTDPGNVQKAVCHPTAWDLGKGDFRILMCTKVTMDDFLTAHHEMGHIQYDMAYAAQPFLLRNGANEGFHEAVGEIMSLSAATPKHLKSIGLLSPDFQEDNETEINFLLKQALTIVGTLPFTYMLEKWRWMVFKGEIPKDQWMKKWWEMKREIVGVVEPVPHDETYCDPASLFHVSNDYSFIRYYTRTLYQFQFQEALCQAAKHEGPLHKCDISNSTEAGQKLFNMLRLGKSEPWTLALENVVGAKNMNVRPLLNYFEPLFTWLKDQNKNSFVGWSTDWSPYADQSIKVRISLKSALGDKAYEWNDNEMYLFRSSVAYAMRQYFLKVKNQMILFGEEDVRVANLKPRISFNFFVTAPKNVSDIIPRTEVEKAIRMSRSRINDAFRLNDNSLEFLGIQPTLGPPNQPPVSTSTSPTRSMAPGAVHLPQPVSTRDKTHTCPPCPAPEAAGGPSVFLFPPKPKDTLMISRTPEVTCVVVDVSHEDPEVKFNWYVDGVEVHNAKTKPREEQYNSTYRVVSVLTVLHQDWLNGKEYKCKVSNKALGAPIEKTISKAKGQPREPQVYTLPPCRDELTKNQVSLWCLVKGFYPSDIAVEWESNGQPENNYKTTPPVLDSDGSFFLYSKLTVDKSRWQQGNVFSCSVMHEALHNHYTQKSLSLSPG

SEQ ID NO: 341 - protein, 979 aa, synthetic construct; identical to SEQ ID NO: 69
  REGION 1..979: note = ACE2-740/208/knob/PGLALA/R273Q

SEQ ID NO: 342 - protein, 847 aa, synthetic construct
  REGION 1..847: note = ACE2-615/201/hole/PGLALA/R273Q/RF
QSTIEEQAKTFLDKFNHEAEDLFYQSSLASWNYNTNITEENVQNMNNAGDKWSAFLKEQSTLAQMYPLQEIQNLTVKLQLQALQQNGSSVLSEDKSKRLNTILNTMSTIYSTGKVCNPDNPQECLLLEPGLNEIMANSLDYNERLWAWESWRSEVGKQLRPLYEEYVVLKNEMARANHYEDYGDYWRGDYEVNGVDGYDYSRGQLIEDVEHTFEEIKPLYEHLHAYVRAKLMNAYPSYISPIGCLPAHLLGDMWGQFWTNLYSLTVPFGQKPNIDVTDAMVDQAWDAQRIFKEAEKFFVSVGLPNMTQGFWENSMLTDPGNVQKAVCHPTAWDLGKGDFRILMCTKVTMDDFLTAHHEMGHIQYDMAYAAQPFLLRNGANEGFHEAVGEIMSLSAATPKHLKSIGLLSPDFQEDNETEINFLLKQALTIVGTLPFTYMLEKWRWMVFKGEIPKDQWMKKWWEMKREIVGVVEPVPHDETYCDPASLFHVSNDYSFIRYYTRTLYQFQFQEALCQAAKHEGPLHKCDISNSTEAGQKLFNMLRLGKSEPWTLALENVVGAKNMNVRPLLNYFEPLFTWLKDQNKNSFVGWSTDWSPYADTSTSPTRSMAPGAVHLPQPVSTRDKTHTCPPCPAPEAAGGPSVFLFPPKPKDTLMISRTPEVTCVVVDVSHEDPEVKFNWYVDGVEVHNAKTKPREEQYNSTYRVVSVLTVLHQDWLNGKEYKCKVSNKALGAPIEKTISKAKGQPREPQVCTLPPSRDELTKNQVSLSCAVKGFYPSDIAVEWESNGQPENNYKTTPPVLDSDGSFFLVSKLTVDKSRWQQGNVFSCSVMHEALHNRFTQKSLSLSPG

SEQ ID NO: 343 - protein, 848 aa, synthetic construct
  REGION 1..848: note = ACE2-615/202/hole/PGLALA/R273Q/RF
QSTIEEQAKTFLDKFNHEAEDLFYQSSLASWNYNTNITEENVQNMNNAGDKWSAFLKEQSTLAQMYPLQEIQNLTVKLQLQALQQNGSSVLSEDKSKRLNTILNTMSTIYSTGKVCNPDNPQECLLLEPGLNEIMANSLDYNERLWAWESWRSEVGKQLRPLYEEYVVLKNEMARANHYEDYGDYWRGDYEVNGVDGYDYSRGQLIEDVEHTFEEIKPLYEHLHAYVRAKLMNAYPSYISPIGCLPAHLLGDMWGQFWTNLYSLTVPFGQKPNIDVTDAMVDQAWDAQRIFKEAEKFFVSVGLPNMTQGFWENSMLTDPGNVQKAVCHPTAWDLGKGDFRILMCTKVTMDDFLTAHHEMGHIQYDMAYAAQPFLLRNGANEGFHEAVGEIMSLSAATPKHLKSIGLLSPDFQEDNETEINFLLKQALTIVGTLPFTYMLEKWRWMVFKGEIPKDQWMKKWWEMKREIVGVVEPVPHDETYCDPASLFHVSNDYSFIRYYTRTLYQFQFQEALCQAAKHEGPLHKCDISNSTEAGQKLFNMLRLGKSEPWTLALENVVGAKNMNVRPLLNYFEPLFTWLKDQNKNSFVGWSTDWSPYADTSTSPTRSMAPGAVHLPQPVSTRSDKTHTCPPCPAPEAAGGPSVFLFPPKPKDTLMISRTPEVTCVVVDVSHEDPEVKFNWYVDGVEVHNAKTKPREEQYNSTYRVVSVLTVLHQDWLNGKEYKCKVSNKALGAPIEKTISKAKGQPREPQVCTLPPSRDELTKNQVSLSCAVKGFYPSDIAVEWESNGQPENNYKTTPPVLDSDGSFFLVSKLTVDKSRWQQGNVFSCSVMHEALHNRFTQKSLSLSPG

SEQ ID NO: 344 - protein, 854 aa, synthetic construct
  REGION 1..854: note = ACE2-615/208/hole/PGLALA/R273Q/RF
QSTIEEQAKTFLDKFNHEAEDLFYQSSLASWNYNTNITEENVQNMNNAGDKWSAFLKEQSTLAQMYPLQEIQNLTVKLQLQALQQNGSSVLSEDKSKRLNTILNTMSTIYSTGKVCNPDNPQECLLLEPGLNEIMANSLDYNERLWAWESWRSEVGKQLRPLYEEYVVLKNEMARANHYEDYGDYWRGDYEVNGVDGYDYSRGQLIEDVEHTFEEIKPLYEHLHAYVRAKLMNAYPSYISPIGCLPAHLLGDMWGQFWTNLYSLTVPFGQKPNIDVTDAMVDQAWDAQRIFKEAEKFFVSVGLPNMTQGFWENSMLTDPGNVQKAVCHPTAWDLGKGDFRILMCTKVTMDDFLTAHHEMGHIQYDMAYAAQPFLLRNGANEGFHEAVGEIMSLSAATPKHLKSIGLLSPDFQEDNETEINFLLKQALTIVGTLPFTYMLEKWRWMVFKGEIPKDQWMKKWWEMKREIVGVVEPVPHDETYCDPASLFHVSNDYSFIRYYTRTLYQFQFQEALCQAAKHEGPLHKCDISNSTEAGQKLFNMLRLGKSEPWTLALENVVGAKNMNVRPLLNYFEPLFTWLKDQNKNSFVGWSTDWSPYADTSTSPTRSMAPGAVHLPQPVSTRSQHTQPTDKTHTCPPCPAPEAAGGPSVFLFPPKPKDTLMISRTPEVTCVVVDVSHEDPEVKFNWYVDGVEVHNAKTKPREEQYNSTYRVVSVLTVLHQDWLNGKEYKCKVSNKALGAPIEKTISKAKGQPREPQVCTLPPSRDELTKNQVSLSCAVKGFYPSDIAVEWESNGQPENNYKTTPPVLDSDGSFFLVSKLTVDKSRWQQGNVFSCSVMHEALHNRFTQKSLSLSPG

SEQ ID NO: 345 - protein, 858 aa, synthetic construct
  REGION 1..858: note = ACE2-615/212/hole/PGLALA/R273Q/RF
QSTIEEQAKTFLDKFNHEAEDLFYQSSLASWNYNTNITEENVQNMNNAGDKWSAFLKEQSTLAQMYPLQEIQNLTVKLQLQALQQNGSSVLSEDKSKRLNTILNTMSTIYSTGKVCNPDNPQECLLLEPGLNEIMANSLDYNERLWAWESWRSEVGKQLRPLYEEYVVLKNEMARANHYEDYGDYWRGDYEVNGVDGYDYSRGQLIEDVEHTFEEIKPLYEHLHAYVRAKLMNAYPSYISPIGCLPAHLLGDMWGQFWTNLYSLTVPFGQKPNIDVTDAMVDQAWDAQRIFKEAEKFFVSVGLPNMTQGFWENSMLTDPGNVQKAVCHPTAWDLGKGDFRILMCTKVTMDDFLTAHHEMGHIQYDMAYAAQPFLLRNGANEGFHEAVGEIMSLSAATPKHLKSIGLLSPDFQEDNETEINFLLKQALTIVGTLPFTYMLEKWRWMVFKGEIPKDQWMKKWWEMKREIVGVVEPVPHDETYCDPASLFHVSNDYSFIRYYTRTLYQFQFQEALCQAAKHEGPLHKCDISNSTEAGQKLFNMLRLGKSEPWTLALENVVGAKNMNVRPLLNYFEPLFTWLKDQNKNSFVGWSTDWSPYADTSTSPTRSMAPGAVHLPQPVSTRSQHTQPTPEPSDKTHTCPPCPAPEAAGGPSVFLFPPKPKDTLMISRTPEVTCVVVDVSHEDPEVKFNWYVDGVEVHNAKTKPREEQYNSTYRVVSVLTVLHQDWLNGKEYKCKVSNKALGAPIEKTISKAKGQPREPQVCTLPPSRDELTKNQVSLSCAVKGFYPSDIAVEWESNGQPENNYKTTPPVLDSDGSFFLVSKLTVDKSRWQQGNVFSCSVMHEALHNRFTQKSLSLSPG

SEQ ID NO: 346 - protein, 859 aa, synthetic construct
  REGION 1..859: note = ACE2-615/213/hole/PGLALA/R273Q/RF
QSTIEEQAKTFLDKFNHEAEDLFYQSSLASWNYNTNITEENVQNMNNAGDKWSAFLKEQSTLAQMYPLQEIQNLTVKLQLQALQQNGSSVLSEDKSKRLNTILNTMSTIYSTGKVCNPDNPQECLLLEPGLNEIMANSLDYNERLWAWESWRSEVGKQLRPLYEEYVVLKNEMARANHYEDYGDYWRGDYEVNGVDGYDYSRGQLIEDVEHTFEEIKPLYEHLHAYVRAKLMNAYPSYISPIGCLPAHLLGDMWGQFWTNLYSLTVPFGQKPNIDVTDAMVDQAWDAQRIFKEAEKFFVSVGLPNMTQGFWENSMLTDPGNVQKAVCHPTAWDLGKGDFRILMCTKVTMDDFLTAHHEMGHIQYDMAYAAQPFLLRNGANEGFHEAVGEIMSLSAATPKHLKSIGLLSPDFQEDNETEINFLLKQALTIVGTLPFTYMLEKWRWMVFKGEIPKDQWMKKWWEMKREIVGVVEPVPHDETYCDPASLFHVSNDYSFIRYYTRTLYQFQFQEALCQAAKHEGPLHKCDISNSTEAGQKLFNMLRLGKSEPWTLALENVVGAKNMNVRPLLNYFEPLFTWLKDQNKNSFVGWSTDWSPYADTSTSPTRSMAPGAVHLPQPVSTRSQHTQPTPEPSTDKTHTCPPCPAPEAAGGPSVFLFPPKPKDTLMISRTPEVTCVVVDVSHEDPEVKFNWYVDGVEVHNAKTKPREEQYNSTYRVVSVLTVLHQDWLNGKEYKCKVSNKALGAPIEKTISKAKGQPREPQVCTLPPSRDELTKNQVSLSCAVKGFYPSDIAVEWESNGQPENNYKTTPPVLDSDGSFFLVSKLTVDKSRWQQGNVFSCSVMHEALHNRFTQKSLSLSPG

SEQ ID NO: 347 - protein, 862 aa, synthetic construct
  REGION 1..862: note = ACE2-615/216/hole/PGLALA/R273Q/RF
QSTIEEQAKTFLDKFNHEAEDLFYQSSLASWNYNTNITEENVQNMNNAGDKWSAFLKEQSTLAQMYPLQEIQNLTVKLQLQALQQNGSSVLSEDKSKRLNTILNTMSTIYSTGKVCNPDNPQECLLLEPGLNEIMANSLDYNERLWAWESWRSEVGKQLRPLYEEYVVLKNEMARANHYEDYGDYWRGDYEVNGVDGYDYSRGQLIEDVEHTFEEIKPLYEHLHAYVRAKLMNAYPSYISPIGCLPAHLLGDMWGQFWTNLYSLTVPFGQKPNIDVTDAMVDQAWDAQRIFKEAEKFFVSVGLPNMTQGFWENSMLTDPGNVQKAVCHPTAWDLGKGDFRILMCTKVTMDDFLTAHHEMGHIQYDMAYAAQPFLLRNGANEGFHEAVGEIMSLSAATPKHLKSIGLLSPDFQEDNETEINFLLKQALTIVGTLPFTYMLEKWRWMVFKGEIPKDQWMKKWWEMKREIVGVVEPVPHDETYCDPASLFHVSNDYSFIRYYTRTLYQFQFQEALCQAAKHEGPLHKCDISNSTEAGQKLFNMLRLGKSEPWTLALENVVGAKNMNVRPLLNYFEPLFTWLKDQNKNSFVGWSTDWSPYADTSTSPTRSMAPGAVHLPQPVSTRSQHTQPTPEPSTAPSDKTHTCPPCPAPEAAGGPSVFLFPPKPKDTLMISRTPEVTCVVVDVSHEDPEVKFNWYVDGVEVHNAKTKPREEQYNSTYRVVSVLTVLHQDWLNGKEYKCKVSNKALGAPIEKTISKAKGQPREPQVCTLPPSRDELTKNQVSLSCAVKGFYPSDIAVEWESNGQPENNYKTTPPVLDSDGSFFLVSKLTVDKSRWQQGNVFSCSVMHEALHNRFTQKSLSLSPG

SEQ ID NO: 348 - protein, 863 aa, synthetic construct
  REGION 1..863: note = ACE2-615/217/hole/PGLALA/R273Q/RF
QSTIEEQAKTFLDKFNHEAEDLFYQSSLASWNYNTNITEENVQNMNNAGDKWSAFLKEQSTLAQMYPLQEIQNLTVKLQLQALQQNGSSVLSEDKSKRLNTILNTMSTIYSTGKVCNPDNPQECLLLEPGLNEIMANSLDYNERLWAWESWRSEVGKQLRPLYEEYVVLKNEMARANHYEDYGDYWRGDYEVNGVDGYDYSRGQLIEDVEHTFEEIKPLYEHLHAYVRAKLMNAYPSYISPIGCLPAHLLGDMWGQFWTNLYSLTVPFGQKPNIDVTDAMVDQAWDAQRIFKEAEKFFVSVGLPNMTQGFWENSMLTDPGNVQKAVCHPTAWDLGKGDFRILMCTKVTMDDFLTAHHEMGHIQYDMAYAAQPFLLRNGANEGFHEAVGEIMSLSAATPKHLKSIGLLSPDFQEDNETEINFLLKQALTIVGTLPFTYMLEKWRWMVFKGEIPKDQWMKKWWEMKREIVGVVEPVPHDETYCDPASLFHVSNDYSFIRYYTRTLYQFQFQEALCQAAKHEGPLHKCDISNSTEAGQKLFNMLRLGKSEPWTLALENVVGAKNMNVRPLLNYFEPLFTWLKDQNKNSFVGWSTDWSPYADTSTSPTRSMAPGAVHLPQPVSTRSQHTQPTPEPSTAPSTDKTHTCPPCPAPEAAGGPSVFLFPPKPKDTLMISRTPEVTCVVVDVSHEDPEVKFNWYVDGVEVHNAKTKPREEQYNSTYRVVSVLTVLHQDWLNGKEYKCKVSNKALGAPIEKTISKAKGQPREPQVCTLPPSRDELTKNQVSLSCAVKGFYPSDIAVEWESNGQPENNYKTTPPVLDSDGSFFLVSKLTVDKSRWQQGNVFSCSVMHEALHNRFTQKSLSLSPG

SEQ ID NO: 349 - protein, 864 aa, synthetic construct
  REGION 1..864: note = ACE2-615/218/hole/PGLALA/R273Q/RF
QSTIEEQAKTFLDKFNHEAEDLFYQSSLASWNYNTNITEENVQNMNNAGDKWSAFLKEQSTLAQMYPLQEIQNLTVKLQLQALQQNGSSVLSEDKSKRLNTILNTMSTIYSTGKVCNPDNPQECLLLEPGLNEIMANSLDYNERLWAWESWRSEVGKQLRPLYEEYVVLKNEMARANHYEDYGDYWRGDYEVNGVDGYDYSRGQLIEDVEHTFEEIKPLYEHLHAYVRAKLMNAYPSYISPIGCLPAHLLGDMWGQFWTNLYSLTVPFGQKPNIDVTDAMVDQAWDAQRIFKEAEKFFVSVGLPNMTQGFWENSMLTDPGNVQKAVCHPTAWDLGKGDFRILMCTKVTMDDFLTAHHEMGHIQYDMAYAAQPFLLRNGANEGFHEAVGEIMSLSAATPKHLKSIGLLSPDFQEDNETEINFLLKQALTIVGTLPFTYMLEKWRWMVFKGEIPKDQWMKKWWEMKREIVGVVEPVPHDETYCDPASLFHVSNDYSFIRYYTRTLYQFQFQEALCQAAKHEGPLHKCDISNSTEAGQKLFNMLRLGKSEPWTLALENVVGAKNMNVRPLLNYFEPLFTWLKDQNKNSFVGWSTDWSPYADTSTSPTRSMAPGAVHLPQPVSTRSQHTQPTPEPSTAPSTSDKTHTCPPCPAPEAAGGPSVFLFPPKPKDTLMISRTPEVTCVVVDVSHEDPEVKFNWYVDGVEVHNAKTKPREEQYNSTYRVVSVLTVLHQDWLNGKEYKCKVSNKALGAPIEKTISKAKGQPREPQVCTLPPSRDELTKNQVSLSCAVKGFYPSDIAVEWESNGQPENNYKTTPPVLDSDGSFFLVSKLTVDKSRWQQGNVFSCSVMHEALHNRFTQKSLSLSPG

SEQ ID NO: 350 - protein, 870 aa, synthetic construct
  REGION 1..870: note = ACE2-615/224/hole/PGLALA/R273Q/RF
QSTIEEQAKTFLDKFNHEAEDLFYQSSLASWNYNTNITEENVQNMNNAGDKWSAFLKEQSTLAQMYPLQEIQNLTVKLQLQALQQNGSSVLSEDKSKRLNTILNTMSTIYSTGKVCNPDNPQECLLLEPGLNEIMANSLDYNERLWAWESWRSEVGKQLRPLYEEYVVLKNEMARANHYEDYGDYWRGDYEVNGVDGYDYSRGQLIEDVEHTFEEIKPLYEHLHAYVRAKLMNAYPSYISPIGCLPAHLLGDMWGQFWTNLYSLTVPFGQKPNIDVTDAMVDQAWDAQRIFKEAEKFFVSVGLPNMTQGFWENSMLTDPGNVQKAVCHPTAWDLGKGDFRILMCTKVTMDDFLTAHHEMGHIQYDMAYAAQPFLLRNGANEGFHEAVGEIMSLSAATPKHLKSIGLLSPDFQEDNETEINFLLKQALTIVGTLPFTYMLEKWRWMVFKGEIPKDQWMKKWWEMKREIVGVVEPVPHDETYCDPASLFHVSNDYSFIRYYTRTLYQFQFQEALCQAAKHEGPLHKCDISNSTEAGQKLFNMLRLGKSEPWTLALENVVGAKNMNVRPLLNYFEPLFTWLKDQNKNSFVGWSTDWSPYADTSTSPTRSMAPGAVHLPQPVSTRSQHTQPTPEPSTAPSTSFLLPMGDKTHTCPPCPAPEAAGGPSVFLFPPKPKDTLMISRTPEVTCVVVDVSHEDPEVKFNWYVDGVEVHNAKTKPREEQYNSTYRVVSVLTVLHQDWLNGKEYKCKVSNKALGAPIEKTISKAKGQPREPQVCTLPPSRDELTKNQVSLSCAVKGFYPSDIAVEWESNGQPENNYKTTPPVLDSDGSFFLVSKLTVDKSRWQQGNVFSCSVMHEALHNRFTQKSLSLSPG

SEQ ID NO: 351 - protein, 881 aa, synthetic construct
  REGION 1..881: note = ACE2-615/235/hole/PGLALA/R273Q/RF
QSTIEEQAKTFLDKFNHEAEDLFYQSSLASWNYNTNITEENVQNMNNAGDKWSAFLKEQSTLAQMYPLQEIQNLTVKLQLQALQQNGSSVLSEDKSKRLNTILNTMSTIYSTGKVCNPDNPQECLLLEPGLNEIMANSLDYNERLWAWESWRSEVGKQLRPLYEEYVVLKNEMARANHYEDYGDYWRGDYEVNGVDGYDYSRGQLIEDVEHTFEEIKPLYEHLHAYVRAKLMNAYPSYISPIGCLPAHLLGDMWGQFWTNLYSLTVPFGQKPNIDVTDAMVDQAWDAQRIFKEAEKFFVSVGLPNMTQGFWENSMLTDPGNVQKAVCHPTAWDLGKGDFRILMCTKVTMDDFLTAHHEMGHIQYDMAYAAQPFLLRNGANEGFHEAVGEIMSLSAATPKHLKSIGLLSPDFQEDNETEINFLLKQALTIVGTLPFTYMLEKWRWMVFKGEIPKDQWMKKWWEMKREIVGVVEPVPHDETYCDPASLFHVSNDYSFIRYYTRTLYQFQFQEALCQAAKHEGPLHKCDISNSTEAGQKLFNMLRLGKSEPWTLALENVVGAKNMNVRPLLNYFEPLFTWLKDQNKNSFVGWSTDWSPYADTSTSPTRSMAPGAVHLPQPVSTRSQHTQPTPEPSTAPSTSFLLPMGPSPPAEGSTGDDKTHTCPPCPAPEAAGGPSVFLFPPKPKDTLMISRTPEVTCVVVDVSHEDPEVKFNWYVDGVEVHNAKTKPREEQYNSTYRVVSVLTVLHQDWLNGKEYKCKVSNKALGAPIEKTISKAKGQPREPQVCTLPPSRDELTKNQVSLSCAVKGFYPSDIAVEWESNGQPENNYKTTPPVLDSDGSFFLVSKLTVDKSRWQQGNVFSCSVMHEALHNRFTQKSLSLSPG

SEQ ID NO: 352 - protein, 972 aa, synthetic construct
  REGION 1..972: note = ACE2-740/201/hole/PGLALA/R273Q/RF
QSTIEEQAKTFLDKFNHEAEDLFYQSSLASWNYNTNITEENVQNMNNAGDKWSAFLKEQSTLAQMYPLQEIQNLTVKLQLQALQQNGSSVLSEDKSKRLNTILNTMSTIYSTGKVCNPDNPQECLLLEPGLNEIMANSLDYNERLWAWESWRSEVGKQLRPLYEEYVVLKNEMARANHYEDYGDYWRGDYEVNGVDGYDYSRGQLIEDVEHTFEEIKPLYEHLHAYVRAKLMNAYPSYISPIGCLPAHLLGDMWGQFWTNLYSLTVPFGQKPNIDVTDAMVDQAWDAQRIFKEAEKFFVSVGLPNMTQGFWENSMLTDPGNVQKAVCHPTAWDLGKGDFRILMCTKVTMDDFLTAHHEMGHIQYDMAYAAQPFLLRNGANEGFHEAVGEIMSLSAATPKHLKSIGLLSPDFQEDNETEINFLLKQALTIVGTLPFTYMLEKWRWMVFKGEIPKDQWMKKWWEMKREIVGVVEPVPHDETYCDPASLFHVSNDYSFIRYYTRTLYQFQFQEALCQAAKHEGPLHKCDISNSTEAGQKLFNMLRLGKSEPWTLALENVVGAKNMNVRPLLNYFEPLFTWLKDQNKNSFVGWSTDWSPYADQSIKVRISLKSALGDKAYEWNDNEMYLFRSSVAYAMRQYFLKVKNQMILFGEEDVRVANLKPRISFNFFVTAPKNVSDIIPRTEVEKAIRMSRSRINDAFRLNDNSLEFLGIQPTLGPPNQPPVSTSTSPTRSMAPGAVHLPQPVSTRDKTHTCPPCPAPEAAGGPSVFLFPPKPKDTLMISRTPEVTCVVVDVSHEDPEVKFNWYVDGVEVHNAKTKPREEQYNSTYRVVSVLTVLHQDWLNGKEYKCKVSNKALGAPIEKTISKAKGQPREPQVCTLPPSRDELTKNQVSLSCAVKGFYPSDIAVEWESNGQPENNYKTTPPVLDSDGSFFLVSKLTVDKSRWQQGNVFSCSVMHEALHNRFTQKSLSLSPG

SEQ ID NO: 353 - protein, 847 aa, synthetic construct
  REGION 1..847: note = ACE2-615/201/knob/PGLALA/R273Q
QSTIEEQAKTFLDKFNHEAEDLFYQSSLASWNYNTNITEENVQNMNNAGDKWSAFLKEQSTLAQMYPLQEIQNLTVKLQLQALQQNGSSVLSEDKSKRLNTILNTMSTIYSTGKVCNPDNPQECLLLEPGLNEIMANSLDYNERLWAWESWRSEVGKQLRPLYEEYVVLKNEMARANHYEDYGDYWRGDYEVNGVDGYDYSRGQLIEDVEHTFEEIKPLYEHLHAYVRAKLMNAYPSYISPIGCLPAHLLGDMWGQFWTNLYSLTVPFGQKPNIDVTDAMVDQAWDAQRIFKEAEKFFVSVGLPNMTQGFWENSMLTDPGNVQKAVCHPTAWDLGKGDFRILMCTKVTMDDFLTAHHEMGHIQYDMAYAAQPFLLRNGANEGFHEAVGEIMSLSAATPKHLKSIGLLSPDFQEDNETEINFLLKQALTIVGTLPFTYMLEKWRWMVFKGEIPKDQWMKKWWEMKREIVGVVEPVPHDETYCDPASLFHVSNDYSFIRYYTRTLYQFQFQEALCQAAKHEGPLHKCDISNSTEAGQKLFNMLRLGKSEPWTLALENVVGAKNMNVRPLLNYFEPLFTWLKDQNKNSFVGWSTDWSPYADTSTSPTRSMAPGAVHLPQPVSTRDKTHTCPPCPAPEAAGGPSVFLFPPKPKDTLMISRTPEVTCVVVDVSHEDPEVKFNWYVDGVEVHNAKTKPREEQYNSTYRVVSVLTVLHQDWLNGKEYKCKVSNKALGAPIEKTISKAKGQPREPQVYTLPPCRDELTKNQVSLWCLVKGFYPSDIAVEWESNGQPENNYKTTPPVLDSDGSFFLYSKLTVDKSRWQQGNVFSCSVMHEALHNHYTQKSLSLSPG

SEQ ID NO: 354 - protein, 972 aa, synthetic construct
  REGION 1..972: note = ACE2-740/201/knob/PGLALA
QSTIEEQAKTFLDKFNHEAEDLFYQSSLASWNYNTNITEENVQNMNNAGDKWSAFLKEQSTLAQMYPLQEIQNLTVKLQLQALQQNGSSVLSEDKSKRLNTILNTMSTIYSTGKVCNPDNPQECLLLEPGLNEIMANSLDYNERLWAWESWRSEVGKQLRPLYEEYVVLKNEMARANHYEDYGDYWRGDYEVNGVDGYDYSRGQLIEDVEHTFEEIKPLYEHLHAYVRAKLMNAYPSYISPIGCLPAHLLGDMWGRFWTNLYSLTVPFGQKPNIDVTDAMVDQAWDAQRIFKEAEKFFVSVGLPNMTQGFWENSMLTDPGNVQKAVCHPTAWDLGKGDFRILMCTKVTMDDFLTAHHEMGHIQYDMAYAAQPFLLRNGANEGFHEAVGEIMSLSAATPKHLKSIGLLSPDFQEDNETEINFLLKQALTIVGTLPFTYMLEKWRWMVFKGEIPKDQWMKKWWEMKREIVGVVEPVPHDETYCDPASLFHVSNDYSFIRYYTRTLYQFQFQEALCQAAKHEGPLHKCDISNSTEAGQKLFNMLRLGKSEPWTLALENVVGAKNMNVRPLLNYFEPLFTWLKDQNKNSFVGWSTDWSPYADQSIKVRISLKSALGDKAYEWNDNEMYLFRSSVAYAMRQYFLKVKNQMILFGEEDVRVANLKPRISFNFFVTAPKNVSDIIPRTEVEKAIRMSRSRINDAFRLNDNSLEFLGIQPTLGPPNQPPVSTSTSPTRSMAPGAVHLPQPVSTRDKTHTCPPCPAPEAAGGPSVFLFPPKPKDTLMISRTPEVTCVVVDVSHEDPEVKFNWYVDGVEVHNAKTKPREEQYNSTYRVVSVLTVLHQDWLNGKEYKCKVSNKALGAPIEKTISKAKGQPREPQVYTLPPCRDELTKNQVSLWCLVKGFYPSDIAVEWESNGQPENNYKTTPPVLDSDGSFFLYSKLTVDKSRWQQGNVFSCSVMHEALHNHYTQKSLSLSPG

SEQ ID NO: 355 - protein, 972 aa, synthetic construct
  REGION 1..972: note = ACE2-740/201/knob/PGLALA/R273A
QSTIEEQAKTFLDKFNHEAEDLFYQSSLASWNYNTNITEENVQNMNNAGDKWSAFLKEQSTLAQMYPLQEIQNLTVKLQLQALQQNGSSVLSEDKSKRLNTILNTMSTIYSTGKVCNPDNPQECLLLEPGLNEIMANSLDYNERLWAWESWRSEVGKQLRPLYEEYVVLKNEMARANHYEDYGDYWRGDYEVNGVDGYDYSRGQLIEDVEHTFEEIKPLYEHLHAYVRAKLMNAYPSYISPIGCLPAHLLGDMWGAFWTNLYSLTVPFGQKPNIDVTDAMVDQAWDAQRIFKEAEKFFVSVGLPNMTQGFWENSMLTDPGNVQKAVCHPTAWDLGKGDFRILMCTKVTMDDFLTAHHEMGHIQYDMAYAAQPFLLRNGANEGFHEAVGEIMSLSAATPKHLKSIGLLSPDFQEDNETEINFLLKQALTIVGTLPFTYMLEKWRWMVFKGEIPKDQWMKKWWEMKREIVGVVEPVPHDETYCDPASLFHVSNDYSFIRYYTRTLYQFQFQEALCQAAKHEGPLHKCDISNSTEAGQKLFNMLRLGKSEPWTLALENVVGAKNMNVRPLLNYFEPLFTWLKDQNKNSFVGWSTDWSPYADQSIKVRISLKSALGDKAYEWNDNEMYLFRSSVAYAMRQYFLKVKNQMILFGEEDVRVANLKPRISFNFFVTAPKNVSDIIPRTEVEKAIRMSRSRINDAFRLNDNSLEFLGIQPTLGPPNQPPVSTSTSPTRSMAPGAVHLPQPVSTRDKTHTCPPCPAPEAAGGPSVFLFPPKPKDTLMISRTPEVTCVVVDVSHEDPEVKFNWYVDGVEVHNAKTKPREEQYNSTYRVVSVLTVLHQDWLNGKEYKCKVSNKALGAPIEKTISKAKGQPREPQVYTLPPCRDELTKNQVSLWCLVKGFYPSDIAVEWESNGQPENNYKTTPPVLDSDGSFFLYSKLTVDKSRWQQGNVFSCSVMHEALHNHYTQKSLSLSPG

SEQ ID NO: 356 - protein, 972 aa, synthetic construct
  REGION 1..972: note = ACE2-740/201/knob/PGLALA/R273G
QSTIEEQAKTFLDKFNHEAEDLFYQSSLASWNYNTNITEENVQNMNNAGDKWSAFLKEQSTLAQMYPLQEIQNLTVKLQLQALQQNGSSVLSEDKSKRLNTILNTMSTIYSTGKVCNPDNPQECLLLEPGLNEIMANSLDYNERLWAWESWRSEVGKQLRPLYEEYVVLKNEMARANHYEDYGDYWRGDYEVNGVDGYDYSRGQLIEDVEHTFEEIKPLYEHLHAYVRAKLMNAYPSYISPIGCLPAHLLGDMWGGFWTNLYSLTVPFGQKPNIDVTDAMVDQAWDAQRIFKEAEKFFVSVGLPNMTQGFWENSMLTDPGNVQKAVCHPTAWDLGKGDFRILMCTKVTMDDFLTAHHEMGHIQYDMAYAAQPFLLRNGANEGFHEAVGEIMSLSAATPKHLKSIGLLSPDFQEDNETEINFLLKQALTIVGTLPFTYMLEKWRWMVFKGEIPKDQWMKKWWEMKREIVGVVEPVPHDETYCDPASLFHVSNDYSFIRYYTRTLYQFQFQEALCQAAKHEGPLHKCDISNSTEAGQKLFNMLRLGKSEPWTLALENVVGAKNMNVRPLLNYFEPLFTWLKDQNKNSFVGWSTDWSPYADQSIKVRISLKSALGDKAYEWNDNEMYLFRSSVAYAMRQYFLKVKNQMILFGEEDVRVANLKPRISFNFFVTAPKNVSDIIPRTEVEKAIRMSRSRINDAFRLNDNSLEFLGIQPTLGPPNQPPVSTSTSPTRSMAPGAVHLPQPVSTRDKTHTCPPCPAPEAAGGPSVFLFPPKPKDTLMISRTPEVTCVVVDVSHEDPEVKFNWYVDGVEVHNAKTKPREEQYNSTYRVVSVLTVLHQDWLNGKEYKCKVSNKALGAPIEKTISKAKGQPREPQVYTLPPCRDELTKNQVSLWCLVKGFYPSDIAVEWESNGQPENNYKTTPPVLDSDGSFFLYSKLTVDKSRWQQGNVFSCSVMHEALHNHYTQKSLSLSPG

SEQ ID NO: 357 - protein, 972 aa, synthetic construct
  REGION 1..972: note = ACE2-740/201/knob/PGLALA/R273V
QSTIEEQAKTFLDKFNHEAEDLFYQSSLASWNYNTNITEENVQNMNNAGDKWSAFLKEQSTLAQMYPLQEIQNLTVKLQLQALQQNGSSVLSEDKSKRLNTILNTMSTIYSTGKVCNPDNPQECLLLEPGLNEIMANSLDYNERLWAWESWRSEVGKQLRPLYEEYVVLKNEMARANHYEDYGDYWRGDYEVNGVDGYDYSRGQLIEDVEHTFEEIKPLYEHLHAYVRAKLMNAYPSYISPIGCLPAHLLGDMWGVFWTNLYSLTVPFGQKPNIDVTDAMVDQAWDAQRIFKEAEKFFVSVGLPNMTQGFWENSMLTDPGNVQKAVCHPTAWDLGKGDFRILMCTKVTMDDFLTAHHEMGHIQYDMAYAAQPFLLRNGANEGFHEAVGEIMSLSAATPKHLKSIGLLSPDFQEDNETEINFLLKQALTIVGTLPFTYMLEKWRWMVFKGEIPKDQWMKKWWEMKREIVGVVEPVPHDETYCDPASLFHVSNDYSFIRYYTRTLYQFQFQEALCQAAKHEGPLHKCDISNSTEAGQKLFNMLRLGKSEPWTLALENVVGAKNMNVRPLLNYFEPLFTWLKDQNKNSFVGWSTDWSPYADQSIKVRISLKSALGDKAYEWNDNEMYLFRSSVAYAMRQYFLKVKNQMILFGEEDVRVANLKPRISFNFFVTAPKNVSDIIPRTEVEKAIRMSRSRINDAFRLNDNSLEFLGIQPTLGPPNQPPVSTSTSPTRSMAPGAVHLPQPVSTRDKTHTCPPCPAPEAAGGPSVFLFPPKPKDTLMISRTPEVTCVVVDVSHEDPEVKFNWYVDGVEVHNAKTKPREEQYNSTYRVVSVLTVLHQDWLNGKEYKCKVSNKALGAPIEKTISKAKGQPREPQVYTLPPCRDELTKNQVSLWCLVKGFYPSDIAVEWESNGQPENNYKTTPPVLDSDGSFFLYSKLTVDKSRWQQGNVFSCSVMHEALHNHYTQKSLSLSPG

SEQ ID NO: 358 - protein, 972 aa, synthetic construct
  REGION 1..972: note = ACE2-740/201/knob/PGLALA/H378A
QSTIEEQAKTFLDKFNHEAEDLFYQSSLASWNYNTNITEENVQNMNNAGDKWSAFLKEQSTLAQMYPLQEIQNLTVKLQLQALQQNGSSVLSEDKSKRLNTILNTMSTIYSTGKVCNPDNPQECLLLEPGLNEIMANSLDYNERLWAWESWRSEVGKQLRPLYEEYVVLKNEMARANHYEDYGDYWRGDYEVNGVDGYDYSRGQLIEDVEHTFEEIKPLYEHLHAYVRAKLMNAYPSYISPIGCLPAHLLGDMWGRFWTNLYSLTVPFGQKPNIDVTDAMVDQAWDAQRIFKEAEKFFVSVGLPNMTQGFWENSMLTDPGNVQKAVCHPTAWDLGKGDFRILMCTKVTMDDFLTAHHEMGAIQYDMAYAAQPFLLRNGANEGFHEAVGEIMSLSAATPKHLKSIGLLSPDFQEDNETEINFLLKQALTIVGTLPFTYMLEKWRWMVFKGEIPKDQWMKKWWEMKREIVGVVEPVPHDETYCDPASLFHVSNDYSFIRYYTRTLYQFQFQEALCQAAKHEGPLHKCDISNSTEAGQKLFNMLRLGKSEPWTLALENVVGAKNMNVRPLLNYFEPLFTWLKDQNKNSFVGWSTDWSPYADQSIKVRISLKSALGDKAYEWNDNEMYLFRSSVAYAMRQYFLKVKNQMILFGEEDVRVANLKPRISFNFFVTAPKNVSDIIPRTEVEKAIRMSRSRINDAFRLNDNSLEFLGIQPTLGPPNQPPVSTSTSPTRSMAPGAVHLPQPVSTRDKTHTCPPCPAPEAAGGPSVFLFPPKPKDTLMISRTPEVTCVVVDVSHEDPEVKFNWYVDGVEVHNAKTKPREEQYNSTYRVVSVLTVLHQDWLNGKEYKCKVSNKALGAPIEKTISKAKGQPREPQVYTLPPCRDELTKNQVSLWCLVKGFYPSDIAVEWESNGQPENNYKTTPPVLDSDGSFFLYSKLTVDKSRWQQGNVFSCSVMHEALHNHYTQKSLSLSPG

SEQ ID NO: 359 - protein, 972 aa, synthetic construct
  REGION 1..972: note = ACE2-740/201/knob/PGLALA/E402A
QSTIEEQAKTFLDKFNHEAEDLFYQSSLASWNYNTNITEENVQNMNNAGDKWSAFLKEQSTLAQMYPLQEIQNLTVKLQLQALQQNGSSVLSEDKSKRLNTILNTMSTIYSTGKVCNPDNPQECLLLEPGLNEIMANSLDYNERLWAWESWRSEVGKQLRPLYEEYVVLKNEMARANHYEDYGDYWRGDYEVNGVDGYDYSRGQLIEDVEHTFEEIKPLYEHLHAYVRAKLMNAYPSYISPIGCLPAHLLGDMWGRFWTNLYSLTVPFGQKPNIDVTDAMVDQAWDAQRIFKEAEKFFVSVGLPNMTQGFWENSMLTDPGNVQKAVCHPTAWDLGKGDFRILMCTKVTMDDFLTAHHEMGHIQYDMAYAAQPFLLRNGANEGFHAAVGEIMSLSAATPKHLKSIGLLSPDFQEDNETEINFLLKQALTIVGTLPFTYMLEKWRWMVFKGEIPKDQWMKKWWEMKREIVGVVEPVPHDETYCDPASLFHVSNDYSFIRYYTRTLYQFQFQEALCQAAKHEGPLHKCDISNSTEAGQKLFNMLRLGKSEPWTLALENVVGAKNMNVRPLLNYFEPLFTWLKDQNKNSFVGWSTDWSPYADQSIKVRISLKSALGDKAYEWNDNEMYLFRSSVAYAMRQYFLKVKNQMILFGEEDVRVANLKPRISFNFFVTAPKNVSDIIPRTEVEKAIRMSRSRINDAFRLNDNSLEFLGIQPTLGPPNQPPVSTSTSPTRSMAPGAVHLPQPVSTRDKTHTCPPCPAPEAAGGPSVFLFPPKPKDTLMISRTPEVTCVVVDVSHEDPEVKFNWYVDGVEVHNAKTKPREEQYNSTYRVVSVLTVLHQDWLNGKEYKCKVSNKALGAPIEKTISKAKGQPREPQVYTLPPCRDELTKNQVSLWCLVKGFYPSDIAVEWESNGQPENNYKTTPPVLDSDGSFFLYSKLTVDKSRWQQGNVFSCSVMHEALHNHYTQKSLSLSPG

SEQ ID NO: 360 - protein, 979 aa, synthetic construct
  REGION 1..979: note = ACE2-740/208/knob/PGLALA
QSTIEEQAKTFLDKFNHEAEDLFYQSSLASWNYNTNITEENVQNMNNAGDKWSAFLKEQSTLAQMYPLQEIQNLTVKLQLQALQQNGSSVLSEDKSKRLNTILNTMSTIYSTGKVCNPDNPQECLLLEPGLNEIMANSLDYNERLWAWESWRSEVGKQLRPLYEEYVVLKNEMARANHYEDYGDYWRGDYEVNGVDGYDYSRGQLIEDVEHTFEEIKPLYEHLHAYVRAKLMNAYPSYISPIGCLPAHLLGDMWGRFWTNLYSLTVPFGQKPNIDVTDAMVDQAWDAQRIFKEAEKFFVSVGLPNMTQGFWENSMLTDPGNVQKAVCHPTAWDLGKGDFRILMCTKVTMDDFLTAHHEMGHIQYDMAYAAQPFLLRNGANEGFHEAVGEIMSLSAATPKHLKSIGLLSPDFQEDNETEINFLLKQALTIVGTLPFTYMLEKWRWMVFKGEIPKDQWMKKWWEMKREIVGVVEPVPHDETYCDPASLFHVSNDYSFIRYYTRTLYQFQFQEALCQAAKHEGPLHKCDISNSTEAGQKLFNMLRLGKSEPWTLALENVVGAKNMNVRPLLNYFEPLFTWLKDQNKNSFVGWSTDWSPYADQSIKVRISLKSALGDKAYEWNDNEMYLFRSSVAYAMRQYFLKVKNQMILFGEEDVRVANLKPRISFNFFVTAPKNVSDIIPRTEVEKAIRMSRSRINDAFRLNDNSLEFLGIQPTLGPPNQPPVSTSTSPTRSMAPGAVHLPQPVSTRSQHTQPTDKTHTCPPCPAPEAAGGPSVFLFPPKPKDTLMISRTPEVTCVVVDVSHEDPEVKFNWYVDGVEVHNAKTKPREEQYNSTYRVVSVLTVLHQDWLNGKEYKCKVSNKALGAPIEKTISKAKGQPREPQVYTLPPCRDELTKNQVSLWCLVKGFYPSDIAVEWESNGQPENNYKTTPPVLDSDGSFFLYSKLTVDKSRWQQGNVFSCSVMHEALHNHYTQKSLSLSPG

SEQ ID NO: 361 - protein, 979 aa, synthetic construct
  REGION 1..979: note = ACE2-740/208/knob/PGLALA/R273A
QSTIEEQAKTFLDKFNHEAEDLFYQSSLASWNYNTNITEENVQNMNNAGDKWSAFLKEQSTLAQMYPLQEIQNLTVKLQLQALQQNGSSVLSEDKSKRLNTILNTMSTIYSTGKVCNPDNPQECLLLEPGLNEIMANSLDYNERLWAWESWRSEVGKQLRPLYEEYVVLKNEMARANHYEDYGDYWRGDYEVNGVDGYDYSRGQLIEDVEHTFEEIKPLYEHLHAYVRAKLMNAYPSYISPIGCLPAHLLGDMWGAFWTNLYSLTVPFGQKPNIDVTDAMVDQAWDAQRIFKEAEKFFVSVGLPNMTQGFWENSMLTDPGNVQKAVCHPTAWDLGKGDFRILMCTKVTMDDFLTAHHEMGHIQYDMAYAAQPFLLRNGANEGFHEAVGEIMSLSAATPKHLKSIGLLSPDFQEDNETEINFLLKQALTIVGTLPFTYMLEKWRWMVFKGEIPKDQWMKKWWEMKREIVGVVEPVPHDETYCDPASLFHVSNDYSFIRYYTRTLYQFQFQEALCQAAKHEGPLHKCDISNSTEAGQKLFNMLRLGKSEPWTLALENVVGAKNMNVRPLLNYFEPLFTWLKDQNKNSFVGWSTDWSPYADQSIKVRISLKSALGDKAYEWNDNEMYLFRSSVAYAMRQYFLKVKNQMILFGEEDVRVANLKPRISFNFFVTAPKNVSDIIPRTEVEKAIRMSRSRINDAFRLNDNSLEFLGIQPTLGPPNQPPVSTSTSPTRSMAPGAVHLPQPVSTRSQHTQPTDKTHTCPPCPAPEAAGGPSVFLFPPKPKDTLMISRTPEVTCVVVDVSHEDPEVKFNWYVDGVEVHNAKTKPREEQYNSTYRVVSVLTVLHQDWLNGKEYKCKVSNKALGAPIEKTISKAKGQPREPQVYTLPPCRDELTKNQVSLWCLVKGFYPSDIAVEWESNGQPENNYKTTPPVLDSDGSFFLYSKLTVDKSRWQQGNVFSCSVMHEALHNHYTQKSLSLSPG

SEQ ID NO: 362 - protein, 979 aa, synthetic construct
  REGION 1..979: note = ACE2-740/208/knob/PGLALA/R273G
QSTIEEQAKTFLDKFNHEAEDLFYQSSLASWNYNTNITEENVQNMNNAGDKWSAFLKEQSTLAQMYPLQEIQNLTVKLQLQALQQNGSSVLSEDKSKRLNTILNTMSTIYSTGKVCNPDNPQECLLLEPGLNEIMANSLDYNERLWAWESWRSEVGKQLRPLYEEYVVLKNEMARANHYEDYGDYWRGDYEVNGVDGYDYSRGQLIEDVEHTFEEIKPLYEHLHAYVRAKLMNAYPSYISPIGCLPAHLLGDMWGGFWTNLYSLTVPFGQKPNIDVTDAMVDQAWDAQRIFKEAEKFFVSVGLPNMTQGFWENSMLTDPGNVQKAVCHPTAWDLGKGDFRILMCTKVTMDDFLTAHHEMGHIQYDMAYAAQPFLLRNGANEGFHEAVGEIMSLSAATPKHLKSIGLLSPDFQEDNETEINFLLKQALTIVGTLPFTYMLEKWRWMVFKGEIPKDQWMKKWWEMKREIVGVVEPVPHDETYCDPASLFHVSNDYSFIRYYTRTLYQFQFQEALCQAAKHEGPLHKCDISNSTEAGQKLFNMLRLGKSEPWTLALENVVGAKNMNVRPLLNYFEPLFTWLKDQNKNSFVGWSTDWSPYADQSIKVRISLKSALGDKAYEWNDNEMYLFRSSVAYAMRQYFLKVKNQMILFGEEDVRVANLKPRISFNFFVTAPKNVSDIIPRTEVEKAIRMSRSRINDAFRLNDNSLEFLGIQPTLGPPNQPPVSTSTSPTRSMAPGAVHLPQPVSTRSQHTQPTDKTHTCPPCPAPEAAGGPSVFLFPPKPKDTLMISRTPEVTCVVVDVSHEDPEVKFNWYVDGVEVHNAKTKPREEQYNSTYRVVSVLTVLHQDWLNGKEYKCKVSNKALGAPIEKTISKAKGQPREPQVYTLPPCRDELTKNQVSLWCLVKGFYPSDIAVEWESNGQPENNYKTTPPVLDSDGSFFLYSKLTVDKSRWQQGNVFSCSVMHEALHNHYTQKSLSLSPG

SEQ ID NO: 363 - protein, 979 aa, synthetic construct
  REGION 1..979: note = ACE2-740/208/knob/PGLALA/R273V
QSTIEEQAKTFLDKFNHEAEDLFYQSSLASWNYNTNITEENVQNMNNAGDKWSAFLKEQSTLAQMYPLQEIQNLTVKLQLQALQQNGSSVLSEDKSKRLNTILNTMSTIYSTGKVCNPDNPQECLLLEPGLNEIMANSLDYNERLWAWESWRSEVGKQLRPLYEEYVVLKNEMARANHYEDYGDYWRGDYEVNGVDGYDYSRGQLIEDVEHTFEEIKPLYEHLHAYVRAKLMNAYPSYISPIGCLPAHLLGDMWGVFWTNLYSLTVPFGQKPNIDVTDAMVDQAWDAQRIFKEAEKFFVSVGLPNMTQGFWENSMLTDPGNVQKAVCHPTAWDLGKGDFRILMCTKVTMDDFLTAHHEMGHIQYDMAYAAQPFLLRNGANEGFHEAVGEIMSLSAATPKHLKSIGLLSPDFQEDNETEINFLLKQALTIVGTLPFTYMLEKWRWMVFKGEIPKDQWMKKWWEMKREIVGVVEPVPHDETYCDPASLFHVSNDYSFIRYYTRTLYQFQFQEALCQAAKHEGPLHKCDISNSTEAGQKLFNMLRLGKSEPWTLALENVVGAKNMNVRPLLNYFEPLFTWLKDQNKNSFVGWSTDWSPYADQSIKVRISLKSALGDKAYEWNDNEMYLFRSSVAYAMRQYFLKVKNQMILFGEEDVRVANLKPRISFNFFVTAPKNVSDIIPRTEVEKAIRMSRSRINDAFRLNDNSLEFLGIQPTLGPPNQPPVSTSTSPTRSMAPGAVHLPQPVSTRSQHTQPTDKTHTCPPCPAPEAAGGPSVFLFPPKPKDTLMISRTPEVTCVVVDVSHEDPEVKFNWYVDGVEVHNAKTKPREEQYNSTYRVVSVLTVLHQDWLNGKEYKCKVSNKALGAPIEKTISKAKGQPREPQVYTLPPCRDELTKNQVSLWCLVKGFYPSDIAVEWESNGQPENNYKTTPPVLDSDGSFFLYSKLTVDKSRWQQGNVFSCSVMHEALHNHYTQKSLSLSPG

SEQ ID NO: 364 - protein, 979 aa, synthetic construct
  REGION 1..979: note = ACE2-740/208/knob/PGLALA/H378A
QSTIEEQAKTFLDKFNHEAEDLFYQSSLASWNYNTNITEENVQNMNNAGDKWSAFLKEQSTLAQMYPLQEIQNLTVKLQLQALQQNGSSVLSEDKSKRLNTILNTMSTIYSTGKVCNPDNPQECLLLEPGLNEIMANSLDYNERLWAWESWRSEVGKQLRPLYEEYVVLKNEMARANHYEDYGDYWRGDYEVNGVDGYDYSRGQLIEDVEHTFEEIKPLYEHLHAYVRAKLMNAYPSYISPIGCLPAHLLGDMWGRFWTNLYSLTVPFGQKPNIDVTDAMVDQAWDAQRIFKEAEKFFVSVGLPNMTQGFWENSMLTDPGNVQKAVCHPTAWDLGKGDFRILMCTKVTMDDFLTAHHEMGAIQYDMAYAAQPFLLRNGANEGFHEAVGEIMSLSAATPKHLKSIGLLSPDFQEDNETEINFLLKQALTIVGTLPFTYMLEKWRWMVFKGEIPKDQWMKKWWEMKREIVGVVEPVPHDETYCDPASLFHVSNDYSFIRYYTRTLYQFQFQEALCQAAKHEGPLHKCDISNSTEAGQKLFNMLRLGKSEPWTLALENVVGAKNMNVRPLLNYFEPLFTWLKDQNKNSFVGWSTDWSPYADQSIKVRISLKSALGDKAYEWNDNEMYLFRSSVAYAMRQYFLKVKNQMILFGEEDVRVANLKPRISFNFFVTAPKNVSDIIPRTEVEKAIRMSRSRINDAFRLNDNSLEFLGIQPTLGPPNQPPVSTSTSPTRSMAPGAVHLPQPVSTRSQHTQPTDKTHTCPPCPAPEAAGGPSVFLFPPKPKDTLMISRTPEVTCVVVDVSHEDPEVKFNWYVDGVEVHNAKTKPREEQYNSTYRVVSVLTVLHQDWLNGKEYKCKVSNKALGAPIEKTISKAKGQPREPQVYTLPPCRDELTKNQVSLWCLVKGFYPSDIAVEWESNGQPENNYKTTPPVLDSDGSFFLYSKLTVDKSRWQQGNVFSCSVMHEALHNHYTQKSLSLSPG

SEQ ID NO: 365 - protein, 979 aa, synthetic construct
  REGION 1..979: note = ACE2-740/208/knob/PGLALA/E402A
QSTIEEQAKTFLDKFNHEAEDLFYQSSLASWNYNTNITEENVQNMNNAGDKWSAFLKEQSTLAQMYPLQEIQNLTVKLQLQALQQNGSSVLSEDKSKRLNTILNTMSTIYSTGKVCNPDNPQECLLLEPGLNEIMANSLDYNERLWAWESWRSEVGKQLRPLYEEYVVLKNEMARANHYEDYGDYWRGDYEVNGVDGYDYSRGQLIEDVEHTFEEIKPLYEHLHAYVRAKLMNAYPSYISPIGCLPAHLLGDMWGRFWTNLYSLTVPFGQKPNIDVTDAMVDQAWDAQRIFKEAEKFFVSVGLPNMTQGFWENSMLTDPGNVQKAVCHPTAWDLGKGDFRILMCTKVTMDDFLTAHHEMGHIQYDMAYAAQPFLLRNGANEGFHAAVGEIMSLSAATPKHLKSIGLLSPDFQEDNETEINFLLKQALTIVGTLPFTYMLEKWRWMVFKGEIPKDQWMKKWWEMKREIVGVVEPVPHDETYCDPASLFHVSNDYSFIRYYTRTLYQFQFQEALCQAAKHEGPLHKCDISNSTEAGQKLFNMLRLGKSEPWTLALENVVGAKNMNVRPLLNYFEPLFTWLKDQNKNSFVGWSTDWSPYADQSIKVRISLKSALGDKAYEWNDNEMYLFRSSVAYAMRQYFLKVKNQMILFGEEDVRVANLKPRISFNFFVTAPKNVSDIIPRTEVEKAIRMSRSRINDAFRLNDNSLEFLGIQPTLGPPNQPPVSTSTSPTRSMAPGAVHLPQPVSTRSQHTQPTDKTHTCPPCPAPEAAGGPSVFLFPPKPKDTLMISRTPEVTCVVVDVSHEDPEVKFNWYVDGVEVHNAKTKPREEQYNSTYRVVSVLTVLHQDWLNGKEYKCKVSNKALGAPIEKTISKAKGQPREPQVYTLPPCRDELTKNQVSLWCLVKGFYPSDIAVEWESNGQPENNYKTTPPVLDSDGSFFLYSKLTVDKSRWQQGNVFSCSVMHEALHNHYTQKSLSLSPG

SEQ ID NO: 366 - protein, 847 aa, synthetic construct
  REGION 1..847: note = ACE2-615/201/hole/PGLALA/RF
QSTIEEQAKTFLDKFNHEAEDLFYQSSLASWNYNTNITEENVQNMNNAGDKWSAFLKEQSTLAQMYPLQEIQNLTVKLQLQALQQNGSSVLSEDKSKRLNTILNTMSTIYSTGKVCNPDNPQECLLLEPGLNEIMANSLDYNERLWAWESWRSEVGKQLRPLYEEYVVLKNEMARANHYEDYGDYWRGDYEVNGVDGYDYSRGQLIEDVEHTFEEIKPLYEHLHAYVRAKLMNAYPSYISPIGCLPAHLLGDMWGRFWTNLYSLTVPFGQKPNIDVTDAMVDQAWDAQRIFKEAEKFFVSVGLPNMTQGFWENSMLTDPGNVQKAVCHPTAWDLGKGDFRILMCTKVTMDDFLTAHHEMGHIQYDMAYAAQPFLLRNGANEGFHEAVGEIMSLSAATPKHLKSIGLLSPDFQEDNETEINFLLKQALTIVGTLPFTYMLEKWRWMVFKGEIPKDQWMKKWWEMKREIVGVVEPVPHDETYCDPASLFHVSNDYSFIRYYTRTLYQFQFQEALCQAAKHEGPLHKCDISNSTEAGQKLFNMLRLGKSEPWTLALENVVGAKNMNVRPLLNYFEPLFTWLKDQNKNSFVGWSTDWSPYADTSTSPTRSMAPGAVHLPQPVSTRDKTHTCPPCPAPEAAGGPSVFLFPPKPKDTLMISRTPEVTCVVVDVSHEDPEVKFNWYVDGVEVHNAKTKPREEQYNSTYRVVSVLTVLHQDWLNGKEYKCKVSNKALGAPIEKTISKAKGQPREPQVCTLPPSRDELTKNQVSLSCAVKGFYPSDIAVEWESNGQPENNYKTTPPVLDSDGSFFLVSKLTVDKSRWQQGNVFSCSVMHEALHNRFTQKSLSLSPG

SEQ ID NO: 367 - protein, 847 aa, synthetic construct
  REGION 1..847: note = ACE2-615/201/hole/PGLALA/R273A/RF
QSTIEEQAKTFLDKFNHEAEDLFYQSSLASWNYNTNITEENVQNMNNAGDKWSAFLKEQSTLAQMYPLQEIQNLTVKLQLQALQQNGSSVLSEDKSKRLNTILNTMSTIYSTGKVCNPDNPQECLLLEPGLNEIMANSLDYNERLWAWESWRSEVGKQLRPLYEEYVVLKNEMARANHYEDYGDYWRGDYEVNGVDGYDYSRGQLIEDVEHTFEEIKPLYEHLHAYVRAKLMNAYPSYISPIGCLPAHLLGDMWGAFWTNLYSLTVPFGQKPNIDVTDAMVDQAWDAQRIFKEAEKFFVSVGLPNMTQGFWENSMLTDPGNVQKAVCHPTAWDLGKGDFRILMCTKVTMDDFLTAHHEMGHIQYDMAYAAQPFLLRNGANEGFHEAVGEIMSLSAATPKHLKSIGLLSPDFQEDNETEINFLLKQALTIVGTLPFTYMLEKWRWMVFKGEIPKDQWMKKWWEMKREIVGVVEPVPHDETYCDPASLFHVSNDYSFIRYYTRTLYQFQFQEALCQAAKHEGPLHKCDISNSTEAGQKLFNMLRLGKSEPWTLALENVVGAKNMNVRPLLNYFEPLFTWLKDQNKNSFVGWSTDWSPYADTSTSPTRSMAPGAVHLPQPVSTRDKTHTCPPCPAPEAAGGPSVFLFPPKPKDTLMISRTPEVTCVVVDVSHEDPEVKFNWYVDGVEVHNAKTKPREEQYNSTYRVVSVLTVLHQDWLNGKEYKCKVSNKALGAPIEKTISKAKGQPREPQVCTLPPSRDELTKNQVSLSCAVKGFYPSDIAVEWESNGQPENNYKTTPPVLDSDGSFFLVSKLTVDKSRWQQGNVFSCSVMHEALHNRFTQKSLSLSPG

SEQ ID NO: 368 - protein, 847 aa, synthetic construct
  REGION 1..847: note = ACE2-615/201/hole/PGLALA/R273G/RF
QSTIEEQAKTFLDKFNHEAEDLFYQSSLASWNYNTNITEENVQNMNNAGDKWSAFLKEQSTLAQMYPLQEIQNLTVKLQLQALQQNGSSVLSEDKSKRLNTILNTMSTIYSTGKVCNPDNPQECLLLEPGLNEIMANSLDYNERLWAWESWRSEVGKQLRPLYEEYVVLKNEMARANHYEDYGDYWRGDYEVNGVDGYDYSRGQLIEDVEHTFEEIKPLYEHLHAYVRAKLMNAYPSYISPIGCLPAHLLGDMWGGFWTNLYSLTVPFGQKPNIDVTDAMVDQAWDAQRIFKEAEKFFVSVGLPNMTQGFWENSMLTDPGNVQKAVCHPTAWDLGKGDFRILMCTKVTMDDFLTAHHEMGHIQYDMAYAAQPFLLRNGANEGFHEAVGEIMSLSAATPKHLKSIGLLSPDFQEDNETEINFLLKQALTIVGTLPFTYMLEKWRWMVFKGEIPKDQWMKKWWEMKREIVGVVEPVPHDETYCDPASLFHVSNDYSFIRYYTRTLYQFQFQEALCQAAKHEGPLHKCDISNSTEAGQKLFNMLRLGKSEPWTLALENVVGAKNMNVRPLLNYFEPLFTWLKDQNKNSFVGWSTDWSPYADTSTSPTRSMAPGAVHLPQPVSTRDKTHTCPPCPAPEAAGGPSVFLFPPKPKDTLMISRTPEVTCVVVDVSHEDPEVKFNWYVDGVEVHNAKTKPREEQYNSTYRVVSVLTVLHQDWLNGKEYKCKVSNKALGAPIEKTISKAKGQPREPQVCTLPPSRDELTKNQVSLSCAVKGFYPSDIAVEWESNGQPENNYKTTPPVLDSDGSFFLVSKLTVDKSRWQQGNVFSCSVMHEALHNRFTQKSLSLSPG

SEQ ID NO: 369 - protein, 847 aa, synthetic construct
  REGION 1..847: note = ACE2-615/201/hole/PGLALA/R273V/RF
QSTIEEQAKTFLDKFNHEAEDLFYQSSLASWNYNTNITEENVQNMNNAGDKWSAFLKEQSTLAQMYPLQEIQNLTVKLQLQALQQNGSSVLSEDKSKRLNTILNTMSTIYSTGKVCNPDNPQECLLLEPGLNEIMANSLDYNERLWAWESWRSEVGKQLRPLYEEYVVLKNEMARANHYEDYGDYWRGDYEVNGVDGYDYSRGQLIEDVEHTFEEIKPLYEHLHAYVRAKLMNAYPSYISPIGCLPAHLLGDMWGVFWTNLYSLTVPFGQKPNIDVTDAMVDQAWDAQRIFKEAEKFFVSVGLPNMTQGFWENSMLTDPGNVQKAVCHPTAWDLGKGDFRILMCTKVTMDDFLTAHHEMGHIQYDMAYAAQPFLLRNGANEGFHEAVGEIMSLSAATPKHLKSIGLLSPDFQEDNETEINFLLKQALTIVGTLPFTYMLEKWRWMVFKGEIPKDQWMKKWWEMKREIVGVVEPVPHDETYCDPASLFHVSNDYSFIRYYTRTLYQFQFQEALCQAAKHEGPLHKCDISNSTEAGQKLFNMLRLGKSEPWTLALENVVGAKNMNVRPLLNYFEPLFTWLKDQNKNSFVGWSTDWSPYADTSTSPTRSMAPGAVHLPQPVSTRDKTHTCPPCPAPEAAGGPSVFLFPPKPKDTLMISRTPEVTCVVVDVSHEDPEVKFNWYVDGVEVHNAKTKPREEQYNSTYRVVSVLTVLHQDWLNGKEYKCKVSNKALGAPIEKTISKAKGQPREPQVCTLPPSRDELTKNQVSLSCAVKGFYPSDIAVEWESNGQPENNYKTTPPVLDSDGSFFLVSKLTVDKSRWQQGNVFSCSVMHEALHNRFTQKSLSLSPG

SEQ ID NO: 370 - protein, 847 aa, synthetic construct
  REGION 1..847: note = ACE2-615/201/hole/PGLALA/H378A/RF
QSTIEEQAKTFLDKFNHEAEDLFYQSSLASWNYNTNITEENVQNMNNAGDKWSAFLKEQSTLAQMYPLQEIQNLTVKLQLQALQQNGSSVLSEDKSKRLNTILNTMSTIYSTGKVCNPDNPQECLLLEPGLNEIMANSLDYNERLWAWESWRSEVGKQLRPLYEEYVVLKNEMARANHYEDYGDYWRGDYEVNGVDGYDYSRGQLIEDVEHTFEEIKPLYEHLHAYVRAKLMNAYPSYISPIGCLPAHLLGDMWGRFWTNLYSLTVPFGQKPNIDVTDAMVDQAWDAQRIFKEAEKFFVSVGLPNMTQGFWENSMLTDPGNVQKAVCHPTAWDLGKGDFRILMCTKVTMDDFLTAHHEMGAIQYDMAYAAQPFLLRNGANEGFHEAVGEIMSLSAATPKHLKSIGLLSPDFQEDNETEINFLLKQALTIVGTLPFTYMLEKWRWMVFKGEIPKDQWMKKWWEMKREIVGVVEPVPHDETYCDPASLFHVSNDYSFIRYYTRTLYQFQFQEALCQAAKHEGPLHKCDISNSTEAGQKLFNMLRLGKSEPWTLALENVVGAKNMNVRPLLNYFEPLFTWLKDQNKNSFVGWSTDWSPYADTSTSPTRSMAPGAVHLPQPVSTRDKTHTCPPCPAPEAAGGPSVFLFPPKPKDTLMISRTPEVTCVVVDVSHEDPEVKFNWYVDGVEVHNAKTKPREEQYNSTYRVVSVLTVLHQDWLNGKEYKCKVSNKALGAPIEKTISKAKGQPREPQVCTLPPSRDELTKNQVSLSCAVKGFYPSDIAVEWESNGQPENNYKTTPPVLDSDGSFFLVSKLTVDKSRWQQGNVFSCSVMHEALHNRFTQKSLSLSPG

SEQ ID NO: 371 - protein, 847 aa, synthetic construct
  REGION 1..847: note = ACE2-615/201/hole/PGLALA/E402A/RF
QSTIEEQAKTFLDKFNHEAEDLFYQSSLASWNYNTNITEENVQNMNNAGDKWSAFLKEQSTLAQMYPLQEIQNLTVKLQLQALQQNGSSVLSEDKSKRLNTILNTMSTIYSTGKVCNPDNPQECLLLEPGLNEIMANSLDYNERLWAWESWRSEVGKQLRPLYEEYVVLKNEMARANHYEDYGDYWRGDYEVNGVDGYDYSRGQLIEDVEHTFEEIKPLYEHLHAYVRAKLMNAYPSYISPIGCLPAHLLGDMWGRFWTNLYSLTVPFGQKPNIDVTDAMVDQAWDAQRIFKEAEKFFVSVGLPNMTQGFWENSMLTDPGNVQKAVCHPTAWDLGKGDFRILMCTKVTMDDFLTAHHEMGHIQYDMAYAAQPFLLRNGANEGFHAAVGEIMSLSAATPKHLKSIGLLSPDFQEDNETEINFLLKQALTIVGTLPFTYMLEKWRWMVFKGEIPKDQWMKKWWEMKREIVGVVEPVPHDETYCDPASLFHVSNDYSFIRYYTRTLYQFQFQEALCQAAKHEGPLHKCDISNSTEAGQKLFNMLRLGKSEPWTLALENVVGAKNMNVRPLLNYFEPLFTWLKDQNKNSFVGWSTDWSPYADTSTSPTRSMAPGAVHLPQPVSTRDKTHTCPPCPAPEAAGGPSVFLFPPKPKDTLMISRTPEVTCVVVDVSHEDPEVKFNWYVDGVEVHNAKTKPREEQYNSTYRVVSVLTVLHQDWLNGKEYKCKVSNKALGAPIEKTISKAKGQPREPQVCTLPPSRDELTKNQVSLSCAVKGFYPSDIAVEWESNGQPENNYKTTPPVLDSDGSFFLVSKLTVDKSRWQQGNVFSCSVMHEALHNRFTQKSLSLSPG

SEQ ID NO: 372 - protein, 854 aa, synthetic construct
  REGION 1..854: note = ACE2-615/208/hole/PGLALA/RF
QSTIEEQAKTFLDKFNHEAEDLFYQSSLASWNYNTNITEENVQNMNNAGDKWSAFLKEQSTLAQMYPLQEIQNLTVKLQLQALQQNGSSVLSEDKSKRLNTILNTMSTIYSTGKVCNPDNPQECLLLEPGLNEIMANSLDYNERLWAWESWRSEVGKQLRPLYEEYVVLKNEMARANHYEDYGDYWRGDYEVNGVDGYDYSRGQLIEDVEHTFEEIKPLYEHLHAYVRAKLMNAYPSYISPIGCLPAHLLGDMWGRFWTNLYSLTVPFGQKPNIDVTDAMVDQAWDAQRIFKEAEKFFVSVGLPNMTQGFWENSMLTDPGNVQKAVCHPTAWDLGKGDFRILMCTKVTMDDFLTAHHEMGHIQYDMAYAAQPFLLRNGANEGFHEAVGEIMSLSAATPKHLKSIGLLSPDFQEDNETEINFLLKQALTIVGTLPFTYMLEKWRWMVFKGEIPKDQWMKKWWEMKREIVGVVEPVPHDETYCDPASLFHVSNDYSFIRYYTRTLYQFQFQEALCQAAKHEGPLHKCDISNSTEAGQKLFNMLRLGKSEPWTLALENVVGAKNMNVRPLLNYFEPLFTWLKDQNKNSFVGWSTDWSPYADTSTSPTRSMAPGAVHLPQPVSTRSQHTQPTDKTHTCPPCPAPEAAGGPSVFLFPPKPKDTLMISRTPEVTCVVVDVSHEDPEVKFNWYVDGVEVHNAKTKPREEQYNSTYRVVSVLTVLHQDWLNGKEYKCKVSNKALGAPIEKTISKAKGQPREPQVCTLPPSRDELTKNQVSLSCAVKGFYPSDIAVEWESNGQPENNYKTTPPVLDSDGSFFLVSKLTVDKSRWQQGNVFSCSVMHEALHNRFTQKSLSLSPG

SEQ ID NO: 373 - protein, 854 aa, synthetic construct
  REGION 1..854: note = ACE2-615/208/hole/PGLALA/R273A/RF
QSTIEEQAKTFLDKFNHEAEDLFYQSSLASWNYNTNITEENVQNMNNAGDKWSAFLKEQSTLAQMYPLQEIQNLTVKLQLQALQQNGSSVLSEDKSKRLNTILNTMSTIYSTGKVCNPDNPQECLLLEPGLNEIMANSLDYNERLWAWESWRSEVGKQLRPLYEEYVVLKNEMARANHYEDYGDYWRGDYEVNGVDGYDYSRGQLIEDVEHTFEEIKPLYEHLHAYVRAKLMNAYPSYISPIGCLPAHLLGDMWGAFWTNLYSLTVPFGQKPNIDVTDAMVDQAWDAQRIFKEAEKFFVSVGLPNMTQGFWENSMLTDPGNVQKAVCHPTAWDLGKGDFRILMCTKVTMDDFLTAHHEMGHIQYDMAYAAQPFLLRNGANEGFHEAVGEIMSLSAATPKHLKSIGLLSPDFQEDNETEINFLLKQALTIVGTLPFTYMLEKWRWMVFKGEIPKDQWMKKWWEMKREIVGVVEPVPHDETYCDPASLFHVSNDYSFIRYYTRTLYQFQFQEALCQAAKHEGPLHKCDISNSTEAGQKLFNMLRLGKSEPWTLALENVVGAKNMNVRPLLNYFEPLFTWLKDQNKNSFVGWSTDWSPYADTSTSPTRSMAPGAVHLPQPVSTRSQHTQPTDKTHTCPPCPAPEAAGGPSVFLFPPKPKDTLMISRTPEVTCVVVDVSHEDPEVKFNWYVDGVEVHNAKTKPREEQYNSTYRVVSVLTVLHQDWLNGKEYKCKVSNKALGAPIEKTISKAKGQPREPQVCTLPPSRDELTKNQVSLSCAVKGFYPSDIAVEWESNGQPENNYKTTPPVLDSDGSFFLVSKLTVDKSRWQQGNVFSCSVMHEALHNRFTQKSLSLSPG

SEQ ID NO: 374 - protein, 854 aa, synthetic construct
  REGION 1..854: note = ACE2-615/208/hole/PGLALA/R273G/RF
QSTIEEQAKTFLDKFNHEAEDLFYQSSLASWNYNTNITEENVQNMNNAGDKWSAFLKEQSTLAQMYPLQEIQNLTVKLQLQALQQNGSSVLSEDKSKRLNTILNTMSTIYSTGKVCNPDNPQECLLLEPGLNEIMANSLDYNERLWAWESWRSEVGKQLRPLYEEYVVLKNEMARANHYEDYGDYWRGDYEVNGVDGYDYSRGQLIEDVEHTFEEIKPLYEHLHAYVRAKLMNAYPSYISPIGCLPAHLLGDMWGGFWTNLYSLTVPFGQKPNIDVTDAMVDQAWDAQRIFKEAEKFFVSVGLPNMTQGFWENSMLTDPGNVQKAVCHPTAWDLGKGDFRILMCTKVTMDDFLTAHHEMGHIQYDMAYAAQPFLLRNGANEGFHEAVGEIMSLSAATPKHLKSIGLLSPDFQEDNETEINFLLKQALTIVGTLPFTYMLEKWRWMVFKGEIPKDQWMKKWWEMKREIVGVVEPVPHDETYCDPASLFHVSNDYSFIRYYTRTLYQFQFQEALCQAAKHEGPLHKCDISNSTEAGQKLFNMLRLGKSEPWTLALENVVGAKNMNVRPLLNYFEPLFTWLKDQNKNSFVGWSTDWSPYADTSTSPTRSMAPGAVHLPQPVSTRSQHTQPTDKTHTCPPCPAPEAAGGPSVFLFPPKPKDTLMISRTPEVTCVVVDVSHEDPEVKFNWYVDGVEVHNAKTKPREEQYNSTYRVVSVLTVLHQDWLNGKEYKCKVSNKALGAPIEKTISKAKGQPREPQVCTLPPSRDELTKNQVSLSCAVKGFYPSDIAVEWESNGQPENNYKTTPPVLDSDGSFFLVSKLTVDKSRWQQGNVFSCSVMHEALHNRFTQKSLSLSPG

SEQ ID NO: 375 - protein, 854 aa, synthetic construct
  REGION 1..854: note = ACE2-615/208/hole/PGLALA/R273V/RF
QSTIEEQAKTFLDKFNHEAEDLFYQSSLASWNYNTNITEENVQNMNNAGDKWSAFLKEQSTLAQMYPLQEIQNLTVKLQLQALQQNGSSVLSEDKSKRLNTILNTMSTIYSTGKVCNPDNPQECLLLEPGLNEIMANSLDYNERLWAWESWRSEVGKQLRPLYEEYVVLKNEMARANHYEDYGDYWRGDYEVNGVDGYDYSRGQLIEDVEHTFEEIKPLYEHLHAYVRAKLMNAYPSYISPIGCLPAHLLGDMWGVFWTNLYSLTVPFGQKPNIDVTDAMVDQAWDAQRIFKEAEKFFVSVGLPNMTQGFWENSMLTDPGNVQKAVCHPTAWDLGKGDFRILMCTKVTMDDFLTAHHEMGHIQYDMAYAAQPFLLRNGANEGFHEAVGEIMSLSAATPKHLKSIGLLSPDFQEDNETEINFLLKQALTIVGTLPFTYMLEKWRWMVFKGEIPKDQWMKKWWEMKREIVGVVEPVPHDETYCDPASLFHVSNDYSFIRYYTRTLYQFQFQEALCQAAKHEGPLHKCDISNSTEAGQKLFNMLRLGKSEPWTLALENVVGAKNMNVRPLLNYFEPLFTWLKDQNKNSFVGWSTDWSPYADTSTSPTRSMAPGAVHLPQPVSTRSQHTQPTDKTHTCPPCPAPEAAGGPSVFLFPPKPKDTLMISRTPEVTCVVVDVSHEDPEVKFNWYVDGVEVHNAKTKPREEQYNSTYRVVSVLTVLHQDWLNGKEYKCKVSNKALGAPIEKTISKAKGQPREPQVCTLPPSRDELTKNQVSLSCAVKGFYPSDIAVEWESNGQPENNYKTTPPVLDSDGSFFLVSKLTVDKSRWQQGNVFSCSVMHEALHNRFTQKSLSLSPG

SEQ ID NO: 376 - protein, 854 aa, synthetic construct
  REGION 1..854: note = ACE2-615/208/hole/PGLALA/H378A/RF
QSTIEEQAKTFLDKFNHEAEDLFYQSSLASWNYNTNITEENVQNMNNAGDKWSAFLKEQSTLAQMYPLQEIQNLTVKLQLQALQQNGSSVLSEDKSKRLNTILNTMSTIYSTGKVCNPDNPQECLLLEPGLNEIMANSLDYNERLWAWESWRSEVGKQLRPLYEEYVVLKNEMARANHYEDYGDYWRGDYEVNGVDGYDYSRGQLIEDVEHTFEEIKPLYEHLHAYVRAKLMNAYPSYISPIGCLPAHLLGDMWGRFWTNLYSLTVPFGQKPNIDVTDAMVDQAWDAQRIFKEAEKFFVSVGLPNMTQGFWENSMLTDPGNVQKAVCHPTAWDLGKGDFRILMCTKVTMDDFLTAHHEMGAIQYDMAYAAQPFLLRNGANEGFHEAVGEIMSLSAATPKHLKSIGLLSPDFQEDNETEINFLLKQALTIVGTLPFTYMLEKWRWMVFKGEIPKDQWMKKWWEMKREIVGVVEPVPHDETYCDPASLFHVSNDYSFIRYYTRTLYQFQFQEALCQAAKHEGPLHKCDISNSTEAGQKLFNMLRLGKSEPWTLALENVVGAKNMNVRPLLNYFEPLFTWLKDQNKNSFVGWSTDWSPYADTSTSPTRSMAPGAVHLPQPVSTRSQHTQPTDKTHTCPPCPAPEAAGGPSVFLFPPKPKDTLMISRTPEVTCVVVDVSHEDPEVKFNWYVDGVEVHNAKTKPREEQYNSTYRVVSVLTVLHQDWLNGKEYKCKVSNKALGAPIEKTISKAKGQPREPQVCTLPPSRDELTKNQVSLSCAVKGFYPSDIAVEWESNGQPENNYKTTPPVLDSDGSFFLVSKLTVDKSRWQQGNVFSCSVMHEALHNRFTQKSLSLSPG

SEQ ID NO: 377 - protein, 854 aa, synthetic construct
  REGION 1..854: note = ACE2-615/208/hole/PGLALA/E402A/RF
QSTIEEQAKTFLDKFNHEAEDLFYQSSLASWNYNTNITEENVQNMNNAGDKWSAFLKEQSTLAQMYPLQEIQNLTVKLQLQALQQNGSSVLSEDKSKRLNTILNTMSTIYSTGKVCNPDNPQECLLLEPGLNEIMANSLDYNERLWAWESWRSEVGKQLRPLYEEYVVLKNEMARANHYEDYGDYWRGDYEVNGVDGYDYSRGQLIEDVEHTFEEIKPLYEHLHAYVRAKLMNAYPSYISPIGCLPAHLLGDMWGRFWTNLYSLTVPFGQKPNIDVTDAMVDQAWDAQRIFKEAEKFFVSVGLPNMTQGFWENSMLTDPGNVQKAVCHPTAWDLGKGDFRILMCTKVTMDDFLTAHHEMGHIQYDMAYAAQPFLLRNGANEGFHAAVGEIMSLSAATPKHLKSIGLLSPDFQEDNETEINFLLKQALTIVGTLPFTYMLEKWRWMVFKGEIPKDQWMKKWWEMKREIVGVVEPVPHDETYCDPASLFHVSNDYSFIRYYTRTLYQFQFQEALCQAAKHEGPLHKCDISNSTEAGQKLFNMLRLGKSEPWTLALENVVGAKNMNVRPLLNYFEPLFTWLKDQNKNSFVGWSTDWSPYADTSTSPTRSMAPGAVHLPQPVSTRSQHTQPTDKTHTCPPCPAPEAAGGPSVFLFPPKPKDTLMISRTPEVTCVVVDVSHEDPEVKFNWYVDGVEVHNAKTKPREEQYNSTYRVVSVLTVLHQDWLNGKEYKCKVSNKALGAPIEKTISKAKGQPREPQVCTLPPSRDELTKNQVSLSCAVKGFYPSDIAVEWESNGQPENNYKTTPPVLDSDGSFFLVSKLTVDKSRWQQGNVFSCSVMHEALHNRFTQKSLSLSPG

SEQ ID NO: 378 - protein, 858 aa, synthetic construct
  REGION 1..858: note = ACE2-615/212/hole/PGLALA/RF
QSTIEEQAKTFLDKFNHEAEDLFYQSSLASWNYNTNITEENVQNMNNAGDKWSAFLKEQSTLAQMYPLQEIQNLTVKLQLQALQQNGSSVLSEDKSKRLNTILNTMSTIYSTGKVCNPDNPQECLLLEPGLNEIMANSLDYNERLWAWESWRSEVGKQLRPLYEEYVVLKNEMARANHYEDYGDYWRGDYEVNGVDGYDYSRGQLIEDVEHTFEEIKPLYEHLHAYVRAKLMNAYPSYISPIGCLPAHLLGDMWGRFWTNLYSLTVPFGQKPNIDVTDAMVDQAWDAQRIFKEAEKFFVSVGLPNMTQGFWENSMLTDPGNVQKAVCHPTAWDLGKGDFRILMCTKVTMDDFLTAHHEMGHIQYDMAYAAQPFLLRNGANEGFHEAVGEIMSLSAATPKHLKSIGLLSPDFQEDNETEINFLLKQALTIVGTLPFTYMLEKWRWMVFKGEIPKDQWMKKWWEMKREIVGVVEPVPHDETYCDPASLFHVSNDYSFIRYYTRTLYQFQFQEALCQAAKHEGPLHKCDISNSTEAGQKLFNMLRLGKSEPWTLALENVVGAKNMNVRPLLNYFEPLFTWLKDQNKNSFVGWSTDWSPYADTSTSPTRSMAPGAVHLPQPVSTRSQHTQPTPEPSDKTHTCPPCPAPEAAGGPSVFLFPPKPKDTLMISRTPEVTCVVVDVSHEDPEVKFNWYVDGVEVHNAKTKPREEQYNSTYRVVSVLTVLHQDWLNGKEYKCKVSNKALGAPIEKTISKAKGQPREPQVCTLPPSRDELTKNQVSLSCAVKGFYPSDIAVEWESNGQPENNYKTTPPVLDSDGSFFLVSKLTVDKSRWQQGNVFSCSVMHEALHNRFTQKSLSLSPG

SEQ ID NO: 379 - protein, 858 aa, synthetic construct
  REGION 1..858: note = ACE2-615/212/hole/PGLALA/R273A/RF
QSTIEEQAKTFLDKFNHEAEDLFYQSSLASWNYNTNITEENVQNMNNAGDKWSAFLKEQSTLAQMYPLQEIQNLTVKLQLQALQQNGSSVLSEDKSKRLNTILNTMSTIYSTGKVCNPDNPQECLLLEPGLNEIMANSLDYNERLWAWESWRSEVGKQLRPLYEEYVVLKNEMARANHYEDYGDYWRGDYEVNGVDGYDYSRGQLIEDVEHTFEEIKPLYEHLHAYVRAKLMNAYPSYISPIGCLPAHLLGDMWGAFWTNLYSLTVPFGQKPNIDVTDAMVDQAWDAQRIFKEAEKFFVSVGLPNMTQGFWENSMLTDPGNVQKAVCHPTAWDLGKGDFRILMCTKVTMDDFLTAHHEMGHIQYDMAYAAQPFLLRNGANEGFHEAVGEIMSLSAATPKHLKSIGLLSPDFQEDNETEINFLLKQALTIVGTLPFTYMLEKWRWMVFKGEIPKDQWMKKWWEMKREIVGVVEPVPHDETYCDPASLFHVSNDYSFIRYYTRTLYQFQFQEALCQAAKHEGPLHKCDISNSTEAGQKLFNMLRLGKSEPWTLALENVVGAKNMNVRPLLNYFEPLFTWLKDQNKNSFVGWSTDWSPYADTSTSPTRSMAPGAVHLPQPVSTRSQHTQPTPEPSDKTHTCPPCPAPEAAGGPSVFLFPPKPKDTLMISRTPEVTCVVVDVSHEDPEVKFNWYVDGVEVHNAKTKPREEQYNSTYRVVSVLTVLHQDWLNGKEYKCKVSNKALGAPIEKTISKAKGQPREPQVCTLPPSRDELTKNQVSLSCAVKGFYPSDIAVEWESNGQPENNYKTTPPVLDSDGSFFLVSKLTVDKSRWQQGNVFSCSVMHEALHNRFTQKSLSLSPG

SEQ ID NO: 380 - protein, 858 aa, synthetic construct
  REGION 1..858: note = ACE2-615/212/hole/PGLALA/R273G/RF
QSTIEEQAKTFLDKFNHEAEDLFYQSSLASWNYNTNITEENVQNMNNAGDKWSAFLKEQSTLAQMYPLQEIQNLTVKLQLQALQQNGSSVLSEDKSKRLNTILNTMSTIYSTGKVCNPDNPQECLLLEPGLNEIMANSLDYNERLWAWESWRSEVGKQLRPLYEEYVVLKNEMARANHYEDYGDYWRGDYEVNGVDGYDYSRGQLIEDVEHTFEEIKPLYEHLHAYVRAKLMNAYPSYISPIGCLPAHLLGDMWGGFWTNLYSLTVPFGQKPNIDVTDAMVDQAWDAQRIFKEAEKFFVSVGLPNMTQGFWENSMLTDPGNVQKAVCHPTAWDLGKGDFRILMCTKVTMDDFLTAHHEMGHIQYDMAYAAQPFLLRNGANEGFHEAVGEIMSLSAATPKHLKSIGLLSPDFQEDNETEINFLLKQALTIVGTLPFTYMLEKWRWMVFKGEIPKDQWMKKWWEMKREIVGVVEPVPHDETYCDPASLFHVSNDYSFIRYYTRTLYQFQFQEALCQAAKHEGPLHKCDISNSTEAGQKLFNMLRLGKSEPWTLALENVVGAKNMNVRPLLNYFEPLFTWLKDQNKNSFVGWSTDWSPYADTSTSPTRSMAPGAVHLPQPVSTRSQHTQPTPEPSDKTHTCPPCPAPEAAGGPSVFLFPPKPKDTLMISRTPEVTCVVVDVSHEDPEVKFNWYVDGVEVHNAKTKPREEQYNSTYRVVSVLTVLHQDWLNGKEYKCKVSNKALGAPIEKTISKAKGQPREPQVCTLPPSRDELTKNQVSLSCAVKGFYPSDIAVEWESNGQPENNYKTTPPVLDSDGSFFLVSKLTVDKSRWQQGNVFSCSVMHEALHNRFTQKSLSLSPG

SEQ ID NO: 381 - protein, 858 aa, synthetic construct
  REGION 1..858: note = ACE2-615/212/hole/PGLALA/R273V/RF
QSTIEEQAKTFLDKFNHEAEDLFYQSSLASWNYNTNITEENVQNMNNAGDKWSAFLKEQSTLAQMYPLQEIQNLTVKLQLQALQQNGSSVLSEDKSKRLNTILNTMSTIYSTGKVCNPDNPQECLLLEPGLNEIMANSLDYNERLWAWESWRSEVGKQLRPLYEEYVVLKNEMARANHYEDYGDYWRGDYEVNGVDGYDYSRGQLIEDVEHTFEEIKPLYEHLHAYVRAKLMNAYPSYISPIGCLPAHLLGDMWGVFWTNLYSLTVPFGQKPNIDVTDAMVDQAWDAQRIFKEAEKFFVSVGLPNMTQGFWENSMLTDPGNVQKAVCHPTAWDLGKGDFRILMCTKVTMDDFLTAHHEMGHIQYDMAYAAQPFLLRNGANEGFHEAVGEIMSLSAATPKHLKSIGLLSPDFQEDNETEINFLLKQALTIVGTLPFTYMLEKWRWMVFKGEIPKDQWMKKWWEMKREIVGVVEPVPHDETYCDPASLFHVSNDYSFIRYYTRTLYQFQFQEALCQAAKHEGPLHKCDISNSTEAGQKLFNMLRLGKSEPWTLALENVVGAKNMNVRPLLNYFEPLFTWLKDQNKNSFVGWSTDWSPYADTSTSPTRSMAPGAVHLPQPVSTRSQHTQPTPEPSDKTHTCPPCPAPEAAGGPSVFLFPPKPKDTLMISRTPEVTCVVVDVSHEDPEVKFNWYVDGVEVHNAKTKPREEQYNSTYRVVSVLTVLHQDWLNGKEYKCKVSNKALGAPIEKTISKAKGQPREPQVCTLPPSRDELTKNQVSLSCAVKGFYPSDIAVEWESNGQPENNYKTTPPVLDSDGSFFLVSKLTVDKSRWQQGNVFSCSVMHEALHNRFTQKSLSLSPG

SEQ ID NO: 382 - protein, 858 aa, synthetic construct
  REGION 1..858: note = ACE2-615/212/hole/PGLALA/H378A/RF
QSTIEEQAKTFLDKFNHEAEDLFYQSSLASWNYNTNITEENVQNMNNAGDKWSAFLKEQSTLAQMYPLQEIQNLTVKLQLQALQQNGSSVLSEDKSKRLNTILNTMSTIYSTGKVCNPDNPQECLLLEPGLNEIMANSLDYNERLWAWESWRSEVGKQLRPLYEEYVVLKNEMARANHYEDYGDYWRGDYEVNGVDGYDYSRGQLIEDVEHTFEEIKPLYEHLHAYVRAKLMNAYPSYISPIGCLPAHLLGDMWGRFWTNLYSLTVPFGQKPNIDVTDAMVDQAWDAQRIFKEAEKFFVSVGLPNMTQGFWENSMLTDPGNVQKAVCHPTAWDLGKGDFRILMCTKVTMDDFLTAHHEMGAIQYDMAYAAQPFLLRNGANEGFHEAVGEIMSLSAATPKHLKSIGLLSPDFQEDNETEINFLLKQALTIVGTLPFTYMLEKWRWMVFKGEIPKDQWMKKWWEMKREIVGVVEPVPHDETYCDPASLFHVSNDYSFIRYYTRTLYQFQFQEALCQAAKHEGPLHKCDISNSTEAGQKLFNMLRLGKSEPWTLALENVVGAKNMNVRPLLNYFEPLFTWLKDQNKNSFVGWSTDWSPYADTSTSPTRSMAPGAVHLPQPVSTRSQHTQPTPEPSDKTHTCPPCPAPEAAGGPSVFLFPPKPKDTLMISRTPEVTCVVVDVSHEDPEVKFNWYVDGVEVHNAKTKPREEQYNSTYRVVSVLTVLHQDWLNGKEYKCKVSNKALGAPIEKTISKAKGQPREPQVCTLPPSRDELTKNQVSLSCAVKGFYPSDIAVEWESNGQPENNYKTTPPVLDSDGSFFLVSKLTVDKSRWQQGNVFSCSVMHEALHNRFTQKSLSLSPG

SEQ ID NO: 383 - protein, 858 aa, synthetic construct
  REGION 1..858: note = ACE2-615/212/hole/PGLALA/E402A/RF
QSTIEEQAKTFLDKFNHEAEDLFYQSSLASWNYNTNITEENVQNMNNAGDKWSAFLKEQSTLAQMYPLQEIQNLTVKLQLQALQQNGSSVLSEDKSKRLNTILNTMSTIYSTGKVCNPDNPQECLLLEPGLNEIMANSLDYNERLWAWESWRSEVGKQLRPLYEEYVVLKNEMARANHYEDYGDYWRGDYEVNGVDGYDYSRGQLIEDVEHTFEEIKPLYEHLHAYVRAKLMNAYPSYISPIGCLPAHLLGDMWGRFWTNLYSLTVPFGQKPNIDVTDAMVDQAWDAQRIFKEAEKFFVSVGLPNMTQGFWENSMLTDPGNVQKAVCHPTAWDLGKGDFRILMCTKVTMDDFLTAHHEMGHIQYDMAYAAQPFLLRNGANEGFHAAVGEIMSLSAATPKHLKSIGLLSPDFQEDNETEINFLLKQALTIVGTLPFTYMLEKWRWMVFKGEIPKDQWMKKWWEMKREIVGVVEPVPHDETYCDPASLFHVSNDYSFIRYYTRTLYQFQFQEALCQAAKHEGPLHKCDISNSTEAGQKLFNMLRLGKSEPWTLALENVVGAKNMNVRPLLNYFEPLFTWLKDQNKNSFVGWSTDWSPYADTSTSPTRSMAPGAVHLPQPVSTRSQHTQPTPEPSDKTHTCPPCPAPEAAGGPSVFLFPPKPKDTLMISRTPEVTCVVVDVSHEDPEVKFNWYVDGVEVHNAKTKPREEQYNSTYRVVSVLTVLHQDWLNGKEYKCKVSNKALGAPIEKTISKAKGQPREPQVCTLPPSRDELTKNQVSLSCAVKGFYPSDIAVEWESNGQPENNYKTTPPVLDSDGSFFLVSKLTVDKSRWQQGNVFSCSVMHEALHNRFTQKSLSLSPG

SEQ ID NO: 384 - protein, 966 aa, synthetic construct
  REGION 1..966: note = ACE2-615/201/hole/PGLALA/RF/TMEM27CA
QSTIEEQAKTFLDKFNHEAEDLFYQSSLASWNYNTNITEENVQNMNNAGDKWSAFLKEQSTLAQMYPLQEIQNLTVKLQLQALQQNGSSVLSEDKSKRLNTILNTMSTIYSTGKVCNPDNPQECLLLEPGLNEIMANSLDYNERLWAWESWRSEVGKQLRPLYEEYVVLKNEMARANHYEDYGDYWRGDYEVNGVDGYDYSRGQLIEDVEHTFEEIKPLYEHLHAYVRAKLMNAYPSYISPIGCLPAHLLGDMWGRFWTNLYSLTVPFGQKPNIDVTDAMVDQAWDAQRIFKEAEKFFVSVGLPNMTQGFWENSMLTDPGNVQKAVCHPTAWDLGKGDFRILMCTKVTMDDFLTAHHEMGHIQYDMAYAAQPFLLRNGANEGFHEAVGEIMSLSAATPKHLKSIGLLSPDFQEDNETEINFLLKQALTIVGTLPFTYMLEKWRWMVFKGEIPKDQWMKKWWEMKREIVGVVEPVPHDETYCDPASLFHVSNDYSFIRYYTRTLYQFQFQEALCQAAKHEGPLHKCDISNSTEAGQKLFNMLRLGKSEPWTLALENVVGAKNMNVRPLLNYFEPLFTWLKDQNKNSFVGWSTDWSPYADNAFKVRLSIRTALGDKAYAWDTNEEYLFKAMVAFSMRKVPNREATEISHVLLANVTQRVSFWFVVTDPSKNHTLPAVEVQSAIRMNKNRINNAFFLNDQTLEFLKIPSTLAPPMDPSVPTSTSPTRSMAPGAVHLPQPVSTRDKTHTCPPCPAPEAAGGPSVFLFPPKPKDTLMISRTPEVTCVVVDVSHEDPEVKFNWYVDGVEVHNAKTKPREEQYNSTYRVVSVLTVLHQDWLNGKEYKCKVSNKALGAPIEKTISKAKGQPREPQVCTLPPSRDELTKNQVSLSCAVKGFYPSDIAVEWESNGQPENNYKTTPPVLDSDGSFFLVSKLTVDKSRWQQGNVFSCSVMHEALHNRFTQKSLSLSPG

SEQ ID NO: 385 - protein, 966 aa, synthetic construct
  REGION 1..966: note = ACE2-615/201/hole/PGLALA/R273A/RF/TMEM27CA
QSTIEEQAKTFLDKFNHEAEDLFYQSSLASWNYNTNITEENVQNMNNAGDKWSAFLKEQSTLAQMYPLQEIQNLTVKLQLQALQQNGSSVLSEDKSKRLNTILNTMSTIYSTGKVCNPDNPQECLLLEPGLNEIMANSLDYNERLWAWESWRSEVGKQLRPLYEEYVVLKNEMARANHYEDYGDYWRGDYEVNGVDGYDYSRGQLIEDVEHTFEEIKPLYEHLHAYVRAKLMNAYPSYISPIGCLPAHLLGDMWGAFWTNLYSLTVPFGQKPNIDVTDAMVDQAWDAQRIFKEAEKFFVSVGLPNMTQGFWENSMLTDPGNVQKAVCHPTAWDLGKGDFRILMCTKVTMDDFLTAHHEMGHIQYDMAYAAQPFLLRNGANEGFHEAVGEIMSLSAATPKHLKSIGLLSPDFQEDNETEINFLLKQALTIVGTLPFTYMLEKWRWMVFKGEIPKDQWMKKWWEMKREIVGVVEPVPHDETYCDPASLFHVSNDYSFIRYYTRTLYQFQFQEALCQAAKHEGPLHKCDISNSTEAGQKLFNMLRLGKSEPWTLALENVVGAKNMNVRPLLNYFEPLFTWLKDQNKNSFVGWSTDWSPYADNAFKVRLSIRTALGDKAYAWDTNEEYLFKAMVAFSMRKVPNREATEISHVLLANVTQRVSFWFVVTDPSKNHTLPAVEVQSAIRMNKNRINNAFFLNDQTLEFLKIPSTLAPPMDPSVPTSTSPTRSMAPGAVHLPQPVSTRDKTHTCPPCPAPEAAGGPSVFLFPPKPKDTLMISRTPEVTCVVVDVSHEDPEVKFNWYVDGVEVHNAKTKPREEQYNSTYRVVSVLTVLHQDWLNGKEYKCKVSNKALGAPIEKTISKAKGQPREPQVCTLPPSRDELTKNQVSLSCAVKGFYPSDIAVEWESNGQPENNYKTTPPVLDSDGSFFLVSKLTVDKSRWQQGNVFSCSVMHEALHNRFTQKSLSLSPG

SEQ ID NO: 386 - protein, 966 aa, synthetic construct
  REGION 1..966: note = ACE2-615/201/hole/PGLALA/R273G/RF/TMEM27CA
QSTIEEQAKTFLDKFNHEAEDLFYQSSLASWNYNTNITEENVQNMNNAGDKWSAFLKEQSTLAQMYPLQEIQNLTVKLQLQALQQNGSSVLSEDKSKRLNTILNTMSTIYSTGKVCNPDNPQECLLLEPGLNEIMANSLDYNERLWAWESWRSEVGKQLRPLYEEYVVLKNEMARANHYEDYGDYWRGDYEVNGVDGYDYSRGQLIEDVEHTFEEIKPLYEHLHAYVRAKLMNAYPSYISPIGCLPAHLLGDMWGGFWTNLYSLTVPFGQKPNIDVTDAMVDQAWDAQRIFKEAEKFFVSVGLPNMTQGFWENSMLTDPGNVQKAVCHPTAWDLGKGDFRILMCTKVTMDDFLTAHHEMGHIQYDMAYAAQPFLLRNGANEGFHEAVGEIMSLSAATPKHLKSIGLLSPDFQEDNETEINFLLKQALTIVGTLPFTYMLEKWRWMVFKGEIPKDQWMKKWWEMKREIVGVVEPVPHDETYCDPASLFHVSNDYSFIRYYTRTLYQFQFQEALCQAAKHEGPLHKCDISNSTEAGQKLFNMLRLGKSEPWTLALENVVGAKNMNVRPLLNYFEPLFTWLKDQNKNSFVGWSTDWSPYADNAFKVRLSIRTALGDKAYAWDTNEEYLFKAMVAFSMRKVPNREATEISHVLLANVTQRVSFWFVVTDPSKNHTLPAVEVQSAIRMNKNRINNAFFLNDQTLEFLKIPSTLAPPMDPSVPTSTSPTRSMAPGAVHLPQPVSTRDKTHTCPPCPAPEAAGGPSVFLFPPKPKDTLMISRTPEVTCVVVDVSHEDPEVKFNWYVDGVEVHNAKTKPREEQYNSTYRVVSVLTVLHQDWLNGKEYKCKVSNKALGAPIEKTISKAKGQPREPQVCTLPPSRDELTKNQVSLSCAVKGFYPSDIAVEWESNGQPENNYKTTPPVLDSDGSFFLVSKLTVDKSRWQQGNVFSCSVMHEALHNRFTQKSLSLSPG

SEQ ID NO: 387 - protein, 966 aa, synthetic construct
  REGION 1..966: note = ACE2-615/201/hole/PGLALA/R273V/RF/TMEM27CA
QSTIEEQAKTFLDKFNHEAEDLFYQSSLASWNYNTNITEENVQNMNNAGDKWSAFLKEQSTLAQMYPLQEIQNLTVKLQLQALQQNGSSVLSEDKSKRLNTILNTMSTIYSTGKVCNPDNPQECLLLEPGLNEIMANSLDYNERLWAWESWRSEVGKQLRPLYEEYVVLKNEMARANHYEDYGDYWRGDYEVNGVDGYDYSRGQLIEDVEHTFEEIKPLYEHLHAYVRAKLMNAYPSYISPIGCLPAHLLGDMWGVFWTNLYSLTVPFGQKPNIDVTDAMVDQAWDAQRIFKEAEKFFVSVGLPNMTQGFWENSMLTDPGNVQKAVCHPTAWDLGKGDFRILMCTKVTMDDFLTAHHEMGHIQYDMAYAAQPFLLRNGANEGFHEAVGEIMSLSAATPKHLKSIGLLSPDFQEDNETEINFLLKQALTIVGTLPFTYMLEKWRWMVFKGEIPKDQWMKKWWEMKREIVGVVEPVPHDETYCDPASLFHVSNDYSFIRYYTRTLYQFQFQEALCQAAKHEGPLHKCDISNSTEAGQKLFNMLRLGKSEPWTLALENVVGAKNMNVRPLLNYFEPLFTWLKDQNKNSFVGWSTDWSPYADNAFKVRLSIRTALGDKAYAWDTNEEYLFKAMVAFSMRKVPNREATEISHVLLANVTQRVSFWFVVTDPSKNHTLPAVEVQSAIRMNKNRINNAFFLNDQTLEFLKIPSTLAPPMDPSVPTSTSPTRSMAPGAVHLPQPVSTRDKTHTCPPCPAPEAAGGPSVFLFPPKPKDTLMISRTPEVTCVVVDVSHEDPEVKFNWYVDGVEVHNAKTKPREEQYNSTYRVVSVLTVLHQDWLNGKEYKCKVSNKALGAPIEKTISKAKGQPREPQVCTLPPSRDELTKNQVSLSCAVKGFYPSDIAVEWESNGQPENNYKTTPPVLDSDGSFFLVSKLTVDKSRWQQGNVFSCSVMHEALHNRFTQKSLSLSPG

SEQ ID NO: 388 - protein, 966 aa, synthetic construct
  REGION 1..966: note = ACE2-615/201/hole/PGLALA/H378A/RF/TMEM27CA
QSTIEEQAKTFLDKFNHEAEDLFYQSSLASWNYNTNITEENVQNMNNAGDKWSAFLKEQSTLAQMYPLQEIQNLTVKLQLQALQQNGSSVLSEDKSKRLNTILNTMSTIYSTGKVCNPDNPQECLLLEPGLNEIMANSLDYNERLWAWESWRSEVGKQLRPLYEEYVVLKNEMARANHYEDYGDYWRGDYEVNGVDGYDYSRGQLIEDVEHTFEEIKPLYEHLHAYVRAKLMNAYPSYISPIGCLPAHLLGDMWGRFWTNLYSLTVPFGQKPNIDVTDAMVDQAWDAQRIFKEAEKFFVSVGLPNMTQGFWENSMLTDPGNVQKAVCHPTAWDLGKGDFRILMCTKVTMDDFLTAHHEMGAIQYDMAYAAQPFLLRNGANEGFHEAVGEIMSLSAATPKHLKSIGLLSPDFQEDNETEINFLLKQALTIVGTLPFTYMLEKWRWMVFKGEIPKDQWMKKWWEMKREIVGVVEPVPHDETYCDPASLFHVSNDYSFIRYYTRTLYQFQFQEALCQAAKHEGPLHKCDISNSTEAGQKLFNMLRLGKSEPWTLALENVVGAKNMNVRPLLNYFEPLFTWLKDQNKNSFVGWSTDWSPYADNAFKVRLSIRTALGDKAYAWDTNEEYLFKAMVAFSMRKVPNREATEISHVLLANVTQRVSFWFVVTDPSKNHTLPAVEVQSAIRMNKNRINNAFFLNDQTLEFLKIPSTLAPPMDPSVPTSTSPTRSMAPGAVHLPQPVSTRDKTHTCPPCPAPEAAGGPSVFLFPPKPKDTLMISRTPEVTCVVVDVSHEDPEVKFNWYVDGVEVHNAKTKPREEQYNSTYRVVSVLTVLHQDWLNGKEYKCKVSNKALGAPIEKTISKAKGQPREPQVCTLPPSRDELTKNQVSLSCAVKGFYPSDIAVEWESNGQPENNYKTTPPVLDSDGSFFLVSKLTVDKSRWQQGNVFSCSVMHEALHNRFTQKSLSLSPG

SEQ ID NO: 389 - protein, 966 aa, synthetic construct
  REGION 1..966: note = ACE2-615/201/hole/PGLALA/E402A/RF/TMEM27CA
QSTIEEQAKTFLDKFNHEAEDLFYQSSLASWNYNTNITEENVQNMNNAGDKWSAFLKEQSTLAQMYPLQEIQNLTVKLQLQALQQNGSSVLSEDKSKRLNTILNTMSTIYSTGKVCNPDNPQECLLLEPGLNEIMANSLDYNERLWAWESWRSEVGKQLRPLYEEYVVLKNEMARANHYEDYGDYWRGDYEVNGVDGYDYSRGQLIEDVEHTFEEIKPLYEHLHAYVRAKLMNAYPSYISPIGCLPAHLLGDMWGRFWTNLYSLTVPFGQKPNIDVTDAMVDQAWDAQRIFKEAEKFFVSVGLPNMTQGFWENSMLTDPGNVQKAVCHPTAWDLGKGDFRILMCTKVTMDDFLTAHHEMGHIQYDMAYAAQPFLLRNGANEGFHAAVGEIMSLSAATPKHLKSIGLLSPDFQEDNETEINFLLKQALTIVGTLPFTYMLEKWRWMVFKGEIPKDQWMKKWWEMKREIVGVVEPVPHDETYCDPASLFHVSNDYSFIRYYTRTLYQFQFQEALCQAAKHEGPLHKCDISNSTEAGQKLFNMLRLGKSEPWTLALENVVGAKNMNVRPLLNYFEPLFTWLKDQNKNSFVGWSTDWSPYADNAFKVRLSIRTALGDKAYAWDTNEEYLFKAMVAFSMRKVPNREATEISHVLLANVTQRVSFWFVVTDPSKNHTLPAVEVQSAIRMNKNRINNAFFLNDQTLEFLKIPSTLAPPMDPSVPTSTSPTRSMAPGAVHLPQPVSTRDKTHTCPPCPAPEAAGGPSVFLFPPKPKDTLMISRTPEVTCVVVDVSHEDPEVKFNWYVDGVEVHNAKTKPREEQYNSTYRVVSVLTVLHQDWLNGKEYKCKVSNKALGAPIEKTISKAKGQPREPQVCTLPPSRDELTKNQVSLSCAVKGFYPSDIAVEWESNGQPENNYKTTPPVLDSDGSFFLVSKLTVDKSRWQQGNVFSCSVMHEALHNRFTQKSLSLSPG

SEQ ID NO: 390 - protein, 966 aa, synthetic construct
  REGION 1..966: note = ACE2-607/201/hole/PGLALA/RF/TMEM27
QSTIEEQAKTFLDKFNHEAEDLFYQSSLASWNYNTNITEENVQNMNNAGDKWSAFLKEQSTLAQMYPLQEIQNLTVKLQLQALQQNGSSVLSEDKSKRLNTILNTMSTIYSTGKVCNPDNPQECLLLEPGLNEIMANSLDYNERLWAWESWRSEVGKQLRPLYEEYVVLKNEMARANHYEDYGDYWRGDYEVNGVDGYDYSRGQLIEDVEHTFEEIKPLYEHLHAYVRAKLMNAYPSYISPIGCLPAHLLGDMWGRFWTNLYSLTVPFGQKPNIDVTDAMVDQAWDAQRIFKEAEKFFVSVGLPNMTQGFWENSMLTDPGNVQKAVCHPTAWDLGKGDFRILMCTKVTMDDFLTAHHEMGHIQYDMAYAAQPFLLRNGANEGFHEAVGEIMSLSAATPKHLKSIGLLSPDFQEDNETEINFLLKQALTIVGTLPFTYMLEKWRWMVFKGEIPKDQWMKKWWEMKREIVGVVEPVPHDETYCDPASLFHVSNDYSFIRYYTRTLYQFQFQEALCQAAKHEGPLHKCDISNSTEAGQKLFNMLRLGKSEPWTLALENVVGAKNMNVRPLLNYFEPLFTWLKDQNKNSFVGWSELCQPGAENAFKVRLSIRTALGDKAYAWDTNEEYLFKAMVAFSMRKVPNREATEISHVLLCNVTQRVSFWFVVTDPSKNHTLPAVEVQSAIRMNKNRINNAFFLNDQTLEFLKIPSTLAPPMDPSVPTSTSPTRSMAPGAVHLPQPVSTRDKTHTCPPCPAPEAAGGPSVFLFPPKPKDTLMISRTPEVTCVVVDVSHEDPEVKFNWYVDGVEVHNAKTKPREEQYNSTYRVVSVLTVLHQDWLNGKEYKCKVSNKALGAPIEKTISKAKGQPREPQVCTLPPSRDELTKNQVSLSCAVKGFYPSDIAVEWESNGQPENNYKTTPPVLDSDGSFFLVSKLTVDKSRWQQGNVFSCSVMHEALHNRFTQKSLSLSPG

SEQ ID NO: 391 - protein, 966 aa, synthetic construct
  REGION 1..966: note = ACE2-607/201/hole/PGLALA/R273A/RF/TMEM27
QSTIEEQAKTFLDKFNHEAEDLFYQSSLASWNYNTNITEENVQNMNNAGDKWSAFLKEQSTLAQMYPLQEIQNLTVKLQLQALQQNGSSVLSEDKSKRLNTILNTMSTIYSTGKVCNPDNPQECLLLEPGLNEIMANSLDYNERLWAWESWRSEVGKQLRPLYEEYVVLKNEMARANHYEDYGDYWRGDYEVNGVDGYDYSRGQLIEDVEHTFEEIKPLYEHLHAYVRAKLMNAYPSYISPIGCLPAHLLGDMWGAFWTNLYSLTVPFGQKPNIDVTDAMVDQAWDAQRIFKEAEKFFVSVGLPNMTQGFWENSMLTDPGNVQKAVCHPTAWDLGKGDFRILMCTKVTMDDFLTAHHEMGHIQYDMAYAAQPFLLRNGANEGFHEAVGEIMSLSAATPKHLKSIGLLSPDFQEDNETEINFLLKQALTIVGTLPFTYMLEKWRWMVFKGEIPKDQWMKKWWEMKREIVGVVEPVPHDETYCDPASLFHVSNDYSFIRYYTRTLYQFQFQEALCQAAKHEGPLHKCDISNSTEAGQKLFNMLRLGKSEPWTLALENVVGAKNMNVRPLLNYFEPLFTWLKDQNKNSFVGWSELCQPGAENAFKVRLSIRTALGDKAYAWDTNEEYLFKAMVAFSMRKVPNREATEISHVLLCNVTQRVSFWFVVTDPSKNHTLPAVEVQSAIRMNKNRINNAFFLNDQTLEFLKIPSTLAPPMDPSVPTSTSPTRSMAPGAVHLPQPVSTRDKTHTCPPCPAPEAAGGPSVFLFPPKPKDTLMISRTPEVTCVVVDVSHEDPEVKFNWYVDGVEVHNAKTKPREEQYNSTYRVVSVLTVLHQDWLNGKEYKCKVSNKALGAPIEKTISKAKGQPREPQVCTLPPSRDELTKNQVSLSCAVKGFYPSDIAVEWESNGQPENNYKTTPPVLDSDGSFFLVSKLTVDKSRWQQGNVFSCSVMHEALHNRFTQKSLSLSPG

SEQ ID NO: 392 - protein, 966 aa, synthetic construct
  REGION 1..966: note = ACE2-607/201/hole/PGLALA/R273G/RF/TMEM27
QSTIEEQAKTFLDKFNHEAEDLFYQSSLASWNYNTNITEENVQNMNNAGDKWSAFLKEQSTLAQMYPLQEIQNLTVKLQLQALQQNGSSVLSEDKSKRLNTILNTMSTIYSTGKVCNPDNPQECLLLEPGLNEIMANSLDYNERLWAWESWRSEVGKQLRPLYEEYVVLKNEMARANHYEDYGDYWRGDYEVNGVDGYDYSRGQLIEDVEHTFEEIKPLYEHLHAYVRAKLMNAYPSYISPIGCLPAHLLGDMWGGFWTNLYSLTVPFGQKPNIDVTDAMVDQAWDAQRIFKEAEKFFVSVGLPNMTQGFWENSMLTDPGNVQKAVCHPTAWDLGKGDFRILMCTKVTMDDFLTAHHEMGHIQYDMAYAAQPFLLRNGANEGFHEAVGEIMSLSAATPKHLKSIGLLSPDFQEDNETEINFLLKQALTIVGTLPFTYMLEKWRWMVFKGEIPKDQWMKKWWEMKREIVGVVEPVPHDETYCDPASLFHVSNDYSFIRYYTRTLYQFQFQEALCQAAKHEGPLHKCDISNSTEAGQKLFNMLRLGKSEPWTLALENVVGAKNMNVRPLLNYFEPLFTWLKDQNKNSFVGWSELCQPGAENAFKVRLSIRTALGDKAYAWDTNEEYLFKAMVAFSMRKVPNREATEISHVLLCNVTQRVSFWFVVTDPSKNHTLPAVEVQSAIRMNKNRINNAFFLNDQTLEFLKIPSTLAPPMDPSVPTSTSPTRSMAPGAVHLPQPVSTRDKTHTCPPCPAPEAAGGPSVFLFPPKPKDTLMISRTPEVTCVVVDVSHEDPEVKFNWYVDGVEVHNAKTKPREEQYNSTYRVVSVLTVLHQDWLNGKEYKCKVSNKALGAPIEKTISKAKGQPREPQVCTLPPSRDELTKNQVSLSCAVKGFYPSDIAVEWESNGQPENNYKTTPPVLDSDGSFFLVSKLTVDKSRWQQGNVFSCSVMHEALHNRFTQKSLSLSPG

SEQ ID NO: 393 - protein, 966 aa, synthetic construct
  REGION 1..966: note = ACE2-607/201/hole/PGLALA/R273V/RF/TMEM27
QSTIEEQAKTFLDKFNHEAEDLFYQSSLASWNYNTNITEENVQNMNNAGDKWSAFLKEQSTLAQMYPLQEIQNLTVKLQLQALQQNGSSVLSEDKSKRLNTILNTMSTIYSTGKVCNPDNPQECLLLEPGLNEIMANSLDYNERLWAWESWRSEVGKQLRPLYEEYVVLKNEMARANHYEDYGDYWRGDYEVNGVDGYDYSRGQLIEDVEHTFEEIKPLYEHLHAYVRAKLMNAYPSYISPIGCLPAHLLGDMWGVFWTNLYSLTVPFGQKPNIDVTDAMVDQAWDAQRIFKEAEKFFVSVGLPNMTQGFWENSMLTDPGNVQKAVCHPTAWDLGKGDFRILMCTKVTMDDFLTAHHEMGHIQYDMAYAAQPFLLRNGANEGFHEAVGEIMSLSAATPKHLKSIGLLSPDFQEDNETEINFLLKQALTIVGTLPFTYMLEKWRWMVFKGEIPKDQWMKKWWEMKREIVGVVEPVPHDETYCDPASLFHVSNDYSFIRYYTRTLYQFQFQEALCQAAKHEGPLHKCDISNSTEAGQKLFNMLRLGKSEPWTLALENVVGAKNMNVRPLLNYFEPLFTWLKDQNKNSFVGWSELCQPGAENAFKVRLSIRTALGDKAYAWDTNEEYLFKAMVAFSMRKVPNREATEISHVLLCNVTQRVSFWFVVTDPSKNHTLPAVEVQSAIRMNKNRINNAFFLNDQTLEFLKIPSTLAPPMDPSVPTSTSPTRSMAPGAVHLPQPVSTRDKTHTCPPCPAPEAAGGPSVFLFPPKPKDTLMISRTPEVTCVVVDVSHEDPEVKFNWYVDGVEVHNAKTKPREEQYNSTYRVVSVLTVLHQDWLNGKEYKCKVSNKALGAPIEKTISKAKGQPREPQVCTLPPSRDELTKNQVSLSCAVKGFYPSDIAVEWESNGQPENNYKTTPPVLDSDGSFFLVSKLTVDKSRWQQGNVFSCSVMHEALHNRFTQKSLSLSPG

SEQ ID NO: 394 - protein, 966 aa, synthetic construct
  REGION 1..966: note = ACE2-607/201/hole/PGLALA/H378A/RF/TMEM27
QSTIEEQAKTFLDKFNHEAEDLFYQSSLASWNYNTNITEENVQNMNNAGDKWSAFLKEQSTLAQMYPLQEIQNLTVKLQLQALQQNGSSVLSEDKSKRLNTILNTMSTIYSTGKVCNPDNPQECLLLEPGLNEIMANSLDYNERLWAWESWRSEVGKQLRPLYEEYVVLKNEMARANHYEDYGDYWRGDYEVNGVDGYDYSRGQLIEDVEHTFEEIKPLYEHLHAYVRAKLMNAYPSYISPIGCLPAHLLGDMWGRFWTNLYSLTVPFGQKPNIDVTDAMVDQAWDAQRIFKEAEKFFVSVGLPNMTQGFWENSMLTDPGNVQKAVCHPTAWDLGKGDFRILMCTKVTMDDFLTAHHEMGAIQYDMAYAAQPFLLRNGANEGFHEAVGEIMSLSAATPKHLKSIGLLSPDFQEDNETEINFLLKQALTIVGTLPFTYMLEKWRWMVFKGEIPKDQWMKKWWEMKREIVGVVEPVPHDETYCDPASLFHVSNDYSFIRYYTRTLYQFQFQEALCQAAKHEGPLHKCDISNSTEAGQKLFNMLRLGKSEPWTLALENVVGAKNMNVRPLLNYFEPLFTWLKDQNKNSFVGWSELCQPGAENAFKVRLSIRTALGDKAYAWDTNEEYLFKAMVAFSMRKVPNREATEISHVLLCNVTQRVSFWFVVTDPSKNHTLPAVEVQSAIRMNKNRINNAFFLNDQTLEFLKIPSTLAPPMDPSVPTSTSPTRSMAPGAVHLPQPVSTRDKTHTCPPCPAPEAAGGPSVFLFPPKPKDTLMISRTPEVTCVVVDVSHEDPEVKFNWYVDGVEVHNAKTKPREEQYNSTYRVVSVLTVLHQDWLNGKEYKCKVSNKALGAPIEKTISKAKGQPREPQVCTLPPSRDELTKNQVSLSCAVKGFYPSDIAVEWESNGQPENNYKTTPPVLDSDGSFFLVSKLTVDKSRWQQGNVFSCSVMHEALHNRFTQKSLSLSPG

SEQ ID NO: 395 - protein, 966 aa, synthetic construct
  REGION 1..966: note = ACE2-607/201/hole/PGLALA/E402A/RF/TMEM27
QSTIEEQAKTFLDKFNHEAEDLFYQSSLASWNYNTNITEENVQNMNNAGDKWSAFLKEQSTLAQMYPLQEIQNLTVKLQLQALQQNGSSVLSEDKSKRLNTILNTMSTIYSTGKVCNPDNPQECLLLEPGLNEIMANSLDYNERLWAWESWRSEVGKQLRPLYEEYVVLKNEMARANHYEDYGDYWRGDYEVNGVDGYDYSRGQLIEDVEHTFEEIKPLYEHLHAYVRAKLMNAYPSYISPIGCLPAHLLGDMWGRFWTNLYSLTVPFGQKPNIDVTDAMVDQAWDAQRIFKEAEKFFVSVGLPNMTQGFWENSMLTDPGNVQKAVCHPTAWDLGKGDFRILMCTKVTMDDFLTAHHEMGHIQYDMAYAAQPFLLRNGANEGFHAAVGEIMSLSAATPKHLKSIGLLSPDFQEDNETEINFLLKQALTIVGTLPFTYMLEKWRWMVFKGEIPKDQWMKKWWEMKREIVGVVEPVPHDETYCDPASLFHVSNDYSFIRYYTRTLYQFQFQEALCQAAKHEGPLHKCDISNSTEAGQKLFNMLRLGKSEPWTLALENVVGAKNMNVRPLLNYFEPLFTWLKDQNKNSFVGWSELCQPGAENAFKVRLSIRTALGDKAYAWDTNEEYLFKAMVAFSMRKVPNREATEISHVLLCNVTQRVSFWFVVTDPSKNHTLPAVEVQSAIRMNKNRINNAFFLNDQTLEFLKIPSTLAPPMDPSVPTSTSPTRSMAPGAVHLPQPVSTRDKTHTCPPCPAPEAAGGPSVFLFPPKPKDTLMISRTPEVTCVVVDVSHEDPEVKFNWYVDGVEVHNAKTKPREEQYNSTYRVVSVLTVLHQDWLNGKEYKCKVSNKALGAPIEKTISKAKGQPREPQVCTLPPSRDELTKNQVSLSCAVKGFYPSDIAVEWESNGQPENNYKTTPPVLDSDGSFFLVSKLTVDKSRWQQGNVFSCSVMHEALHNRFTQKSLSLSPG

SEQ ID NO: 396 - protein, 970 aa, synthetic construct
  REGION 1..970: note = ACE2-611/201/hole/PGLALA/RF/TMEM27
QSTIEEQAKTFLDKFNHEAEDLFYQSSLASWNYNTNITEENVQNMNNAGDKWSAFLKEQSTLAQMYPLQEIQNLTVKLQLQALQQNGSSVLSEDKSKRLNTILNTMSTIYSTGKVCNPDNPQECLLLEPGLNEIMANSLDYNERLWAWESWRSEVGKQLRPLYEEYVVLKNEMARANHYEDYGDYWRGDYEVNGVDGYDYSRGQLIEDVEHTFEEIKPLYEHLHAYVRAKLMNAYPSYISPIGCLPAHLLGDMWGRFWTNLYSLTVPFGQKPNIDVTDAMVDQAWDAQRIFKEAEKFFVSVGLPNMTQGFWENSMLTDPGNVQKAVCHPTAWDLGKGDFRILMCTKVTMDDFLTAHHEMGHIQYDMAYAAQPFLLRNGANEGFHEAVGEIMSLSAATPKHLKSIGLLSPDFQEDNETEINFLLKQALTIVGTLPFTYMLEKWRWMVFKGEIPKDQWMKKWWEMKREIVGVVEPVPHDETYCDPASLFHVSNDYSFIRYYTRTLYQFQFQEALCQAAKHEGPLHKCDISNSTEAGQKLFNMLRLGKSEPWTLALENVVGAKNMNVRPLLNYFEPLFTWLKDQNKNSFVGWSTDWSELCQPGAENAFKVRLSIRTALGDKAYAWDTNEEYLFKAMVAFSMRKVPNREATEISHVLLCNVTQRVSFWFVVTDPSKNHTLPAVEVQSAIRMNKNRINNAFFLNDQTLEFLKIPSTLAPPMDPSVPTSTSPTRSMAPGAVHLPQPVSTRDKTHTCPPCPAPEAAGGPSVFLFPPKPKDTLMISRTPEVTCVVVDVSHEDPEVKFNWYVDGVEVHNAKTKPREEQYNSTYRVVSVLTVLHQDWLNGKEYKCKVSNKALGAPIEKTISKAKGQPREPQVCTLPPSRDELTKNQVSLSCAVKGFYPSDIAVEWESNGQPENNYKTTPPVLDSDGSFFLVSKLTVDKSRWQQGNVFSCSVMHEALHNRFTQKSLSLSPG

SEQ ID NO: 397 - protein, 970 aa, synthetic construct
  REGION 1..970: note = ACE2-611/201/hole/PGLALA/R273A/RF/TMEM27
QSTIEEQAKTFLDKFNHEAEDLFYQSSLASWNYNTNITEENVQNMNNAGDKWSAFLKEQSTLAQMYPLQEIQNLTVKLQLQALQQNGSSVLSEDKSKRLNTILNTMSTIYSTGKVCNPDNPQECLLLEPGLNEIMANSLDYNERLWAWESWRSEVGKQLRPLYEEYVVLKNEMARANHYEDYGDYWRGDYEVNGVDGYDYSRGQLIEDVEHTFEEIKPLYEHLHAYVRAKLMNAYPSYISPIGCLPAHLLGDMWGAFWTNLYSLTVPFGQKPNIDVTDAMVDQAWDAQRIFKEAEKFFVSVGLPNMTQGFWENSMLTDPGNVQKAVCHPTAWDLGKGDFRILMCTKVTMDDFLTAHHEMGHIQYDMAYAAQPFLLRNGANEGFHEAVGEIMSLSAATPKHLKSIGLLSPDFQEDNETEINFLLKQALTIVGTLPFTYMLEKWRWMVFKGEIPKDQWMKKWWEMKREIVGVVEPVPHDETYCDPASLFHVSNDYSFIRYYTRTLYQFQFQEALCQAAKHEGPLHKCDISNSTEAGQKLFNMLRLGKSEPWTLALENVVGAKNMNVRPLLNYFEPLFTWLKDQNKNSFVGWSTDWSELCQPGAENAFKVRLSIRTALGDKAYAWDTNEEYLFKAMVAFSMRKVPNREATEISHVLLCNVTQRVSFWFVVTDPSKNHTLPAVEVQSAIRMNKNRINNAFFLNDQTLEFLKIPSTLAPPMDPSVPTSTSPTRSMAPGAVHLPQPVSTRDKTHTCPPCPAPEAAGGPSVFLFPPKPKDTLMISRTPEVTCVVVDVSHEDPEVKFNWYVDGVEVHNAKTKPREEQYNSTYRVVSVLTVLHQDWLNGKEYKCKVSNKALGAPIEKTISKAKGQPREPQVCTLPPSRDELTKNQVSLSCAVKGFYPSDIAVEWESNGQPENNYKTTPPVLDSDGSFFLVSKLTVDKSRWQQGNVFSCSVMHEALHNRFTQKSLSLSPG

SEQ ID NO: 398 - protein, 970 aa, synthetic construct
  REGION 1..970: note = ACE2-611/201/hole/PGLALA/R273G/RF/TMEM27
QSTIEEQAKTFLDKFNHEAEDLFYQSSLASWNYNTNITEENVQNMNNAGDKWSAFLKEQSTLAQMYPLQEIQNLTVKLQLQALQQNGSSVLSEDKSKRLNTILNTMSTIYSTGKVCNPDNPQECLLLEPGLNEIMANSLDYNERLWAWESWRSEVGKQLRPLYEEYVVLKNEMARANHYEDYGDYWRGDYEVNGVDGYDYSRGQLIEDVEHTFEEIKPLYEHLHAYVRAKLMNAYPSYISPIGCLPAHLLGDMWGGFWTNLYSLTVPFGQKPNIDVTDAMVDQAWDAQRIFKEAEKFFVSVGLPNMTQGFWENSMLTDPGNVQKAVCHPTAWDLGKGDFRILMCTKVTMDDFLTAHHEMGHIQYDMAYAAQPFLLRNGANEGFHEAVGEIMSLSAATPKHLKSIGLLSPDFQEDNETEINFLLKQALTIVGTLPFTYMLEKWRWMVFKGEIPKDQWMKKWWEMKREIVGVVEPVPHDETYCDPASLFHVSNDYSFIRYYTRTLYQFQFQEALCQAAKHEGPLHKCDISNSTEAGQKLFNMLRLGKSEPWTLALENVVGAKNMNVRPLLNYFEPLFTWLKDQNKNSFVGWSTDWSELCQPGAENAFKVRLSIRTALGDKAYAWDTNEEYLFKAMVAFSMRKVPNREATEISHVLLCNVTQRVSFWFVVTDPSKNHTLPAVEVQSAIRMNKNRINNAFFLNDQTLEFLKIPSTLAPPMDPSVPTSTSPTRSMAPGAVHLPQPVSTRDKTHTCPPCPAPEAAGGPSVFLFPPKPKDTLMISRTPEVTCVVVDVSHEDPEVKFNWYVDGVEVHNAKTKPREEQYNSTYRVVSVLTVLHQDWLNGKEYKCKVSNKALGAPIEKTISKAKGQPREPQVCTLPPSRDELTKNQVSLSCAVKGFYPSDIAVEWESNGQPENNYKTTPPVLDSDGSFFLVSKLTVDKSRWQQGNVFSCSVMHEALHNRFTQKSLSLSPG

SEQ ID NO: 399 - protein, 970 aa, synthetic construct
  REGION 1..970: note = ACE2-611/201/hole/PGLALA/R273V/RF/TMEM27
QSTIEEQAKTFLDKFNHEAEDLFYQSSLASWNYNTNITEENVQNMNNAGDKWSAFLKEQSTLAQMYPLQEIQNLTVKLQLQALQQNGSSVLSEDKSKRLNTILNTMSTIYSTGKVCNPDNPQECLLLEPGLNEIMANSLDYNERLWAWESWRSEVGKQLRPLYEEYVVLKNEMARANHYEDYGDYWRGDYEVNGVDGYDYSRGQLIEDVEHTFEEIKPLYEHLHAYVRAKLMNAYPSYISPIGCLPAHLLGDMWGVFWTNLYSLTVPFGQKPNIDVTDAMVDQAWDAQRIFKEAEKFFVSVGLPNMTQGFWENSMLTDPGNVQKAVCHPTAWDLGKGDFRILMCTKVTMDDFLTAHHEMGHIQYDMAYAAQPFLLRNGANEGFHEAVGEIMSLSAATPKHLKSIGLLSPDFQEDNETEINFLLKQALTIVGTLPFTYMLEKWRWMVFKGEIPKDQWMKKWWEMKREIVGVVEPVPHDETYCDPASLFHVSNDYSFIRYYTRTLYQFQFQEALCQAAKHEGPLHKCDISNSTEAGQKLFNMLRLGKSEPWTLALENVVGAKNMNVRPLLNYFEPLFTWLKDQNKNSFVGWSTDWSELCQPGAENAFKVRLSIRTALGDKAYAWDTNEEYLFKAMVAFSMRKVPNREATEISHVLLCNVTQRVSFWFVVTDPSKNHTLPAVEVQSAIRMNKNRINNAFFLNDQTLEFLKIPSTLAPPMDPSVPTSTSPTRSMAPGAVHLPQPVSTRDKTHTCPPCPAPEAAGGPSVFLFPPKPKDTLMISRTPEVTCVVVDVSHEDPEVKFNWYVDGVEVHNAKTKPREEQYNSTYRVVSVLTVLHQDWLNGKEYKCKVSNKALGAPIEKTISKAKGQPREPQVCTLPPSRDELTKNQVSLSCAVKGFYPSDIAVEWESNGQPENNYKTTPPVLDSDGSFFLVSKLTVDKSRWQQGNVFSCSVMHEALHNRFTQKSLSLSPG

SEQ ID NO: 400 - protein, 970 aa, synthetic construct
  REGION 1..970: note = ACE2-611/201/hole/PGLALA/H378A/RF/TMEM27
QSTIEEQAKTFLDKFNHEAEDLFYQSSLASWNYNTNITEENVQNMNNAGDKWSAFLKEQSTLAQMYPLQEIQNLTVKLQLQALQQNGSSVLSEDKSKRLNTILNTMSTIYSTGKVCNPDNPQECLLLEPGLNEIMANSLDYNERLWAWESWRSEVGKQLRPLYEEYVVLKNEMARANHYEDYGDYWRGDYEVNGVDGYDYSRGQLIEDVEHTFEEIKPLYEHLHAYVRAKLMNAYPSYISPIGCLPAHLLGDMWGRFWTNLYSLTVPFGQKPNIDVTDAMVDQAWDAQRIFKEAEKFFVSVGLPNMTQGFWENSMLTDPGNVQKAVCHPTAWDLGKGDFRILMCTKVTMDDFLTAHHEMGAIQYDMAYAAQPFLLRNGANEGFHEAVGEIMSLSAATPKHLKSIGLLSPDFQEDNETEINFLLKQALTIVGTLPFTYMLEKWRWMVFKGEIPKDQWMKKWWEMKREIVGVVEPVPHDETYCDPASLFHVSNDYSFIRYYTRTLYQFQFQEALCQAAKHEGPLHKCDISNSTEAGQKLFNMLRLGKSEPWTLALENVVGAKNMNVRPLLNYFEPLFTWLKDQNKNSFVGWSTDWSELCQPGAENAFKVRLSIRTALGDKAYAWDTNEEYLFKAMVAFSMRKVPNREATEISHVLLCNVTQRVSFWFVVTDPSKNHTLPAVEVQSAIRMNKNRINNAFFLNDQTLEFLKIPSTLAPPMDPSVPTSTSPTRSMAPGAVHLPQPVSTRDKTHTCPPCPAPEAAGGPSVFLFPPKPKDTLMISRTPEVTCVVVDVSHEDPEVKFNWYVDGVEVHNAKTKPREEQYNSTYRVVSVLTVLHQDWLNGKEYKCKVSNKALGAPIEKTISKAKGQPREPQVCTLPPSRDELTKNQVSLSCAVKGFYPSDIAVEWESNGQPENNYKTTPPVLDSDGSFFLVSKLTVDKSRWQQGNVFSCSVMHEALHNRFTQKSLSLSPG

SEQ ID NO: 401 - protein, 970 aa, synthetic construct
  REGION 1..970: note = ACE2-611/201/hole/PGLALA/E402A/RF/TMEM27
QSTIEEQAKTFLDKFNHEAEDLFYQSSLASWNYNTNITEENVQNMNNAGDKWSAFLKEQSTLAQMYPLQEIQNLTVKLQLQALQQNGSSVLSEDKSKRLNTILNTMSTIYSTGKVCNPDNPQECLLLEPGLNEIMANSLDYNERLWAWESWRSEVGKQLRPLYEEYVVLKNEMARANHYEDYGDYWRGDYEVNGVDGYDYSRGQLIEDVEHTFEEIKPLYEHLHAYVRAKLMNAYPSYISPIGCLPAHLLGDMWGRFWTNLYSLTVPFGQKPNIDVTDAMVDQAWDAQRIFKEAEKFFVSVGLPNMTQGFWENSMLTDPGNVQKAVCHPTAWDLGKGDFRILMCTKVTMDDFLTAHHEMGHIQYDMAYAAQPFLLRNGANEGFHAAVGEIMSLSAATPKHLKSIGLLSPDFQEDNETEINFLLKQALTIVGTLPFTYMLEKWRWMVFKGEIPKDQWMKKWWEMKREIVGVVEPVPHDETYCDPASLFHVSNDYSFIRYYTRTLYQFQFQEALCQAAKHEGPLHKCDISNSTEAGQKLFNMLRLGKSEPWTLALENVVGAKNMNVRPLLNYFEPLFTWLKDQNKNSFVGWSTDWSELCQPGAENAFKVRLSIRTALGDKAYAWDTNEEYLFKAMVAFSMRKVPNREATEISHVLLCNVTQRVSFWFVVTDPSKNHTLPAVEVQSAIRMNKNRINNAFFLNDQTLEFLKIPSTLAPPMDPSVPTSTSPTRSMAPGAVHLPQPVSTRDKTHTCPPCPAPEAAGGPSVFLFPPKPKDTLMISRTPEVTCVVVDVSHEDPEVKFNWYVDGVEVHNAKTKPREEQYNSTYRVVSVLTVLHQDWLNGKEYKCKVSNKALGAPIEKTISKAKGQPREPQVCTLPPSRDELTKNQVSLSCAVKGFYPSDIAVEWESNGQPENNYKTTPPVLDSDGSFFLVSKLTVDKSRWQQGNVFSCSVMHEALHNRFTQKSLSLSPG

SEQ ID NO: 402 - protein, 972 aa, synthetic construct
  REGION 1..972: note = ACE2-740/201/PGLALA
QSTIEEQAKTFLDKFNHEAEDLFYQSSLASWNYNTNITEENVQNMNNAGDKWSAFLKEQSTLAQMYPLQEIQNLTVKLQLQALQQNGSSVLSEDKSKRLNTILNTMSTIYSTGKVCNPDNPQECLLLEPGLNEIMANSLDYNERLWAWESWRSEVGKQLRPLYEEYVVLKNEMARANHYEDYGDYWRGDYEVNGVDGYDYSRGQLIEDVEHTFEEIKPLYEHLHAYVRAKLMNAYPSYISPIGCLPAHLLGDMWGRFWTNLYSLTVPFGQKPNIDVTDAMVDQAWDAQRIFKEAEKFFVSVGLPNMTQGFWENSMLTDPGNVQKAVCHPTAWDLGKGDFRILMCTKVTMDDFLTAHHEMGHIQYDMAYAAQPFLLRNGANEGFHEAVGEIMSLSAATPKHLKSIGLLSPDFQEDNETEINFLLKQALTIVGTLPFTYMLEKWRWMVFKGEIPKDQWMKKWWEMKREIVGVVEPVPHDETYCDPASLFHVSNDYSFIRYYTRTLYQFQFQEALCQAAKHEGPLHKCDISNSTEAGQKLFNMLRLGKSEPWTLALENVVGAKNMNVRPLLNYFEPLFTWLKDQNKNSFVGWSTDWSPYADQSIKVRISLKSALGDKAYEWNDNEMYLFRSSVAYAMRQYFLKVKNQMILFGEEDVRVANLKPRISFNFFVTAPKNVSDIIPRTEVEKAIRMSRSRINDAFRLNDNSLEFLGIQPTLGPPNQPPVSTSTSPTRSMAPGAVHLPQPVSTRDKTHTCPPCPAPEAAGGPSVFLFPPKPKDTLMISRTPEVTCVVVDVSHEDPEVKFNWYVDGVEVHNAKTKPREEQYNSTYRVVSVLTVLHQDWLNGKEYKCKVSNKALGAPIEKTISKAKGQPREPQVYTLPPSRDELTKNQVSLTCLVKGFYPSDIAVEWESNGQPENNYKTTPPVLDSDGSFFLYSKLTVDKSRWQQGNVFSCSVMHEALHNHYTQKSLSLSPG

SEQ ID NO: 403 - protein, 972 aa, synthetic construct
  REGION 1..972: note = ACE2-740/201/PGLALA/R273A
QSTIEEQAKTFLDKFNHEAEDLFYQSSLASWNYNTNITEENVQNMNNAGDKWSAFLKEQSTLAQMYPLQEIQNLTVKLQLQALQQNGSSVLSEDKSKRLNTILNTMSTIYSTGKVCNPDNPQECLLLEPGLNEIMANSLDYNERLWAWESWRSEVGKQLRPLYEEYVVLKNEMARANHYEDYGDYWRGDYEVNGVDGYDYSRGQLIEDVEHTFEEIKPLYEHLHAYVRAKLMNAYPSYISPIGCLPAHLLGDMWGAFWTNLYSLTVPFGQKPNIDVTDAMVDQAWDAQRIFKEAEKFFVSVGLPNMTQGFWENSMLTDPGNVQKAVCHPTAWDLGKGDFRILMCTKVTMDDFLTAHHEMGHIQYDMAYAAQPFLLRNGANEGFHEAVGEIMSLSAATPKHLKSIGLLSPDFQEDNETEINFLLKQALTIVGTLPFTYMLEKWRWMVFKGEIPKDQWMKKWWEMKREIVGVVEPVPHDETYCDPASLFHVSNDYSFIRYYTRTLYQFQFQEALCQAAKHEGPLHKCDISNSTEAGQKLFNMLRLGKSEPWTLALENVVGAKNMNVRPLLNYFEPLFTWLKDQNKNSFVGWSTDWSPYADQSIKVRISLKSALGDKAYEWNDNEMYLFRSSVAYAMRQYFLKVKNQMILFGEEDVRVANLKPRISFNFFVTAPKNVSDIIPRTEVEKAIRMSRSRINDAFRLNDNSLEFLGIQPTLGPPNQPPVSTSTSPTRSMAPGAVHLPQPVSTRDKTHTCPPCPAPEAAGGPSVFLFPPKPKDTLMISRTPEVTCVVVDVSHEDPEVKFNWYVDGVEVHNAKTKPREEQYNSTYRVVSVLTVLHQDWLNGKEYKCKVSNKALGAPIEKTISKAKGQPREPQVYTLPPSRDELTKNQVSLTCLVKGFYPSDIAVEWESNGQPENNYKTTPPVLDSDGSFFLYSKLTVDKSRWQQGNVFSCSVMHEALHNHYTQKSLSLSPG

SEQ ID NO: 404 - protein, 972 aa, synthetic construct
  REGION 1..972: note = ACE2-740/201/PGLALA/R273G
QSTIEEQAKTFLDKFNHEAEDLFYQSSLASWNYNTNITEENVQNMNNAGDKWSAFLKEQSTLAQMYPLQEIQNLTVKLQLQALQQNGSSVLSEDKSKRLNTILNTMSTIYSTGKVCNPDNPQECLLLEPGLNEIMANSLDYNERLWAWESWRSEVGKQLRPLYEEYVVLKNEMARANHYEDYGDYWRGDYEVNGVDGYDYSRGQLIEDVEHTFEEIKPLYEHLHAYVRAKLMNAYPSYISPIGCLPAHLLGDMWGGFWTNLYSLTVPFGQKPNIDVTDAMVDQAWDAQRIFKEAEKFFVSVGLPNMTQGFWENSMLTDPGNVQKAVCHPTAWDLGKGDFRILMCTKVTMDDFLTAHHEMGHIQYDMAYAAQPFLLRNGANEGFHEAVGEIMSLSAATPKHLKSIGLLSPDFQEDNETEINFLLKQALTIVGTLPFTYMLEKWRWMVFKGEIPKDQWMKKWWEMKREIVGVVEPVPHDETYCDPASLFHVSNDYSFIRYYTRTLYQFQFQEALCQAAKHEGPLHKCDISNSTEAGQKLFNMLRLGKSEPWTLALENVVGAKNMNVRPLLNYFEPLFTWLKDQNKNSFVGWSTDWSPYADQSIKVRISLKSALGDKAYEWNDNEMYLFRSSVAYAMRQYFLKVKNQMILFGEEDVRVANLKPRISFNFFVTAPKNVSDIIPRTEVEKAIRMSRSRINDAFRLNDNSLEFLGIQPTLGPPNQPPVSTSTSPTRSMAPGAVHLPQPVSTRDKTHTCPPCPAPEAAGGPSVFLFPPKPKDTLMISRTPEVTCVVVDVSHEDPEVKFNWYVDGVEVHNAKTKPREEQYNSTYRVVSVLTVLHQDWLNGKEYKCKVSNKALGAPIEKTISKAKGQPREPQVYTLPPSRDELTKNQVSLTCLVKGFYPSDIAVEWESNGQPENNYKTTPPVLDSDGSFFLYSKLTVDKSRWQQGNVFSCSVMHEALHNHYTQKSLSLSPG

SEQ ID NO: 405 - protein, 972 aa, synthetic construct
  REGION 1..972: note = ACE2-740/201/PGLALA/R273V
QSTIEEQAKTFLDKFNHEAEDLFYQSSLASWNYNTNITEENVQNMNNAGDKWSAFLKEQSTLAQMYPLQEIQNLTVKLQLQALQQNGSSVLSEDKSKRLNTILNTMSTIYSTGKVCNPDNPQECLLLEPGLNEIMANSLDYNERLWAWESWRSEVGKQLRPLYEEYVVLKNEMARANHYEDYGDYWRGDYEVNGVDGYDYSRGQLIEDVEHTFEEIKPLYEHLHAYVRAKLMNAYPSYISPIGCLPAHLLGDMWGVFWTNLYSLTVPFGQKPNIDVTDAMVDQAWDAQRIFKEAEKFFVSVGLPNMTQGFWENSMLTDPGNVQKAVCHPTAWDLGKGDFRILMCTKVTMDDFLTAHHEMGHIQYDMAYAAQPFLLRNGANEGFHEAVGEIMSLSAATPKHLKSIGLLSPDFQEDNETEINFLLKQALTIVGTLPFTYMLEKWRWMVFKGEIPKDQWMKKWWEMKREIVGVVEPVPHDETYCDPASLFHVSNDYSFIRYYTRTLYQFQFQEALCQAAKHEGPLHKCDISNSTEAGQKLFNMLRLGKSEPWTLALENVVGAKNMNVRPLLNYFEPLFTWLKDQNKNSFVGWSTDWSPYADQSIKVRISLKSALGDKAYEWNDNEMYLFRSSVAYAMRQYFLKVKNQMILFGEEDVRVANLKPRISFNFFVTAPKNVSDIIPRTEVEKAIRMSRSRINDAFRLNDNSLEFLGIQPTLGPPNQPPVSTSTSPTRSMAPGAVHLPQPVSTRDKTHTCPPCPAPEAAGGPSVFLFPPKPKDTLMISRTPEVTCVVVDVSHEDPEVKFNWYVDGVEVHNAKTKPREEQYNSTYRVVSVLTVLHQDWLNGKEYKCKVSNKALGAPIEKTISKAKGQPREPQVYTLPPSRDELTKNQVSLTCLVKGFYPSDIAVEWESNGQPENNYKTTPPVLDSDGSFFLYSKLTVDKSRWQQGNVFSCSVMHEALHNHYTQKSLSLSPG

SEQ ID NO: 406 - protein, 972 aa, synthetic construct
  REGION 1..972: note = ACE2-740/201/PGLALA/H378A
QSTIEEQAKTFLDKFNHEAEDLFYQSSLASWNYNTNITEENVQNMNNAGDKWSAFLKEQSTLAQMYPLQEIQNLTVKLQLQALQQNGSSVLSEDKSKRLNTILNTMSTIYSTGKVCNPDNPQECLLLEPGLNEIMANSLDYNERLWAWESWRSEVGKQLRPLYEEYVVLKNEMARANHYEDYGDYWRGDYEVNGVDGYDYSRGQLIEDVEHTFEEIKPLYEHLHAYVRAKLMNAYPSYISPIGCLPAHLLGDMWGRFWTNLYSLTVPFGQKPNIDVTDAMVDQAWDAQRIFKEAEKFFVSVGLPNMTQGFWENSMLTDPGNVQKAVCHPTAWDLGKGDFRILMCTKVTMDDFLTAHHEMGAIQYDMAYAAQPFLLRNGANEGFHEAVGEIMSLSAATPKHLKSIGLLSPDFQEDNETEINFLLKQALTIVGTLPFTYMLEKWRWMVFKGEIPKDQWMKKWWEMKREIVGVVEPVPHDETYCDPASLFHVSNDYSFIRYYTRTLYQFQFQEALCQAAKHEGPLHKCDISNSTEAGQKLFNMLRLGKSEPWTLALENVVGAKNMNVRPLLNYFEPLFTWLKDQNKNSFVGWSTDWSPYADQSIKVRISLKSALGDKAYEWNDNEMYLFRSSVAYAMRQYFLKVKNQMILFGEEDVRVANLKPRISFNFFVTAPKNVSDIIPRTEVEKAIRMSRSRINDAFRLNDNSLEFLGIQPTLGPPNQPPVSTSTSPTRSMAPGAVHLPQPVSTRDKTHTCPPCPAPEAAGGPSVFLFPPKPKDTLMISRTPEVTCVVVDVSHEDPEVKFNWYVDGVEVHNAKTKPREEQYNSTYRVVSVLTVLHQDWLNGKEYKCKVSNKALGAPIEKTISKAKGQPREPQVYTLPPSRDELTKNQVSLTCLVKGFYPSDIAVEWESNGQPENNYKTTPPVLDSDGSFFLYSKLTVDKSRWQQGNVFSCSVMHEALHNHYTQKSLSLSPG

SEQ ID NO: 407 - protein, 972 aa, synthetic construct
  REGION 1..972: note = ACE2-740/201/PGLALA/E402A
QSTIEEQAKTFLDKFNHEAEDLFYQSSLASWNYNTNITEENVQNMNNAGDKWSAFLKEQSTLAQMYPLQEIQNLTVKLQLQALQQNGSSVLSEDKSKRLNTILNTMSTIYSTGKVCNPDNPQECLLLEPGLNEIMANSLDYNERLWAWESWRSEVGKQLRPLYEEYVVLKNEMARANHYEDYGDYWRGDYEVNGVDGYDYSRGQLIEDVEHTFEEIKPLYEHLHAYVRAKLMNAYPSYISPIGCLPAHLLGDMWGRFWTNLYSLTVPFGQKPNIDVTDAMVDQAWDAQRIFKEAEKFFVSVGLPNMTQGFWENSMLTDPGNVQKAVCHPTAWDLGKGDFRILMCTKVTMDDFLTAHHEMGHIQYDMAYAAQPFLLRNGANEGFHAAVGEIMSLSAATPKHLKSIGLLSPDFQEDNETEINFLLKQALTIVGTLPFTYMLEKWRWMVFKGEIPKDQWMKKWWEMKREIVGVVEPVPHDETYCDPASLFHVSNDYSFIRYYTRTLYQFQFQEALCQAAKHEGPLHKCDISNSTEAGQKLFNMLRLGKSEPWTLALENVVGAKNMNVRPLLNYFEPLFTWLKDQNKNSFVGWSTDWSPYADQSIKVRISLKSALGDKAYEWNDNEMYLFRSSVAYAMRQYFLKVKNQMILFGEEDVRVANLKPRISFNFFVTAPKNVSDIIPRTEVEKAIRMSRSRINDAFRLNDNSLEFLGIQPTLGPPNQPPVSTSTSPTRSMAPGAVHLPQPVSTRDKTHTCPPCPAPEAAGGPSVFLFPPKPKDTLMISRTPEVTCVVVDVSHEDPEVKFNWYVDGVEVHNAKTKPREEQYNSTYRVVSVLTVLHQDWLNGKEYKCKVSNKALGAPIEKTISKAKGQPREPQVYTLPPSRDELTKNQVSLTCLVKGFYPSDIAVEWESNGQPENNYKTTPPVLDSDGSFFLYSKLTVDKSRWQQGNVFSCSVMHEALHNHYTQKSLSLSPG

SEQ ID NO: 408 - protein, 972 aa, synthetic construct
  REGION 1..972: note = ACE2-740/201/PGLALA/313
QSTIEEQAKTFLDFFDSQAEDLFYQSSLASWNYNTNITEENVQNMNNAGDKWSAFLKEQSTLAQMYPLQEIQNLTVKLQLQALQQNGSSVLSEDKSKRLNTILNTMSTIYSTGKVCNPDNPQECLLLEPGLNEIMANSLDYNERLWAWESWRSEVGKQLRPLYEEYVVLKNEMARANHYEDYGDYWRGDYEVNGVDGYDYSRGQLIEDVEHTFEEIKPLYEHLHAYVRAKLMNAYPSYISPIGCLPAHLLGDMWGRFWTNLYSLTVPFGQKPNIDVTDAMVDQAWDAQRIFKEAEKFFVSVGLPNMTQGFWENSMLTDPGNVQKAVCHPTAWDLGKGDFRILMCTKVTMDDFLTAHHEMGHIQYDMAYAAQPFLLRNGANEGFHEAVGEIMSLSAATPKHLKSIGLLSPDFQEDNETEINFLLKQALTIVGTLPFTYMLEKWRWMVFKGEIPKDQWMKKWWEMKREIVGVVEPVPHDETYCDPASLFHVSNDYSFIRYYTRTLYQFQFQEALCQAAKHEGPLHKCDISNSTEAGQKLFNMLRLGKSEPWTLALENVVGAKNMNVRPLLNYFEPLFTWLKDQNKNSFVGWSTDWSPYADQSIKVRISLKSALGDKAYEWNDNEMYLFRSSVAYAMRQYFLKVKNQMILFGEEDVRVANLKPRISFNFFVTAPKNVSDIIPRTEVEKAIRMSRSRINDAFRLNDNSLEFLGIQPTLGPPNQPPVSTSTSPTRSMAPGAVHLPQPVSTRDKTHTCPPCPAPEAAGGPSVFLFPPKPKDTLMISRTPEVTCVVVDVSHEDPEVKFNWYVDGVEVHNAKTKPREEQYNSTYRVVSVLTVLHQDWLNGKEYKCKVSNKALGAPIEKTISKAKGQPREPQVYTLPPSRDELTKNQVSLTCLVKGFYPSDIAVEWESNGQPENNYKTTPPVLDSDGSFFLYSKLTVDKSRWQQGNVFSCSVMHEALHNHYTQKSLSLSPG

SEQ ID NO: 409 - protein, 972 aa, synthetic construct
  REGION 1..972: note = ACE2-740/201/PGLALA/R273A/313
QSTIEEQAKTFLDFFDSQAEDLFYQSSLASWNYNTNITEENVQNMNNAGDKWSAFLKEQSTLAQMYPLQEIQNLTVKLQLQALQQNGSSVLSEDKSKRLNTILNTMSTIYSTGKVCNPDNPQECLLLEPGLNEIMANSLDYNERLWAWESWRSEVGKQLRPLYEEYVVLKNEMARANHYEDYGDYWRGDYEVNGVDGYDYSRGQLIEDVEHTFEEIKPLYEHLHAYVRAKLMNAYPSYISPIGCLPAHLLGDMWGAFWTNLYSLTVPFGQKPNIDVTDAMVDQAWDAQRIFKEAEKFFVSVGLPNMTQGFWENSMLTDPGNVQKAVCHPTAWDLGKGDFRILMCTKVTMDDFLTAHHEMGHIQYDMAYAAQPFLLRNGANEGFHEAVGEIMSLSAATPKHLKSIGLLSPDFQEDNETEINFLLKQALTIVGTLPFTYMLEKWRWMVFKGEIPKDQWMKKWWEMKREIVGVVEPVPHDETYCDPASLFHVSNDYSFIRYYTRTLYQFQFQEALCQAAKHEGPLHKCDISNSTEAGQKLFNMLRLGKSEPWTLALENVVGAKNMNVRPLLNYFEPLFTWLKDQNKNSFVGWSTDWSPYADQSIKVRISLKSALGDKAYEWNDNEMYLFRSSVAYAMRQYFLKVKNQMILFGEEDVRVANLKPRISFNFFVTAPKNVSDIIPRTEVEKAIRMSRSRINDAFRLNDNSLEFLGIQPTLGPPNQPPVSTSTSPTRSMAPGAVHLPQPVSTRDKTHTCPPCPAPEAAGGPSVFLFPPKPKDTLMISRTPEVTCVVVDVSHEDPEVKFNWYVDGVEVHNAKTKPREEQYNSTYRVVSVLTVLHQDWLNGKEYKCKVSNKALGAPIEKTISKAKGQPREPQVYTLPPSRDELTKNQVSLTCLVKGFYPSDIAVEWESNGQPENNYKTTPPVLDSDGSFFLYSKLTVDKSRWQQGNVFSCSVMHEALHNHYTQKSLSLSPG

SEQ ID NO: 410 - protein, 972 aa, synthetic construct
  REGION 1..972: note = ACE2-740/201/PGLALA/R273G/313
QSTIEEQAKTFLDFFDSQAEDLFYQSSLASWNYNTNITEENVQNMNNAGDKWSAFLKEQSTLAQMYPLQEIQNLTVKLQLQALQQNGSSVLSEDKSKRLNTILNTMSTIYSTGKVCNPDNPQECLLLEPGLNEIMANSLDYNERLWAWESWRSEVGKQLRPLYEEYVVLKNEMARANHYEDYGDYWRGDYEVNGVDGYDYSRGQLIEDVEHTFEEIKPLYEHLHAYVRAKLMNAYPSYISPIGCLPAHLLGDMWGGFWTNLYSLTVPFGQKPNIDVTDAMVDQAWDAQRIFKEAEKFFVSVGLPNMTQGFWENSMLTDPGNVQKAVCHPTAWDLGKGDFRILMCTKVTMDDFLTAHHEMGHIQYDMAYAAQPFLLRNGANEGFHEAVGEIMSLSAATPKHLKSIGLLSPDFQEDNETEINFLLKQALTIVGTLPFTYMLEKWRWMVFKGEIPKDQWMKKWWEMKREIVGVVEPVPHDETYCDPASLFHVSNDYSFIRYYTRTLYQFQFQEALCQAAKHEGPLHKCDISNSTEAGQKLFNMLRLGKSEPWTLALENVVGAKNMNVRPLLNYFEPLFTWLKDQNKNSFVGWSTDWSPYADQSIKVRISLKSALGDKAYEWNDNEMYLFRSSVAYAMRQYFLKVKNQMILFGEEDVRVANLKPRISFNFFVTAPKNVSDIIPRTEVEKAIRMSRSRINDAFRLNDNSLEFLGIQPTLGPPNQPPVSTSTSPTRSMAPGAVHLPQPVSTRDKTHTCPPCPAPEAAGGPSVFLFPPKPKDTLMISRTPEVTCVVVDVSHEDPEVKFNWYVDGVEVHNAKTKPREEQYNSTYRVVSVLTVLHQDWLNGKEYKCKVSNKALGAPIEKTISKAKGQPREPQVYTLPPSRDELTKNQVSLTCLVKGFYPSDIAVEWESNGQPENNYKTTPPVLDSDGSFFLYSKLTVDKSRWQQGNVFSCSVMHEALHNHYTQKSLSLSPG

SEQ ID NO: 411 - protein, 972 aa, synthetic construct
  REGION 1..972: note = ACE2-740/201/PGLALA/R273V/313
QSTIEEQAKTFLDFFDSQAEDLFYQSSLASWNYNTNITEENVQNMNNAGDKWSAFLKEQSTLAQMYPLQEIQNLTVKLQLQALQQNGSSVLSEDKSKRLNTILNTMSTIYSTGKVCNPDNPQECLLLEPGLNEIMANSLDYNERLWAWESWRSEVGKQLRPLYEEYVVLKNEMARANHYEDYGDYWRGDYEVNGVDGYDYSRGQLIEDVEHTFEEIKPLYEHLHAYVRAKLMNAYPSYISPIGCLPAHLLGDMWGVFWTNLYSLTVPFGQKPNIDVTDAMVDQAWDAQRIFKEAEKFFVSVGLPNMTQGFWENSMLTDPGNVQKAVCHPTAWDLGKGDFRILMCTKVTMDDFLTAHHEMGHIQYDMAYAAQPFLLRNGANEGFHEAVGEIMSLSAATPKHLKSIGLLSPDFQEDNETEINFLLKQALTIVGTLPFTYMLEKWRWMVFKGEIPKDQWMKKWWEMKREIVGVVEPVPHDETYCDPASLFHVSNDYSFIRYYTRTLYQFQFQEALCQAAKHEGPLHKCDISNSTEAGQKLFNMLRLGKSEPWTLALENVVGAKNMNVRPLLNYFEPLFTWLKDQNKNSFVGWSTDWSPYADQSIKVRISLKSALGDKAYEWNDNEMYLFRSSVAYAMRQYFLKVKNQMILFGEEDVRVANLKPRISFNFFVTAPKNVSDIIPRTEVEKAIRMSRSRINDAFRLNDNSLEFLGIQPTLGPPNQPPVSTSTSPTRSMAPGAVHLPQPVSTRDKTHTCPPCPAPEAAGGPSVFLFPPKPKDTLMISRTPEVTCVVVDVSHEDPEVKFNWYVDGVEVHNAKTKPREEQYNSTYRVVSVLTVLHQDWLNGKEYKCKVSNKALGAPIEKTISKAKGQPREPQVYTLPPSRDELTKNQVSLTCLVKGFYPSDIAVEWESNGQPENNYKTTPPVLDSDGSFFLYSKLTVDKSRWQQGNVFSCSVMHEALHNHYTQKSLSLSPG

SEQ ID NO: 412 - protein, 972 aa, synthetic construct
  REGION 1..972: note = ACE2-740/201/PGLALA/H378A/313
QSTIEEQAKTFLDFFDSQAEDLFYQSSLASWNYNTNITEENVQNMNNAGDKWSAFLKEQSTLAQMYPLQEIQNLTVKLQLQALQQNGSSVLSEDKSKRLNTILNTMSTIYSTGKVCNPDNPQECLLLEPGLNEIMANSLDYNERLWAWESWRSEVGKQLRPLYEEYVVLKNEMARANHYEDYGDYWRGDYEVNGVDGYDYSRGQLIEDVEHTFEEIKPLYEHLHAYVRAKLMNAYPSYISPIGCLPAHLLGDMWGRFWTNLYSLTVPFGQKPNIDVTDAMVDQAWDAQRIFKEAEKFFVSVGLPNMTQGFWENSMLTDPGNVQKAVCHPTAWDLGKGDFRILMCTKVTMDDFLTAHHEMGAIQYDMAYAAQPFLLRNGANEGFHEAVGEIMSLSAATPKHLKSIGLLSPDFQEDNETEINFLLKQALTIVGTLPFTYMLEKWRWMVFKGEIPKDQWMKKWWEMKREIVGVVEPVPHDETYCDPASLFHVSNDYSFIRYYTRTLYQFQFQEALCQAAKHEGPLHKCDISNSTEAGQKLFNMLRLGKSEPWTLALENVVGAKNMNVRPLLNYFEPLFTWLKDQNKNSFVGWSTDWSPYADQSIKVRISLKSALGDKAYEWNDNEMYLFRSSVAYAMRQYFLKVKNQMILFGEEDVRVANLKPRISFNFFVTAPKNVSDIIPRTEVEKAIRMSRSRINDAFRLNDNSLEFLGIQPTLGPPNQPPVSTSTSPTRSMAPGAVHLPQPVSTRDKTHTCPPCPAPEAAGGPSVFLFPPKPKDTLMISRTPEVTCVVVDVSHEDPEVKFNWYVDGVEVHNAKTKPREEQYNSTYRVVSVLTVLHQDWLNGKEYKCKVSNKALGAPIEKTISKAKGQPREPQVYTLPPSRDELTKNQVSLTCLVKGFYPSDIAVEWESNGQPENNYKTTPPVLDSDGSFFLYSKLTVDKSRWQQGNVFSCSVMHEALHNHYTQKSLSLSPG

SEQ ID NO: 413 - protein, 972 aa, synthetic construct
  REGION 1..972: note = ACE2-740/201/PGLALA/E402A/313
QSTIEEQAKTFLDFFDSQAEDLFYQSSLASWNYNTNITEENVQNMNNAGDKWSAFLKEQSTLAQMYPLQEIQNLTVKLQLQALQQNGSSVLSEDKSKRLNTILNTMSTIYSTGKVCNPDNPQECLLLEPGLNEIMANSLDYNERLWAWESWRSEVGKQLRPLYEEYVVLKNEMARANHYEDYGDYWRGDYEVNGVDGYDYSRGQLIEDVEHTFEEIKPLYEHLHAYVRAKLMNAYPSYISPIGCLPAHLLGDMWGRFWTNLYSLTVPFGQKPNIDVTDAMVDQAWDAQRIFKEAEKFFVSVGLPNMTQGFWENSMLTDPGNVQKAVCHPTAWDLGKGDFRILMCTKVTMDDFLTAHHEMGHIQYDMAYAAQPFLLRNGANEGFHAAVGEIMSLSAATPKHLKSIGLLSPDFQEDNETEINFLLKQALTIVGTLPFTYMLEKWRWMVFKGEIPKDQWMKKWWEMKREIVGVVEPVPHDETYCDPASLFHVSNDYSFIRYYTRTLYQFQFQEALCQAAKHEGPLHKCDISNSTEAGQKLFNMLRLGKSEPWTLALENVVGAKNMNVRPLLNYFEPLFTWLKDQNKNSFVGWSTDWSPYADQSIKVRISLKSALGDKAYEWNDNEMYLFRSSVAYAMRQYFLKVKNQMILFGEEDVRVANLKPRISFNFFVTAPKNVSDIIPRTEVEKAIRMSRSRINDAFRLNDNSLEFLGIQPTLGPPNQPPVSTSTSPTRSMAPGAVHLPQPVSTRDKTHTCPPCPAPEAAGGPSVFLFPPKPKDTLMISRTPEVTCVVVDVSHEDPEVKFNWYVDGVEVHNAKTKPREEQYNSTYRVVSVLTVLHQDWLNGKEYKCKVSNKALGAPIEKTISKAKGQPREPQVYTLPPSRDELTKNQVSLTCLVKGFYPSDIAVEWESNGQPENNYKTTPPVLDSDGSFFLYSKLTVDKSRWQQGNVFSCSVMHEALHNHYTQKSLSLSPG

SEQ ID NO: 414 - protein, 979 aa, synthetic construct
  REGION 1..979: note = ACE2-740/208/knob/PGLALA/313
QSTIEEQAKTFLDFFDSQAEDLFYQSSLASWNYNTNITEENVQNMNNAGDKWSAFLKEQSTLAQMYPLQEIQNLTVKLQLQALQQNGSSVLSEDKSKRLNTILNTMSTIYSTGKVCNPDNPQECLLLEPGLNEIMANSLDYNERLWAWESWRSEVGKQLRPLYEEYVVLKNEMARANHYEDYGDYWRGDYEVNGVDGYDYSRGQLIEDVEHTFEEIKPLYEHLHAYVRAKLMNAYPSYISPIGCLPAHLLGDMWGRFWTNLYSLTVPFGQKPNIDVTDAMVDQAWDAQRIFKEAEKFFVSVGLPNMTQGFWENSMLTDPGNVQKAVCHPTAWDLGKGDFRILMCTKVTMDDFLTAHHEMGHIQYDMAYAAQPFLLRNGANEGFHEAVGEIMSLSAATPKHLKSIGLLSPDFQEDNETEINFLLKQALTIVGTLPFTYMLEKWRWMVFKGEIPKDQWMKKWWEMKREIVGVVEPVPHDETYCDPASLFHVSNDYSFIRYYTRTLYQFQFQEALCQAAKHEGPLHKCDISNSTEAGQKLFNMLRLGKSEPWTLALENVVGAKNMNVRPLLNYFEPLFTWLKDQNKNSFVGWSTDWSPYADQSIKVRISLKSALGDKAYEWNDNEMYLFRSSVAYAMRQYFLKVKNQMILFGEEDVRVANLKPRISFNFFVTAPKNVSDIIPRTEVEKAIRMSRSRINDAFRLNDNSLEFLGIQPTLGPPNQPPVSTSTSPTRSMAPGAVHLPQPVSTRSQHTQPTDKTHTCPPCPAPEAAGGPSVFLFPPKPKDTLMISRTPEVTCVVVDVSHEDPEVKFNWYVDGVEVHNAKTKPREEQYNSTYRVVSVLTVLHQDWLNGKEYKCKVSNKALGAPIEKTISKAKGQPREPQVYTLPPCRDELTKNQVSLWCLVKGFYPSDIAVEWESNGQPENNYKTTPPVLDSDGSFFLYSKLTVDKSRWQQGNVFSCSVMHEALHNHYTQKSLSLSPG

SEQ ID NO: 415 - protein, 979 aa, synthetic construct
  REGION 1..979: note = ACE2-740/208/knob/PGLALA/R273A/313
QSTIEEQAKTFLDFFDSQAEDLFYQSSLASWNYNTNITEENVQNMNNAGDKWSAFLKEQSTLAQMYPLQEIQNLTVKLQLQALQQNGSSVLSEDKSKRLNTILNTMSTIYSTGKVCNPDNPQECLLLEPGLNEIMANSLDYNERLWAWESWRSEVGKQLRPLYEEYVVLKNEMARANHYEDYGDYWRGDYEVNGVDGYDYSRGQLIEDVEHTFEEIKPLYEHLHAYVRAKLMNAYPSYISPIGCLPAHLLGDMWGAFWTNLYSLTVPFGQKPNIDVTDAMVDQAWDAQRIFKEAEKFFVSVGLPNMTQGFWENSMLTDPGNVQKAVCHPTAWDLGKGDFRILMCTKVTMDDFLTAHHEMGHIQYDMAYAAQPFLLRNGANEGFHEAVGEIMSLSAATPKHLKSIGLLSPDFQEDNETEINFLLKQALTIVGTLPFTYMLEKWRWMVFKGEIPKDQWMKKWWEMKREIVGVVEPVPHDETYCDPASLFHVSNDYSFIRYYTRTLYQFQFQEALCQAAKHEGPLHKCDISNSTEAGQKLFNMLRLGKSEPWTLALENVVGAKNMNVRPLLNYFEPLFTWLKDQNKNSFVGWSTDWSPYADQSIKVRISLKSALGDKAYEWNDNEMYLFRSSVAYAMRQYFLKVKNQMILFGEEDVRVANLKPRISFNFFVTAPKNVSDIIPRTEVEKAIRMSRSRINDAFRLNDNSLEFLGIQPTLGPPNQPPVSTSTSPTRSMAPGAVHLPQPVSTRSQHTQPTDKTHTCPPCPAPEAAGGPSVFLFPPKPKDTLMISRTPEVTCVVVDVSHEDPEVKFNWYVDGVEVHNAKTKPREEQYNSTYRVVSVLTVLHQDWLNGKEYKCKVSNKALGAPIEKTISKAKGQPREPQVYTLPPCRDELTKNQVSLWCLVKGFYPSDIAVEWESNGQPENNYKTTPPVLDSDGSFFLYSKLTVDKSRWQQGNVFSCSVMHEALHNHYTQKSLSLSPG

SEQ ID NO: 416 - protein, 979 aa, synthetic construct
  REGION 1..979: note = ACE2-740/208/knob/PGLALA/R273G/313
QSTIEEQAKTFLDFFDSQAEDLFYQSSLASWNYNTNITEENVQNMNNAGDKWSAFLKEQSTLAQMYPLQEIQNLTVKLQLQALQQNGSSVLSEDKSKRLNTILNTMSTIYSTGKVCNPDNPQECLLLEPGLNEIMANSLDYNERLWAWESWRSEVGKQLRPLYEEYVVLKNEMARANHYEDYGDYWRGDYEVNGVDGYDYSRGQLIEDVEHTFEEIKPLYEHLHAYVRAKLMNAYPSYISPIGCLPAHLLGDMWGGFWTNLYSLTVPFGQKPNIDVTDAMVDQAWDAQRIFKEAEKFFVSVGLPNMTQGFWENSMLTDPGNVQKAVCHPTAWDLGKGDFRILMCTKVTMDDFLTAHHEMGHIQYDMAYAAQPFLLRNGANEGFHEAVGEIMSLSAATPKHLKSIGLLSPDFQEDNETEINFLLKQALTIVGTLPFTYMLEKWRWMVFKGEIPKDQWMKKWWEMKREIVGVVEPVPHDETYCDPASLFHVSNDYSFIRYYTRTLYQFQFQEALCQAAKHEGPLHKCDISNSTEAGQKLFNMLRLGKSEPWTLALENVVGAKNMNVRPLLNYFEPLFTWLKDQNKNSFVGWSTDWSPYADQSIKVRISLKSALGDKAYEWNDNEMYLFRSSVAYAMRQYFLKVKNQMILFGEEDVRVANLKPRISFNFFVTAPKNVSDIIPRTEVEKAIRMSRSRINDAFRLNDNSLEFLGIQPTLGPPNQPPVSTSTSPTRSMAPGAVHLPQPVSTRSQHTQPTDKTHTCPPCPAPEAAGGPSVFLFPPKPKDTLMISRTPEVTCVVVDVSHEDPEVKFNWYVDGVEVHNAKTKPREEQYNSTYRVVSVLTVLHQDWLNGKEYKCKVSNKALGAPIEKTISKAKGQPREPQVYTLPPCRDELTKNQVSLWCLVKGFYPSDIAVEWESNGQPENNYKTTPPVLDSDGSFFLYSKLTVDKSRWQQGNVFSCSVMHEALHNHYTQKSLSLSPG

SEQ ID NO: 417 - protein, 979 aa, synthetic construct
  REGION 1..979: note = ACE2-740/208/knob/PGLALA/R273V/313
QSTIEEQAKTFLDFFDSQAEDLFYQSSLASWNYNTNITEENVQNMNNAGDKWSAFLKEQSTLAQMYPLQEIQNLTVKLQLQALQQNGSSVLSEDKSKRLNTILNTMSTIYSTGKVCNPDNPQECLLLEPGLNEIMANSLDYNERLWAWESWRSEVGKQLRPLYEEYVVLKNEMARANHYEDYGDYWRGDYEVNGVDGYDYSRGQLIEDVEHTFEEIKPLYEHLHAYVRAKLMNAYPSYISPIGCLPAHLLGDMWGVFWTNLYSLTVPFGQKPNIDVTDAMVDQAWDAQRIFKEAEKFFVSVGLPNMTQGFWENSMLTDPGNVQKAVCHPTAWDLGKGDFRILMCTKVTMDDFLTAHHEMGHIQYDMAYAAQPFLLRNGANEGFHEAVGEIMSLSAATPKHLKSIGLLSPDFQEDNETEINFLLKQALTIVGTLPFTYMLEKWRWMVFKGEIPKDQWMKKWWEMKREIVGVVEPVPHDETYCDPASLFHVSNDYSFIRYYTRTLYQFQFQEALCQAAKHEGPLHKCDISNSTEAGQKLFNMLRLGKSEPWTLALENVVGAKNMNVRPLLNYFEPLFTWLKDQNKNSFVGWSTDWSPYADQSIKVRISLKSALGDKAYEWNDNEMYLFRSSVAYAMRQYFLKVKNQMILFGEEDVRVANLKPRISFNFFVTAPKNVSDIIPRTEVEKAIRMSRSRINDAFRLNDNSLEFLGIQPTLGPPNQPPVSTSTSPTRSMAPGAVHLPQPVSTRSQHTQPTDKTHTCPPCPAPEAAGGPSVFLFPPKPKDTLMISRTPEVTCVVVDVSHEDPEVKFNWYVDGVEVHNAKTKPREEQYNSTYRVVSVLTVLHQDWLNGKEYKCKVSNKALGAPIEKTISKAKGQPREPQVYTLPPCRDELTKNQVSLWCLVKGFYPSDIAVEWESNGQPENNYKTTPPVLDSDGSFFLYSKLTVDKSRWQQGNVFSCSVMHEALHNHYTQKSLSLSPG

SEQ ID NO: 418 - protein, 979 aa, synthetic construct
  REGION 1..979: note = ACE2-740/208/knob/PGLALA/H378A/313
QSTIEEQAKTFLDFFDSQAEDLFYQSSLASWNYNTNITEENVQNMNNAGDKWSAFLKEQSTLAQMYPLQEIQNLTVKLQLQALQQNGSSVLSEDKSKRLNTILNTMSTIYSTGKVCNPDNPQECLLLEPGLNEIMANSLDYNERLWAWESWRSEVGKQLRPLYEEYVVLKNEMARANHYEDYGDYWRGDYEVNGVDGYDYSRGQLIEDVEHTFEEIKPLYEHLHAYVRAKLMNAYPSYISPIGCLPAHLLGDMWGRFWTNLYSLTVPFGQKPNIDVTDAMVDQAWDAQRIFKEAEKFFVSVGLPNMTQGFWENSMLTDPGNVQKAVCHPTAWDLGKGDFRILMCTKVTMDDFLTAHHEMGAIQYDMAYAAQPFLLRNGANEGFHEAVGEIMSLSAATPKHLKSIGLLSPDFQEDNETEINFLLKQALTIVGTLPFTYMLEKWRWMVFKGEIPKDQWMKKWWEMKREIVGVVEPVPHDETYCDPASLFHVSNDYSFIRYYTRTLYQFQFQEALCQAAKHEGPLHKCDISNSTEAGQKLFNMLRLGKSEPWTLALENVVGAKNMNVRPLLNYFEPLFTWLKDQNKNSFVGWSTDWSPYADQSIKVRISLKSALGDKAYEWNDNEMYLFRSSVAYAMRQYFLKVKNQMILFGEEDVRVANLKPRISFNFFVTAPKNVSDIIPRTEVEKAIRMSRSRINDAFRLNDNSLEFLGIQPTLGPPNQPPVSTSTSPTRSMAPGAVHLPQPVSTRSQHTQPTDKTHTCPPCPAPEAAGGPSVFLFPPKPKDTLMISRTPEVTCVVVDVSHEDPEVKFNWYVDGVEVHNAKTKPREEQYNSTYRVVSVLTVLHQDWLNGKEYKCKVSNKALGAPIEKTISKAKGQPREPQVYTLPPCRDELTKNQVSLWCLVKGFYPSDIAVEWESNGQPENNYKTTPPVLDSDGSFFLYSKLTVDKSRWQQGNVFSCSVMHEALHNHYTQKSLSLSPG

SEQ ID NO: 419 - protein, 979 aa, synthetic construct
  REGION 1..979: note = ACE2-740/208/knob/PGLALA/E402A/313
QSTIEEQAKTFLDFFDSQAEDLFYQSSLASWNYNTNITEENVQNMNNAGDKWSAFLKEQSTLAQMYPLQEIQNLTVKLQLQALQQNGSSVLSEDKSKRLNTILNTMSTIYSTGKVCNPDNPQECLLLEPGLNEIMANSLDYNERLWAWESWRSEVGKQLRPLYEEYVVLKNEMARANHYEDYGDYWRGDYEVNGVDGYDYSRGQLIEDVEHTFEEIKPLYEHLHAYVRAKLMNAYPSYISPIGCLPAHLLGDMWGRFWTNLYSLTVPFGQKPNIDVTDAMVDQAWDAQRIFKEAEKFFVSVGLPNMTQGFWENSMLTDPGNVQKAVCHPTAWDLGKGDFRILMCTKVTMDDFLTAHHEMGHIQYDMAYAAQPFLLRNGANEGFHAAVGEIMSLSAATPKHLKSIGLLSPDFQEDNETEINFLLKQALTIVGTLPFTYMLEKWRWMVFKGEIPKDQWMKKWWEMKREIVGVVEPVPHDETYCDPASLFHVSNDYSFIRYYTRTLYQFQFQEALCQAAKHEGPLHKCDISNSTEAGQKLFNMLRLGKSEPWTLALENVVGAKNMNVRPLLNYFEPLFTWLKDQNKNSFVGWSTDWSPYADQSIKVRISLKSALGDKAYEWNDNEMYLFRSSVAYAMRQYFLKVKNQMILFGEEDVRVANLKPRISFNFFVTAPKNVSDIIPRTEVEKAIRMSRSRINDAFRLNDNSLEFLGIQPTLGPPNQPPVSTSTSPTRSMAPGAVHLPQPVSTRSQHTQPTDKTHTCPPCPAPEAAGGPSVFLFPPKPKDTLMISRTPEVTCVVVDVSHEDPEVKFNWYVDGVEVHNAKTKPREEQYNSTYRVVSVLTVLHQDWLNGKEYKCKVSNKALGAPIEKTISKAKGQPREPQVYTLPPCRDELTKNQVSLWCLVKGFYPSDIAVEWESNGQPENNYKTTPPVLDSDGSFFLYSKLTVDKSRWQQGNVFSCSVMHEALHNHYTQKSLSLSPG

SEQ ID NO: 420 - protein, 221 aa, synthetic construct; identical to SEQ ID NO: 73
  REGION 1..221: note = Fc6CC-hole/PGLALA/RF

SEQ ID NO: 421 - protein, 110 aa, synthetic construct
  REGION 1..110: note = REGN10987_VL (PDB:6XDG_A)
QSALTQPASVSGSPGQSITISCTGTSSDVGGYNYVSWYQQHPGKAPKLMIYDVSKRPSGVSNRFSGSKSGNTASLTISGLQSEDEADYYCNSLTSISTWVFGGGTKLTVL

SEQ ID NO: 422 - protein, 120 aa, synthetic construct
  REGION 1..120: note = REGN10987_VH (PDB:6XDG_C)
QVQLVESGGGVVQPGRSLRLSCAASGFTFSNYAMYWVRQAPGKGLEWVAVISYDGSNKYYADSVKGRFTISRDNSKNTLYLQMNSLRTEDTAVYYCASGSDYGDYLLVYWGQGTLVTVSS

SEQ ID NO: 423 - protein, 216 aa, synthetic construct
  REGION 1..216: note = REGN10987_VL-CL
QSALTQPASVSGSPGQSITISCTGTSSDVGGYNYVSWYQQHPGKAPKLMIYDVSKRPSGVSNRFSGSKSGNTASLTISGLQSEDEADYYCNSLTSISTWVFGGGTKLTVLGQPKAAPSVTLFPPSSEELQANKATLVCLISDFYPGAVTVAWKADSSPVKAGVETTTPSKQSNNKYAASSYLSLTPEQWKSHRSYSCQVTHEGSTVEKTVAPTECS

SEQ ID NO: 424 - protein, 449 aa, synthetic construct
  REGION 1..449: note = REGN10987_VH-CH
QVQLVESGGGVVQPGRSLRLSCAASGFTFSNYAMYWVRQAPGKGLEWVAVISYDGSNKYYADSVKGRFTISRDNSKNTLYLQMNSLRTEDTAVYYCASGSDYGDYLLVYWGQGTLVTVSSASTKGPSVFPLAPSSKSTSGGTAALGCLVKDYFPEPVTVSWNSGALTSGVHTFPAVLQSSGLYSLSSVVTVPSSSLGTQTYICNVNHKPSNTKVDKKVEPKSCDKTHTCPPCPAPELLGGPSVFLFPPKPKDTLMISRTPEVTCVVVDVSHEDPEVKFNWYVDGVEVHNAKTKPREEQYNSTYRVVSVLTVLHQDWLNGKEYKCKVSNKALPAPIEKTISKAKGQPREPQVYTLPPSRDELTKNQVSLTCLVKGFYPSDIAVEWESNGQPENNYKTTPPVLDSDGSFFLYSKLTVDKSRWQQGNVFSCSVMHEALHNHYTQKSLSLSPG

SEQ ID NO: 425 - protein, 449 aa, synthetic construct
  REGION 1..449: note = REGN10987_VH-CH/hole/PGLALA/RF/N82aS
QVQLVESGGGVVQPGRSLRLSCAASGFTFSNYAMYWVRQAPGKGLEWVAVISYDGSNKYYADSVKGRFTISRDNSKNTLYLQMSSLRTEDTAVYYCASGSDYGDYLLVYWGQGTLVTVSSASTKGPSVFPLAPSSKSTSGGTAALGCLVKDYFPEPVTVSWNSGALTSGVHTFPAVLQSSGLYSLSSVVTVPSSSLGTQTYICNVNHKPSNTKVDKKVEPKSCDKTHTCPPCPAPEAAGGPSVFLFPPKPKDTLMISRTPEVTCVVVDVSHEDPEVKFNWYVDGVEVHNAKTKPREEQYNSTYRVVSVLTVLHQDWLNGKEYKCKVSNKALGAPIEKTISKAKGQPREPQVCTLPPSRDELTKNQVSLSCAVKGFYPSDIAVEWESNGQPENNYKTTPPVLDSDGSFFLVSKLTVDKSRWQQGNVFSCSVMHEALHNRFTQKSLSLSPG

SEQ ID NO: 426 - protein, 605 aa, synthetic construct
  REGION 1..605: note = REGN10987_VH-CH/CLD201/knob/PGLALA
QVQLVESGGGVVQPGRSLRLSCAASGFTFSNYAMYWVRQAPGKGLEWVAVISYDGSNKYYADSVKGRFTISRDNSKNTLYLQMNSLRTEDTAVYYCASGSDYGDYLLVYWGQGTLVTVSSASTKGPSVFPLAPSSKSTSGGTAALGCLVKDYFPEPVTVSWNSGALTSGVHTFPAVLQSSGLYSLSSVVTVPSSSLGTQTYICNVNHKPSNTKVDKKVEPKSCTDWSPYADQSIKVRISLKSALGDKAYEWNDNEMYLFRSSVAYAMRQYFLKVKNQMILFGEEDVRVANLKPRISFNFFVTAPKNVSDIIPRTEVEKAIRMSRSRINDAFRLNDNSLEFLGIQPTLGPPNQPPVSTSTSPTRSMAPGAVHLPQPVSTRDKTHTCPPCPAPEAAGGPSVFLFPPKPKDTLMISRTPEVTCVVVDVSHEDPEVKFNWYVDGVEVHNAKTKPREEQYNSTYRVVSVLTVLHQDWLNGKEYKCKVSNKALGAPIEKTISKAKGQPREPQVYTLPPCRDELTKNQVSLWCLVKGFYPSDIAVEWESNGQPENNYKTTPPVLDSDGSFFLYSKLTVDKSRWQQGNVFSCSVMHEALHNHYTQKSLSLSPG

SEQ ID NO: 427 - protein, 107 aa, synthetic construct
  REGION 1..107: note = REGN10933_VK (PDB:6XDG_D)
DIQMTQSPSSLSASVGDRVTITCQASQDITNYLNWYQQKPGKAPKLLIYAASNLETGVPSRFSGSGSGTDFTFTISGLQPEDIATYYCQQYDNLPLTFGGGTKVEIK

SEQ ID NO: 428 - protein, 120 aa, synthetic construct
  REGION 1..120: note = REGN10933_VH (PDB:6XDG_B)
QVQLVESGGGLVKPGGSLRLSCAASGFTFSDYYMSWIRQAPGKGLEWVSYITYSGSTIYYADSVKGRFTISRDNAKSSLYLQMNSLRAEDTAVYYCARDRGTTMVPFDYWGQGTLVTVSS

SEQ ID NO: 429 - protein, 214 aa, synthetic construct
  REGION 1..214: note = REGN10933_VK-CK
DIQMTQSPSSLSASVGDRVTITCQASQDITNYLNWYQQKPGKAPKLLIYAASNLETGVPSRFSGSGSGTDFTFTISGLQPEDIATYYCQQYDNLPLTFGGGTKVEIKRTVAAPSVFIFPPSDEQLKSGTASVVCLLNNFYPREAKVQWKVDNALQSGNSQESVTEQDSKDSTYSLSSTLTLSKADYEKHKVYACEVTHQGLSSPVTKSFNRGEC

SEQ ID NO: 430 - protein, 449 aa, synthetic construct
  REGION 1..449: note = REGN10933_VH-CH
QVQLVESGGGLVKPGGSLRLSCAASGFTFSDYYMSWIRQAPGKGLEWVSYITYSGSTIYYADSVKGRFTISRDNAKSSLYLQMNSLRAEDTAVYYCARDRGTTMVPFDYWGQGTLVTVSSASTKGPSVFPLAPSSKSTSGGTAALGCLVKDYFPEPVTVSWNSGALTSGVHTFPAVLQSSGLYSLSSVVTVPSSSLGTQTYICNVNHKPSNTKVDKKVEPKSCDKTHTCPPCPAPELLGGPSVFLFPPKPKDTLMISRTPEVTCVVVDVSHEDPEVKFNWYVDGVEVHNAKTKPREEQYNSTYRVVSVLTVLHQDWLNGKEYKCKVSNKALPAPIEKTISKAKGQPREPQVYTLPPSRDELTKNQVSLTCLVKGFYPSDIAVEWESNGQPENNYKTTPPVLDSDGSFFLYSKLTVDKSRWQQGNVFSCSVMHEALHNHYTQKSLSLSPG

SEQ ID NO: 431 - protein, 449 aa, synthetic construct
  REGION 1..449: note = REGN10933_VH-CH/hole/PGLALA/RF/N82aS
QVQLVESGGGLVKPGGSLRLSCAASGFTFSDYYMSWIRQAPGKGLEWVSYITYSGSTIYYADSVKGRFTISRDNAKSSLYLQMSSLRAEDTAVYYCARDRGTTMVPFDYWGQGTLVTVSSASTKGPSVFPLAPSSKSTSGGTAALGCLVKDYFPEPVTVSWNSGALTSGVHTFPAVLQSSGLYSLSSVVTVPSSSLGTQTYICNVNHKPSNTKVDKKVEPKSCDKTHTCPPCPAPEAAGGPSVFLFPPKPKDTLMISRTPEVTCVVVDVSHEDPEVKFNWYVDGVEVHNAKTKPREEQYNSTYRVVSVLTVLHQDWLNGKEYKCKVSNKALGAPIEKTISKAKGQPREPQVCTLPPSRDELTKNQVSLSCAVKGFYPSDIAVEWESNGQPENNYKTTPPVLDSDGSFFLVSKLTVDKSRWQQGNVFSCSVMHEALHNRFTQKSLSLSPG

SEQ ID NO: 432 - protein, 605 aa, synthetic construct
  REGION 1..605: note = REGN10933_VH-CH/CLD201/knob/PGLALA
QVQLVESGGGLVKPGGSLRLSCAASGFTFSDYYMSWIRQAPGKGLEWVSYITYSGSTIYYADSVKGRFTISRDNAKSSLYLQMNSLRAEDTAVYYCARDRGTTMVPFDYWGQGTLVTVSSASTKGPSVFPLAPSSKSTSGGTAALGCLVKDYFPEPVTVSWNSGALTSGVHTFPAVLQSSGLYSLSSVVTVPSSSLGTQTYICNVNHKPSNTKVDKKVEPKSCTDWSPYADQSIKVRISLKSALGDKAYEWNDNEMYLFRSSVAYAMRQYFLKVKNQMILFGEEDVRVANLKPRISFNFFVTAPKNVSDIIPRTEVEKAIRMSRSRINDAFRLNDNSLEFLGIQPTLGPPNQPPVSTSTSPTRSMAPGAVHLPQPVSTRDKTHTCPPCPAPEAAGGPSVFLFPPKPKDTLMISRTPEVTCVVVDVSHEDPEVKFNWYVDGVEVHNAKTKPREEQYNSTYRVVSVLTVLHQDWLNGKEYKCKVSNKALGAPIEKTISKAKGQPREPQVYTLPPCRDELTKNQVSLWCLVKGFYPSDIAVEWESNGQPENNYKTTPPVLDSDGSFFLYSKLTVDKSRWQQGNVFSCSVMHEALHNHYTQKSLSLSPG

SEQ ID NO: 433 - protein, 107 aa, synthetic construct [sequence omitted]

SEQ ID NO: 434 - protein, 127 aa, synthetic construct [sequence omitted]

SEQ ID NO: 435 - protein, 214 aa, synthetic construct
  REGION 1..214: note = S309_VK-CK
EIVLTQSPGTLSLSPGERATLSCRASQTVSSTSLAWYQQKPGQAPRLLIYGASSRATGIPDRFSGSGSGTDFTLTISRLEPEDFAVYYCQQHDTSLTFGGGTKVEIKRTVAAPSVFIFPPSDEQLKSGTASVVCLLNNFYPREAKVQWKVDNALQSGNSQESVTEQDSKDSTYSLSSTLTLSKADYEKHKVYACEVTHQGLSSPVTKSFNRGEC

SEQ ID NO: 436 - protein, 456 aa, synthetic construct
  REGION 1..456: note = S309_VH-CH
QVQLVQSGAEVKKPGASVKVSCKASGYPFTSYGISWVRQAPGQGLEWMGWISTYNGNTNYAQKFQGRVTMTTDTSTTTGYMELRRLRSDDTAVYYCARDYTRGAWFGESLIGGFDNWGQGTLVTVSSASTKGPSVFPLAPSSKSTSGGTAALGCLVKDYFPEPVTVSWNSGALTSGVHTFPAVLQSSGLYSLSSVVTVPSSSLGTQTYICNVNHKPSNTKVDKKVEPKSCDKTHTCPPCPAPELLGGPSVFLFPPKPKDTLMISRTPEVTCVVVDVSHEDPEVKFNWYVDGVEVHNAKTKPREEQYNSTYRVVSVLTVLHQDWLNGKEYKCKVSNKALPAPIEKTISKAKGQPREPQVYTLPPSRDELTKNQVSLTCLVKGFYPSDIAVEWESNGQPENNYKTTPPVLDSDGSFFLYSKLTVDKSRWQQGNVFSCSVMHEALHNHYTQKSLSLSPG

SEQ ID NO: 437 - protein, 456 aa, synthetic construct
  REGION 1..456: note = S309_VH-CH/hole/PGLALA/RF
QVQLVQSGAEVKKPGASVKVSCKASGYPFTSYGISWVRQAPGQGLEWMGWISTYNGNTNYAQKFQGRVTMTTDTSTTTGYMELRRLRSDDTAVYYCARDYTRGAWFGESLIGGFDNWGQGTLVTVSSASTKGPSVFPLAPSSKSTSGGTAALGCLVKDYFPEPVTVSWNSGALTSGVHTFPAVLQSSGLYSLSSVVTVPSSSLGTQTYICNVNHKPSNTKVDKKVEPKSCDKTHTCPPCPAPEAAGGPSVFLFPPKPKDTLMISRTPEVTCVVVDVSHEDPEVKFNWYVDGVEVHNAKTKPREEQYNSTYRVVSVLTVLHQDWLNGKEYKCKVSNKALGAPIEKTISKAKGQPREPQVCTLPPSRDELTKNQVSLSCAVKGFYPSDIAVEWESNGQPENNYKTTPPVLDSDGSFFLVSKLTVDKSRWQQGNVFSCSVMHEALHNRFTQKSLSLSPG

SEQ ID NO: 438 - protein, 612 aa, synthetic construct
  REGION 1..612: note = S309_VH-CH/CLD201/knob/PGLALA
QVQLVQSGAEVKKPGASVKVSCKASGYPFTSYGISWVRQAPGQGLEWMGWISTYNGNTNYAQKFQGRVTMTTDTSTTTGYMELRRLRSDDTAVYYCARDYTRGAWFGESLIGGFDNWGQGTLVTVSSASTKGPSVFPLAPSSKSTSGGTAALGCLVKDYFPEPVTVSWNSGALTSGVHTFPAVLQSSGLYSLSSVVTVPSSSLGTQTYICNVNHKPSNTKVDKKVEPKSCTDWSPYADQSIKVRISLKSALGDKAYEWNDNEMYLFRSSVAYAMRQYFLKVKNQMILFGEEDVRVANLKPRISFNFFVTAPKNVSDIIPRTEVEKAIRMSRSRINDAFRLNDNSLEFLGIQPTLGPPNQPPVSTSTSPTRSMAPGAVHLPQPVSTRDKTHTCPPCPAPEAAGGPSVFLFPPKPKDTLMISRTPEVTCVVVDVSHEDPEVKFNWYVDGVEVHNAKTKPREEQYNSTYRVVSVLTVLHQDWLNGKEYKCKVSNKALGAPIEKTISKAKGQPREPQVYTLPPCRDELTKNQVSLWCLVKGFYPSDIAVEWESNGQPENNYKTTPPVLDSDGSFFLYSKLTVDKSRWQQGNVFSCSVMHEALHNHYTQKSLSLSPG

SEQ ID NO: 439 - protein, 107 aa, synthetic construct
  REGION 1..107: note = Bamlanivimab_11876_VK
DIQMTQSPSSLSASVGDRVTITCRASQSISSYLSWYQQKPGKAPKLLIYAASSLQSGVPSRFSGSGSGTDFTLTITSLQPEDFATYYCQQSYSTPRTFGQGTKVEIK

SEQ ID NO: 440 - protein, 125 aa, synthetic construct
  REGION 1..125: note = Bamlanivimab_11876_VH
QVQLVQSGAEVKKPGSSVKVSCKASGGTFSNYAISWVRQAPGQGLEWMGRIIPILGIANYAQKFQGRVTITADKSTSTAYMELSSLRSEDTAVYYCARGYYEARHYYYYYAMDVWGQGTAVTVSS

SEQ ID NO: 441 - protein, 214 aa, synthetic construct
  REGION 1..214: note = Bamlanivimab_11876_VK-CK
DIQMTQSPSSLSASVGDRVTITCRASQSISSYLSWYQQKPGKAPKLLIYAASSLQSGVPSRFSGSGSGTDFTLTITSLQPEDFATYYCQQSYSTPRTFGQGTKVEIKRTVAAPSVFIFPPSDEQLKSGTASVVCLLNNFYPREAKVQWKVDNALQSGNSQESVTEQDSKDSTYSLSSTLTLSKADYEKHKVYACEVTHQGLSSPVTKSFNRGEC

SEQ ID NO: 442 - protein, 454 aa, synthetic construct
  REGION 1..454: note = Bamlanivimab_11876_VH-CH
QVQLVQSGAEVKKPGSSVKVSCKASGGTFSNYAISWVRQAPGQGLEWMGRIIPILGIANYAQKFQGRVTITADKSTSTAYMELSSLRSEDTAVYYCARGYYEARHYYYYYAMDVWGQGTAVTVSSASTKGPSVFPLAPSSKSTSGGTAALGCLVKDYFPEPVTVSWNSGALTSGVHTFPAVLQSSGLYSLSSVVTVPSSSLGTQTYICNVNHKPSNTKVDKRVEPKSCDKTHTCPPCPAPELLGGPSVFLFPPKPKDTLMISRTPEVTCVVVDVSHEDPEVKFNWYVDGVEVHNAKTKPREEQYNSTYRVVSVLTVLHQDWLNGKEYKCKVSNKALPAPIEKTISKAKGQPREPQVYTLPPSREEMTKNQVSLTCLVKGFYPSDIAVEWESNGQPENNYKTTPPVLDSDGSFFLYSKLTVDKSRWQQGNVFSCSVMHEALHNHYTQKSLSLSPG

SEQ ID NO: 443 - protein, 109 aa, synthetic construct
  REGION 1..109: note = Etesevimab_11873_VK
DIVMTQSPSSLSASVGDRVTITCRASQSISRYLNWYQQKPGKAPKLLIYAASSLQSGVPSRFSGSGSGTDFTLTISSLQPEDFATYYCQQSYSTPPEYTFGQGTKLEIK

SEQ ID NO: 444 - protein, 119 aa, synthetic construct
  REGION 1..119: note = Etesevimab_11873_VH
EVQLVESGGGLVQPGGSLRLSCAASGFTVSSNYMSWVRQAPGKGLEWVSVIYSGGSTFYADSVKGRFTISRDNSMNTLFLQMNSLRAEDTAVYYCARVLPMYGDYLDYWGQGTLVTVSS

SEQ ID NO: 445 - protein, 216 aa, synthetic construct
  REGION 1..216: note = Etesevimab_11873_VK-CK
DIVMTQSPSSLSASVGDRVTITCRASQSISRYLNWYQQKPGKAPKLLIYAASSLQSGVPSRFSGSGSGTDFTLTISSLQPEDFATYYCQQSYSTPPEYTFGQGTKLEIKRTVAAPSVFIFPPSDEQLKSGTASVVCLLNNFYPREAKVQWKVDNALQSGNSQESVTEQDSKDSTYSLSSTLTLSKADYEKHKVYACEVTHQGLSSPVTKSFNRGEC

SEQ ID NO: 446 - protein, 448 aa, synthetic construct
  REGION 1..448: note = Etesevimab_11873_VH-CH
EVQLVESGGGLVQPGGSLRLSCAASGFTVSSNYMSWVRQAPGKGLEWVSVIYSGGSTFYADSVKGRFTISRDNSMNTLFLQMNSLRAEDTAVYYCARVLPMYGDYLDYWGQGTLVTVSSASTKGPSVFPLAPSSKSTSGGTAALGCLVKDYFPEPVTVSWNSGALTSGVHTFPAVLQSSGLYSLSSVVTVPSSSLGTQTYICNVNHKPSNTKVDKRVEPKSCDKTHTCPPCPAPEAAGGPSVFLFPPKPKDTLMISRTPEVTCVVVDVSHEDPEVKFNWYVDGVEVHNAKTKPREEQYNSTYRVVSVLTVLHQDWLNGKEYKCKVSNKALPAPIEKTISKAKGQPREPQVYTLPPSREEMTKNQVSLTCLVKGFYPSDIAVEWESNGQPENNYKTTPPVLDSDGSFFLYSKLTVDKSRWQQGNVFSCSVMHEALHNHYTQKSLSLSPG

SEQ ID NO: 447 - protein, 112 aa, synthetic construct
  REGION 1..112: note = Cilgavimab_11777_VK
DIVMTQSPDSLAVSLGERATINCKSSQSVLYSSNNKNYLAWYQQKPGQPPKLLMYWASTRESGVPDRFSGSGSGAEFTLTISSLQAEDVAIYYCQQYYSTLTFGGGTKVEIK

SEQ ID NO: 448 - protein, 131 aa, synthetic construct
  REGION 1..131: note = Cilgavimab_11777_VH
EVQLVESGGGLVKPGGSLRLSCAASGFTFRDVWMSWVRQAPGKGLEWVGRIKSKIDGGTTDYAAPVKGRFTISRDDSKNTLYLQMNSLKTEDTAVYYCTTAGSYYYDTVGPGLPEGKFDYWGQGTLVTVSS

SEQ ID NO: 449 - protein, 219 aa, synthetic construct
  REGION 1..219: note = Cilgavimab_11777_VK-CK
DIVMTQSPDSLAVSLGERATINCKSSQSVLYSSNNKNYLAWYQQKPGQPPKLLMYWASTRESGVPDRFSGSGSGAEFTLTISSLQAEDVAIYYCQQYYSTLTFGGGTKVEIKRTVAAPSVFIFPPSDEQLKSGTASVVCLLNNFYPREAKVQWKVDNALQSGNSQESVTEQDSKDSTYSLSSTLTLSKADYEKHKVYACEVTHQGLSSPVTKSFNRGEC

SEQ ID NO: 450 - protein, 460 aa, synthetic construct
  REGION 1..460: note = Cilgavimab_11777_VH-CH
EVQLVESGGGLVKPGGSLRLSCAASGFTFRDVWMSWVRQAPGKGLEWVGRIKSKIDGGTTDYAAPVKGRFTISRDDSKNTLYLQMNSLKTEDTAVYYCTTAGSYYYDTVGPGLPEGKFDYWGQGTLVTVSSASTKGPSVFPLAPSSKSTSGGTAALGCLVKDYFPEPVTVSWNSGALTSGVHTFPAVLQSSGLYSLSSVVTVPSSSLGTQTYICNVNHKPSNTKVDKRVEPKSCDKTHTCPPCPAPEFEGGPSVFLFPPKPKDTLYITREPEVTCVVVDVSHEDPEVKFNWYVDGVEVHNAKTKPREEQYNSTYRVVSVLTVLHQDWLNGKEYKCKVSNKALPASIEKTISKAKGQPREPQVYTLPPSREEMTKNQVSLTCLVKGFYPSDIAVEWESNGQPENNYKTTPPVLDSDGSFFLYSKLTVDKSRWQQGNVFSCSVMHEALHNHYTQKSLSLSPG

SEQ ID NO: 451 - protein, 109 aa, synthetic construct
  REGION 1..109: note = Tixagevimab_11776_VK
EIVLTQSPGTLSLSPGERATLSCRASQSVSSSYLAWYQQKPGQAPRLLIYGASSRATGIPDRFSGSGSGTDFTLTISRLEPEDFAVYYCQHYGSSRGWTFGQGTKVEIK

SEQ ID NO: 452 - protein, 123 aa, synthetic construct
  REGION 1..123: note = Tixagevimab_11776_VH
QMQLVQSGPEVKKPGTSVKVSCKASGFTFMSSAVQWVRQARGQRLEWIGWIVIGSGNTNYAQKFQERVTITRDMSTSTAYMELSSLRSEDTAVYYCAAPYCSSISCNDGFDIWGQGTMVTVSS

SEQ ID NO: 453 - protein, 216 aa, synthetic construct
  REGION 1..216: note = Tixagevimab_11776_VK-CK
EIVLTQSPGTLSLSPGERATLSCRASQSVSSSYLAWYQQKPGQAPRLLIYGASSRATGIPDRFSGSGSGTDFTLTISRLEPEDFAVYYCQHYGSSRGWTFGQGTKVEIKRTVAAPSVFIFPPSDEQLKSGTASVVCLLNNFYPREAKVQWKVDNALQSGNSQESVTEQDSKDSTYSLSSTLTLSKADYEKHKVYACEVTHQGLSSPVTKSFNRGEC

SEQ ID NO: 454 - protein, 452 aa, synthetic construct
  REGION 1..452: note = Tixagevimab_11776_Vh-CH
QMQLVQSGPEVKKPGTSVKVSCKASGFTFMSSAVQWVRQARGQRLEWIGWIVIGSGNTNYAQKFQERVTITRDMSTSTAYMELSSLRSEDTAVYYCAAPYCSSISCNDGFDIWGQGTMVTVSSASTKGPSVFPLAPSSKSTSGGTAALGCLVKDYFPEPVTVSWNSGALTSGVHTFPAVLQSSGLYSLSSVVTVPSSSLGTQTYICNVNHKPSNTKVDKRVEPKSCDKTHTCPPCPAPEFEGGPSVFLFPPKPKDTLYITREPEVTCVVVDVSHEDPEVKFNWYVDGVEVHNAKTKPREEQYNSTYRVVSVLTVLHQDWLNGKEYKCKVSNKALPASIEKTISKAKGQPREPQVYTLPPSREEMTKNQVSLTCLVKGFYPSDIAVEWESNGQPENNYKTTPPVLDSDGSFFLYSKLTVDKSRWQQGNVFSCSVMHEALHNHYTQKSLSLSPG

SEQ ID NO: 455 - protein, 107 aa, synthetic construct [sequence omitted]

SEQ ID NO: 456 - protein, 127 aa, synthetic construct
  REGION 1..127: note = Sotrovimab_s309_VH
QVQLVQSGAEVKKPGASVKVSCKASGYPFTSYGISWVRQAPGQGLEWMGWISTYQGNTNYAQKFQGRVTMTTDTSTTTGYMELRRLRSDDTAVYYCARDYTRGAWFGESLIGGFDNWGQGTLVTVSS

SEQ ID NO: 457 - protein, 214 aa, synthetic construct; identical to SEQ ID NO: 435
  REGION 1..214: note = Sotrovimab_s309_VK-CK

SEQ ID NO: 458 - protein, 456 aa, synthetic construct
  REGION 1..456: note = Sotrovimab_s309_VH-CH
QVQLVQSGAEVKKPGASVKVSCKASGYPFTSYGISWVRQAPGQGLEWMGWISTYQGNTNYAQKFQGRVTMTTDTSTTTGYMELRRLRSDDTAVYYCARDYTRGAWFGESLIGGFDNWGQGTLVTVSSASTKGPSVFPLAPSSKSTSGGTAALGCLVKDYFPEPVTVSWNSGALTSGVHTFPAVLQSSGLYSLSSVVTVPSSSLGTQTYICNVNHKPSNTKVDKKVEPKSCDKTHTCPPCPAPELLGGPSVFLFPPKPKDTLMISRTPEVTCVVVDVSHEDPEVKFNWYVDGVEVHNAKTKPREEQYNSTYRVVSVLTVLHQDWLNGKEYKCKVSNKALPAPIEKTISKAKGQPREPQVYTLPPSRDELTKNQVSLTCLVKGFYPSDIAVEWESNGQPENNYKTTPPVLDSDGSFFLYSKLTVDKSRWQQGNVFSCSVLHEALHSHYTQKSLSLSPG

SEQ ID NO: 459 - protein, 110 aa, synthetic construct
  REGION 1..110: note = Regdanvimab_11883_VL
ELVLTQPPSVSAAPGQKVTISCSGSSSNIGNNYVSWYQQLPGTAPKLLIYDNNKRPSGIPDRFSGSKSGTSATLGITGLQTGDEADYYCGTWDSSLSAGVFGGGTELTVL

SEQ ID NO: 460 - protein, 128 aa, synthetic construct
  REGION 1..128: note = Regdanvimab_11883_VH
QITLKESGPTLVKPTQTLTLTCSFSGFSLSTSGVGVGWIRQPPGKALEWLALIDWDDNKYHTTSLKTRLTISKDTSKNQVVLTMTNMDPVDTATYYCARIPGFLRYRNRYYYYGMDVWGQGTTVTVSS

SEQ ID NO: 461 - protein, 216 aa, synthetic construct
  REGION 1..216: note = Regdanvimab_11883_VL-CL
ELVLTQPPSVSAAPGQKVTISCSGSSSNIGNNYVSWYQQLPGTAPKLLIYDNNKRPSGIPDRFSGSKSGTSATLGITGLQTGDEADYYCGTWDSSLSAGVFGGGTELTVLGQPKAAPSVTLFPPSSEELQANKATLVCLISDFYPGAVTVAWKADGSPVKAGVETTKPSKQSNNKYAASSYLSLTPEQWKSHRSYSCQVTHEGSTVEKTVAPTECS

SEQ ID NO: 462 - protein, 457 aa, synthetic construct
  REGION 1..457: note = Regdanvimab_11883_VH-CH
QITLKESGPTLVKPTQTLTLTCSFSGFSLSTSGVGVGWIRQPPGKALEWLALIDWDDNKYHTTSLKTRLTISKDTSKNQVVLTMTNMDPVDTATYYCARIPGFLRYRNRYYYYGMDVWGQGTTVTVSSASTKGPSVFPLAPSSKSTSGGTAALGCLVKDYFPEPVTVSWNSGALTSGVHTFPAVLQSSGLYSLSSVVTVPSSSLGTQTYICNVNHKPSNTKVDKRVEPKSCDKTHTCPPCPAPELLGGPSVFLFPPKPKDTLMISRTPEVTCVVVDVSHEDPEVKFNWYVDGVEVHNAKTKPREEQYNSTYRVVSVLTVLHQDWLNGKEYKCKVSNKALPAPIEKTISKAKGQPREPQVYTLPPSRDELTKNQVSLTCLVKGFYPSDIAVEWESNGQPENNYKTTPPVLDSDGSFFLYSKLTVDKSRWQQGNVFSCSVMHEALHNHYTQKSLSLSPG

SEQ ID NO: 463 - protein, 107 aa, synthetic construct
  REGION 1..107: note = B13A_VK
DIQMTQTTSSLSASLGDRVTISCRASQDISNYLNWYQQKPDGTVKLLIYYTSRLQSGVPSRFSGSGTGTDYSLTISNLEQEDIATYFCQQGNTLPWTFGGGTKLEIK

SEQ ID NO: 464 - protein, 121 aa, synthetic construct
  REGION 1..121: note = B13A_VH
QVQLQQSGAELVKPGASVKISCKASGYAFSNYWMNWVKQRPGKGLEWIGQIYPGDGDTNYNGNFKGKATLTADKSSSTAYIQLSSLTSEDSAVYFCGRGFIATVVEVFDHWGLGTTLTVSS

SEQ ID NO: 465 - protein, 214 aa, synthetic construct
  REGION 1..214: note = B13A_VK-CK
DIQMTQTTSSLSASLGDRVTISCRASQDISNYLNWYQQKPDGTVKLLIYYTSRLQSGVPSRFSGSGTGTDYSLTISNLEQEDIATYFCQQGNTLPWTFGGGTKLEIKRTVAAPSVFIFPPSDEQLKSGTASVVCLLNNFYPREAKVQWKVDNALQSGNSQESVTEQDSKDSTYSLSSTLTLSKADYEKHKVYACEVTHQGLSSPVTKSFNRGEC

SEQ ID NO: 466 - protein, 450 aa, synthetic construct
  REGION 1..450: note = B13A_VH-CH/PGLALA
QVQLQQSGAELVKPGASVKISCKASGYAFSNYWMNWVKQRPGKGLEWIGQIYPGDGDTNYNGNFKGKATLTADKSSSTAYIQLSSLTSEDSAVYFCGRGFIATVVEVFDHWGLGTTLTVSSASTKGPSVFPLAPSSKSTSGGTAALGCLVKDYFPEPVTVSWNSGALTSGVHTFPAVLQSSGLYSLSSVVTVPSSSLGTQTYICNVNHKPSNTKVDKKVEPKSCDKTHTCPPCPAPEAAGGPSVFLFPPKPKDTLMISRTPEVTCVVVDVSHEDPEVKFNWYVDGVEVHNAKTKPREEQYNSTYRVVSVLTVLHQDWLNGKEYKCKVSNKALGAPIEKTISKAKGQPREPQVYTLPPSRDELTKNQVSLTCLVKGFYPSDIAVEWESNGQPENNYKTTPPVLDSDGSFFLYSKLTVDKSRWQQGNVFSCSVMHEALHNHYTQKSLSLSPG

SEQ ID NO: 467 - protein, 111 aa, synthetic construct
  REGION 1..111: note = O24A_VK
DIVLTQSPASLAVFLGQRATISCRASKSVSTSGYSYMHWYQQRPGQPPKLLIYLASNLESGVPARFSGSGSGTDFTLNIHPVEEEDAATYYCQHSRELPPTFGGGTKLEIK

SEQ ID NO: 468 - protein, 118 aa, synthetic construct
  REGION 1..118: note = O24A_VH
QAYLQQSGAELVRPGASVKMSCKASGYTFTSYSMHWVKQTPRQGLEWIGAIYPGNDDTSYNQKFKGKATLTVDRSSSTAYMQLSSLTSEDSAVYFCTRDYSNYPFDYWGQGTTLTVSS

SEQ ID NO: 469 - protein, 218 aa, synthetic construct
  REGION 1..218: note = O24A_VK-CK
DIVLTQSPASLAVFLGQRATISCRASKSVSTSGYSYMHWYQQRPGQPPKLLIYLASNLESGVPARFSGSGSGTDFTLNIHPVEEEDAATYYCQHSRELPPTFGGGTKLEIKRTVAAPSVFIFPPSDEQLKSGTASVVCLLNNFYPREAKVQWKVDNALQSGNSQESVTEQDSKDSTYSLSSTLTLSKADYEKHKVYACEVTHQGLSSPVTKSFNRGEC

SEQ ID NO: 470 - protein, 447 aa, synthetic construct
  REGION 1..447: note = O24A_VH-CH/PGLALA
QAYLQQSGAELVRPGASVKMSCKASGYTFTSYSMHWVKQTPRQGLEWIGAIYPGNDDTSYNQKFKGKATLTVDRSSSTAYMQLSSLTSEDSAVYFCTRDYSNYPFDYWGQGTTLTVSSASTKGPSVFPLAPSSKSTSGGTAALGCLVKDYFPEPVTVSWNSGALTSGVHTFPAVLQSSGLYSLSSVVTVPSSSLGTQTYICNVNHKPSNTKVDKKVEPKSCDKTHTCPPCPAPEAAGGPSVFLFPPKPKDTLMISRTPEVTCVVVDVSHEDPEVKFNWYVDGVEVHNAKTKPREEQYNSTYRVVSVLTVLHQDWLNGKEYKCKVSNKALGAPIEKTISKAKGQPREPQVYTLPPSRDELTKNQVSLTCLVKGFYPSDIAVEWESNGQPENNYKTTPPVLDSDGSFFLYSKLTVDKSRWQQGNVFSCSVMHEALHNHYTQKSLSLSPG

SEQ ID NO: 471 - protein, 991 aa, synthetic construct
  REGION 1..991: note = ACE2-740wt/201/hole/PGLALA/RF
MEWSWVFLFFLSVTTGVHSQSTIEEQAKTFLDKFNHEAEDLFYQSSLASWNYNTNITEENVQNMNNAGDKWSAFLKEQSTLAQMYPLQEIQNLTVKLQLQALQQNGSSVLSEDKSKRLNTILNTMSTIYSTGKVCNPDNPQECLLLEPGLNEIMANSLDYNERLWAWESWRSEVGKQLRPLYEEYVVLKNEMARANHYEDYGDYWRGDYEVNGVDGYDYSRGQLIEDVEHTFEEIKPLYEHLHAYVRAKLMNAYPSYISPIGCLPAHLLGDMWGRFWTNLYSLTVPFGQKPNIDVTDAMVDQAWDAQRIFKEAEKFFVSVGLPNMTQGFWENSMLTDPGNVQKAVCHPTAWDLGKGDFRILMCTKVTMDDFLTAHHEMGHIQYDMAYAAQPFLLRNGANEGFHEAVGEIMSLSAATPKHLKSIGLLSPDFQEDNETEINFLLKQALTIVGTLPFTYMLEKWRWMVFKGEIPKDQWMKKWWEMKREIVGVVEPVPHDETYCDPASLFHVSNDYSFIRYYTRTLYQFQFQEALCQAAKHEGPLHKCDISNSTEAGQKLFNMLRLGKSEPWTLALENVVGAKNMNVRPLLNYFEPLFTWLKDQNKNSFVGWSTDWSPYADQSIKVRISLKSALGDKAYEWNDNEMYLFRSSVAYAMRQYFLKVKNQMILFGEEDVRVANLKPRISFNFFVTAPKNVSDIIPRTEVEKAIRMSRSRINDAFRLNDNSLEFLGIQPTLGPPNQPPVSTSTSPTRSMAPGAVHLPQPVSTRDKTHTCPPCPAPEAAGGPSVFLFPPKPKDTLMISRTPEVTCVVVDVSHEDPEVKFNWYVDGVEVHNAKTKPREEQYNSTYRVVSVLTVLHQDWLNGKEYKCKVSNKALGAPIEKTISKAKGQPREPQVCTLPPSRDELTKNQVSLSCAVKGFYPSDIAVEWESNGQPENNYKTTPPVLDSDGSFFLVSKLTVDKSRWQQGNVFSCSVMHEALHNRFTQKSLSLSPG

SEQ ID NO: 472 - protein, 468 aa, synthetic construct
  REGION 1..468: note = REGN10987_VH/knob/PGLALA
MEWSWVFLFFLSVTTGVHSQVQLVESGGGVVQPGRSLRLSCAASGFTFSNYAMYWVRQAPGKGLEWVAVISYDGSNKYYADSVKGRFTISRDNSKNTLYLQMNSLRTEDTAVYYCASGSDYGDYLLVYWGQGTLVTVSSASTKGPSVFPLAPSSKSTSGGTAALGCLVKDYFPEPVTVSWNSGALTSGVHTFPAVLQSSGLYSLSSVVTVPSSSLGTQTYICNVNHKPSNTKVDKKVEPKSCDKTHTCPPCPAPEAAGGPSVFLFPPKPKDTLMISRTPEVTCVVVDVSHEDPEVKFNWYVDGVEVHNAKTKPREEQYNSTYRVVSVLTVLHQDWLNGKEYKCKVSNKALGAPIEKTISKAKGQPREPQVYTLPPCRDELTKNQVSLWCLVKGFYPSDIAVEWESNGQPENNYKTTPPVLDSDGSFFLYSKLTVDKSRWQQGNVFSCSVMHEALHNHYTQKSLSLSPG

SEQ ID NO: 473 - protein, 991 aa, synthetic construct
  REGION 1..991: note = ACE2-740HA/201/hole/PGLALA/RF
MEWSWVFLFFLSVTTGVHSQSTIEEQAKTFLDKFNHEAEDLFYQSSLASWNYNTNITEENVQNMNNAGDKWSAFLKEQSTLAQMYPLQEIQNLTVKLQLQALQQNGSSVLSEDKSKRLNTILNTMSTIYSTGKVCNPDNPQECLLLEPGLNEIMANSLDYNERLWAWESWRSEVGKQLRPLYEEYVVLKNEMARANHYEDYGDYWRGDYEVNGVDGYDYSRGQLIEDVEHTFEEIKPLYEHLHAYVRAKLMNAYPSYISPIGCLPAHLLGDMWGRFWTNLYSLTVPFGQKPNIDVTDAMVDQAWDAQRIFKEAEKFFVSVGLPNMTQGFWENSMLTDPGNVQKAVCHPTAWDLGKGDFRILMCTKVTMDDFLTAHHEMGAIQYDMAYAAQPFLLRNGANEGFHEAVGEIMSLSAATPKHLKSIGLLSPDFQEDNETEINFLLKQALTIVGTLPFTYMLEKWRWMVFKGEIPKDQWMKKWWEMKREIVGVVEPVPHDETYCDPASLFHVSNDYSFIRYYTRTLYQFQFQEALCQAAKHEGPLHKCDISNSTEAGQKLFNMLRLGKSEPWTLALENVVGAKNMNVRPLLNYFEPLFTWLKDQNKNSFVGWSTDWSPYADQSIKVRISLKSALGDKAYEWNDNEMYLFRSSVAYAMRQYFLKVKNQMILFGEEDVRVANLKPRISFNFFVTAPKNVSDIIPRTEVEKAIRMSRSRINDAFRLNDNSLEFLGIQPTLGPPNQPPVSTSTSPTRSMAPGAVHLPQPVSTRDKTHTCPPCPAPEAAGGPSVFLFPPKPKDTLMISRTPEVTCVVVDVSHEDPEVKFNWYVDGVEVHNAKTKPREEQYNSTYRVVSVLTVLHQDWLNGKEYKCKVSNKALGAPIEKTISKAKGQPREPQVCTLPPSRDELTKNQVSLSCAVKGFYPSDIAVEWESNGQPENNYKTTPPVLDSDGSFFLVSKLTVDKSRWQQGNVFSCSVMHEALHNRFTQKSLSLSPG

SEQ ID NO: 474 - protein, 468 aa, synthetic construct
  REGION 1..468: note = REGN10933_VH/knob/PGLALA
MEWSWVFLFFLSVTTGVHSQVQLVESGGGLVKPGGSLRLSCAASGFTFSDYYMSWIRQAPGKGLEWVSYITYSGSTIYYADSVKGRFTISRDNAKSSLYLQMNSLRAEDTAVYYCARDRGTTMVPFDYWGQGTLVTVSSASTKGPSVFPLAPSSKSTSGGTAALGCLVKDYFPEPVTVSWNSGALTSGVHTFPAVLQSSGLYSLSSVVTVPSSSLGTQTYICNVNHKPSNTKVDKKVEPKSCDKTHTCPPCPAPEAAGGPSVFLFPPKPKDTLMISRTPEVTCVVVDVSHEDPEVKFNWYVDGVEVHNAKTKPREEQYNSTYRVVSVLTVLHQDWLNGKEYKCKVSNKALGAPIEKTISKAKGQPREPQVYTLPPCRDELTKNQVSLWCLVKGFYPSDIAVEWESNGQPENNYKTTPPVLDSDGSFFLYSKLTVDKSRWQQGNVFSCSVMHEALHNHYTQKSLSLSPG

SEQ ID NO: 475 - protein, 473 aa, synthetic construct
  REGION 1..473: note = Bamlanivimab_11876_VH/knob/PGLALA
MEWSWVFLFFLSVTTGVHSQVQLVQSGAEVKKPGSSVKVSCKASGGTFSNYAISWVRQAPGQGLEWMGRIIPILGIANYAQKFQGRVTITADKSTSTAYMELSSLRSEDTAVYYCARGYYEARHYYYYYAMDVWGQGTAVTVSSASTKGPSVFPLAPSSKSTSGGTAALGCLVKDYFPEPVTVSWNSGALTSGVHTFPAVLQSSGLYSLSSVVTVPSSSLGTQTYICNVNHKPSNTKVDKKVEPKSCDKTHTCPPCPAPEAAGGPSVFLFPPKPKDTLMISRTPEVTCVVVDVSHEDPEVKFNWYVDGVEVHNAKTKPREEQYNSTYRVVSVLTVLHQDWLNGKEYKCKVSNKALGAPIEKTISKAKGQPREPQVYTLPPCRDELTKNQVSLWCLVKGFYPSDIAVEWESNGQPENNYKTTPPVLDSDGSFFLYSKLTVDKSRWQQGNVFSCSVMHEALHNHYTQKSLSLSPG

SEQ ID NO: 476 - protein, 467 aa, synthetic construct
  REGION 1..467: note = Etesevimab_11873_VH/knob/PGLALA
MEWSWVFLFFLSVTTGVHSEVQLVESGGGLVQPGGSLRLSCAASGFTVSSNYMSWVRQAPGKGLEWVSVIYSGGSTFYADSVKGRFTISRDNSMNTLFLQMNSLRAEDTAVYYCARVLPMYGDYLDYWGQGTLVTVSSASTKGPSVFPLAPSSKSTSGGTAALGCLVKDYFPEPVTVSWNSGALTSGVHTFPAVLQSSGLYSLSSVVTVPSSSLGTQTYICNVNHKPSNTKVDKKVEPKSCDKTHTCPPCPAPEAAGGPSVFLFPPKPKDTLMISRTPEVTCVVVDVSHEDPEVKFNWYVDGVEVHNAKTKPREEQYNSTYRVVSVLTVLHQDWLNGKEYKCKVSNKALGAPIEKTISKAKGQPREPQVYTLPPCRDELTKNQVSLWCLVKGFYPSDIAVEWESNGQPENNYKTTPPVLDSDGSFFLYSKLTVDKSRWQQGNVFSCSVMHEALHNHYTQKSLSLSPG

SEQ ID NO: 477 - protein, 991 aa, synthetic construct
  REGION 1..991: note = ACE2-740wt/201/hole/FES/YTE/RF
MEWSWVFLFFLSVTTGVHSQSTIEEQAKTFLDKFNHEAEDLFYQSSLASWNYNTNITEENVQNMNNAGDKWSAFLKEQSTLAQMYPLQEIQNLTVKLQLQALQQNGSSVLSEDKSKRLNTILNTMSTIYSTGKVCNPDNPQECLLLEPGLNEIMANSLDYNERLWAWESWRSEVGKQLRPLYEEYVVLKNEMARANHYEDYGDYWRGDYEVNGVDGYDYSRGQLIEDVEHTFEEIKPLYEHLHAYVRAKLMNAYPSYISPIGCLPAHLLGDMWGRFWTNLYSLTVPFGQKPNIDVTDAMVDQAWDAQRIFKEAEKFFVSVGLPNMTQGFWENSMLTDPGNVQKAVCHPTAWDLGKGDFRILMCTKVTMDDFLTAHHEMGHIQYDMAYAAQPFLLRNGANEGFHEAVGEIMSLSAATPKHLKSIGLLSPDFQEDNETEINFLLKQALTIVGTLPFTYMLEKWRWMVFKGEIPKDQWMKKWWEMKREIVGVVEPVPHDETYCDPASLFHVSNDYSFIRYYTRTLYQFQFQEALCQAAKHEGPLHKCDISNSTEAGQKLFNMLRLGKSEPWTLALENVVGAKNMNVRPLLNYFEPLFTWLKDQNKNSFVGWSTDWSPYADQSIKVRISLKSALGDKAYEWNDNEMYLFRSSVAYAMRQYFLKVKNQMILFGEEDVRVANLKPRISFNFFVTAPKNVSDIIPRTEVEKAIRMSRSRINDAFRLNDNSLEFLGIQPTLGPPNQPPVSTSTSPTRSMAPGAVHLPQPVSTRDKTHTCPPCPAPEFEGGPSVFLFPPKPKDTLYITREPEVTCVVVDVSHEDPEVKFNWYVDGVEVHNAKTKPREEQYNSTYRVVSVLTVLHQDWLNGKEYKCKVSNKALPASIEKTISKAKGQPREPQVCTLPPSRDELTKNQVSLSCAVKGFYPSDIAVEWESNGQPENNYKTTPPVLDSDGSFFLVSKLTVDKSRWQQGNVFSCSVMHEALHNRFTQKSLSLSPG

SEQ ID NO: 478 - protein, 479 aa, synthetic construct
  REGION 1..479: note = Cilgavimab_11777_VH/knob/FES/YTE
MEWSWVFLFFLSVTTGVHSEVQLVESGGGLVKPGGSLRLSCAASGFTFRDVWMSWVRQAPGKGLEWVGRIKSKIDGGTTDYAAPVKGRFTISRDDSKNTLYLQMNSLKTEDTAVYYCTTAGSYYYDTVGPGLPEGKFDYWGQGTLVTVSSASTKGPSVFPLAPSSKSTSGGTAALGCLVKDYFPEPVTVSWNSGALTSGVHTFPAVLQSSGLYSLSSVVTVPSSSLGTQTYICNVNHKPSNTKVDKKVEPKSCDKTHTCPPCPAPEFEGGPSVFLFPPKPKDTLYITREPEVTCVVVDVSHEDPEVKFNWYVDGVEVHNAKTKPREEQYNSTYRVVSVLTVLHQDWLNGKEYKCKVSNKALPASIEKTISKAKGQPREPQVYTLPPCRDELTKNQVSLWCLVKGFYPSDIAVEWESNGQPENNYKTTPPVLDSDGSFFLYSKLTVDKSRWQQGNVFSCSVMHEALHNHYTQKSLSLSPG

SEQ ID NO: 479 - protein, 991 aa, synthetic construct
  REGION 1..991: note = ACE2-740HA/201/hole/FES/YTE/RF
MEWSWVFLFFLSVTTGVHSQSTIEEQAKTFLDKFNHEAEDLFYQSSLASWNYNTNITEENVQNMNNAGDKWSAFLKEQSTLAQMYPLQEIQNLTVKLQLQALQQNGSSVLSEDKSKRLNTILNTMSTIYSTGKVCNPDNPQECLLLEPGLNEIMANSLDYNERLWAWESWRSEVGKQLRPLYEEYVVLKNEMARANHYEDYGDYWRGDYEVNGVDGYDYSRGQLIEDVEHTFEEIKPLYEHLHAYVRAKLMNAYPSYISPIGCLPAHLLGDMWGRFWTNLYSLTVPFGQKPNIDVTDAMVDQAWDAQRIFKEAEKFFVSVGLPNMTQGFWENSMLTDPGNVQKAVCHPTAWDLGKGDFRILMCTKVTMDDFLTAHHEMGAIQYDMAYAAQPFLLRNGANEGFHEAVGEIMSLSAATPKHLKSIGLLSPDFQEDNETEINFLLKQALTIVGTLPFTYMLEKWRWMVFKGEIPKDQWMKKWWEMKREIVGVVEPVPHDETYCDPASLFHVSNDYSFIRYYTRTLYQFQFQEALCQAAKHEGPLHKCDISNSTEAGQKLFNMLRLGKSEPWTLALENVVGAKNMNVRPLLNYFEPLFTWLKDQNKNSFVGWSTDWSPYADQSIKVRISLKSALGDKAYEWNDNEMYLFRSSVAYAMRQYFLKVKNQMILFGEEDVRVANLKPRISFNFFVTAPKNVSDIIPRTEVEKAIRMSRSRINDAFRLNDNSLEFLGIQPTLGPPNQPPVSTSTSPTRSMAPGAVHLPQPVSTRDKTHTCPPCPAPEFEGGPSVFLFPPKPKDTLYITREPEVTCVVVDVSHEDPEVKFNWYVDGVEVHNAKTKPREEQYNSTYRVVSVLTVLHQDWLNGKEYKCKVSNKALPASIEKTISKAKGQPREPQVCTLPPSRDELTKNQVSLSCAVKGFYPSDIAVEWESNGQPENNYKTTPPVLDSDGSFFLVSKLTVDKSRWQQGNVFSCSVMHEALHNRFTQKSLSLSPG

SEQ ID NO: 480 - protein, 471 aa, synthetic construct
  REGION 1..471: note = Tixagevimab_11776_VH/knob/FES/YTE
MEWSWVFLFFLSVTTGVHSQMQLVQSGPEVKKPGTSVKVSCKASGFTFMSSAVQWVRQARGQRLEWIGWIVIGSGNTNYAQKFQERVTITRDMSTSTAYMELSSLRSEDTAVYYCAAPYCSSISCNDGFDIWGQGTMVTVSSASTKGPSVFPLAPSSKSTSGGTAALGCLVKDYFPEPVTVSWNSGALTSGVHTFPAVLQSSGLYSLSSVVTVPSSSLGTQTYICNVNHKPSNTKVDKKVEPKSCDKTHTCPPCPAPEFEGGPSVFLFPPKPKDTLYITREPEVTCVVVDVSHEDPEVKFNWYVDGVEVHNAKTKPREEQYNSTYRVVSVLTVLHQDWLNGKEYKCKVSNKALPASIEKTISKAKGQPREPQVYTLPPCRDELTKNQVSLWCLVKGFYPSDIAVEWESNGQPENNYKTTPPVLDSDGSFFLYSKLTVDKSRWQQGNVFSCSVMHEALHNHYTQKSLSLSPG

SEQ ID NO: 481 - protein, 991 aa, synthetic construct
  REGION 1..991: note = ACE2-740wt/201/hole/PGLALA/RF/LS
MEWSWVFLFFLSVTTGVHSQSTIEEQAKTFLDKFNHEAEDLFYQSSLASWNYNTNITEENVQNMNNAGDKWSAFLKEQSTLAQMYPLQEIQNLTVKLQLQALQQNGSSVLSEDKSKRLNTILNTMSTIYSTGKVCNPDNPQECLLLEPGLNEIMANSLDYNERLWAWESWRSEVGKQLRPLYEEYVVLKNEMARANHYEDYGDYWRGDYEVNGVDGYDYSRGQLIEDVEHTFEEIKPLYEHLHAYVRAKLMNAYPSYISPIGCLPAHLLGDMWGRFWTNLYSLTVPFGQKPNIDVTDAMVDQAWDAQRIFKEAEKFFVSVGLPNMTQGFWENSMLTDPGNVQKAVCHPTAWDLGKGDFRILMCTKVTMDDFLTAHHEMGHIQYDMAYAAQPFLLRNGANEGFHEAVGEIMSLSAATPKHLKSIGLLSPDFQEDNETEINFLLKQALTIVGTLPFTYMLEKWRWMVFKGEIPKDQWMKKWWEMKREIVGVVEPVPHDETYCDPASLFHVSNDYSFIRYYTRTLYQFQFQEALCQAAKHEGPLHKCDISNSTEAGQKLFNMLRLGKSEPWTLALENVVGAKNMNVRPLLNYFEPLFTWLKDQNKNSFVGWSTDWSPYADQSIKVRISLKSALGDKAYEWNDNEMYLFRSSVAYAMRQYFLKVKNQMILFGEEDVRVANLKPRISFNFFVTAPKNVSDIIPRTEVEKAIRMSRSRINDAFRLNDNSLEFLGIQPTLGPPNQPPVSTSTSPTRSMAPGAVHLPQPVSTRDKTHTCPPCPAPEAAGGPSVFLFPPKPKDTLMISRTPEVTCVVVDVSHEDPEVKFNWYVDGVEVHNAKTKPREEQYNSTYRVVSVLTVLHQDWLNGKEYKCKVSNKALGAPIEKTISKAKGQPREPQVCTLPPSRDELTKNQVSLSCAVKGFYPSDIAVEWESNGQPENNYKTTPPVLDSDGSFFLVSKLTVDKSRWQQGNVFSCSVLHEALHSRFTQKSLSLSPG

SEQ ID NO: 482 - protein, 475 aa, synthetic construct
  REGION 1..475: note = Sotrovimab_11766_VH/knob/PGLALA/LS
MEWSWVFLFFLSVTTGVHSQVQLVQSGAEVKKPGASVKVSCKASGYPFTSYGISWVRQAPGQGLEWMGWISTYQGNTNYAQKFQGRVTMTTDTSTTTGYMELRRLRSDDTAVYYCARDYTRGAWFGESLIGGFDNWGQGTLVTVSSASTKGPSVFPLAPSSKSTSGGTAALGCLVKDYFPEPVTVSWNSGALTSGVHTFPAVLQSSGLYSLSSVVTVPSSSLGTQTYICNVNHKPSNTKVDKKVEPKSCDKTHTCPPCPAPEAAGGPSVFLFPPKPKDTLMISRTPEVTCVVVDVSHEDPEVKFNWYVDGVEVHNAKTKPREEQYNSTYRVVSVLTVLHQDWLNGKEYKCKVSNKALGAPIEKTISKAKGQPREPQVYTLPPCRDELTKNQVSLWCLVKGFYPSDIAVEWESNGQPENNYKTTPPVLDSDGSFFLYSKLTVDKSRWQQGNVFSCSVLHEALHSHYTQKSLSLSPG

SEQ ID NO: 483 - protein, 991 aa, synthetic construct
  REGION 1..991: note = ACE2-740HA/201/hole/PGLALA/RF/LS
MEWSWVFLFFLSVTTGVHSQSTIEEQAKTFLDKFNHEAEDLFYQSSLASWNYNTNITEENVQNMNNAGDKWSAFLKEQSTLAQMYPLQEIQNLTVKLQLQALQQNGSSVLSEDKSKRLNTILNTMSTIYSTGKVCNPDNPQECLLLEPGLNEIMANSLDYNERLWAWESWRSEVGKQLRPLYEEYVVLKNEMARANHYEDYGDYWRGDYEVNGVDGYDYSRGQLIEDVEHTFEEIKPLYEHLHAYVRAKLMNAYPSYISPIGCLPAHLLGDMWGRFWTNLYSLTVPFGQKPNIDVTDAMVDQAWDAQRIFKEAEKFFVSVGLPNMTQGFWENSMLTDPGNVQKAVCHPTAWDLGKGDFRILMCTKVTMDDFLTAHHEMGAIQYDMAYAAQPFLLRNGANEGFHEAVGEIMSLSAATPKHLKSIGLLSPDFQEDNETEINFLLKQALTIVGTLPFTYMLEKWRWMVFKGEIPKDQWMKKWWEMKREIVGVVEPVPHDETYCDPASLFHVSNDYSFIRYYTRTLYQFQFQEALCQAAKHEGPLHKCDISNSTEAGQKLFNMLRLGKSEPWTLALENVVGAKNMNVRPLLNYFEPLFTWLKDQNKNSFVGWSTDWSPYADQSIKVRISLKSALGDKAYEWNDNEMYLFRSSVAYAMRQYFLKVKNQMILFGEEDVRVANLKPRISFNFFVTAPKNVSDIIPRTEVEKAIRMSRSRINDAFRLNDNSLEFLGIQPTLGPPNQPPVSTSTSPTRSMAPGAVHLPQPVSTRDKTHTCPPCPAPEAAGGPSVFLFPPKPKDTLMISRTPEVTCVVVDVSHEDPEVKFNWYVDGVEVHNAKTKPREEQYNSTYRVVSVLTVLHQDWLNGKEYKCKVSNKALGAPIEKTISKAKGQPREPQVCTLPPSRDELTKNQVSLSCAVKGFYPSDIAVEWESNGQPENNYKTTPPVLDSDGSFFLVSKLTVDKSRWQQGNVFSCSVLHEALHSRFTQKSLSLSPG

SEQ ID NO: 484 - protein, 476 aa, synthetic construct
  REGION 1..476: note = Regdanvimab_11883_VH/knob/PGLALA
MEWSWVFLFFLSVTTGVHSQITLKESGPTLVKPTQTLTLTCSFSGFSLSTSGVGVGWIRQPPGKALEWLALIDWDDNKYHTTSLKTRLTISKDTSKNQVVLTMTNMDPVDTATYYCARIPGFLRYRNRYYYYGMDVWGQGTTVTVSSASTKGPSVFPLAPSSKSTSGGTAALGCLVKDYFPEPVTVSWNSGALTSGVHTFPAVLQSSGLYSLSSVVTVPSSSLGTQTYICNVNHKPSNTKVDKKVEPKSCDKTHTCPPCPAPEAAGGPSVFLFPPKPKDTLMISRTPEVTCVVVDVSHEDPEVKFNWYVDGVEVHNAKTKPREEQYNSTYRVVSVLTVLHQDWLNGKEYKCKVSNKALGAPIEKTISKAKGQPREPQVYTLPPCRDELTKNQVSLWCLVKGFYPSDIAVEWESNGQPENNYKTTPPVLDSDGSFFLYSKLTVDKSRWQQGNVFSCSVMHEALHNHYTQKSLSLSPG

SEQ ID NO: 485 - protein, 469 aa, synthetic construct
  REGION 1..469: note = B13A_VH/knob/PGLALA
MEWSWVFLFFLSVTTGVHSQVQLQQSGAELVKPGASVKISCKASGYAFSNYWMNWVKQRPGKGLEWIGQIYPGDGDTNYNGNFKGKATLTADKSSSTAYIQLSSLTSEDSAVYFCGRGFIATVVEVFDHWGLGTTLTVSSASTKGPSVFPLAPSSKSTSGGTAALGCLVKDYFPEPVTVSWNSGALTSGVHTFPAVLQSSGLYSLSSVVTVPSSSLGTQTYICNVNHKPSNTKVDKKVEPKSCDKTHTCPPCPAPEAAGGPSVFLFPPKPKDTLMISRTPEVTCVVVDVSHEDPEVKFNWYVDGVEVHNAKTKPREEQYNSTYRVVSVLTVLHQDWLNGKEYKCKVSNKALGAPIEKTISKAKGQPREPQVYTLPPCRDELTKNQVSLWCLVKGFYPSDIAVEWESNGQPENNYKTTPPVLDSDGSFFLYSKLTVDKSRWQQGNVFSCSVMHEALHNHYTQKSLSLSPG

SEQ ID NO: 486 - protein, 466 aa, synthetic construct
  REGION 1..466: note = O24A_VH/knob/PGLALA
MEWSWVFLFFLSVTTGVHSQAYLQQSGAELVRPGASVKMSCKASGYTFTSYSMHWVKQTPRQGLEWIGAIYPGNDDTSYNQKFKGKATLTVDRSSSTAYMQLSSLTSEDSAVYFCTRDYSNYPFDYWGQGTTLTVSSASTKGPSVFPLAPSSKSTSGGTAALGCLVKDYFPEPVTVSWNSGALTSGVHTFPAVLQSSGLYSLSSVVTVPSSSLGTQTYICNVNHKPSNTKVDKKVEPKSCDKTHTCPPCPAPEAAGGPSVFLFPPKPKDTLMISRTPEVTCVVVDVSHEDPEVKFNWYVDGVEVHNAKTKPREEQYNSTYRVVSVLTVLHQDWLNGKEYKCKVSNKALGAPIEKTISKAKGQPREPQVYTLPPCRDELTKNQVSLWCLVKGFYPSDIAVEWESNGQPENNYKTTPPVLDSDGSFFLYSKLTVDKSRWQQGNVFSCSVMHEALHNHYTQKSLSLSPG

SEQ ID NO: 487 - protein, 469 aa, synthetic construct
  REGION 1..469: note = B13A_VH/knob/FES/YTE
MEWSWVFLFFLSVTTGVHSQVQLQQSGAELVKPGASVKISCKASGYAFSNYWMNWVKQRPGKGLEWIGQIYPGDGDTNYNGNFKGKATLTADKSSSTAYIQLSSLTSEDSAVYFCGRGFIATVVEVFDHWGLGTTLTVSSASTKGPSVFPLAPSSKSTSGGTAALGCLVKDYFPEPVTVSWNSGALTSGVHTFPAVLQSSGLYSLSSVVTVPSSSLGTQTYICNVNHKPSNTKVDKKVEPKSCDKTHTCPPCPAPEFEGGPSVFLFPPKPKDTLYITREPEVTCVVVDVSHEDPEVKFNWYVDGVEVHNAKTKPREEQYNSTYRVVSVLTVLHQDWLNGKEYKCKVSNKALPASIEKTISKAKGQPREPQVYTLPPCRDELTKNQVSLWCLVKGFYPSDIAVEWESNGQPENNYKTTPPVLDSDGSFFLYSKLTVDKSRWQQGNVFSCSVMHEALHNHYTQKSLSLSPG

SEQ ID NO: 488 - protein, 466 aa, synthetic construct
  REGION 1..466: note = O24A_VH/knob/FES/YTE
MEWSWVFLFFLSVTTGVHSQAYLQQSGAELVRPGASVKMSCKASGYTFTSYSMHWVKQTPRQGLEWIGAIYPGNDDTSYNQKFKGKATLTVDRSSSTAYMQLSSLTSEDSAVYFCTRDYSNYPFDYWGQGTTLTVSSASTKGPSVFPLAPSSKSTSGGTAALGCLVKDYFPEPVTVSWNSGALTSGVHTFPAVLQSSGLYSLSSVVTVPSSSLGTQTYICNVNHKPSNTKVDKKVEPKSCDKTHTCPPCPAPEFEGGPSVFLFPPKPKDTLYITREPEVTCVVVDVSHEDPEVKFNWYVDGVEVHNAKTKPREEQYNSTYRVVSVLTVLHQDWLNGKEYKCKVSNKALPASIEKTISKAKGQPREPQVYTLPPCRDELTKNQVSLWCLVKGFYPSDIAVEWESNGQPENNYKTTPPVLDSDGSFFLYSKLTVDKSRWQQGNVFSCSVMHEALHNHYTQKSLSLSPG

SEQ ID NO: 489 - protein, 605 aa, synthetic construct
  REGION 1..605: note = REGN10987_VH/CLD201/hole/PGLALA/RF/N84S
QVQLVESGGGVVQPGRSLRLSCAASGFTFSNYAMYWVRQAPGKGLEWVAVISYDGSNKYYADSVKGRFTISRDNSKNTLYLQMSSLRTEDTAVYYCASGSDYGDYLLVYWGQGTLVTVSSASTKGPSVFPLAPSSKSTSGGTAALGCLVKDYFPEPVTVSWNSGALTSGVHTFPAVLQSSGLYSLSSVVTVPSSSLGTQTYICNVNHKPSNTKVDKKVEPKSCTDWSPYADQSIKVRISLKSALGDKAYEWNDNEMYLFRSSVAYAMRQYFLKVKNQMILFGEEDVRVANLKPRISFNFFVTAPKNVSDIIPRTEVEKAIRMSRSRINDAFRLNDNSLEFLGIQPTLGPPNQPPVSTSTSPTRSMAPGAVHLPQPVSTRDKTHTCPPCPAPEAAGGPSVFLFPPKPKDTLMISRTPEVTCVVVDVSHEDPEVKFNWYVDGVEVHNAKTKPREEQYNSTYRVVSVLTVLHQDWLNGKEYKCKVSNKALGAPIEKTISKAKGQPREPQVCTLPPSRDELTKNQVSLSCAVKGFYPSDIAVEWESNGQPENNYKTTPPVLDSDGSFFLVSKLTVDKSRWQQGNVFSCSVMHEALHNRFTQKSLSLSPG

SEQ ID NO: 490 - protein, 598 aa, synthetic construct
  REGION 1..598: note = REGN10987_(x)VL/CLD201/hole/PGLALA/RF
QSALTQPASVSGSPGQSITISCTGTSSDVGGYNYVSWYQQHPGKAPKLMIYDVSKRPSGVSNRFSGSKSGNTASLTISGLQSEDEADYYCNSLTSISTWVFGGGTKLTVLGQPKAAPSVTLFPPSSEELQANKATLVCLISDFYPGAVTVAWKADSSPVKAGVETTTPSKQSNNKYAASSYLSLTPEQWKSHRSYSCQVTHEGSTVEKTVAPTECSTDWSPYADQSIKVRISLKSALGDKAYEWNDNEMYLFRSSVAYAMRQYFLKVKNQMILFGEEDVRVANLKPRISFNFFVTAPKNVSDIIPRTEVEKAIRMSRSRINDAFRLNDNSLEFLGIQPTLGPPNQPPVSTSTSPTRSMAPGAVHLPQPVSTRDKTHTCPPCPAPEAAGGPSVFLFPPKPKDTLMISRTPEVTCVVVDVSHEDPEVKFNWYVDGVEVHNAKTKPREEQYNSTYRVVSVLTVLHQDWLNGKEYKCKVSNKALGAPIEKTISKAKGQPREPQVCTLPPSRDELTKNQVSLSCAVKGFYPSDIAVEWESNGQPENNYKTTPPVLDSDGSFFLVSKLTVDKSRWQQGNVFSCSVMHEALHNRFTQKSLSLSPG

SEQ ID NO: 491 - protein, 605 aa, synthetic construct
  REGION 1..605: note = REGN10933_VH/CLD201/hole/PGLALA/RF/N84S
QVQLVESGGGLVKPGGSLRLSCAASGFTFSDYYMSWIRQAPGKGLEWVSYITYSGSTIYYADSVKGRFTISRDNAKSSLYLQMSSLRAEDTAVYYCARDRGTTMVPFDYWGQGTLVTVSSASTKGPSVFPLAPSSKSTSGGTAALGCLVKDYFPEPVTVSWNSGALTSGVHTFPAVLQSSGLYSLSSVVTVPSSSLGTQTYICNVNHKPSNTKVDKKVEPKSCTDWSPYADQSIKVRISLKSALGDKAYEWNDNEMYLFRSSVAYAMRQYFLKVKNQMILFGEEDVRVANLKPRISFNFFVTAPKNVSDIIPRTEVEKAIRMSRSRINDAFRLNDNSLEFLGIQPTLGPPNQPPVSTSTSPTRSMAPGAVHLPQPVSTRDKTHTCPPCPAPEAAGGPSVFLFPPKPKDTLMISRTPEVTCVVVDVSHEDPEVKFNWYVDGVEVHNAKTKPREEQYNSTYRVVSVLTVLHQDWLNGKEYKCKVSNKALGAPIEKTISKAKGQPREPQVCTLPPSRDELTKNQVSLSCAVKGFYPSDIAVEWESNGQPENNYKTTPPVLDSDGSFFLVSKLTVDKSRWQQGNVFSCSVMHEALHNRFTQKSLSLSPG

SEQ ID NO: 492 - protein, 596 aa, synthetic construct
  REGION 1..596: note = REGN10933_(x)VK/CLD201/hole/PGLALA/RF
DIQMTQSPSSLSASVGDRVTITCQASQDITNYLNWYQQKPGKAPKLLIYAASNLETGVPSRFSGSGSGTDFTFTISGLQPEDIATYYCQQYDNLPLTFGGGTKVEIKRTVAAPSVFIFPPSDEQLKSGTASVVCLLNNFYPREAKVQWKVDNALQSGNSQESVTEQDSKDSTYSLSSTLTLSKADYEKHKVYACEVTHQGLSSPVTKSFNRGECTDWSPYADQSIKVRISLKSALGDKAYEWNDNEMYLFRSSVAYAMRQYFLKVKNQMILFGEEDVRVANLKPRISFNFFVTAPKNVSDIIPRTEVEKAIRMSRSRINDAFRLNDNSLEFLGIQPTLGPPNQPPVSTSTSPTRSMAPGAVHLPQPVSTRDKTHTCPPCPAPEAAGGPSVFLFPPKPKDTLMISRTPEVTCVVVDVSHEDPEVKFNWYVDGVEVHNAKTKPREEQYNSTYRVVSVLTVLHQDWLNGKEYKCKVSNKALGAPIEKTISKAKGQPREPQVCTLPPSRDELTKNQVSLSCAVKGFYPSDIAVEWESNGQPENNYKTTPPVLDSDGSFFLVSKLTVDKSRWQQGNVFSCSVMHEALHNRFTQKSLSLSPG

SEQ ID NO: 493 - protein, 610 aa, synthetic construct
  REGION 1..610: note = 11876_VH/CLD201/hole/PGLALA/RF/N82aS)
QVQLVQSGAEVKKPGSSVKVSCKASGGTFSNYAISWVRQAPGQGLEWMGRIIPILGIANYAQKFQGRVTITADKSTSTAYMELSSLRSEDTAVYYCARGYYEARHYYYYYAMDVWGQGTAVTVSSASTKGPSVFPLAPSSKSTSGGTAALGCLVKDYFPEPVTVSWNSGALTSGVHTFPAVLQSSGLYSLSSVVTVPSSSLGTQTYICNVNHKPSNTKVDKKVEPKSCTDWSPYADQSIKVRISLKSALGDKAYEWNDNEMYLFRSSVAYAMRQYFLKVKNQMILFGEEDVRVANLKPRISFNFFVTAPKNVSDIIPRTEVEKAIRMSRSRINDAFRLNDNSLEFLGIQPTLGPPNQPPVSTSTSPTRSMAPGAVHLPQPVSTRDKTHTCPPCPAPEAAGGPSVFLFPPKPKDTLMISRTPEVTCVVVDVSHEDPEVKFNWYVDGVEVHNAKTKPREEQYNSTYRVVSVLTVLHQDWLNGKEYKCKVSNKALGAPIEKTISKAKGQPREPQVCTLPPSRDELTKNQVSLSCAVKGFYPSDIAVEWESNGQPENNYKTTPPVLDSDGSFFLVSKLTVDKSRWQQGNVFSCSVMHEALHNRFTQKSLSLSPG

SEQ ID NO: 494 - protein, 596 aa, synthetic construct
  REGION 1..596: note = 11876_(x)VK/CLD201/hole/PGLALA/RF
DIQMTQSPSSLSASVGDRVTITCRASQSISSYLSWYQQKPGKAPKLLIYAASSLQSGVPSRFSGSGSGTDFTLTITSLQPEDFATYYCQQSYSTPRTFGQGTKVEIKRTVAAPSVFIFPPSDEQLKSGTASVVCLLNNFYPREAKVQWKVDNALQSGNSQESVTEQDSKDSTYSLSSTLTLSKADYEKHKVYACEVTHQGLSSPVTKSFNRGECTDWSPYADQSIKVRISLKSALGDKAYEWNDNEMYLFRSSVAYAMRQYFLKVKNQMILFGEEDVRVANLKPRISFNFFVTAPKNVSDIIPRTEVEKAIRMSRSRINDAFRLNDNSLEFLGIQPTLGPPNQPPVSTSTSPTRSMAPGAVHLPQPVSTRDKTHTCPPCPAPEAAGGPSVFLFPPKPKDTLMISRTPEVTCVVVDVSHEDPEVKFNWYVDGVEVHNAKTKPREEQYNSTYRVVSVLTVLHQDWLNGKEYKCKVSNKALGAPIEKTISKAKGQPREPQVCTLPPSRDELTKNQVSLSCAVKGFYPSDIAVEWESNGQPENNYKTTPPVLDSDGSFFLVSKLTVDKSRWQQGNVFSCSVMHEALHNRFTQKSLSLSPG

SEQ ID NO: 495 - protein, 604 aa, synthetic construct
  REGION 1..604: note = 11873_VH/CLD201/hole/PGLALA/RF/N83S
EVQLVESGGGLVQPGGSLRLSCAASGFTVSSNYMSWVRQAPGKGLEWVSVIYSGGSTFYADSVKGRFTISRDNSMNTLFLQMSSLRAEDTAVYYCARVLPMYGDYLDYWGQGTLVTVSSASTKGPSVFPLAPSSKSTSGGTAALGCLVKDYFPEPVTVSWNSGALTSGVHTFPAVLQSSGLYSLSSVVTVPSSSLGTQTYICNVNHKPSNTKVDKKVEPKSCTDWSPYADQSIKVRISLKSALGDKAYEWNDNEMYLFRSSVAYAMRQYFLKVKNQMILFGEEDVRVANLKPRISFNFFVTAPKNVSDIIPRTEVEKAIRMSRSRINDAFRLNDNSLEFLGIQPTLGPPNQPPVSTSTSPTRSMAPGAVHLPQPVSTRDKTHTCPPCPAPEAAGGPSVFLFPPKPKDTLMISRTPEVTCVVVDVSHEDPEVKFNWYVDGVEVHNAKTKPREEQYNSTYRVVSVLTVLHQDWLNGKEYKCKVSNKALGAPIEKTISKAKGQPREPQVCTLPPSRDELTKNQVSLSCAVKGFYPSDIAVEWESNGQPENNYKTTPPVLDSDGSFFLVSKLTVDKSRWQQGNVFSCSVMHEALHNRFTQKSLSLSPG

SEQ ID NO: 496 - protein, 598 aa, synthetic construct
  REGION 1..598: note = 11873_(x)VK/CLD201/hole/PGLALA/RF
DIVMTQSPSSLSASVGDRVTITCRASQSISRYLNWYQQKPGKAPKLLIYAASSLQSGVPSRFSGSGSGTDFTLTISSLQPEDFATYYCQQSYSTPPEYTFGQGTKLEIKRTVAAPSVFIFPPSDEQLKSGTASVVCLLNNFYPREAKVQWKVDNALQSGNSQESVTEQDSKDSTYSLSSTLTLSKADYEKHKVYACEVTHQGLSSPVTKSFNRGECTDWSPYADQSIKVRISLKSALGDKAYEWNDNEMYLFRSSVAYAMRQYFLKVKNQMILFGEEDVRVANLKPRISFNFFVTAPKNVSDIIPRTEVEKAIRMSRSRINDAFRLNDNSLEFLGIQPTLGPPNQPPVSTSTSPTRSMAPGAVHLPQPVSTRDKTHTCPPCPAPEAAGGPSVFLFPPKPKDTLMISRTPEVTCVVVDVSHEDPEVKFNWYVDGVEVHNAKTKPREEQYNSTYRVVSVLTVLHQDWLNGKEYKCKVSNKALGAPIEKTISKAKGQPREPQVCTLPPSRDELTKNQVSLSCAVKGFYPSDIAVEWESNGQPENNYKTTPPVLDSDGSFFLVSKLTVDKSRWQQGNVFSCSVMHEALHNRFTQKSLSLSPG

SEQ ID NO: 497 - protein, 616 aa, synthetic construct
  REGION 1..616: note = 11777_VH/CLD201/hole/FES/YTE/RF/N86S
EVQLVESGGGLVKPGGSLRLSCAASGFTFRDVWMSWVRQAPGKGLEWVGRIKSKIDGGTTDYAAPVKGRFTISRDDSKNTLYLQMSSLKTEDTAVYYCTTAGSYYYDTVGPGLPEGKFDYWGQGTLVTVSSASTKGPSVFPLAPSSKSTSGGTAALGCLVKDYFPEPVTVSWNSGALTSGVHTFPAVLQSSGLYSLSSVVTVPSSSLGTQTYICNVNHKPSNTKVDKKVEPKSCTDWSPYADQSIKVRISLKSALGDKAYEWNDNEMYLFRSSVAYAMRQYFLKVKNQMILFGEEDVRVANLKPRISFNFFVTAPKNVSDIIPRTEVEKAIRMSRSRINDAFRLNDNSLEFLGIQPTLGPPNQPPVSTSTSPTRSMAPGAVHLPQPVSTRDKTHTCPPCPAPEFEGGPSVFLFPPKPKDTLYITREPEVTCVVVDVSHEDPEVKFNWYVDGVEVHNAKTKPREEQYNSTYRVVSVLTVLHQDWLNGKEYKCKVSNKALPASIEKTISKAKGQPREPQVCTLPPSRDELTKNQVSLSCAVKGFYPSDIAVEWESNGQPENNYKTTPPVLDSDGSFFLVSKLTVDKSRWQQGNVFSCSVMHEALHNRFTQKSLSLSPG

SEQ ID NO: 498 - protein, 601 aa, synthetic construct
  REGION 1..601: note = 11777_(x)VK/CLD201/hole/FES/YTE/RF
DIVMTQSPDSLAVSLGERATINCKSSQSVLYSSNNKNYLAWYQQKPGQPPKLLMYWASTRESGVPDRFSGSGSGAEFTLTISSLQAEDVAIYYCQQYYSTLTFGGGTKVEIKRTVAAPSVFIFPPSDEQLKSGTASVVCLLNNFYPREAKVQWKVDNALQSGNSQESVTEQDSKDSTYSLSSTLTLSKADYEKHKVYACEVTHQGLSSPVTKSFNRGECTDWSPYADQSIKVRISLKSALGDKAYEWNDNEMYLFRSSVAYAMRQYFLKVKNQMILFGEEDVRVANLKPRISFNFFVTAPKNVSDIIPRTEVEKAIRMSRSRINDAFRLNDNSLEFLGIQPTLGPPNQPPVSTSTSPTRSMAPGAVHLPQPVSTRDKTHTCPPCPAPEFEGGPSVFLFPPKPKDTLYITREPEVTCVVVDVSHEDPEVKFNWYVDGVEVHNAKTKPREEQYNSTYRVVSVLTVLHQDWLNGKEYKCKVSNKALPASIEKTISKAKGQPREPQVCTLPPSRDELTKNQVSLSCAVKGFYPSDIAVEWESNGQPENNYKTTPPVLDSDGSFFLVSKLTVDKSRWQQGNVFSCSVMHEALHNRFTQKSLSLSPG

SEQ ID NO: 499 - protein, 608 aa, synthetic construct
  REGION 1..608: note = 11776_VH/CLD201/hole/FES/YTE/RF
QMQLVQSGPEVKKPGTSVKVSCKASGFTFMSSAVQWVRQARGQRLEWIGWIVIGSGNTNYAQKFQERVTITRDMSTSTAYMELSSLRSEDTAVYYCAAPYCSSISCNDGFDIWGQGTMVTVSSASTKGPSVFPLAPSSKSTSGGTAALGCLVKDYFPEPVTVSWNSGALTSGVHTFPAVLQSSGLYSLSSVVTVPSSSLGTQTYICNVNHKPSNTKVDKKVEPKSCTDWSPYADQSIKVRISLKSALGDKAYEWNDNEMYLFRSSVAYAMRQYFLKVKNQMILFGEEDVRVANLKPRISFNFFVTAPKNVSDIIPRTEVEKAIRMSRSRINDAFRLNDNSLEFLGIQPTLGPPNQPPVSTSTSPTRSMAPGAVHLPQPVSTRDKTHTCPPCPAPEFEGGPSVFLFPPKPKDTLYITREPEVTCVVVDVSHEDPEVKFNWYVDGVEVHNAKTKPREEQYNSTYRVVSVLTVLHQDWLNGKEYKCKVSNKALPASIEKTISKAKGQPREPQVCTLPPSRDELTKNQVSLSCAVKGFYPSDIAVEWESNGQPENNYKTTPPVLDSDGSFFLVSKLTVDKSRWQQGNVFSCSVMHEALHNRFTQKSLSLSPG

SEQ ID NO: 500 - protein, 598 aa, synthetic construct
  REGION 1..598: note = 11776_xVK/CLD201/hole/FES/YTE/RF
EIVLTQSPGTLSLSPGERATLSCRASQSVSSSYLAWYQQKPGQAPRLLIYGASSRATGIPDRFSGSGSGTDFTLTISRLEPEDFAVYYCQHYGSSRGWTFGQGTKVEIKRTVAAPSVFIFPPSDEQLKSGTASVVCLLNNFYPREAKVQWKVDNALQSGNSQESVTEQDSKDSTYSLSSTLTLSKADYEKHKVYACEVTHQGLSSPVTKSFNRGECTDWSPYADQSIKVRISLKSALGDKAYEWNDNEMYLFRSSVAYAMRQYFLKVKNQMILFGEEDVRVANLKPRISFNFFVTAPKNVSDIIPRTEVEKAIRMSRSRINDAFRLNDNSLEFLGIQPTLGPPNQPPVSTSTSPTRSMAPGAVHLPQPVSTRDKTHTCPPCPAPEFEGGPSVFLFPPKPKDTLYITREPEVTCVVVDVSHEDPEVKFNWYVDGVEVHNAKTKPREEQYNSTYRVVSVLTVLHQDWLNGKEYKCKVSNKALPASIEKTISKAKGQPREPQVCTLPPSRDELTKNQVSLSCAVKGFYPSDIAVEWESNGQPENNYKTTPPVLDSDGSFFLVSKLTVDKSRWQQGNVFSCSVMHEALHNRFTQKSLSLSPG

SEQ ID NO: 501 - protein, 612 aa, synthetic construct
  REGION 1..612: note = 11766_VH/CLD201/hole/PGLALA/RF/LS
QVQLVQSGAEVKKPGASVKVSCKASGYPFTSYGISWVRQAPGQGLEWMGWISTYQGNTNYAQKFQGRVTMTTDTSTTTGYMELRRLRSDDTAVYYCARDYTRGAWFGESLIGGFDNWGQGTLVTVSSASTKGPSVFPLAPSSKSTSGGTAALGCLVKDYFPEPVTVSWNSGALTSGVHTFPAVLQSSGLYSLSSVVTVPSSSLGTQTYICNVNHKPSNTKVDKKVEPKSCTDWSPYADQSIKVRISLKSALGDKAYEWNDNEMYLFRSSVAYAMRQYFLKVKNQMILFGEEDVRVANLKPRISFNFFVTAPKNVSDIIPRTEVEKAIRMSRSRINDAFRLNDNSLEFLGIQPTLGPPNQPPVSTSTSPTRSMAPGAVHLPQPVSTRDKTHTCPPCPAPEAAGGPSVFLFPPKPKDTLMISRTPEVTCVVVDVSHEDPEVKFNWYVDGVEVHNAKTKPREEQYNSTYRVVSVLTVLHQDWLNGKEYKCKVSNKALGAPIEKTISKAKGQPREPQVCTLPPSRDELTKNQVSLSCAVKGFYPSDIAVEWESNGQPENNYKTTPPVLDSDGSFFLVSKLTVDKSRWQQGNVFSCSVLHEALHSRFTQKSLSLSPG

SEQ ID NO: 502 - protein, 613 aa, synthetic construct
  REGION 1..613: note = 11883_VH/CLD201/hole/PGLALA/RF
QITLKESGPTLVKPTQTLTLTCSFSGFSLSTSGVGVGWIRQPPGKALEWLALIDWDDNKYHTTSLKTRLTISKDTSKNQVVLTMTNMDPVDTATYYCARIPGFLRYRNRYYYYGMDVWGQGTTVTVSSASTKGPSVFPLAPSSKSTSGGTAALGCLVKDYFPEPVTVSWNSGALTSGVHTFPAVLQSSGLYSLSSVVTVPSSSLGTQTYICNVNHKPSNTKVDKKVEPKSCTDWSPYADQSIKVRISLKSALGDKAYEWNDNEMYLFRSSVAYAMRQYFLKVKNQMILFGEEDVRVANLKPRISFNFFVTAPKNVSDIIPRTEVEKAIRMSRSRINDAFRLNDNSLEFLGIQPTLGPPNQPPVSTSTSPTRSMAPGAVHLPQPVSTRDKTHTCPPCPAPEAAGGPSVFLFPPKPKDTLMISRTPEVTCVVVDVSHEDPEVKFNWYVDGVEVHNAKTKPREEQYNSTYRVVSVLTVLHQDWLNGKEYKCKVSNKALGAPIEKTISKAKGQPREPQVCTLPPSRDELTKNQVSLSCAVKGFYPSDIAVEWESNGQPENNYKTTPPVLDSDGSFFLVSKLTVDKSRWQQGNVFSCSVMHEALHNRFTQKSLSLSPG

SEQ ID NO: 503 - protein, 223 aa, synthetic construct
  REGION 1..223: note = REGN10987_(x)VH/N84S
QVQLVESGGGVVQPGRSLRLSCAASGFTFSNYAMYWVRQAPGKGLEWVAVISYDGSNKYYADSVKGRFTISRDNSKNTLYLQMSSLRTEDTAVYYCASGSDYGDYLLVYWGQGTLVTVSSASTKGPSVFPLAPSSKSTSGGTAALGCLVKDYFPEPVTVSWNSGALTSGVHTFPAVLQSSGLYSLSSVVTVPSSSLGTQTYICNVNHKPSNTKVDKKVEPKSC

SEQ ID NO: 504 - protein, 223 aa, synthetic construct
  REGION 1..223: note = REGN10933_(x)VH/N84S
QVQLVESGGGLVKPGGSLRLSCAASGFTFSDYYMSWIRQAPGKGLEWVSYITYSGSTIYYADSVKGRFTISRDNAKSSLYLQMSSLRAEDTAVYYCARDRGTTMVPFDYWGQGTLVTVSSASTKGPSVFPLAPSSKSTSGGTAALGCLVKDYFPEPVTVSWNSGALTSGVHTFPAVLQSSGLYSLSSVVTVPSSSLGTQTYICNVNHKPSNTKVDKKVEPKSC

SEQ ID NO: 505 - protein, 228 aa, synthetic construct
  REGION 1..228: note = 11876_(x)VH
QVQLVQSGAEVKKPGSSVKVSCKASGGTFSNYAISWVRQAPGQGLEWMGRIIPILGIANYAQKFQGRVTITADKSTSTAYMELSSLRSEDTAVYYCARGYYEARHYYYYYAMDVWGQGTAVTVSSASTKGPSVFPLAPSSKSTSGGTAALGCLVKDYFPEPVTVSWNSGALTSGVHTFPAVLQSSGLYSLSSVVTVPSSSLGTQTYICNVNHKPSNTKVDKKVEPKSC

SEQ ID NO: 506 - protein, 222 aa, synthetic construct
  REGION 1..222: note = 11873_(x)VH/N83S
EVQLVESGGGLVQPGGSLRLSCAASGFTVSSNYMSWVRQAPGKGLEWVSVIYSGGSTFYADSVKGRFTISRDNSMNTLFLQMSSLRAEDTAVYYCARVLPMYGDYLDYWGQGTLVTVSSASTKGPSVFPLAPSSKSTSGGTAALGCLVKDYFPEPVTVSWNSGALTSGVHTFPAVLQSSGLYSLSSVVTVPSSSLGTQTYICNVNHKPSNTKVDKKVEPKSC

SEQ ID NO: 507 - protein, 234 aa, synthetic construct
  REGION 1..234: note = 11777_(x)VH/N86S
EVQLVESGGGLVKPGGSLRLSCAASGFTFRDVWMSWVRQAPGKGLEWVGRIKSKIDGGTTDYAAPVKGRFTISRDDSKNTLYLQMSSLKTEDTAVYYCTTAGSYYYDTVGPGLPEGKFDYWGQGTLVTVSSASTKGPSVFPLAPSSKSTSGGTAALGCLVKDYFPEPVTVSWNSGALTSGVHTFPAVLQSSGLYSLSSVVTVPSSSLGTQTYICNVNHKPSNTKVDKKVEPKSC

SEQ ID NO: 508 - protein, 226 aa, synthetic construct
  REGION 1..226: note = 11776_xVH
QMQLVQSGPEVKKPGTSVKVSCKASGFTFMSSAVQWVRQARGQRLEWIGWIVIGSGNTNYAQKFQERVTITRDMSTSTAYMELSSLRSEDTAVYYCAAPYCSSISCNDGFDIWGQGTMVTVSSASTKGPSVFPLAPSSKSTSGGTAALGCLVKDYFPEPVTVSWNSGALTSGVHTFPAVLQSSGLYSLSSVVTVPSSSLGTQTYICNVNHKPSNTKVDKKVEPKSC

SEQ ID NO: 509 - protein, 972 aa, synthetic construct; identical to SEQ ID NO: 358
  REGION 1..972: note = ACE2-740HA/201/knob/PGLALA

SEQ ID NO: 510 - protein, 847 aa, synthetic construct; identical to SEQ ID NO: 370
  REGION 1..847: note = ACE2-615HA/201/hole/PGLALA/RF

SEQ ID NO: 511 - protein, 847 aa, synthetic construct
  REGION 1..847: note = ACE2-615HA/201/knob/PGLALA
QSTIEEQAKTFLDKFNHEAEDLFYQSSLASWNYNTNITEENVQNMNNAGDKWSAFLKEQSTLAQMYPLQEIQNLTVKLQLQALQQNGSSVLSEDKSKRLNTILNTMSTIYSTGKVCNPDNPQECLLLEPGLNEIMANSLDYNERLWAWESWRSEVGKQLRPLYEEYVVLKNEMARANHYEDYGDYWRGDYEVNGVDGYDYSRGQLIEDVEHTFEEIKPLYEHLHAYVRAKLMNAYPSYISPIGCLPAHLLGDMWGRFWTNLYSLTVPFGQKPNIDVTDAMVDQAWDAQRIFKEAEKFFVSVGLPNMTQGFWENSMLTDPGNVQKAVCHPTAWDLGKGDFRILMCTKVTMDDFLTAHHEMGAIQYDMAYAAQPFLLRNGANEGFHEAVGEIMSLSAATPKHLKSIGLLSPDFQEDNETEINFLLKQALTIVGTLPFTYMLEKWRWMVFKGEIPKDQWMKKWWEMKREIVGVVEPVPHDETYCDPASLFHVSNDYSFIRYYTRTLYQFQFQEALCQAAKHEGPLHKCDISNSTEAGQKLFNMLRLGKSEPWTLALENVVGAKNMNVRPLLNYFEPLFTWLKDQNKNSFVGWSTDWSPYADTSTSPTRSMAPGAVHLPQPVSTRDKTHTCPPCPAPEAAGGPSVFLFPPKPKDTLMISRTPEVTCVVVDVSHEDPEVKFNWYVDGVEVHNAKTKPREEQYNSTYRVVSVLTVLHQDWLNGKEYKCKVSNKALGAPIEKTISKAKGQPREPQVYTLPPCRDELTKNQVSLWCLVKGFYPSDIAVEWESNGQPENNYKTTPPVLDSDGSFFLYSKLTVDKSRWQQGNVFSCSVMHEALHNHYTQKSLSLSPG

SEQ ID NO: 512 - protein, 972 aa, synthetic construct
  REGION 1..972: note = ACE2-740HA/201/knob/PGLALA/YTE
QSTIEEQAKTFLDKFNHEAEDLFYQSSLASWNYNTNITEENVQNMNNAGDKWSAFLKEQSTLAQMYPLQEIQNLTVKLQLQALQQNGSSVLSEDKSKRLNTILNTMSTIYSTGKVCNPDNPQECLLLEPGLNEIMANSLDYNERLWAWESWRSEVGKQLRPLYEEYVVLKNEMARANHYEDYGDYWRGDYEVNGVDGYDYSRGQLIEDVEHTFEEIKPLYEHLHAYVRAKLMNAYPSYISPIGCLPAHLLGDMWGRFWTNLYSLTVPFGQKPNIDVTDAMVDQAWDAQRIFKEAEKFFVSVGLPNMTQGFWENSMLTDPGNVQKAVCHPTAWDLGKGDFRILMCTKVTMDDFLTAHHEMGAIQYDMAYAAQPFLLRNGANEGFHEAVGEIMSLSAATPKHLKSIGLLSPDFQEDNETEINFLLKQALTIVGTLPFTYMLEKWRWMVFKGEIPKDQWMKKWWEMKREIVGVVEPVPHDETYCDPASLFHVSNDYSFIRYYTRTLYQFQFQEALCQAAKHEGPLHKCDISNSTEAGQKLFNMLRLGKSEPWTLALENVVGAKNMNVRPLLNYFEPLFTWLKDQNKNSFVGWSTDWSPYADQSIKVRISLKSALGDKAYEWNDNEMYLFRSSVAYAMRQYFLKVKNQMILFGEEDVRVANLKPRISFNFFVTAPKNVSDIIPRTEVEKAIRMSRSRINDAFRLNDNSLEFLGIQPTLGPPNQPPVSTSTSPTRSMAPGAVHLPQPVSTRDKTHTCPPCPAPEAAGGPSVFLFPPKPKDTLYITREPEVTCVVVDVSHEDPEVKFNWYVDGVEVHNAKTKPREEQYNSTYRVVSVLTVLHQDWLNGKEYKCKVSNKALGAPIEKTISKAKGQPREPQVYTLPPCRDELTKNQVSLWCLVKGFYPSDIAVEWESNGQPENNYKTTPPVLDSDGSFFLYSKLTVDKSRWQQGNVFSCSVMHEALHNHYTQKSLSLSPG

SEQ ID NO: 513 - protein, 847 aa, synthetic construct
  REGION 1..847: note = ACE2-615HA/201/hole/PGLALA/YTE/RF
QSTIEEQAKTFLDKFNHEAEDLFYQSSLASWNYNTNITEENVQNMNNAGDKWSAFLKEQSTLAQMYPLQEIQNLTVKLQLQALQQNGSSVLSEDKSKRLNTILNTMSTIYSTGKVCNPDNPQECLLLEPGLNEIMANSLDYNERLWAWESWRSEVGKQLRPLYEEYVVLKNEMARANHYEDYGDYWRGDYEVNGVDGYDYSRGQLIEDVEHTFEEIKPLYEHLHAYVRAKLMNAYPSYISPIGCLPAHLLGDMWGRFWTNLYSLTVPFGQKPNIDVTDAMVDQAWDAQRIFKEAEKFFVSVGLPNMTQGFWENSMLTDPGNVQKAVCHPTAWDLGKGDFRILMCTKVTMDDFLTAHHEMGAIQYDMAYAAQPFLLRNGANEGFHEAVGEIMSLSAATPKHLKSIGLLSPDFQEDNETEINFLLKQALTIVGTLPFTYMLEKWRWMVFKGEIPKDQWMKKWWEMKREIVGVVEPVPHDETYCDPASLFHVSNDYSFIRYYTRTLYQFQFQEALCQAAKHEGPLHKCDISNSTEAGQKLFNMLRLGKSEPWTLALENVVGAKNMNVRPLLNYFEPLFTWLKDQNKNSFVGWSTDWSPYADTSTSPTRSMAPGAVHLPQPVSTRDKTHTCPPCPAPEAAGGPSVFLFPPKPKDTLYITREPEVTCVVVDVSHEDPEVKFNWYVDGVEVHNAKTKPREEQYNSTYRVVSVLTVLHQDWLNGKEYKCKVSNKALGAPIEKTISKAKGQPREPQVCTLPPSRDELTKNQVSLSCAVKGFYPSDIAVEWESNGQPENNYKTTPPVLDSDGSFFLVSKLTVDKSRWQQGNVFSCSVMHEALHNRFTQKSLSLSPG

SEQ ID NO: 514 - protein, 972 aa, synthetic construct
  REGION 1..972: note = ACE2-740HA/201/hole/PGLALA/YTE/RF
QSTIEEQAKTFLDKFNHEAEDLFYQSSLASWNYNTNITEENVQNMNNAGDKWSAFLKEQSTLAQMYPLQEIQNLTVKLQLQALQQNGSSVLSEDKSKRLNTILNTMSTIYSTGKVCNPDNPQECLLLEPGLNEIMANSLDYNERLWAWESWRSEVGKQLRPLYEEYVVLKNEMARANHYEDYGDYWRGDYEVNGVDGYDYSRGQLIEDVEHTFEEIKPLYEHLHAYVRAKLMNAYPSYISPIGCLPAHLLGDMWGRFWTNLYSLTVPFGQKPNIDVTDAMVDQAWDAQRIFKEAEKFFVSVGLPNMTQGFWENSMLTDPGNVQKAVCHPTAWDLGKGDFRILMCTKVTMDDFLTAHHEMGAIQYDMAYAAQPFLLRNGANEGFHEAVGEIMSLSAATPKHLKSIGLLSPDFQEDNETEINFLLKQALTIVGTLPFTYMLEKWRWMVFKGEIPKDQWMKKWWEMKREIVGVVEPVPHDETYCDPASLFHVSNDYSFIRYYTRTLYQFQFQEALCQAAKHEGPLHKCDISNSTEAGQKLFNMLRLGKSEPWTLALENVVGAKNMNVRPLLNYFEPLFTWLKDQNKNSFVGWSTDWSPYADQSIKVRISLKSALGDKAYEWNDNEMYLFRSSVAYAMRQYFLKVKNQMILFGEEDVRVANLKPRISFNFFVTAPKNVSDIIPRTEVEKAIRMSRSRINDAFRLNDNSLEFLGIQPTLGPPNQPPVSTSTSPTRSMAPGAVHLPQPVSTRDKTHTCPPCPAPEAAGGPSVFLFPPKPKDTLYITREPEVTCVVVDVSHEDPEVKFNWYVDGVEVHNAKTKPREEQYNSTYRVVSVLTVLHQDWLNGKEYKCKVSNKALGAPIEKTISKAKGQPREPQVCTLPPSRDELTKNQVSLSCAVKGFYPSDIAVEWESNGQPENNYKTTPPVLDSDGSFFLVSKLTVDKSRWQQGNVFSCSVMHEALHNRFTQKSLSLSPG

SEQ ID NO: 515 - protein, 847 aa, synthetic construct
  REGION 1..847: note = ACE2-615HA/201/knob/PGLALA/YTE
QSTIEEQAKTFLDKFNHEAEDLFYQSSLASWNYNTNITEENVQNMNNAGDKWSAFLKEQSTLAQMYPLQEIQNLTVKLQLQALQQNGSSVLSEDKSKRLNTILNTMSTIYSTGKVCNPDNPQECLLLEPGLNEIMANSLDYNERLWAWESWRSEVGKQLRPLYEEYVVLKNEMARANHYEDYGDYWRGDYEVNGVDGYDYSRGQLIEDVEHTFEEIKPLYEHLHAYVRAKLMNAYPSYISPIGCLPAHLLGDMWGRFWTNLYSLTVPFGQKPNIDVTDAMVDQAWDAQRIFKEAEKFFVSVGLPNMTQGFWENSMLTDPGNVQKAVCHPTAWDLGKGDFRILMCTKVTMDDFLTAHHEMGAIQYDMAYAAQPFLLRNGANEGFHEAVGEIMSLSAATPKHLKSIGLLSPDFQEDNETEINFLLKQALTIVGTLPFTYMLEKWRWMVFKGEIPKDQWMKKWWEMKREIVGVVEPVPHDETYCDPASLFHVSNDYSFIRYYTRTLYQFQFQEALCQAAKHEGPLHKCDISNSTEAGQKLFNMLRLGKSEPWTLALENVVGAKNMNVRPLLNYFEPLFTWLKDQNKNSFVGWSTDWSPYADTSTSPTRSMAPGAVHLPQPVSTRDKTHTCPPCPAPEAAGGPSVFLFPPKPKDTLYITREPEVTCVVVDVSHEDPEVKFNWYVDGVEVHNAKTKPREEQYNSTYRVVSVLTVLHQDWLNGKEYKCKVSNKALGAPIEKTISKAKGQPREPQVYTLPPCRDELTKNQVSLWCLVKGFYPSDIAVEWESNGQPENNYKTTPPVLDSDGSFFLYSKLTVDKSRWQQGNVFSCSVMHEALHNHYTQKSLSLSPG

SEQ ID NO: 516 - protein, 972 aa, synthetic construct
  REGION 1..972: note = ACE2-740HA/201/knob/PGLALA/LS
QSTIEEQAKTFLDKFNHEAEDLFYQSSLASWNYNTNITEENVQNMNNAGDKWSAFLKEQSTLAQMYPLQEIQNLTVKLQLQALQQNGSSVLSEDKSKRLNTILNTMSTIYSTGKVCNPDNPQECLLLEPGLNEIMANSLDYNERLWAWESWRSEVGKQLRPLYEEYVVLKNEMARANHYEDYGDYWRGDYEVNGVDGYDYSRGQLIEDVEHTFEEIKPLYEHLHAYVRAKLMNAYPSYISPIGCLPAHLLGDMWGRFWTNLYSLTVPFGQKPNIDVTDAMVDQAWDAQRIFKEAEKFFVSVGLPNMTQGFWENSMLTDPGNVQKAVCHPTAWDLGKGDFRILMCTKVTMDDFLTAHHEMGAIQYDMAYAAQPFLLRNGANEGFHEAVGEIMSLSAATPKHLKSIGLLSPDFQEDNETEINFLLKQALTIVGTLPFTYMLEKWRWMVFKGEIPKDQWMKKWWEMKREIVGVVEPVPHDETYCDPASLFHVSNDYSFIRYYTRTLYQFQFQEALCQAAKHEGPLHKCDISNSTEAGQKLFNMLRLGKSEPWTLALENVVGAKNMNVRPLLNYFEPLFTWLKDQNKNSFVGWSTDWSPYADQSIKVRISLKSALGDKAYEWNDNEMYLFRSSVAYAMRQYFLKVKNQMILFGEEDVRVANLKPRISFNFFVTAPKNVSDIIPRTEVEKAIRMSRSRINDAFRLNDNSLEFLGIQPTLGPPNQPPVSTSTSPTRSMAPGAVHLPQPVSTRDKTHTCPPCPAPEAAGGPSVFLFPPKPKDTLMISRTPEVTCVVVDVSHEDPEVKFNWYVDGVEVHNAKTKPREEQYNSTYRVVSVLTVLHQDWLNGKEYKCKVSNKALGAPIEKTISKAKGQPREPQVYTLPPCRDELTKNQVSLWCLVKGFYPSDIAVEWESNGQPENNYKTTPPVLDSDGSFFLYSKLTVDKSRWQQGNVFSCSVLHEALHSHYTQKSLSLSPG

SEQ ID NO: 517 - protein, 847 aa, synthetic construct
  REGION 1..847: note = ACE2-615HA/201/hole/PGLALA/LS/RF
QSTIEEQAKTFLDKFNHEAEDLFYQSSLASWNYNTNITEENVQNMNNAGDKWSAFLKEQSTLAQMYPLQEIQNLTVKLQLQALQQNGSSVLSEDKSKRLNTILNTMSTIYSTGKVCNPDNPQECLLLEPGLNEIMANSLDYNERLWAWESWRSEVGKQLRPLYEEYVVLKNEMARANHYEDYGDYWRGDYEVNGVDGYDYSRGQLIEDVEHTFEEIKPLYEHLHAYVRAKLMNAYPSYISPIGCLPAHLLGDMWGRFWTNLYSLTVPFGQKPNIDVTDAMVDQAWDAQRIFKEAEKFFVSVGLPNMTQGFWENSMLTDPGNVQKAVCHPTAWDLGKGDFRILMCTKVTMDDFLTAHHEMGAIQYDMAYAAQPFLLRNGANEGFHEAVGEIMSLSAATPKHLKSIGLLSPDFQEDNETEINFLLKQALTIVGTLPFTYMLEKWRWMVFKGEIPKDQWMKKWWEMKREIVGVVEPVPHDETYCDPASLFHVSNDYSFIRYYTRTLYQFQFQEALCQAAKHEGPLHKCDISNSTEAGQKLFNMLRLGKSEPWTLALENVVGAKNMNVRPLLNYFEPLFTWLKDQNKNSFVGWSTDWSPYADTSTSPTRSMAPGAVHLPQPVSTRDKTHTCPPCPAPEAAGGPSVFLFPPKPKDTLMISRTPEVTCVVVDVSHEDPEVKFNWYVDGVEVHNAKTKPREEQYNSTYRVVSVLTVLHQDWLNGKEYKCKVSNKALGAPIEKTISKAKGQPREPQVCTLPPSRDELTKNQVSLSCAVKGFYPSDIAVEWESNGQPENNYKTTPPVLDSDGSFFLVSKLTVDKSRWQQGNVFSCSVLHEALHSRFTQKSLSLSPG

SEQ ID NO: 518 - protein, 972 aa, synthetic construct
  REGION 1..972: note = ACE2-740HA/201/hole/PGLALA/LS/RF
QSTIEEQAKTFLDKFNHEAEDLFYQSSLASWNYNTNITEENVQNMNNAGDKWSAFLKEQSTLAQMYPLQEIQNLTVKLQLQALQQNGSSVLSEDKSKRLNTILNTMSTIYSTGKVCNPDNPQECLLLEPGLNEIMANSLDYNERLWAWESWRSEVGKQLRPLYEEYVVLKNEMARANHYEDYGDYWRGDYEVNGVDGYDYSRGQLIEDVEHTFEEIKPLYEHLHAYVRAKLMNAYPSYISPIGCLPAHLLGDMWGRFWTNLYSLTVPFGQKPNIDVTDAMVDQAWDAQRIFKEAEKFFVSVGLPNMTQGFWENSMLTDPGNVQKAVCHPTAWDLGKGDFRILMCTKVTMDDFLTAHHEMGAIQYDMAYAAQPFLLRNGANEGFHEAVGEIMSLSAATPKHLKSIGLLSPDFQEDNETEINFLLKQALTIVGTLPFTYMLEKWRWMVFKGEIPKDQWMKKWWEMKREIVGVVEPVPHDETYCDPASLFHVSNDYSFIRYYTRTLYQFQFQEALCQAAKHEGPLHKCDISNSTEAGQKLFNMLRLGKSEPWTLALENVVGAKNMNVRPLLNYFEPLFTWLKDQNKNSFVGWSTDWSPYADQSIKVRISLKSALGDKAYEWNDNEMYLFRSSVAYAMRQYFLKVKNQMILFGEEDVRVANLKPRISFNFFVTAPKNVSDIIPRTEVEKAIRMSRSRINDAFRLNDNSLEFLGIQPTLGPPNQPPVSTSTSPTRSMAPGAVHLPQPVSTRDKTHTCPPCPAPEAAGGPSVFLFPPKPKDTLMISRTPEVTCVVVDVSHEDPEVKFNWYVDGVEVHNAKTKPREEQYNSTYRVVSVLTVLHQDWLNGKEYKCKVSNKALGAPIEKTISKAKGQPREPQVCTLPPSRDELTKNQVSLSCAVKGFYPSDIAVEWESNGQPENNYKTTPPVLDSDGSFFLVSKLTVDKSRWQQGNVFSCSVLHEALHSRFTQKSLSLSPG

SEQ ID NO: 519 - protein, 847 aa, synthetic construct
  REGION 1..847: note = ACE2-615HA/201/knob/PGLALA/LS
QSTIEEQAKTFLDKFNHEAEDLFYQSSLASWNYNTNITEENVQNMNNAGDKWSAFLKEQSTLAQMYPLQEIQNLTVKLQLQALQQNGSSVLSEDKSKRLNTILNTMSTIYSTGKVCNPDNPQECLLLEPGLNEIMANSLDYNERLWAWESWRSEVGKQLRPLYEEYVVLKNEMARANHYEDYGDYWRGDYEVNGVDGYDYSRGQLIEDVEHTFEEIKPLYEHLHAYVRAKLMNAYPSYISPIGCLPAHLLGDMWGRFWTNLYSLTVPFGQKPNIDVTDAMVDQAWDAQRIFKEAEKFFVSVGLPNMTQGFWENSMLTDPGNVQKAVCHPTAWDLGKGDFRILMCTKVTMDDFLTAHHEMGAIQYDMAYAAQPFLLRNGANEGFHEAVGEIMSLSAATPKHLKSIGLLSPDFQEDNETEINFLLKQALTIVGTLPFTYMLEKWRWMVFKGEIPKDQWMKKWWEMKREIVGVVEPVPHDETYCDPASLFHVSNDYSFIRYYTRTLYQFQFQEALCQAAKHEGPLHKCDISNSTEAGQKLFNMLRLGKSEPWTLALENVVGAKNMNVRPLLNYFEPLFTWLKDQNKNSFVGWSTDWSPYADTSTSPTRSMAPGAVHLPQPVSTRDKTHTCPPCPAPEAAGGPSVFLFPPKPKDTLMISRTPEVTCVVVDVSHEDPEVKFNWYVDGVEVHNAKTKPREEQYNSTYRVVSVLTVLHQDWLNGKEYKCKVSNKALGAPIEKTISKAKGQPREPQVYTLPPCRDELTKNQVSLWCLVKGFYPSDIAVEWESNGQPENNYKTTPPVLDSDGSFFLYSKLTVDKSRWQQGNVFSCSVLHEALHSHYTQKSLSLSPG

SEQ ID NO: 520 - protein, 972 aa, synthetic construct
  REGION 1..972: note = ACE2-740HA/201/knob/PGLALA/DHS
QSTIEEQAKTFLDKFNHEAEDLFYQSSLASWNYNTNITEENVQNMNNAGDKWSAFLKEQSTLAQMYPLQEIQNLTVKLQLQALQQNGSSVLSEDKSKRLNTILNTMSTIYSTGKVCNPDNPQECLLLEPGLNEIMANSLDYNERLWAWESWRSEVGKQLRPLYEEYVVLKNEMARANHYEDYGDYWRGDYEVNGVDGYDYSRGQLIEDVEHTFEEIKPLYEHLHAYVRAKLMNAYPSYISPIGCLPAHLLGDMWGRFWTNLYSLTVPFGQKPNIDVTDAMVDQAWDAQRIFKEAEKFFVSVGLPNMTQGFWENSMLTDPGNVQKAVCHPTAWDLGKGDFRILMCTKVTMDDFLTAHHEMGAIQYDMAYAAQPFLLRNGANEGFHEAVGEIMSLSAATPKHLKSIGLLSPDFQEDNETEINFLLKQALTIVGTLPFTYMLEKWRWMVFKGEIPKDQWMKKWWEMKREIVGVVEPVPHDETYCDPASLFHVSNDYSFIRYYTRTLYQFQFQEALCQAAKHEGPLHKCDISNSTEAGQKLFNMLRLGKSEPWTLALENVVGAKNMNVRPLLNYFEPLFTWLKDQNKNSFVGWSTDWSPYADQSIKVRISLKSALGDKAYEWNDNEMYLFRSSVAYAMRQYFLKVKNQMILFGEEDVRVANLKPRISFNFFVTAPKNVSDIIPRTEVEKAIRMSRSRINDAFRLNDNSLEFLGIQPTLGPPNQPPVSTSTSPTRSMAPGAVHLPQPVSTRDKTHTCPPCPAPEAAGGPSVFLFPPKPKDTLMISRTPEVTCVVVDVSHEDPEVKFNWYVDGVEVHNAKTKPREEQYNSTYRVVSVLTVDHHDWLNGKEYKCKVSNKALGAPIEKTISKAKGQPREPQVYTLPPCRDELTKNQVSLWCLVKGFYPSDIAVEWESNGQPENNYKTTPPVLDSDGSFFLYSKLTVDKSRWQQGNVFSCSVMHEALHSHYTQKSLSLSPG

SEQ ID NO: 521 - protein, 847 aa, synthetic construct
  REGION 1..847: note = ACE2-615HA/201/hole/PGLALA/DHS/RF
QSTIEEQAKTFLDKFNHEAEDLFYQSSLASWNYNTNITEENVQNMNNAGDKWSAFLKEQSTLAQMYPLQEIQNLTVKLQLQALQQNGSSVLSEDKSKRLNTILNTMSTIYSTGKVCNPDNPQECLLLEPGLNEIMANSLDYNERLWAWESWRSEVGKQLRPLYEEYVVLKNEMARANHYEDYGDYWRGDYEVNGVDGYDYSRGQLIEDVEHTFEEIKPLYEHLHAYVRAKLMNAYPSYISPIGCLPAHLLGDMWGRFWTNLYSLTVPFGQKPNIDVTDAMVDQAWDAQRIFKEAEKFFVSVGLPNMTQGFWENSMLTDPGNVQKAVCHPTAWDLGKGDFRILMCTKVTMDDFLTAHHEMGAIQYDMAYAAQPFLLRNGANEGFHEAVGEIMSLSAATPKHLKSIGLLSPDFQEDNETEINFLLKQALTIVGTLPFTYMLEKWRWMVFKGEIPKDQWMKKWWEMKREIVGVVEPVPHDETYCDPASLFHVSNDYSFIRYYTRTLYQFQFQEALCQAAKHEGPLHKCDISNSTEAGQKLFNMLRLGKSEPWTLALENVVGAKNMNVRPLLNYFEPLFTWLKDQNKNSFVGWSTDWSPYADTSTSPTRSMAPGAVHLPQPVSTRDKTHTCPPCPAPEAAGGPSVFLFPPKPKDTLMISRTPEVTCVVVDVSHEDPEVKFNWYVDGVEVHNAKTKPREEQYNSTYRVVSVLTVDHHDWLNGKEYKCKVSNKALGAPIEKTISKAKGQPREPQVCTLPPSRDELTKNQVSLSCAVKGFYPSDIAVEWESNGQPENNYKTTPPVLDSDGSFFLVSKLTVDKSRWQQGNVFSCSVMHEALHSRFTQKSLSLSPG

SEQ ID NO: 522 - protein, 972 aa, synthetic construct
  REGION 1..972: note = ACE2-740HA/201/hole/PGLALA/DHS/RF
QSTIEEQAKTFLDKFNHEAEDLFYQSSLASWNYNTNITEENVQNMNNAGDKWSAFLKEQSTLAQMYPLQEIQNLTVKLQLQALQQNGSSVLSEDKSKRLNTILNTMSTIYSTGKVCNPDNPQECLLLEPGLNEIMANSLDYNERLWAWESWRSEVGKQLRPLYEEYVVLKNEMARANHYEDYGDYWRGDYEVNGVDGYDYSRGQLIEDVEHTFEEIKPLYEHLHAYVRAKLMNAYPSYISPIGCLPAHLLGDMWGRFWTNLYSLTVPFGQKPNIDVTDAMVDQAWDAQRIFKEAEKFFVSVGLPNMTQGFWENSMLTDPGNVQKAVCHPTAWDLGKGDFRILMCTKVTMDDFLTAHHEMGAIQYDMAYAAQPFLLRNGANEGFHEAVGEIMSLSAATPKHLKSIGLLSPDFQEDNETEINFLLKQALTIVGTLPFTYMLEKWRWMVFKGEIPKDQWMKKWWEMKREIVGVVEPVPHDETYCDPASLFHVSNDYSFIRYYTRTLYQFQFQEALCQAAKHEGPLHKCDISNSTEAGQKLFNMLRLGKSEPWTLALENVVGAKNMNVRPLLNYFEPLFTWLKDQNKNSFVGWSTDWSPYADQSIKVRISLKSALGDKAYEWNDNEMYLFRSSVAYAMRQYFLKVKNQMILFGEEDVRVANLKPRISFNFFVTAPKNVSDIIPRTEVEKAIRMSRSRINDAFRLNDNSLEFLGIQPTLGPPNQPPVSTSTSPTRSMAPGAVHLPQPVSTRDKTHTCPPCPAPEAAGGPSVFLFPPKPKDTLMISRTPEVTCVVVDVSHEDPEVKFNWYVDGVEVHNAKTKPREEQYNSTYRVVSVLTVDHHDWLNGKEYKCKVSNKALGAPIEKTISKAKGQPREPQVCTLPPSRDELTKNQVSLSCAVKGFYPSDIAVEWESNGQPENNYKTTPPVLDSDGSFFLVSKLTVDKSRWQQGNVFSCSVMHEALHSRFTQKSLSLSPG

SEQ ID NO: 523 - protein, 847 aa, synthetic construct
  REGION 1..847: note = ACE2-615HA/201/knob/PGLALA/DHS
QSTIEEQAKTFLDKFNHEAEDLFYQSSLASWNYNTNITEENVQNMNNAGDKWSAFLKEQSTLAQMYPLQEIQNLTVKLQLQALQQNGSSVLSEDKSKRLNTILNTMSTIYSTGKVCNPDNPQECLLLEPGLNEIMANSLDYNERLWAWESWRSEVGKQLRPLYEEYVVLKNEMARANHYEDYGDYWRGDYEVNGVDGYDYSRGQLIEDVEHTFEEIKPLYEHLHAYVRAKLMNAYPSYISPIGCLPAHLLGDMWGRFWTNLYSLTVPFGQKPNIDVTDAMVDQAWDAQRIFKEAEKFFVSVGLPNMTQGFWENSMLTDPGNVQKAVCHPTAWDLGKGDFRILMCTKVTMDDFLTAHHEMGAIQYDMAYAAQPFLLRNGANEGFHEAVGEIMSLSAATPKHLKSIGLLSPDFQEDNETEINFLLKQALTIVGTLPFTYMLEKWRWMVFKGEIPKDQWMKKWWEMKREIVGVVEPVPHDETYCDPASLFHVSNDYSFIRYYTRTLYQFQFQEALCQAAKHEGPLHKCDISNSTEAGQKLFNMLRLGKSEPWTLALENVVGAKNMNVRPLLNYFEPLFTWLKDQNKNSFVGWSTDWSPYADTSTSPTRSMAPGAVHLPQPVSTRDKTHTCPPCPAPEAAGGPSVFLFPPKPKDTLMISRTPEVTCVVVDVSHEDPEVKFNWYVDGVEVHNAKTKPREEQYNSTYRVVSVLTVDHHDWLNGKEYKCKVSNKALGAPIEKTISKAKGQPREPQVYTLPPCRDELTKNQVSLWCLVKGFYPSDIAVEWESNGQPENNYKTTPPVLDSDGSFFLYSKLTVDKSRWQQGNVFSCSVMHEALHSHYTQKSLSLSPG

SEQ ID NO: 524 - protein, 972 aa, synthetic construct
  REGION 1..972: note = ACE2-740HA/201/hole/RF
QSTIEEQAKTFLDKFNHEAEDLFYQSSLASWNYNTNITEENVQNMNNAGDKWSAFLKEQSTLAQMYPLQEIQNLTVKLQLQALQQNGSSVLSEDKSKRLNTILNTMSTIYSTGKVCNPDNPQECLLLEPGLNEIMANSLDYNERLWAWESWRSEVGKQLRPLYEEYVVLKNEMARANHYEDYGDYWRGDYEVNGVDGYDYSRGQLIEDVEHTFEEIKPLYEHLHAYVRAKLMNAYPSYISPIGCLPAHLLGDMWGRFWTNLYSLTVPFGQKPNIDVTDAMVDQAWDAQRIFKEAEKFFVSVGLPNMTQGFWENSMLTDPGNVQKAVCHPTAWDLGKGDFRILMCTKVTMDDFLTAHHEMGAIQYDMAYAAQPFLLRNGANEGFHEAVGEIMSLSAATPKHLKSIGLLSPDFQEDNETEINFLLKQALTIVGTLPFTYMLEKWRWMVFKGEIPKDQWMKKWWEMKREIVGVVEPVPHDETYCDPASLFHVSNDYSFIRYYTRTLYQFQFQEALCQAAKHEGPLHKCDISNSTEAGQKLFNMLRLGKSEPWTLALENVVGAKNMNVRPLLNYFEPLFTWLKDQNKNSFVGWSTDWSPYADQSIKVRISLKSALGDKAYEWNDNEMYLFRSSVAYAMRQYFLKVKNQMILFGEEDVRVANLKPRISFNFFVTAPKNVSDIIPRTEVEKAIRMSRSRINDAFRLNDNSLEFLGIQPTLGPPNQPPVSTSTSPTRSMAPGAVHLPQPVSTRDKTHTCPPCPAPELLGGPSVFLFPPKPKDTLMISRTPEVTCVVVDVSHEDPEVKFNWYVDGVEVHNAKTKPREEQYNSTYRVVSVLTVLHQDWLNGKEYKCKVSNKALPAPIEKTISKAKGQPREPQVCTLPPSRDELTKNQVSLSCAVKGFYPSDIAVEWESNGQPENNYKTTPPVLDSDGSFFLVSKLTVDKSRWQQGNVFSCSVMHEALHNRFTQKSLSLSPG

SEQ ID NO: 525 - protein, 450 aa, synthetic construct
  REGION 1..450: note = B13A_VH/knob
QVQLQQSGAELVKPGASVKISCKASGYAFSNYWMNWVKQRPGKGLEWIGQIYPGDGDTNYNGNFKGKATLTADKSSSTAYIQLSSLTSEDSAVYFCGRGFIATVVEVFDHWGLGTTLTVSSASTKGPSVFPLAPSSKSTSGGTAALGCLVKDYFPEPVTVSWNSGALTSGVHTFPAVLQSSGLYSLSSVVTVPSSSLGTQTYICNVNHKPSNTKVDKKVEPKSCDKTHTCPPCPAPELLGGPSVFLFPPKPKDTLMISRTPEVTCVVVDVSHEDPEVKFNWYVDGVEVHNAKTKPREEQYNSTYRVVSVLTVLHQDWLNGKEYKCKVSNKALPAPIEKTISKAKGQPREPQVYTLPPCRDELTKNQVSLWCLVKGFYPSDIAVEWESNGQPENNYKTTPPVLDSDGSFFLYSKLTVDKSRWQQGNVFSCSVMHEALHNHYTQKSLSLSPG

SEQ ID NO: 526 - protein, 972 aa, synthetic construct
  REGION 1..972: note = ACE2-740HA/201/hole/YTE/RF
QSTIEEQAKTFLDKFNHEAEDLFYQSSLASWNYNTNITEENVQNMNNAGDKWSAFLKEQSTLAQMYPLQEIQNLTVKLQLQALQQNGSSVLSEDKSKRLNTILNTMSTIYSTGKVCNPDNPQECLLLEPGLNEIMANSLDYNERLWAWESWRSEVGKQLRPLYEEYVVLKNEMARANHYEDYGDYWRGDYEVNGVDGYDYSRGQLIEDVEHTFEEIKPLYEHLHAYVRAKLMNAYPSYISPIGCLPAHLLGDMWGRFWTNLYSLTVPFGQKPNIDVTDAMVDQAWDAQRIFKEAEKFFVSVGLPNMTQGFWENSMLTDPGNVQKAVCHPTAWDLGKGDFRILMCTKVTMDDFLTAHHEMGAIQYDMAYAAQPFLLRNGANEGFHEAVGEIMSLSAATPKHLKSIGLLSPDFQEDNETEINFLLKQALTIVGTLPFTYMLEKWRWMVFKGEIPKDQWMKKWWEMKREIVGVVEPVPHDETYCDPASLFHVSNDYSFIRYYTRTLYQFQFQEALCQAAKHEGPLHKCDISNSTEAGQKLFNMLRLGKSEPWTLALENVVGAKNMNVRPLLNYFEPLFTWLKDQNKNSFVGWSTDWSPYADQSIKVRISLKSALGDKAYEWNDNEMYLFRSSVAYAMRQYFLKVKNQMILFGEEDVRVANLKPRISFNFFVTAPKNVSDIIPRTEVEKAIRMSRSRINDAFRLNDNSLEFLGIQPTLGPPNQPPVSTSTSPTRSMAPGAVHLPQPVSTRDKTHTCPPCPAPELLGGPSVFLFPPKPKDTLYITREPEVTCVVVDVSHEDPEVKFNWYVDGVEVHNAKTKPREEQYNSTYRVVSVLTVLHQDWLNGKEYKCKVSNKALPAPIEKTISKAKGQPREPQVCTLPPSRDELTKNQVSLSCAVKGFYPSDIAVEWESNGQPENNYKTTPPVLDSDGSFFLVSKLTVDKSRWQQGNVFSCSVMHEALHNRFTQKSLSLSPG

SEQ ID NO: 527 - protein, 450 aa, synthetic construct
  REGION 1..450: note = B13A_VH/knob/YTE
QVQLQQSGAELVKPGASVKISCKASGYAFSNYWMNWVKQRPGKGLEWIGQIYPGDGDTNYNGNFKGKATLTADKSSSTAYIQLSSLTSEDSAVYFCGRGFIATVVEVFDHWGLGTTLTVSSASTKGPSVFPLAPSSKSTSGGTAALGCLVKDYFPEPVTVSWNSGALTSGVHTFPAVLQSSGLYSLSSVVTVPSSSLGTQTYICNVNHKPSNTKVDKKVEPKSCDKTHTCPPCPAPELLGGPSVFLFPPKPKDTLYITREPEVTCVVVDVSHEDPEVKFNWYVDGVEVHNAKTKPREEQYNSTYRVVSVLTVLHQDWLNGKEYKCKVSNKALPAPIEKTISKAKGQPREPQVYTLPPCRDELTKNQVSLWCLVKGFYPSDIAVEWESNGQPENNYKTTPPVLDSDGSFFLYSKLTVDKSRWQQGNVFSCSVMHEALHNHYTQKSLSLSPG

SEQ ID NO: 528 - protein, 450 aa, synthetic construct
  REGION 1..450: note = B13A_VH/knob/PGLALA/YTE
QVQLQQSGAELVKPGASVKISCKASGYAFSNYWMNWVKQRPGKGLEWIGQIYPGDGDTNYNGNFKGKATLTADKSSSTAYIQLSSLTSEDSAVYFCGRGFIATVVEVFDHWGLGTTLTVSSASTKGPSVFPLAPSSKSTSGGTAALGCLVKDYFPEPVTVSWNSGALTSGVHTFPAVLQSSGLYSLSSVVTVPSSSLGTQTYICNVNHKPSNTKVDKKVEPKSCDKTHTCPPCPAPEAAGGPSVFLFPPKPKDTLYITREPEVTCVVVDVSHEDPEVKFNWYVDGVEVHNAKTKPREEQYNSTYRVVSVLTVLHQDWLNGKEYKCKVSNKALGAPIEKTISKAKGQPREPQVYTLPPCRDELTKNQVSLWCLVKGFYPSDIAVEWESNGQPENNYKTTPPVLDSDGSFFLYSKLTVDKSRWQQGNVFSCSVMHEALHNHYTQKSLSLSPG

SEQ ID NO: 529 - protein, 972 aa, synthetic construct
  REGION 1..972: note = ACE2-740HA/201/hole/LS/RF
QSTIEEQAKTFLDKFNHEAEDLFYQSSLASWNYNTNITEENVQNMNNAGDKWSAFLKEQSTLAQMYPLQEIQNLTVKLQLQALQQNGSSVLSEDKSKRLNTILNTMSTIYSTGKVCNPDNPQECLLLEPGLNEIMANSLDYNERLWAWESWRSEVGKQLRPLYEEYVVLKNEMARANHYEDYGDYWRGDYEVNGVDGYDYSRGQLIEDVEHTFEEIKPLYEHLHAYVRAKLMNAYPSYISPIGCLPAHLLGDMWGRFWTNLYSLTVPFGQKPNIDVTDAMVDQAWDAQRIFKEAEKFFVSVGLPNMTQGFWENSMLTDPGNVQKAVCHPTAWDLGKGDFRILMCTKVTMDDFLTAHHEMGAIQYDMAYAAQPFLLRNGANEGFHEAVGEIMSLSAATPKHLKSIGLLSPDFQEDNETEINFLLKQALTIVGTLPFTYMLEKWRWMVFKGEIPKDQWMKKWWEMKREIVGVVEPVPHDETYCDPASLFHVSNDYSFIRYYTRTLYQFQFQEALCQAAKHEGPLHKCDISNSTEAGQKLFNMLRLGKSEPWTLALENVVGAKNMNVRPLLNYFEPLFTWLKDQNKNSFVGWSTDWSPYADQSIKVRISLKSALGDKAYEWNDNEMYLFRSSVAYAMRQYFLKVKNQMILFGEEDVRVANLKPRISFNFFVTAPKNVSDIIPRTEVEKAIRMSRSRINDAFRLNDNSLEFLGIQPTLGPPNQPPVSTSTSPTRSMAPGAVHLPQPVSTRDKTHTCPPCPAPELLGGPSVFLFPPKPKDTLMISRTPEVTCVVVDVSHEDPEVKFNWYVDGVEVHNAKTKPREEQYNSTYRVVSVLTVLHQDWLNGKEYKCKVSNKALPAPIEKTISKAKGQPREPQVCTLPPSRDELTKNQVSLSCAVKGFYPSDIAVEWESNGQPENNYKTTPPVLDSDGSFFLVSKLTVDKSRWQQGNVFSCSVLHEALHSRFTQKSLSLSPG

SEQ ID NO: 530 - protein, 450 aa, synthetic construct
  REGION 1..450: note = B13A_VH/knob/LS
QVQLQQSGAELVKPGASVKISCKASGYAFSNYWMNWVKQRPGKGLEWIGQIYPGDGDTNYNGNFKGKATLTADKSSSTAYIQLSSLTSEDSAVYFCGRGFIATVVEVFDHWGLGTTLTVSSASTKGPSVFPLAPSSKSTSGGTAALGCLVKDYFPEPVTVSWNSGALTSGVHTFPAVLQSSGLYSLSSVVTVPSSSLGTQTYICNVNHKPSNTKVDKKVEPKSCDKTHTCPPCPAPELLGGPSVFLFPPKPKDTLMISRTPEVTCVVVDVSHEDPEVKFNWYVDGVEVHNAKTKPREEQYNSTYRVVSVLTVLHQDWLNGKEYKCKVSNKALPAPIEKTISKAKGQPREPQVYTLPPCRDELTKNQVSLWCLVKGFYPSDIAVEWESNGQPENNYKTTPPVLDSDGSFFLYSKLTVDKSRWQQGNVFSCSVLHEALHSHYTQKSLSLSPG

SEQ ID NO: 531 - protein, 450 aa, synthetic construct
  REGION 1..450: note = B13A_VH/knob/PGLALA/LS
QVQLQQSGAELVKPGASVKISCKASGYAFSNYWMNWVKQRPGKGLEWIGQIYPGDGDTNYNGNFKGKATLTADKSSSTAYIQLSSLTSEDSAVYFCGRGFIATVVEVFDHWGLGTTLTVSSASTKGPSVFPLAPSSKSTSGGTAALGCLVKDYFPEPVTVSWNSGALTSGVHTFPAVLQSSGLYSLSSVVTVPSSSLGTQTYICNVNHKPSNTKVDKKVEPKSCDKTHTCPPCPAPEAAGGPSVFLFPPKPKDTLMISRTPEVTCVVVDVSHEDPEVKFNWYVDGVEVHNAKTKPREEQYNSTYRVVSVLTVLHQDWLNGKEYKCKVSNKALGAPIEKTISKAKGQPREPQVYTLPPCRDELTKNQVSLWCLVKGFYPSDIAVEWESNGQPENNYKTTPPVLDSDGSFFLYSKLTVDKSRWQQGNVFSCSVLHEALHSHYTQKSLSLSPG

SEQ ID NO: 532 - protein, 972 aa, synthetic construct
  REGION 1..972: note = ACE2-740HA/201/hole/DHS/RF
QSTIEEQAKTFLDKFNHEAEDLFYQSSLASWNYNTNITEENVQNMNNAGDKWSAFLKEQSTLAQMYPLQEIQNLTVKLQLQALQQNGSSVLSEDKSKRLNTILNTMSTIYSTGKVCNPDNPQECLLLEPGLNEIMANSLDYNERLWAWESWRSEVGKQLRPLYEEYVVLKNEMARANHYEDYGDYWRGDYEVNGVDGYDYSRGQLIEDVEHTFEEIKPLYEHLHAYVRAKLMNAYPSYISPIGCLPAHLLGDMWGRFWTNLYSLTVPFGQKPNIDVTDAMVDQAWDAQRIFKEAEKFFVSVGLPNMTQGFWENSMLTDPGNVQKAVCHPTAWDLGKGDFRILMCTKVTMDDFLTAHHEMGAIQYDMAYAAQPFLLRNGANEGFHEAVGEIMSLSAATPKHLKSIGLLSPDFQEDNETEINFLLKQALTIVGTLPFTYMLEKWRWMVFKGEIPKDQWMKKWWEMKREIVGVVEPVPHDETYCDPASLFHVSNDYSFIRYYTRTLYQFQFQEALCQAAKHEGPLHKCDISNSTEAGQKLFNMLRLGKSEPWTLALENVVGAKNMNVRPLLNYFEPLFTWLKDQNKNSFVGWSTDWSPYADQSIKVRISLKSALGDKAYEWNDNEMYLFRSSVAYAMRQYFLKVKNQMILFGEEDVRVANLKPRISFNFFVTAPKNVSDIIPRTEVEKAIRMSRSRINDAFRLNDNSLEFLGIQPTLGPPNQPPVSTSTSPTRSMAPGAVHLPQPVSTRDKTHTCPPCPAPELLGGPSVFLFPPKPKDTLMISRTPEVTCVVVDVSHEDPEVKFNWYVDGVEVHNAKTKPREEQYNSTYRVVSVLTVDHHDWLNGKEYKCKVSNKALPAPIEKTISKAKGQPREPQVCTLPPSRDELTKNQVSLSCAVKGFYPSDIAVEWESNGQPENNYKTTPPVLDSDGSFFLVSKLTVDKSRWQQGNVFSCSVMHEALHSRFTQKSLSLSPG

SEQ ID NO: 533 - protein, 450 aa, synthetic construct
  REGION 1..450: note = B13A_VH/knob/DHS
QVQLQQSGAELVKPGASVKISCKASGYAFSNYWMNWVKQRPGKGLEWIGQIYPGDGDTNYNGNFKGKATLTADKSSSTAYIQLSSLTSEDSAVYFCGRGFIATVVEVFDHWGLGTTLTVSSASTKGPSVFPLAPSSKSTSGGTAALGCLVKDYFPEPVTVSWNSGALTSGVHTFPAVLQSSGLYSLSSVVTVPSSSLGTQTYICNVNHKPSNTKVDKKVEPKSCDKTHTCPPCPAPELLGGPSVFLFPPKPKDTLMISRTPEVTCVVVDVSHEDPEVKFNWYVDGVEVHNAKTKPREEQYNSTYRVVSVLTVDHHDWLNGKEYKCKVSNKALPAPIEKTISKAKGQPREPQVYTLPPCRDELTKNQVSLWCLVKGFYPSDIAVEWESNGQPENNYKTTPPVLDSDGSFFLYSKLTVDKSRWQQGNVFSCSVMHEALHSHYTQKSLSLSPG

SEQ ID NO: 534 - protein, 450 aa, synthetic construct
  REGION 1..450: note = B13A_VH/knob/PGLALA/DHS
QVQLQQSGAELVKPGASVKISCKASGYAFSNYWMNWVKQRPGKGLEWIGQIYPGDGDTNYNGNFKGKATLTADKSSSTAYIQLSSLTSEDSAVYFCGRGFIATVVEVFDHWGLGTTLTVSSASTKGPSVFPLAPSSKSTSGGTAALGCLVKDYFPEPVTVSWNSGALTSGVHTFPAVLQSSGLYSLSSVVTVPSSSLGTQTYICNVNHKPSNTKVDKKVEPKSCDKTHTCPPCPAPEAAGGPSVFLFPPKPKDTLMISRTPEVTCVVVDVSHEDPEVKFNWYVDGVEVHNAKTKPREEQYNSTYRVVSVLTVDHHDWLNGKEYKCKVSNKALGAPIEKTISKAKGQPREPQVYTLPPCRDELTKNQVSLWCLVKGFYPSDIAVEWESNGQPENNYKTTPPVLDSDGSFFLYSKLTVDKSRWQQGNVFSCSVMHEALHSHYTQKSLSLSPG

SEQ ID NO: 535 - protein, 447 aa, synthetic construct
  REGION 1..447: note = O24A_VH/knob
QAYLQQSGAELVRPGASVKMSCKASGYTFTSYSMHWVKQTPRQGLEWIGAIYPGNDDTSYNQKFKGKATLTVDRSSSTAYMQLSSLTSEDSAVYFCTRDYSNYPFDYWGQGTTLTVSSASTKGPSVFPLAPSSKSTSGGTAALGCLVKDYFPEPVTVSWNSGALTSGVHTFPAVLQSSGLYSLSSVVTVPSSSLGTQTYICNVNHKPSNTKVDKKVEPKSCDKTHTCPPCPAPELLGGPSVFLFPPKPKDTLMISRTPEVTCVVVDVSHEDPEVKFNWYVDGVEVHNAKTKPREEQYNSTYRVVSVLTVLHQDWLNGKEYKCKVSNKALPAPIEKTISKAKGQPREPQVYTLPPCRDELTKNQVSLWCLVKGFYPSDIAVEWESNGQPENNYKTTPPVLDSDGSFFLYSKLTVDKSRWQQGNVFSCSVMHEALHNHYTQKSLSLSPG

SEQ ID NO: 536 - protein, 447 aa, synthetic construct
  REGION 1..447: note = O24A_VH/knob/YTE
QAYLQQSGAELVRPGASVKMSCKASGYTFTSYSMHWVKQTPRQGLEWIGAIYPGNDDTSYNQKFKGKATLTVDRSSSTAYMQLSSLTSEDSAVYFCTRDYSNYPFDYWGQGTTLTVSSASTKGPSVFPLAPSSKSTSGGTAALGCLVKDYFPEPVTVSWNSGALTSGVHTFPAVLQSSGLYSLSSVVTVPSSSLGTQTYICNVNHKPSNTKVDKKVEPKSCDKTHTCPPCPAPELLGGPSVFLFPPKPKDTLYITREPEVTCVVVDVSHEDPEVKFNWYVDGVEVHNAKTKPREEQYNSTYRVVSVLTVLHQDWLNGKEYKCKVSNKALPAPIEKTISKAKGQPREPQVYTLPPCRDELTKNQVSLWCLVKGFYPSDIAVEWESNGQPENNYKTTPPVLDSDGSFFLYSKLTVDKSRWQQGNVFSCSVMHEALHNHYTQKSLSLSPG

SEQ ID NO: 537 - protein, 447 aa, synthetic construct
  REGION 1..447: note = O24A_VH/knob/PGLALA/YTE
QAYLQQSGAELVRPGASVKMSCKASGYTFTSYSMHWVKQTPRQGLEWIGAIYPGNDDTSYNQKFKGKATLTVDRSSSTAYMQLSSLTSEDSAVYFCTRDYSNYPFDYWGQGTTLTVSSASTKGPSVFPLAPSSKSTSGGTAALGCLVKDYFPEPVTVSWNSGALTSGVHTFPAVLQSSGLYSLSSVVTVPSSSLGTQTYICNVNHKPSNTKVDKKVEPKSCDKTHTCPPCPAPEAAGGPSVFLFPPKPKDTLYITREPEVTCVVVDVSHEDPEVKFNWYVDGVEVHNAKTKPREEQYNSTYRVVSVLTVLHQDWLNGKEYKCKVSNKALGAPIEKTISKAKGQPREPQVYTLPPCRDELTKNQVSLWCLVKGFYPSDIAVEWESNGQPENNYKTTPPVLDSDGSFFLYSKLTVDKSRWQQGNVFSCSVMHEALHNHYTQKSLSLSPG

SEQ ID NO: 538 - protein, 447 aa, synthetic construct
  REGION 1..447: note = O24A_VH/knob/LS
QAYLQQSGAELVRPGASVKMSCKASGYTFTSYSMHWVKQTPRQGLEWIGAIYPGNDDTSYNQKFKGKATLTVDRSSSTAYMQLSSLTSEDSAVYFCTRDYSNYPFDYWGQGTTLTVSSASTKGPSVFPLAPSSKSTSGGTAALGCLVKDYFPEPVTVSWNSGALTSGVHTFPAVLQSSGLYSLSSVVTVPSSSLGTQTYICNVNHKPSNTKVDKKVEPKSCDKTHTCPPCPAPELLGGPSVFLFPPKPKDTLMISRTPEVTCVVVDVSHEDPEVKFNWYVDGVEVHNAKTKPREEQYNSTYRVVSVLTVLHQDWLNGKEYKCKVSNKALPAPIEKTISKAKGQPREPQVYTLPPCRDELTKNQVSLWCLVKGFYPSDIAVEWESNGQPENNYKTTPPVLDSDGSFFLYSKLTVDKSRWQQGNVFSCSVLHEALHSHYTQKSLSLSPG

SEQ ID NO: 539 - protein, 447 aa, synthetic construct
  REGION 1..447: note = O24A_VH/knob/PGLALA/LS
QAYLQQSGAELVRPGASVKMSCKASGYTFTSYSMHWVKQTPRQGLEWIGAIYPGNDDTSYNQKFKGKATLTVDRSSSTAYMQLSSLTSEDSAVYFCTRDYSNYPFDYWGQGTTLTVSSASTKGPSVFPLAPSSKSTSGGTAALGCLVKDYFPEPVTVSWNSGALTSGVHTFPAVLQSSGLYSLSSVVTVPSSSLGTQTYICNVNHKPSNTKVDKKVEPKSCDKTHTCPPCPAPEAAGGPSVFLFPPKPKDTLMISRTPEVTCVVVDVSHEDPEVKFNWYVDGVEVHNAKTKPREEQYNSTYRVVSVLTVLHQDWLNGKEYKCKVSNKALGAPIEKTISKAKGQPREPQVYTLPPCRDELTKNQVSLWCLVKGFYPSDIAVEWESNGQPENNYKTTPPVLDSDGSFFLYSKLTVDKSRWQQGNVFSCSVLHEALHSHYTQKSLSLSPG

SEQ ID NO: 540 - protein, 447 aa, synthetic construct
  REGION 1..447: note = O24A_VH/knob/DHS
QAYLQQSGAELVRPGASVKMSCKASGYTFTSYSMHWVKQTPRQGLEWIGAIYPGNDDTSYNQKFKGKATLTVDRSSSTAYMQLSSLTSEDSAVYFCTRDYSNYPFDYWGQGTTLTVSSASTKGPSVFPLAPSSKSTSGGTAALGCLVKDYFPEPVTVSWNSGALTSGVHTFPAVLQSSGLYSLSSVVTVPSSSLGTQTYICNVNHKPSNTKVDKKVEPKSCDKTHTCPPCPAPELLGGPSVFLFPPKPKDTLMISRTPEVTCVVVDVSHEDPEVKFNWYVDGVEVHNAKTKPREEQYNSTYRVVSVLTVDHHDWLNGKEYKCKVSNKALPAPIEKTISKAKGQPREPQVYTLPPCRDELTKNQVSLWCLVKGFYPSDIAVEWESNGQPENNYKTTPPVLDSDGSFFLYSKLTVDKSRWQQGNVFSCSVMHEALHSHYTQKSLSLSPG

SEQ ID NO: 541 - protein, 447 aa, synthetic construct
  REGION 1..447: note = O24A_VH/knob/PGLALA/DHS
QAYLQQSGAELVRPGASVKMSCKASGYTFTSYSMHWVKQTPRQGLEWIGAIYPGNDDTSYNQKFKGKATLTVDRSSSTAYMQLSSLTSEDSAVYFCTRDYSNYPFDYWGQGTTLTVSSASTKGPSVFPLAPSSKSTSGGTAALGCLVKDYFPEPVTVSWNSGALTSGVHTFPAVLQSSGLYSLSSVVTVPSSSLGTQTYICNVNHKPSNTKVDKKVEPKSCDKTHTCPPCPAPEAAGGPSVFLFPPKPKDTLMISRTPEVTCVVVDVSHEDPEVKFNWYVDGVEVHNAKTKPREEQYNSTYRVVSVLTVDHHDWLNGKEYKCKVSNKALGAPIEKTISKAKGQPREPQVYTLPPCRDELTKNQVSLWCLVKGFYPSDIAVEWESNGQPENNYKTTPPVLDSDGSFFLYSKLTVDKSRWQQGNVFSCSVMHEALHSHYTQKSLSLSPG

SEQ ID NO: 542 - protein, 972 aa, synthetic construct
  REGION 1..972: note = ACE2-740HA/201/knob
QSTIEEQAKTFLDKFNHEAEDLFYQSSLASWNYNTNITEENVQNMNNAGDKWSAFLKEQSTLAQMYPLQEIQNLTVKLQLQALQQNGSSVLSEDKSKRLNTILNTMSTIYSTGKVCNPDNPQECLLLEPGLNEIMANSLDYNERLWAWESWRSEVGKQLRPLYEEYVVLKNEMARANHYEDYGDYWRGDYEVNGVDGYDYSRGQLIEDVEHTFEEIKPLYEHLHAYVRAKLMNAYPSYISPIGCLPAHLLGDMWGRFWTNLYSLTVPFGQKPNIDVTDAMVDQAWDAQRIFKEAEKFFVSVGLPNMTQGFWENSMLTDPGNVQKAVCHPTAWDLGKGDFRILMCTKVTMDDFLTAHHEMGAIQYDMAYAAQPFLLRNGANEGFHEAVGEIMSLSAATPKHLKSIGLLSPDFQEDNETEINFLLKQALTIVGTLPFTYMLEKWRWMVFKGEIPKDQWMKKWWEMKREIVGVVEPVPHDETYCDPASLFHVSNDYSFIRYYTRTLYQFQFQEALCQAAKHEGPLHKCDISNSTEAGQKLFNMLRLGKSEPWTLALENVVGAKNMNVRPLLNYFEPLFTWLKDQNKNSFVGWSTDWSPYADQSIKVRISLKSALGDKAYEWNDNEMYLFRSSVAYAMRQYFLKVKNQMILFGEEDVRVANLKPRISFNFFVTAPKNVSDIIPRTEVEKAIRMSRSRINDAFRLNDNSLEFLGIQPTLGPPNQPPVSTSTSPTRSMAPGAVHLPQPVSTRDKTHTCPPCPAPELLGGPSVFLFPPKPKDTLMISRTPEVTCVVVDVSHEDPEVKFNWYVDGVEVHNAKTKPREEQYNSTYRVVSVLTVLHQDWLNGKEYKCKVSNKALPAPIEKTISKAKGQPREPQVYTLPPCRDELTKNQVSLWCLVKGFYPSDIAVEWESNGQPENNYKTTPPVLDSDGSFFLYSKLTVDKSRWQQGNVFSCSVMHEALHNHYTQKSLSLSPG

SEQ ID NO: 543 - protein, 847 aa, synthetic construct
  REGION 1..847: note = ACE2-615HA/201/hole/RF
QSTIEEQAKTFLDKFNHEAEDLFYQSSLASWNYNTNITEENVQNMNNAGDKWSAFLKEQSTLAQMYPLQEIQNLTVKLQLQALQQNGSSVLSEDKSKRLNTILNTMSTIYSTGKVCNPDNPQECLLLEPGLNEIMANSLDYNERLWAWESWRSEVGKQLRPLYEEYVVLKNEMARANHYEDYGDYWRGDYEVNGVDGYDYSRGQLIEDVEHTFEEIKPLYEHLHAYVRAKLMNAYPSYISPIGCLPAHLLGDMWGRFWTNLYSLTVPFGQKPNIDVTDAMVDQAWDAQRIFKEAEKFFVSVGLPNMTQGFWENSMLTDPGNVQKAVCHPTAWDLGKGDFRILMCTKVTMDDFLTAHHEMGAIQYDMAYAAQPFLLRNGANEGFHEAVGEIMSLSAATPKHLKSIGLLSPDFQEDNETEINFLLKQALTIVGTLPFTYMLEKWRWMVFKGEIPKDQWMKKWWEMKREIVGVVEPVPHDETYCDPASLFHVSNDYSFIRYYTRTLYQFQFQEALCQAAKHEGPLHKCDISNSTEAGQKLFNMLRLGKSEPWTLALENVVGAKNMNVRPLLNYFEPLFTWLKDQNKNSFVGWSTDWSPYADTSTSPTRSMAPGAVHLPQPVSTRDKTHTCPPCPAPELLGGPSVFLFPPKPKDTLMISRTPEVTCVVVDVSHEDPEVKFNWYVDGVEVHNAKTKPREEQYNSTYRVVSVLTVLHQDWLNGKEYKCKVSNKALPAPIEKTISKAKGQPREPQVCTLPPSRDELTKNQVSLSCAVKGFYPSDIAVEWESNGQPENNYKTTPPVLDSDGSFFLVSKLTVDKSRWQQGNVFSCSVMHEALHNRFTQKSLSLSPG

SEQ ID NO: 544 - protein, 847 aa, synthetic construct
  REGION 1..847: note = ACE2-615HA/201/knob
QSTIEEQAKTFLDKFNHEAEDLFYQSSLASWNYNTNITEENVQNMNNAGDKWSAFLKEQSTLAQMYPLQEIQNLTVKLQLQALQQNGSSVLSEDKSKRLNTILNTMSTIYSTGKVCNPDNPQECLLLEPGLNEIMANSLDYNERLWAWESWRSEVGKQLRPLYEEYVVLKNEMARANHYEDYGDYWRGDYEVNGVDGYDYSRGQLIEDVEHTFEEIKPLYEHLHAYVRAKLMNAYPSYISPIGCLPAHLLGDMWGRFWTNLYSLTVPFGQKPNIDVTDAMVDQAWDAQRIFKEAEKFFVSVGLPNMTQGFWENSMLTDPGNVQKAVCHPTAWDLGKGDFRILMCTKVTMDDFLTAHHEMGAIQYDMAYAAQPFLLRNGANEGFHEAVGEIMSLSAATPKHLKSIGLLSPDFQEDNETEINFLLKQALTIVGTLPFTYMLEKWRWMVFKGEIPKDQWMKKWWEMKREIVGVVEPVPHDETYCDPASLFHVSNDYSFIRYYTRTLYQFQFQEALCQAAKHEGPLHKCDISNSTEAGQKLFNMLRLGKSEPWTLALENVVGAKNMNVRPLLNYFEPLFTWLKDQNKNSFVGWSTDWSPYADTSTSPTRSMAPGAVHLPQPVSTRDKTHTCPPCPAPELLGGPSVFLFPPKPKDTLMISRTPEVTCVVVDVSHEDPEVKFNWYVDGVEVHNAKTKPREEQYNSTYRVVSVLTVLHQDWLNGKEYKCKVSNKALPAPIEKTISKAKGQPREPQVYTLPPCRDELTKNQVSLWCLVKGFYPSDIAVEWESNGQPENNYKTTPPVLDSDGSFFLYSKLTVDKSRWQQGNVFSCSVMHEALHNHYTQKSLSLSPG

SEQ ID NO: 545 - protein, 972 aa, synthetic construct
  REGION 1..972: note = ACE2-740HA/201/knob/YTE
QSTIEEQAKTFLDKFNHEAEDLFYQSSLASWNYNTNITEENVQNMNNAGDKWSAFLKEQSTLAQMYPLQEIQNLTVKLQLQALQQNGSSVLSEDKSKRLNTILNTMSTIYSTGKVCNPDNPQECLLLEPGLNEIMANSLDYNERLWAWESWRSEVGKQLRPLYEEYVVLKNEMARANHYEDYGDYWRGDYEVNGVDGYDYSRGQLIEDVEHTFEEIKPLYEHLHAYVRAKLMNAYPSYISPIGCLPAHLLGDMWGRFWTNLYSLTVPFGQKPNIDVTDAMVDQAWDAQRIFKEAEKFFVSVGLPNMTQGFWENSMLTDPGNVQKAVCHPTAWDLGKGDFRILMCTKVTMDDFLTAHHEMGAIQYDMAYAAQPFLLRNGANEGFHEAVGEIMSLSAATPKHLKSIGLLSPDFQEDNETEINFLLKQALTIVGTLPFTYMLEKWRWMVFKGEIPKDQWMKKWWEMKREIVGVVEPVPHDETYCDPASLFHVSNDYSFIRYYTRTLYQFQFQEALCQAAKHEGPLHKCDISNSTEAGQKLFNMLRLGKSEPWTLALENVVGAKNMNVRPLLNYFEPLFTWLKDQNKNSFVGWSTDWSPYADQSIKVRISLKSALGDKAYEWNDNEMYLFRSSVAYAMRQYFLKVKNQMILFGEEDVRVANLKPRISFNFFVTAPKNVSDIIPRTEVEKAIRMSRSRINDAFRLNDNSLEFLGIQPTLGPPNQPPVSTSTSPTRSMAPGAVHLPQPVSTRDKTHTCPPCPAPELLGGPSVFLFPPKPKDTLYITREPEVTCVVVDVSHEDPEVKFNWYVDGVEVHNAKTKPREEQYNSTYRVVSVLTVLHQDWLNGKEYKCKVSNKALPAPIEKTISKAKGQPREPQVYTLPPCRDELTKNQVSLWCLVKGFYPSDIAVEWESNGQPENNYKTTPPVLDSDGSFFLYSKLTVDKSRWQQGNVFSCSVMHEALHNHYTQKSLSLSPG

SEQ ID NO: 546 - protein, 847 aa, synthetic construct
  REGION 1..847: note = ACE2-615HA/201/hole/YTE/RF
QSTIEEQAKTFLDKFNHEAEDLFYQSSLASWNYNTNITEENVQNMNNAGDKWSAFLKEQSTLAQMYPLQEIQNLTVKLQLQALQQNGSSVLSEDKSKRLNTILNTMSTIYSTGKVCNPDNPQECLLLEPGLNEIMANSLDYNERLWAWESWRSEVGKQLRPLYEEYVVLKNEMARANHYEDYGDYWRGDYEVNGVDGYDYSRGQLIEDVEHTFEEIKPLYEHLHAYVRAKLMNAYPSYISPIGCLPAHLLGDMWGRFWTNLYSLTVPFGQKPNIDVTDAMVDQAWDAQRIFKEAEKFFVSVGLPNMTQGFWENSMLTDPGNVQKAVCHPTAWDLGKGDFRILMCTKVTMDDFLTAHHEMGAIQYDMAYAAQPFLLRNGANEGFHEAVGEIMSLSAATPKHLKSIGLLSPDFQEDNETEINFLLKQALTIVGTLPFTYMLEKWRWMVFKGEIPKDQWMKKWWEMKREIVGVVEPVPHDETYCDPASLFHVSNDYSFIRYYTRTLYQFQFQEALCQAAKHEGPLHKCDISNSTEAGQKLFNMLRLGKSEPWTLALENVVGAKNMNVRPLLNYFEPLFTWLKDQNKNSFVGWSTDWSPYADTSTSPTRSMAPGAVHLPQPVSTRDKTHTCPPCPAPELLGGPSVFLFPPKPKDTLYITREPEVTCVVVDVSHEDPEVKFNWYVDGVEVHNAKTKPREEQYNSTYRVVSVLTVLHQDWLNGKEYKCKVSNKALPAPIEKTISKAKGQPREPQVCTLPPSRDELTKNQVSLSCAVKGFYPSDIAVEWESNGQPENNYKTTPPVLDSDGSFFLVSKLTVDKSRWQQGNVFSCSVMHEALHNRFTQKSLSLSPG

SEQ ID NO: 547 - protein, 847 aa, synthetic construct
  REGION 1..847: note = ACE2-615HA/201/knob/YTE
QSTIEEQAKTFLDKFNHEAEDLFYQSSLASWNYNTNITEENVQNMNNAGDKWSAFLKEQSTLAQMYPLQEIQNLTVKLQLQALQQNGSSVLSEDKSKRLNTILNTMSTIYSTGKVCNPDNPQECLLLEPGLNEIMANSLDYNERLWAWESWRSEVGKQLRPLYEEYVVLKNEMARANHYEDYGDYWRGDYEVNGVDGYDYSRGQLIEDVEHTFEEIKPLYEHLHAYVRAKLMNAYPSYISPIGCLPAHLLGDMWGRFWTNLYSLTVPFGQKPNIDVTDAMVDQAWDAQRIFKEAEKFFVSVGLPNMTQGFWENSMLTDPGNVQKAVCHPTAWDLGKGDFRILMCTKVTMDDFLTAHHEMGAIQYDMAYAAQPFLLRNGANEGFHEAVGEIMSLSAATPKHLKSIGLLSPDFQEDNETEINFLLKQALTIVGTLPFTYMLEKWRWMVFKGEIPKDQWMKKWWEMKREIVGVVEPVPHDETYCDPASLFHVSNDYSFIRYYTRTLYQFQFQEALCQAAKHEGPLHKCDISNSTEAGQKLFNMLRLGKSEPWTLALENVVGAKNMNVRPLLNYFEPLFTWLKDQNKNSFVGWSTDWSPYADTSTSPTRSMAPGAVHLPQPVSTRDKTHTCPPCPAPELLGGPSVFLFPPKPKDTLYITREPEVTCVVVDVSHEDPEVKFNWYVDGVEVHNAKTKPREEQYNSTYRVVSVLTVLHQDWLNGKEYKCKVSNKALPAPIEKTISKAKGQPREPQVYTLPPCRDELTKNQVSLWCLVKGFYPSDIAVEWESNGQPENNYKTTPPVLDSDGSFFLYSKLTVDKSRWQQGNVFSCSVMHEALHNHYTQKSLSLSPG

SEQ ID NO: 548 - protein, 972 aa, synthetic construct
  REGION 1..972: note = ACE2-740HA/201/knob/LS
QSTIEEQAKTFLDKFNHEAEDLFYQSSLASWNYNTNITEENVQNMNNAGDKWSAFLKEQSTLAQMYPLQEIQNLTVKLQLQALQQNGSSVLSEDKSKRLNTILNTMSTIYSTGKVCNPDNPQECLLLEPGLNEIMANSLDYNERLWAWESWRSEVGKQLRPLYEEYVVLKNEMARANHYEDYGDYWRGDYEVNGVDGYDYSRGQLIEDVEHTFEEIKPLYEHLHAYVRAKLMNAYPSYISPIGCLPAHLLGDMWGRFWTNLYSLTVPFGQKPNIDVTDAMVDQAWDAQRIFKEAEKFFVSVGLPNMTQGFWENSMLTDPGNVQKAVCHPTAWDLGKGDFRILMCTKVTMDDFLTAHHEMGAIQYDMAYAAQPFLLRNGANEGFHEAVGEIMSLSAATPKHLKSIGLLSPDFQEDNETEINFLLKQALTIVGTLPFTYMLEKWRWMVFKGEIPKDQWMKKWWEMKREIVGVVEPVPHDETYCDPASLFHVSNDYSFIRYYTRTLYQFQFQEALCQAAKHEGPLHKCDISNSTEAGQKLFNMLRLGKSEPWTLALENVVGAKNMNVRPLLNYFEPLFTWLKDQNKNSFVGWSTDWSPYADQSIKVRISLKSALGDKAYEWNDNEMYLFRSSVAYAMRQYFLKVKNQMILFGEEDVRVANLKPRISFNFFVTAPKNVSDIIPRTEVEKAIRMSRSRINDAFRLNDNSLEFLGIQPTLGPPNQPPVSTSTSPTRSMAPGAVHLPQPVSTRDKTHTCPPCPAPELLGGPSVFLFPPKPKDTLMISRTPEVTCVVVDVSHEDPEVKFNWYVDGVEVHNAKTKPREEQYNSTYRVVSVLTVLHQDWLNGKEYKCKVSNKALPAPIEKTISKAKGQPREPQVYTLPPCRDELTKNQVSLWCLVKGFYPSDIAVEWESNGQPENNYKTTPPVLDSDGSFFLYSKLTVDKSRWQQGNVFSCSVLHEALHSHYTQKSLSLSPG

SEQ ID NO: 549 - protein, 847 aa, synthetic construct
  REGION 1..847: note = ACE2-615HA/201/hole/LS/RF
QSTIEEQAKTFLDKFNHEAEDLFYQSSLASWNYNTNITEENVQNMNNAGDKWSAFLKEQSTLAQMYPLQEIQNLTVKLQLQALQQNGSSVLSEDKSKRLNTILNTMSTIYSTGKVCNPDNPQECLLLEPGLNEIMANSLDYNERLWAWESWRSEVGKQLRPLYEEYVVLKNEMARANHYEDYGDYWRGDYEVNGVDGYDYSRGQLIEDVEHTFEEIKPLYEHLHAYVRAKLMNAYPSYISPIGCLPAHLLGDMWGRFWTNLYSLTVPFGQKPNIDVTDAMVDQAWDAQRIFKEAEKFFVSVGLPNMTQGFWENSMLTDPGNVQKAVCHPTAWDLGKGDFRILMCTKVTMDDFLTAHHEMGAIQYDMAYAAQPFLLRNGANEGFHEAVGEIMSLSAATPKHLKSIGLLSPDFQEDNETEINFLLKQALTIVGTLPFTYMLEKWRWMVFKGEIPKDQWMKKWWEMKREIVGVVEPVPHDETYCDPASLFHVSNDYSFIRYYTRTLYQFQFQEALCQAAKHEGPLHKCDISNSTEAGQKLFNMLRLGKSEPWTLALENVVGAKNMNVRPLLNYFEPLFTWLKDQNKNSFVGWSTDWSPYADTSTSPTRSMAPGAVHLPQPVSTRDKTHTCPPCPAPELLGGPSVFLFPPKPKDTLMISRTPEVTCVVVDVSHEDPEVKFNWYVDGVEVHNAKTKPREEQYNSTYRVVSVLTVLHQDWLNGKEYKCKVSNKALPAPIEKTISKAKGQPREPQVCTLPPSRDELTKNQVSLSCAVKGFYPSDIAVEWESNGQPENNYKTTPPVLDSDGSFFLVSKLTVDKSRWQQGNVFSCSVLHEALHSRFTQKSLSLSPG

SEQ ID NO: 550 - protein, 847 aa, synthetic construct
  REGION 1..847: note = ACE2-615HA/201/knob/LS
QSTIEEQAKTFLDKFNHEAEDLFYQSSLASWNYNTNITEENVQNMNNAGDKWSAFLKEQSTLAQMYPLQEIQNLTVKLQLQALQQNGSSVLSEDKSKRLNTILNTMSTIYSTGKVCNPDNPQECLLLEPGLNEIMANSLDYNERLWAWESWRSEVGKQLRPLYEEYVVLKNEMARANHYEDYGDYWRGDYEVNGVDGYDYSRGQLIEDVEHTFEEIKPLYEHLHAYVRAKLMNAYPSYISPIGCLPAHLLGDMWGRFWTNLYSLTVPFGQKPNIDVTDAMVDQAWDAQRIFKEAEKFFVSVGLPNMTQGFWENSMLTDPGNVQKAVCHPTAWDLGKGDFRILMCTKVTMDDFLTAHHEMGAIQYDMAYAAQPFLLRNGANEGFHEAVGEIMSLSAATPKHLKSIGLLSPDFQEDNETEINFLLKQALTIVGTLPFTYMLEKWRWMVFKGEIPKDQWMKKWWEMKREIVGVVEPVPHDETYCDPASLFHVSNDYSFIRYYTRTLYQFQFQEALCQAAKHEGPLHKCDISNSTEAGQKLFNMLRLGKSEPWTLALENVVGAKNMNVRPLLNYFEPLFTWLKDQNKNSFVGWSTDWSPYADTSTSPTRSMAPGAVHLPQPVSTRDKTHTCPPCPAPELLGGPSVFLFPPKPKDTLMISRTPEVTCVVVDVSHEDPEVKFNWYVDGVEVHNAKTKPREEQYNSTYRVVSVLTVLHQDWLNGKEYKCKVSNKALPAPIEKTISKAKGQPREPQVYTLPPCRDELTKNQVSLWCLVKGFYPSDIAVEWESNGQPENNYKTTPPVLDSDGSFFLYSKLTVDKSRWQQGNVFSCSVLHEALHSHYTQKSLSLSPG

SEQ ID NO: 551 - protein, 972 aa, synthetic construct
  REGION 1..972: note = ACE2-740HA/201/knob/DHS
QSTIEEQAKTFLDKFNHEAEDLFYQSSLASWNYNTNITEENVQNMNNAGDKWSAFLKEQSTLAQMYPLQEIQNLTVKLQLQALQQNGSSVLSEDKSKRLNTILNTMSTIYSTGKVCNPDNPQECLLLEPGLNEIMANSLDYNERLWAWESWRSEVGKQLRPLYEEYVVLKNEMARANHYEDYGDYWRGDYEVNGVDGYDYSRGQLIEDVEHTFEEIKPLYEHLHAYVRAKLMNAYPSYISPIGCLPAHLLGDMWGRFWTNLYSLTVPFGQKPNIDVTDAMVDQAWDAQRIFKEAEKFFVSVGLPNMTQGFWENSMLTDPGNVQKAVCHPTAWDLGKGDFRILMCTKVTMDDFLTAHHEMGAIQYDMAYAAQPFLLRNGANEGFHEAVGEIMSLSAATPKHLKSIGLLSPDFQEDNETEINFLLKQALTIVGTLPFTYMLEKWRWMVFKGEIPKDQWMKKWWEMKREIVGVVEPVPHDETYCDPASLFHVSNDYSFIRYYTRTLYQFQFQEALCQAAKHEGPLHKCDISNSTEAGQKLFNMLRLGKSEPWTLALENVVGAKNMNVRPLLNYFEPLFTWLKDQNKNSFVGWSTDWSPYADQSIKVRISLKSALGDKAYEWNDNEMYLFRSSVAYAMRQYFLKVKNQMILFGEEDVRVANLKPRISFNFFVTAPKNVSDIIPRTEVEKAIRMSRSRINDAFRLNDNSLEFLGIQPTLGPPNQPPVSTSTSPTRSMAPGAVHLPQPVSTRDKTHTCPPCPAPELLGGPSVFLFPPKPKDTLMISRTPEVTCVVVDVSHEDPEVKFNWYVDGVEVHNAKTKPREEQYNSTYRVVSVLTVDHHDWLNGKEYKCKVSNKALPAPIEKTISKAKGQPREPQVYTLPPCRDELTKNQVSLWCLVKGFYPSDIAVEWESNGQPENNYKTTPPVLDSDGSFFLYSKLTVDKSRWQQGNVFSCSVMHEALHSHYTQKSLSLSPG

SEQ ID NO: 552 - protein, 847 aa, synthetic construct
  REGION 1..847: note = ACE2-615HA/201/hole/DHS/RF
QSTIEEQAKTFLDKFNHEAEDLFYQSSLASWNYNTNITEENVQNMNNAGDKWSAFLKEQSTLAQMYPLQEIQNLTVKLQLQALQQNGSSVLSEDKSKRLNTILNTMSTIYSTGKVCNPDNPQECLLLEPGLNEIMANSLDYNERLWAWESWRSEVGKQLRPLYEEYVVLKNEMARANHYEDYGDYWRGDYEVNGVDGYDYSRGQLIEDVEHTFEEIKPLYEHLHAYVRAKLMNAYPSYISPIGCLPAHLLGDMWGRFWTNLYSLTVPFGQKPNIDVTDAMVDQAWDAQRIFKEAEKFFVSVGLPNMTQGFWENSMLTDPGNVQKAVCHPTAWDLGKGDFRILMCTKVTMDDFLTAHHEMGAIQYDMAYAAQPFLLRNGANEGFHEAVGEIMSLSAATPKHLKSIGLLSPDFQEDNETEINFLLKQALTIVGTLPFTYMLEKWRWMVFKGEIPKDQWMKKWWEMKREIVGVVEPVPHDETYCDPASLFHVSNDYSFIRYYTRTLYQFQFQEALCQAAKHEGPLHKCDISNSTEAGQKLFNMLRLGKSEPWTLALENVVGAKNMNVRPLLNYFEPLFTWLKDQNKNSFVGWSTDWSPYADTSTSPTRSMAPGAVHLPQPVSTRDKTHTCPPCPAPELLGGPSVFLFPPKPKDTLMISRTPEVTCVVVDVSHEDPEVKFNWYVDGVEVHNAKTKPREEQYNSTYRVVSVLTVDHHDWLNGKEYKCKVSNKALPAPIEKTISKAKGQPREPQVCTLPPSRDELTKNQVSLSCAVKGFYPSDIAVEWESNGQPENNYKTTPPVLDSDGSFFLVSKLTVDKSRWQQGNVFSCSVMHEALHSRFTQKSLSLSPG

SEQ ID NO: 553 - protein, 847 aa, synthetic construct
  REGION 1..847: note = ACE2-615HA/201/knob/DHS
QSTIEEQAKTFLDKFNHEAEDLFYQSSLASWNYNTNITEENVQNMNNAGDKWSAFLKEQSTLAQMYPLQEIQNLTVKLQLQALQQNGSSVLSEDKSKRLNTILNTMSTIYSTGKVCNPDNPQECLLLEPGLNEIMANSLDYNERLWAWESWRSEVGKQLRPLYEEYVVLKNEMARANHYEDYGDYWRGDYEVNGVDGYDYSRGQLIEDVEHTFEEIKPLYEHLHAYVRAKLMNAYPSYISPIGCLPAHLLGDMWGRFWTNLYSLTVPFGQKPNIDVTDAMVDQAWDAQRIFKEAEKFFVSVGLPNMTQGFWENSMLTDPGNVQKAVCHPTAWDLGKGDFRILMCTKVTMDDFLTAHHEMGAIQYDMAYAAQPFLLRNGANEGFHEAVGEIMSLSAATPKHLKSIGLLSPDFQEDNETEINFLLKQALTIVGTLPFTYMLEKWRWMVFKGEIPKDQWMKKWWEMKREIVGVVEPVPHDETYCDPASLFHVSNDYSFIRYYTRTLYQFQFQEALCQAAKHEGPLHKCDISNSTEAGQKLFNMLRLGKSEPWTLALENVVGAKNMNVRPLLNYFEPLFTWLKDQNKNSFVGWSTDWSPYADTSTSPTRSMAPGAVHLPQPVSTRDKTHTCPPCPAPELLGGPSVFLFPPKPKDTLMISRTPEVTCVVVDVSHEDPEVKFNWYVDGVEVHNAKTKPREEQYNSTYRVVSVLTVDHHDWLNGKEYKCKVSNKALPAPIEKTISKAKGQPREPQVYTLPPCRDELTKNQVSLWCLVKGFYPSDIAVEWESNGQPENNYKTTPPVLDSDGSFFLYSKLTVDKSRWQQGNVFSCSVMHEALHSHYTQKSLSLSPG

SEQ ID NO: 554 - protein, 450 aa, synthetic construct
  REGION 1..450: note = B13A_VH-CH/wt
QVQLQQSGAELVKPGASVKISCKASGYAFSNYWMNWVKQRPGKGLEWIGQIYPGDGDTNYNGNFKGKATLTADKSSSTAYIQLSSLTSEDSAVYFCGRGFIATVVEVFDHWGLGTTLTVSSASTKGPSVFPLAPSSKSTSGGTAALGCLVKDYFPEPVTVSWNSGALTSGVHTFPAVLQSSGLYSLSSVVTVPSSSLGTQTYICNVNHKPSNTKVDKKVEPKSCDKTHTCPPCPAPELLGGPSVFLFPPKPKDTLMISRTPEVTCVVVDVSHEDPEVKFNWYVDGVEVHNAKTKPREEQYNSTYRVVSVLTVLHQDWLNGKEYKCKVSNKALPAPIEKTISKAKGQPREPQVYTLPPSRDELTKNQVSLTCLVKGFYPSDIAVEWESNGQPENNYKTTPPVLDSDGSFFLYSKLTVDKSRWQQGNVFSCSVMHEALHNHYTQKSLSLSPG

SEQ ID NO: 555 - protein, 447 aa, synthetic construct
  REGION 1..447: note = O24A_VH-CH/wt
QAYLQQSGAELVRPGASVKMSCKASGYTFTSYSMHWVKQTPRQGLEWIGAIYPGNDDTSYNQKFKGKATLTVDRSSSTAYMQLSSLTSEDSAVYFCTRDYSNYPFDYWGQGTTLTVSSASTKGPSVFPLAPSSKSTSGGTAALGCLVKDYFPEPVTVSWNSGALTSGVHTFPAVLQSSGLYSLSSVVTVPSSSLGTQTYICNVNHKPSNTKVDKKVEPKSCDKTHTCPPCPAPELLGGPSVFLFPPKPKDTLMISRTPEVTCVVVDVSHEDPEVKFNWYVDGVEVHNAKTKPREEQYNSTYRVVSVLTVLHQDWLNGKEYKCKVSNKALPAPIEKTISKAKGQPREPQVYTLPPSRDELTKNQVSLTCLVKGFYPSDIAVEWESNGQPENNYKTTPPVLDSDGSFFLYSKLTVDKSRWQQGNVFSCSVMHEALHNHYTQKSLSLSPG

SEQ ID NO: 556 - protein, 605 aa, synthetic construct
  REGION 1..605: note = RG1_VH-CH1/N84S/K147E/K213E/CLD201/hole/DHS/RF
QVQLVESGGGVVQPGRSLRLSCAASGFTFSNYAMYWVRQAPGKGLEWVAVISYDGSNKYYADSVKGRFTISRDNSKNTLYLQMSSLRTEDTAVYYCASGSDYGDYLLVYWGQGTLVTVSSASTKGPSVFPLAPSSKSTSGGTAALGCLVEDYFPEPVTVSWNSGALTSGVHTFPAVLQSSGLYSLSSVVTVPSSSLGTQTYICNVNHKPSNTKVDEKVEPKSCTDWSPYADQSIKVRISLKSALGDKAYEWNDNEMYLFRSSVAYAMRQYFLKVKNQMILFGEEDVRVANLKPRISFNFFVTAPKNVSDIIPRTEVEKAIRMSRSRINDAFRLNDNSLEFLGIQPTLGPPNQPPVSTSTSPTRSMAPGAVHLPQPVSTRDKTHTCPPCPAPELLGGPSVFLFPPKPKDTLMISRTPEVTCVVVDVSHEDPEVKFNWYVDGVEVHNAKTKPREEQYNSTYRVVSVLTVDHHDWLNGKEYKCKVSNKALPAPIEKTISKAKGQPREPQVCTLPPSRDELTKNQVSLSCAVKGFYPSDIAVEWESNGQPENNYKTTPPVLDSDGSFFLVSKLTVDKSRWQQGNVFSCSVMHEALHSRFTQKSLSLSPG

SEQ ID NO: 557 - protein, 438 aa, synthetic construct
  REGION 1..438: note = RG2_VK-x-CH1/knob/DHS
DIQMTQSPSSLSASVGDRVTITCQASQDITNYLNWYQQKPGKAPKLLIYAASNLETGVPSRFSGSGSGTDFTFTISGLQPEDIATYYCQQYDNLPLTFGGGTKVEIKSSASTKGPSVFPLAPSSKSTSGGTAALGCLVKDYFPEPVTVSWNSGALTSGVHTFPAVLQSSGLYSLSSVVTVPSSSLGTQTYICNVNHKPSNTKVDKKVEPKSCDKTHTCPPCPAPELLGGPSVFLFPPKPKDTLMISRTPEVTCVVVDVSHEDPEVKFNWYVDGVEVHNAKTKPREEQYNSTYRVVSVLTVDHHDWLNGKEYKCKVSNKALPAPIEKTISKAKGQPREPQVYTLPPCRDELTKNQVSLWCLVKGFYPSDIAVEWESNGQPENNYKTTPPVLDSDGSFFLYSKLTVDKSRWQQGNVFSCSVMHEALHSHYTQKSLSLSPG

SEQ ID NO: 558 - protein, 605 aa, synthetic construct
  REGION 1..605: note = RG1_VH-CH1/N84S/Q39K/S183E/CLD201/hole/DHS/RF
QVQLVESGGGVVQPGRSLRLSCAASGFTFSNYAMYWVRKAPGKGLEWVAVISYDGSNKYYADSVKGRFTISRDNSKNTLYLQMSSLRTEDTAVYYCASGSDYGDYLLVYWGQGTLVTVSSASTKGPSVFPLAPSSKSTSGGTAALGCLVKDYFPEPVTVSWNSGALTSGVHTFPAVLQSSGLYSLESVVTVPSSSLGTQTYICNVNHKPSNTKVDKKVEPKSCTDWSPYADQSIKVRISLKSALGDKAYEWNDNEMYLFRSSVAYAMRQYFLKVKNQMILFGEEDVRVANLKPRISFNFFVTAPKNVSDIIPRTEVEKAIRMSRSRINDAFRLNDNSLEFLGIQPTLGPPNQPPVSTSTSPTRSMAPGAVHLPQPVSTRDKTHTCPPCPAPELLGGPSVFLFPPKPKDTLMISRTPEVTCVVVDVSHEDPEVKFNWYVDGVEVHNAKTKPREEQYNSTYRVVSVLTVDHHDWLNGKEYKCKVSNKALPAPIEKTISKAKGQPREPQVCTLPPSRDELTKNQVSLSCAVKGFYPSDIAVEWESNGQPENNYKTTPPVLDSDGSFFLVSKLTVDKSRWQQGNVFSCSVMHEALHSRFTQKSLSLSPG

SEQ ID NO: 559 - protein, 438 aa, synthetic construct
  REGION 1..438: note = RG2_VK-x-CH1/Q38E/S183K/knob/DHS
DIQMTQSPSSLSASVGDRVTITCQASQDITNYLNWYQEKPGKAPKLLIYAASNLETGVPSRFSGSGSGTDFTFTISGLQPEDIATYYCQQYDNLPLTFGGGTKVEIKSSASTKGPSVFPLAPSSKSTSGGTAALGCLVKDYFPEPVTVSWNSGALTSGVHTFPAVLQSSGLYSLKSVVTVPSSSLGTQTYICNVNHKPSNTKVDKKVEPKSCDKTHTCPPCPAPELLGGPSVFLFPPKPKDTLMISRTPEVTCVVVDVSHEDPEVKFNWYVDGVEVHNAKTKPREEQYNSTYRVVSVLTVDHHDWLNGKEYKCKVSNKALPAPIEKTISKAKGQPREPQVYTLPPCRDELTKNQVSLWCLVKGFYPSDIAVEWESNGQPENNYKTTPPVLDSDGSFFLYSKLTVDKSRWQQGNVFSCSVMHEALHSHYTQKSLSLSPG

SEQ ID NO: 560 - protein, 438 aa, synthetic construct
  REGION 1..438: note = RG2_VK-x-CH1/Q38K/S183K/knob/DHS
DIQMTQSPSSLSASVGDRVTITCQASQDITNYLNWYQKKPGKAPKLLIYAASNLETGVPSRFSGSGSGTDFTFTISGLQPEDIATYYCQQYDNLPLTFGGGTKVEIKSSASTKGPSVFPLAPSSKSTSGGTAALGCLVKDYFPEPVTVSWNSGALTSGVHTFPAVLQSSGLYSLKSVVTVPSSSLGTQTYICNVNHKPSNTKVDKKVEPKSCDKTHTCPPCPAPELLGGPSVFLFPPKPKDTLMISRTPEVTCVVVDVSHEDPEVKFNWYVDGVEVHNAKTKPREEQYNSTYRVVSVLTVDHHDWLNGKEYKCKVSNKALPAPIEKTISKAKGQPREPQVYTLPPCRDELTKNQVSLWCLVKGFYPSDIAVEWESNGQPENNYKTTPPVLDSDGSFFLYSKLTVDKSRWQQGNVFSCSVMHEALHSHYTQKSLSLSPG

SEQ ID NO: 561 - protein, 605 aa, synthetic construct
  REGION 1..605: note = RG2_VH-CH1/N84S/K147E/K213E/CLD201/hole/DHS/RF
QVQLVESGGGLVKPGGSLRLSCAASGFTFSDYYMSWIRQAPGKGLEWVSYITYSGSTIYYADSVKGRFTISRDNAKSSLYLQMSSLRAEDTAVYYCARDRGTTMVPFDYWGQGTLVTVSSASTKGPSVFPLAPSSKSTSGGTAALGCLVEDYFPEPVTVSWNSGALTSGVHTFPAVLQSSGLYSLSSVVTVPSSSLGTQTYICNVNHKPSNTKVDEKVEPKSCTDWSPYADQSIKVRISLKSALGDKAYEWNDNEMYLFRSSVAYAMRQYFLKVKNQMILFGEEDVRVANLKPRISFNFFVTAPKNVSDIIPRTEVEKAIRMSRSRINDAFRLNDNSLEFLGIQPTLGPPNQPPVSTSTSPTRSMAPGAVHLPQPVSTRDKTHTCPPCPAPELLGGPSVFLFPPKPKDTLMISRTPEVTCVVVDVSHEDPEVKFNWYVDGVEVHNAKTKPREEQYNSTYRVVSVLTVDHHDWLNGKEYKCKVSNKALPAPIEKTISKAKGQPREPQVCTLPPSRDELTKNQVSLSCAVKGFYPSDIAVEWESNGQPENNYKTTPPVLDSDGSFFLVSKLTVDKSRWQQGNVFSCSVMHEALHSRFTQKSLSLSPG

SEQ ID NO: 562 - protein, 441 aa, synthetic construct
  REGION 1..441: note = RG1_VL-x-CH1/knob/DHS
QSALTQPASVSGSPGQSITISCTGTSSDVGGYNYVSWYQQHPGKAPKLMIYDVSKRPSGVSNRFSGSKSGNTASLTISGLQSEDEADYYCNSLTSISTWVFGGGTKLTVLSSASTKGPSVFPLAPSSKSTSGGTAALGCLVKDYFPEPVTVSWNSGALTSGVHTFPAVLQSSGLYSLSSVVTVPSSSLGTQTYICNVNHKPSNTKVDKKVEPKSCDKTHTCPPCPAPELLGGPSVFLFPPKPKDTLMISRTPEVTCVVVDVSHEDPEVKFNWYVDGVEVHNAKTKPREEQYNSTYRVVSVLTVDHHDWLNGKEYKCKVSNKALPAPIEKTISKAKGQPREPQVYTLPPCRDELTKNQVSLWCLVKGFYPSDIAVEWESNGQPENNYKTTPPVLDSDGSFFLYSKLTVDKSRWQQGNVFSCSVMHEALHSHYTQKSLSLSPG

SEQ ID NO: 563 - protein, 605 aa, synthetic construct
  REGION 1..605: note = RG2_VH-CH1/N84S/Q39K/S183E/CLD201/hole/DHS/RF
QVQLVESGGGLVKPGGSLRLSCAASGFTFSDYYMSWIRKAPGKGLEWVSYITYSGSTIYYADSVKGRFTISRDNAKSSLYLQMSSLRAEDTAVYYCARDRGTTMVPFDYWGQGTLVTVSSASTKGPSVFPLAPSSKSTSGGTAALGCLVKDYFPEPVTVSWNSGALTSGVHTFPAVLQSSGLYSLESVVTVPSSSLGTQTYICNVNHKPSNTKVDKKVEPKSCTDWSPYADQSIKVRISLKSALGDKAYEWNDNEMYLFRSSVAYAMRQYFLKVKNQMILFGEEDVRVANLKPRISFNFFVTAPKNVSDIIPRTEVEKAIRMSRSRINDAFRLNDNSLEFLGIQPTLGPPNQPPVSTSTSPTRSMAPGAVHLPQPVSTRDKTHTCPPCPAPELLGGPSVFLFPPKPKDTLMISRTPEVTCVVVDVSHEDPEVKFNWYVDGVEVHNAKTKPREEQYNSTYRVVSVLTVDHHDWLNGKEYKCKVSNKALPAPIEKTISKAKGQPREPQVCTLPPSRDELTKNQVSLSCAVKGFYPSDIAVEWESNGQPENNYKTTPPVLDSDGSFFLVSKLTVDKSRWQQGNVFSCSVMHEALHSRFTQKSLSLSPG

SEQ ID NO: 564 - protein, 441 aa, synthetic construct
  REGION 1..441: note = RG1_VL-x-CH1/Q38E/S183K/knob/DHS
QSALTQPASVSGSPGQSITISCTGTSSDVGGYNYVSWYQEHPGKAPKLMIYDVSKRPSGVSNRFSGSKSGNTASLTISGLQSEDEADYYCNSLTSISTWVFGGGTKLTVLSSASTKGPSVFPLAPSSKSTSGGTAALGCLVKDYFPEPVTVSWNSGALTSGVHTFPAVLQSSGLYSLKSVVTVPSSSLGTQTYICNVNHKPSNTKVDKKVEPKSCDKTHTCPPCPAPELLGGPSVFLFPPKPKDTLMISRTPEVTCVVVDVSHEDPEVKFNWYVDGVEVHNAKTKPREEQYNSTYRVVSVLTVDHHDWLNGKEYKCKVSNKALPAPIEKTISKAKGQPREPQVYTLPPCRDELTKNQVSLWCLVKGFYPSDIAVEWESNGQPENNYKTTPPVLDSDGSFFLYSKLTVDKSRWQQGNVFSCSVMHEALHSHYTQKSLSLSPG

SEQ ID NO: 565 - protein, 441 aa, synthetic construct
  REGION 1..441: note = RG1_VL-x-CH1/Q38K/S183K/knob/DHS
QSALTQPASVSGSPGQSITISCTGTSSDVGGYNYVSWYQKHPGKAPKLMIYDVSKRPSGVSNRFSGSKSGNTASLTISGLQSEDEADYYCNSLTSISTWVFGGGTKLTVLSSASTKGPSVFPLAPSSKSTSGGTAALGCLVKDYFPEPVTVSWNSGALTSGVHTFPAVLQSSGLYSLKSVVTVPSSSLGTQTYICNVNHKPSNTKVDKKVEPKSCDKTHTCPPCPAPELLGGPSVFLFPPKPKDTLMISRTPEVTCVVVDVSHEDPEVKFNWYVDGVEVHNAKTKPREEQYNSTYRVVSVLTVDHHDWLNGKEYKCKVSNKALPAPIEKTISKAKGQPREPQVYTLPPCRDELTKNQVSLWCLVKGFYPSDIAVEWESNGQPENNYKTTPPVLDSDGSFFLYSKLTVDKSRWQQGNVFSCSVMHEALHSHYTQKSLSLSPG

SEQ ID NO: 566 - protein, 605 aa, synthetic construct
  REGION 1..605: note = RG1_VH-CH1/N84S/K147E/K213E/CLD201/knob/DHS
QVQLVESGGGVVQPGRSLRLSCAASGFTFSNYAMYWVRQAPGKGLEWVAVISYDGSNKYYADSVKGRFTISRDNSKNTLYLQMSSLRTEDTAVYYCASGSDYGDYLLVYWGQGTLVTVSSASTKGPSVFPLAPSSKSTSGGTAALGCLVEDYFPEPVTVSWNSGALTSGVHTFPAVLQSSGLYSLSSVVTVPSSSLGTQTYICNVNHKPSNTKVDEKVEPKSCTDWSPYADQSIKVRISLKSALGDKAYEWNDNEMYLFRSSVAYAMRQYFLKVKNQMILFGEEDVRVANLKPRISFNFFVTAPKNVSDIIPRTEVEKAIRMSRSRINDAFRLNDNSLEFLGIQPTLGPPNQPPVSTSTSPTRSMAPGAVHLPQPVSTRDKTHTCPPCPAPELLGGPSVFLFPPKPKDTLMISRTPEVTCVVVDVSHEDPEVKFNWYVDGVEVHNAKTKPREEQYNSTYRVVSVLTVDHHDWLNGKEYKCKVSNKALPAPIEKTISKAKGQPREPQVYTLPPCRDELTKNQVSLWCLVKGFYPSDIAVEWESNGQPENNYKTTPPVLDSDGSFFLYSKLTVDKSRWQQGNVFSCSVMHEALHSHYTQKSLSLSPG

SEQ ID NO: 567 - protein, 438 aa, synthetic construct
  REGION 1..438: note = RG2_VK-x-CH1/hole/DHS/RF
DIQMTQSPSSLSASVGDRVTITCQASQDITNYLNWYQQKPGKAPKLLIYAASNLETGVPSRFSGSGSGTDFTFTISGLQPEDIATYYCQQYDNLPLTFGGGTKVEIKSSASTKGPSVFPLAPSSKSTSGGTAALGCLVKDYFPEPVTVSWNSGALTSGVHTFPAVLQSSGLYSLSSVVTVPSSSLGTQTYICNVNHKPSNTKVDKKVEPKSCDKTHTCPPCPAPELLGGPSVFLFPPKPKDTLMISRTPEVTCVVVDVSHEDPEVKFNWYVDGVEVHNAKTKPREEQYNSTYRVVSVLTVDHHDWLNGKEYKCKVSNKALPAPIEKTISKAKGQPREPQVCTLPPSRDELTKNQVSLSCAVKGFYPSDIAVEWESNGQPENNYKTTPPVLDSDGSFFLVSKLTVDKSRWQQGNVFSCSVMHEALHSRFTQKSLSLSPG

SEQ ID NO: 568 - protein, 605 aa, synthetic construct
  REGION 1..605: note = RG1_VH-CH1/N84S/Q39K/S183E/CLD201/knob/DHS
QVQLVESGGGVVQPGRSLRLSCAASGFTFSNYAMYWVRKAPGKGLEWVAVISYDGSNKYYADSVKGRFTISRDNSKNTLYLQMSSLRTEDTAVYYCASGSDYGDYLLVYWGQGTLVTVSSASTKGPSVFPLAPSSKSTSGGTAALGCLVKDYFPEPVTVSWNSGALTSGVHTFPAVLQSSGLYSLESVVTVPSSSLGTQTYICNVNHKPSNTKVDKKVEPKSCTDWSPYADQSIKVRISLKSALGDKAYEWNDNEMYLFRSSVAYAMRQYFLKVKNQMILFGEEDVRVANLKPRISFNFFVTAPKNVSDIIPRTEVEKAIRMSRSRINDAFRLNDNSLEFLGIQPTLGPPNQPPVSTSTSPTRSMAPGAVHLPQPVSTRDKTHTCPPCPAPELLGGPSVFLFPPKPKDTLMISRTPEVTCVVVDVSHEDPEVKFNWYVDGVEVHNAKTKPREEQYNSTYRVVSVLTVDHHDWLNGKEYKCKVSNKALPAPIEKTISKAKGQPREPQVYTLPPCRDELTKNQVSLWCLVKGFYPSDIAVEWESNGQPENNYKTTPPVLDSDGSFFLYSKLTVDKSRWQQGNVFSCSVMHEALHSHYTQKSLSLSPG

SEQ ID NO: 569 - protein, 438 aa, synthetic construct
  REGION 1..438: note = RG2_VK-x-CH1/Q38E/S183K/hole/DHS/RF
DIQMTQSPSSLSASVGDRVTITCQASQDITNYLNWYQEKPGKAPKLLIYAASNLETGVPSRFSGSGSGTDFTFTISGLQPEDIATYYCQQYDNLPLTFGGGTKVEIKSSASTKGPSVFPLAPSSKSTSGGTAALGCLVKDYFPEPVTVSWNSGALTSGVHTFPAVLQSSGLYSLKSVVTVPSSSLGTQTYICNVNHKPSNTKVDKKVEPKSCDKTHTCPPCPAPELLGGPSVFLFPPKPKDTLMISRTPEVTCVVVDVSHEDPEVKFNWYVDGVEVHNAKTKPREEQYNSTYRVVSVLTVDHHDWLNGKEYKCKVSNKALPAPIEKTISKAKGQPREPQVCTLPPSRDELTKNQVSLSCAVKGFYPSDIAVEWESNGQPENNYKTTPPVLDSDGSFFLVSKLTVDKSRWQQGNVFSCSVMHEALHSRFTQKSLSLSPG

SEQ ID NO: 570 - protein, 438 aa, synthetic construct
  REGION 1..438: note = RG2_VK-x-CH1/Q38K/S183K/hole/DHS/RF
DIQMTQSPSSLSASVGDRVTITCQASQDITNYLNWYQKKPGKAPKLLIYAASNLETGVPSRFSGSGSGTDFTFTISGLQPEDIATYYCQQYDNLPLTFGGGTKVEIKSSASTKGPSVFPLAPSSKSTSGGTAALGCLVKDYFPEPVTVSWNSGALTSGVHTFPAVLQSSGLYSLKSVVTVPSSSLGTQTYICNVNHKPSNTKVDKKVEPKSCDKTHTCPPCPAPELLGGPSVFLFPPKPKDTLMISRTPEVTCVVVDVSHEDPEVKFNWYVDGVEVHNAKTKPREEQYNSTYRVVSVLTVDHHDWLNGKEYKCKVSNKALPAPIEKTISKAKGQPREPQVCTLPPSRDELTKNQVSLSCAVKGFYPSDIAVEWESNGQPENNYKTTPPVLDSDGSFFLVSKLTVDKSRWQQGNVFSCSVMHEALHSRFTQKSLSLSPG

SEQ ID NO: 571 - protein, 605 aa, synthetic construct
  REGION 1..605: note = RG2_VH-CH1/N84S/K147E/K213E/CLD201/knob/DHS
QVQLVESGGGLVKPGGSLRLSCAASGFTFSDYYMSWIRQAPGKGLEWVSYITYSGSTIYYADSVKGRFTISRDNAKSSLYLQMSSLRAEDTAVYYCARDRGTTMVPFDYWGQGTLVTVSSASTKGPSVFPLAPSSKSTSGGTAALGCLVEDYFPEPVTVSWNSGALTSGVHTFPAVLQSSGLYSLSSVVTVPSSSLGTQTYICNVNHKPSNTKVDEKVEPKSCTDWSPYADQSIKVRISLKSALGDKAYEWNDNEMYLFRSSVAYAMRQYFLKVKNQMILFGEEDVRVANLKPRISFNFFVTAPKNVSDIIPRTEVEKAIRMSRSRINDAFRLNDNSLEFLGIQPTLGPPNQPPVSTSTSPTRSMAPGAVHLPQPVSTRDKTHTCPPCPAPELLGGPSVFLFPPKPKDTLMISRTPEVTCVVVDVSHEDPEVKFNWYVDGVEVHNAKTKPREEQYNSTYRVVSVLTVDHHDWLNGKEYKCKVSNKALPAPIEKTISKAKGQPREPQVYTLPPCRDELTKNQVSLWCLVKGFYPSDIAVEWESNGQPENNYKTTPPVLDSDGSFFLYSKLTVDKSRWQQGNVFSCSVMHEALHSHYTQKSLSLSPG

SEQ ID NO: 572 - protein, 441 aa, synthetic construct
  REGION 1..441: note = RG1_VL-x-CH1/hole/DHS/RF
QSALTQPASVSGSPGQSITISCTGTSSDVGGYNYVSWYQQHPGKAPKLMIYDVSKRPSGVSNRFSGSKSGNTASLTISGLQSEDEADYYCNSLTSISTWVFGGGTKLTVLSSASTKGPSVFPLAPSSKSTSGGTAALGCLVKDYFPEPVTVSWNSGALTSGVHTFPAVLQSSGLYSLSSVVTVPSSSLGTQTYICNVNHKPSNTKVDKKVEPKSCDKTHTCPPCPAPELLGGPSVFLFPPKPKDTLMISRTPEVTCVVVDVSHEDPEVKFNWYVDGVEVHNAKTKPREEQYNSTYRVVSVLTVDHHDWLNGKEYKCKVSNKALPAPIEKTISKAKGQPREPQVCTLPPSRDELTKNQVSLSCAVKGFYPSDIAVEWESNGQPENNYKTTPPVLDSDGSFFLVSKLTVDKSRWQQGNVFSCSVMHEALHSRFTQKSLSLSPG

SEQ ID NO: 573 - protein, 605 aa, synthetic construct
  REGION 1..605: note = RG2_VH-CH1/N84S/Q39K/S183E/CLD201/knob/DHS
QVQLVESGGGLVKPGGSLRLSCAASGFTFSDYYMSWIRKAPGKGLEWVSYITYSGSTIYYADSVKGRFTISRDNAKSSLYLQMSSLRAEDTAVYYCARDRGTTMVPFDYWGQGTLVTVSSASTKGPSVFPLAPSSKSTSGGTAALGCLVKDYFPEPVTVSWNSGALTSGVHTFPAVLQSSGLYSLESVVTVPSSSLGTQTYICNVNHKPSNTKVDKKVEPKSCTDWSPYADQSIKVRISLKSALGDKAYEWNDNEMYLFRSSVAYAMRQYFLKVKNQMILFGEEDVRVANLKPRISFNFFVTAPKNVSDIIPRTEVEKAIRMSRSRINDAFRLNDNSLEFLGIQPTLGPPNQPPVSTSTSPTRSMAPGAVHLPQPVSTRDKTHTCPPCPAPELLGGPSVFLFPPKPKDTLMISRTPEVTCVVVDVSHEDPEVKFNWYVDGVEVHNAKTKPREEQYNSTYRVVSVLTVDHHDWLNGKEYKCKVSNKALPAPIEKTISKAKGQPREPQVYTLPPCRDELTKNQVSLWCLVKGFYPSDIAVEWESNGQPENNYKTTPPVLDSDGSFFLYSKLTVDKSRWQQGNVFSCSVMHEALHSHYTQKSLSLSPG

SEQ ID NO: 574 - protein, 441 aa, synthetic construct
  REGION 1..441: note = RG1_VL-x-CH1/Q38E/S183K/hole/DHS/RF
QSALTQPASVSGSPGQSITISCTGTSSDVGGYNYVSWYQEHPGKAPKLMIYDVSKRPSGVSNRFSGSKSGNTASLTISGLQSEDEADYYCNSLTSISTWVFGGGTKLTVLSSASTKGPSVFPLAPSSKSTSGGTAALGCLVKDYFPEPVTVSWNSGALTSGVHTFPAVLQSSGLYSLKSVVTVPSSSLGTQTYICNVNHKPSNTKVDKKVEPKSCDKTHTCPPCPAPELLGGPSVFLFPPKPKDTLMISRTPEVTCVVVDVSHEDPEVKFNWYVDGVEVHNAKTKPREEQYNSTYRVVSVLTVDHHDWLNGKEYKCKVSNKALPAPIEKTISKAKGQPREPQVCTLPPSRDELTKNQVSLSCAVKGFYPSDIAVEWESNGQPENNYKTTPPVLDSDGSFFLVSKLTVDKSRWQQGNVFSCSVMHEALHSRFTQKSLSLSPG

SEQ ID NO: 575 - protein, 441 aa, synthetic construct
  REGION 1..441: note = RG1_VL-x-CH1/Q38K/S183K/hole/DHS/RF
QSALTQPASVSGSPGQSITISCTGTSSDVGGYNYVSWYQKHPGKAPKLMIYDVSKRPSGVSNRFSGSKSGNTASLTISGLQSEDEADYYCNSLTSISTWVFGGGTKLTVLSSASTKGPSVFPLAPSSKSTSGGTAALGCLVKDYFPEPVTVSWNSGALTSGVHTFPAVLQSSGLYSLKSVVTVPSSSLGTQTYICNVNHKPSNTKVDKKVEPKSCDKTHTCPPCPAPELLGGPSVFLFPPKPKDTLMISRTPEVTCVVVDVSHEDPEVKFNWYVDGVEVHNAKTKPREEQYNSTYRVVSVLTVDHHDWLNGKEYKCKVSNKALPAPIEKTISKAKGQPREPQVCTLPPSRDELTKNQVSLSCAVKGFYPSDIAVEWESNGQPENNYKTTPPVLDSDGSFFLVSKLTVDKSRWQQGNVFSCSVMHEALHSRFTQKSLSLSPG

SEQ ID NO: 576 - protein, 216 aa, synthetic construct
  REGION 1..216: note = RG1_VL-CL/E123R/Q124K
QSALTQPASVSGSPGQSITISCTGTSSDVGGYNYVSWYQQHPGKAPKLMIYDVSKRPSGVSNRFSGSKSGNTASLTISGLQSEDEADYYCNSLTSISTWVFGGGTKLTVLGQPKAAPSVTLFPPSSRKLQANKATLVCLISDFYPGAVTVAWKADSSPVKAGVETTTPSKQSNNKYAASSYLSLTPEQWKSHRSYSCQVTHEGSTVEKTVAPTECS

SEQ ID NO: 577 - protein, 227 aa, synthetic construct
  REGION 1..227: note = RG2_VH-x-CK/N84S
QVQLVESGGGLVKPGGSLRLSCAASGFTFSDYYMSWIRQAPGKGLEWVSYITYSGSTIYYADSVKGRFTISRDNAKSSLYLQMSSLRAEDTAVYYCARDRGTTMVPFDYWGQGTLVTVSSASVAAPSVFIFPPSDEQLKSGTASVVCLLNNFYPREAKVQWKVDNALQSGNSQESVTEQDSKDSTYSLSSTLTLSKADYEKHKVYACEVTHQGLSSPVTKSFNRGEC

SEQ ID NO: 578 - protein, 216 aa, synthetic construct
  REGION 1..216: note = RG1_VL-CL/Q38E/V133K
QSALTQPASVSGSPGQSITISCTGTSSDVGGYNYVSWYQEHPGKAPKLMIYDVSKRPSGVSNRFSGSKSGNTASLTISGLQSEDEADYYCNSLTSISTWVFGGGTKLTVLGQPKAAPSVTLFPPSSEELQANKATLKCLISDFYPGAVTVAWKADSSPVKAGVETTTPSKQSNNKYAASSYLSLTPEQWKSHRSYSCQVTHEGSTVEKTVAPTECS

SEQ ID NO: 579 - protein, 227 aa, synthetic construct
  REGION 1..227: note = RG2_VH-x-CK/N84S/Q39K/V133E
QVQLVESGGGLVKPGGSLRLSCAASGFTFSDYYMSWIRKAPGKGLEWVSYITYSGSTIYYADSVKGRFTISRDNAKSSLYLQMSSLRAEDTAVYYCARDRGTTMVPFDYWGQGTLVTVSSASVAAPSVFIFPPSDEQLKSGTASVECLLNNFYPREAKVQWKVDNALQSGNSQESVTEQDSKDSTYSLSSTLTLSKADYEKHKVYACEVTHQGLSSPVTKSFNRGEC

SEQ ID NO: 580 - protein, 227 aa, synthetic construct
  REGION 1..227: note = RG2_VH-x-CK/N84S/Q39E/V133E
QVQLVESGGGLVKPGGSLRLSCAASGFTFSDYYMSWIREAPGKGLEWVSYITYSGSTIYYADSVKGRFTISRDNAKSSLYLQMSSLRAEDTAVYYCARDRGTTMVPFDYWGQGTLVTVSSASVAAPSVFIFPPSDEQLKSGTASVECLLNNFYPREAKVQWKVDNALQSGNSQESVTEQDSKDSTYSLSSTLTLSKADYEKHKVYACEVTHQGLSSPVTKSFNRGEC

SEQ ID NO: 581 - protein, 214 aa, synthetic construct
  REGION 1..214: note = RG2_VK-CK/E123R/Q124K
DIQMTQSPSSLSASVGDRVTITCQASQDITNYLNWYQQKPGKAPKLLIYAASNLETGVPSRFSGSGSGTDFTFTISGLQPEDIATYYCQQYDNLPLTFGGGTKVEIKRTVAAPSVFIFPPSDRKLKSGTASVVCLLNNFYPREAKVQWKVDNALQSGNSQESVTEQDSKDSTYSLSSTLTLSKADYEKHKVYACEVTHQGLSSPVTKSFNRGEC

SEQ ID NO: 582 - protein, 225 aa, synthetic construct
  REGION 1..225: note = RG1_VH-x-CL/N84S
QVQLVESGGGVVQPGRSLRLSCAASGFTFSNYAMYWVRQAPGKGLEWVAVISYDGSNKYYADSVKGRFTISRDNSKNTLYLQMSSLRTEDTAVYYCASGSDYGDYLLVYWGQGTLVTVSGQPKAAPSVTLFPPSSEELQANKATLVCLISDFYPGAVTVAWKADSSPVKAGVETTTPSKQSNNKYAASSYLSLTPEQWKSHRSYSCQVTHEGSTVEKTVAPTECS

SEQ ID NO: 583 - protein, 214 aa, synthetic construct
  REGION 1..214: note = RG2_VK-CK/Q38E/V133K
DIQMTQSPSSLSASVGDRVTITCQASQDITNYLNWYQEKPGKAPKLLIYAASNLETGVPSRFSGSGSGTDFTFTISGLQPEDIATYYCQQYDNLPLTFGGGTKVEIKRTVAAPSVFIFPPSDEQLKSGTASVKCLLNNFYPREAKVQWKVDNALQSGNSQESVTEQDSKDSTYSLSSTLTLSKADYEKHKVYACEVTHQGLSSPVTKSFNRGEC

SEQ ID NO: 584 - protein, 225 aa, synthetic construct
  REGION 1..225: note = RG1_VH-x-CL/N84S/Q39K/V133E
QVQLVESGGGVVQPGRSLRLSCAASGFTFSNYAMYWVRKAPGKGLEWVAVISYDGSNKYYADSVKGRFTISRDNSKNTLYLQMSSLRTEDTAVYYCASGSDYGDYLLVYWGQGTLVTVSGQPKAAPSVTLFPPSSEELQANKATLECLISDFYPGAVTVAWKADSSPVKAGVETTTPSKQSNNKYAASSYLSLTPEQWKSHRSYSCQVTHEGSTVEKTVAPTECS

SEQ ID NO: 585 - protein, 225 aa, synthetic construct
  REGION 1..225: note = RG1_VH-x-CL/N84S/Q39E/V133E
QVQLVESGGGVVQPGRSLRLSCAASGFTFSNYAMYWVREAPGKGLEWVAVISYDGSNKYYADSVKGRFTISRDNSKNTLYLQMSSLRTEDTAVYYCASGSDYGDYLLVYWGQGTLVTVSGQPKAAPSVTLFPPSSEELQANKATLECLISDFYPGAVTVAWKADSSPVKAGVETTTPSKQSNNKYAASSYLSLTPEQWKSHRSYSCQVTHEGSTVEKTVAPTECS

SEQ ID NO: 586 - protein, 217 aa, synthetic construct
  REGION 1..217: note = RG1_VL-CK/E123R/Q124K
QSALTQPASVSGSPGQSITISCTGTSSDVGGYNYVSWYQQHPGKAPKLMIYDVSKRPSGVSNRFSGSKSGNTASLTISGLQSEDEADYYCNSLTSISTWVFGGGTKLEIKRTVAAPSVFIFPPSDRKLKSGTASVVCLLNNFYPREAKVQWKVDNALQSGNSQESVTEQDSKDSTYSLSSTLTLSKADYEKHKVYACEVTHQGLSSPVTKSFNRGEC

SEQ ID NO: 587 - protein, 217 aa, synthetic construct
  REGION 1..217: note = RG1_VL-CK/Q38E/V133K
QSALTQPASVSGSPGQSITISCTGTSSDVGGYNYVSWYQEHPGKAPKLMIYDVSKRPSGVSNRFSGSKSGNTASLTISGLQSEDEADYYCNSLTSISTWVFGGGTKLEIKRTVAAPSVFIFPPSDEQLKSGTASVKCLLNNFYPREAKVQWKVDNALQSGNSQESVTEQDSKDSTYSLSSTLTLSKADYEKHKVYACEVTHQGLSSPVTKSFNRGEC

SEQ ID NO: 588 - protein, 227 aa, synthetic construct
  REGION 1..227: note = RG1_VH-x-CK/N84S
QVQLVESGGGVVQPGRSLRLSCAASGFTFSNYAMYWVRQAPGKGLEWVAVISYDGSNKYYADSVKGRFTISRDNSKNTLYLQMSSLRTEDTAVYYCASGSDYGDYLLVYWGQGTLVTVSSASVAAPSVFIFPPSDEQLKSGTASVVCLLNNFYPREAKVQWKVDNALQSGNSQESVTEQDSKDSTYSLSSTLTLSKADYEKHKVYACEVTHQGLSSPVTKSFNRGEC

SEQ ID NO: 589 - protein, 227 aa, synthetic construct
  REGION 1..227: note = RG1_VH-x-CK/N84S/Q39K/V133E
QVQLVESGGGVVQPGRSLRLSCAASGFTFSNYAMYWVRKAPGKGLEWVAVISYDGSNKYYADSVKGRFTISRDNSKNTLYLQMSSLRTEDTAVYYCASGSDYGDYLLVYWGQGTLVTVSSASVAAPSVFIFPPSDEQLKSGTASVECLLNNFYPREAKVQWKVDNALQSGNSQESVTEQDSKDSTYSLSSTLTLSKADYEKHKVYACEVTHQGLSSPVTKSFNRGEC

SEQ ID NO: 590 - protein, 227 aa, synthetic construct
  REGION 1..227: note = RG1_VH-x-CK/N84S/Q39E/V133E
QVQLVESGGGVVQPGRSLRLSCAASGFTFSNYAMYWVREAPGKGLEWVAVISYDGSNKYYADSVKGRFTISRDNSKNTLYLQMSSLRTEDTAVYYCASGSDYGDYLLVYWGQGTLVTVSSASVAAPSVFIFPPSDEQLKSGTASVECLLNNFYPREAKVQWKVDNALQSGNSQESVTEQDSKDSTYSLSSTLTLSKADYEKHKVYACEVTHQGLSSPVTKSFNRGEC

SEQ ID NO: 591 - protein, 606 aa, synthetic construct
  REGION 1..606: note = B13A_VH-CH1/K147E/K213E/CLD201/hole/RF
QVQLQQSGAELVKPGASVKISCKASGYAFSNYWMNWVKQRPGKGLEWIGQIYPGDGDTNYNGNFKGKATLTADKSSSTAYIQLSSLTSEDSAVYFCGRGFIATVVEVFDHWGLGTTLTVSSASTKGPSVFPLAPSSKSTSGGTAALGCLVEDYFPEPVTVSWNSGALTSGVHTFPAVLQSSGLYSLSSVVTVPSSSLGTQTYICNVNHKPSNTKVDEKVEPKSCTDWSPYADQSIKVRISLKSALGDKAYEWNDNEMYLFRSSVAYAMRQYFLKVKNQMILFGEEDVRVANLKPRISFNFFVTAPKNVSDIIPRTEVEKAIRMSRSRINDAFRLNDNSLEFLGIQPTLGPPNQPPVSTSTSPTRSMAPGAVHLPQPVSTRDKTHTCPPCPAPELLGGPSVFLFPPKPKDTLMISRTPEVTCVVVDVSHEDPEVKFNWYVDGVEVHNAKTKPREEQYNSTYRVVSVLTVLHQDWLNGKEYKCKVSNKALPAPIEKTISKAKGQPREPQVCTLPPSRDELTKNQVSLSCAVKGFYPSDIAVEWESNGQPENNYKTTPPVLDSDGSFFLVSKLTVDKSRWQQGNVFSCSVMHEALHNRFTQKSLSLSPG

SEQ ID NO: 592 - protein, 442 aa, synthetic construct
  REGION 1..442: note = O24A_VK-x-CH1/knob
DIVLTQSPASLAVFLGQRATISCRASKSVSTSGYSYMHWYQQRPGQPPKLLIYLASNLESGVPARFSGSGSGTDFTLNIHPVEEEDAATYYCQHSRELPPTFGGGTKVEIKSSASTKGPSVFPLAPSSKSTSGGTAALGCLVKDYFPEPVTVSWNSGALTSGVHTFPAVLQSSGLYSLSSVVTVPSSSLGTQTYICNVNHKPSNTKVDKKVEPKSCDKTHTCPPCPAPELLGGPSVFLFPPKPKDTLMISRTPEVTCVVVDVSHEDPEVKFNWYVDGVEVHNAKTKPREEQYNSTYRVVSVLTVLHQDWLNGKEYKCKVSNKALPAPIEKTISKAKGQPREPQVYTLPPCRDELTKNQVSLWCLVKGFYPSDIAVEWESNGQPENNYKTTPPVLDSDGSFFLYSKLTVDKSRWQQGNVFSCSVMHEALHNHYTQKSLSLSPG

SEQ ID NO: 593 - protein, 606 aa, synthetic construct
  REGION 1..606: note = B13A_VH-CH1/N84S/Q39K/S183E/CLD201/hole/RF
QVQLQQSGAELVKPGASVKISCKASGYAFSNYWMNWVKKRPGKGLEWIGQIYPGDGDTNYNGNFKGKATLTADKSSSTAYIQLSSLTSEDSAVYFCGRGFIATVVEVFDHWGLGTTLTVSSASTKGPSVFPLAPSSKSTSGGTAALGCLVKDYFPEPVTVSWNSGALTSGVHTFPAVLQSSGLYSLESVVTVPSSSLGTQTYICNVNHKPSNTKVDKKVEPKSCTDWSPYADQSIKVRISLKSALGDKAYEWNDNEMYLFRSSVAYAMRQYFLKVKNQMILFGEEDVRVANLKPRISFNFFVTAPKNVSDIIPRTEVEKAIRMSRSRINDAFRLNDNSLEFLGIQPTLGPPNQPPVSTSTSPTRSMAPGAVHLPQPVSTRDKTHTCPPCPAPELLGGPSVFLFPPKPKDTLMISRTPEVTCVVVDVSHEDPEVKFNWYVDGVEVHNAKTKPREEQYNSTYRVVSVLTVLHQDWLNGKEYKCKVSNKALPAPIEKTISKAKGQPREPQVCTLPPSRDELTKNQVSLSCAVKGFYPSDIAVEWESNGQPENNYKTTPPVLDSDGSFFLVSKLTVDKSRWQQGNVFSCSVMHEALHNRFTQKSLSLSPG

SEQ ID NO: 594 - protein, 442 aa, synthetic construct
  REGION 1..442: note = O24A_VK-x-CH1/Q38E/S183K/knob
DIVLTQSPASLAVFLGQRATISCRASKSVSTSGYSYMHWYQERPGQPPKLLIYLASNLESGVPARFSGSGSGTDFTLNIHPVEEEDAATYYCQHSRELPPTFGGGTKVEIKSSASTKGPSVFPLAPSSKSTSGGTAALGCLVKDYFPEPVTVSWNSGALTSGVHTFPAVLQSSGLYSLKSVVTVPSSSLGTQTYICNVNHKPSNTKVDKKVEPKSCDKTHTCPPCPAPELLGGPSVFLFPPKPKDTLMISRTPEVTCVVVDVSHEDPEVKFNWYVDGVEVHNAKTKPREEQYNSTYRVVSVLTVLHQDWLNGKEYKCKVSNKALPAPIEKTISKAKGQPREPQVYTLPPCRDELTKNQVSLWCLVKGFYPSDIAVEWESNGQPENNYKTTPPVLDSDGSFFLYSKLTVDKSRWQQGNVFSCSVMHEALHNHYTQKSLSLSPG

SEQ ID NO: 595 - protein, 442 aa, synthetic construct
  REGION 1..442: note = O24A_VK-x-CH1/Q38K/S183K/knob
DIVLTQSPASLAVFLGQRATISCRASKSVSTSGYSYMHWYQKRPGQPPKLLIYLASNLESGVPARFSGSGSGTDFTLNIHPVEEEDAATYYCQHSRELPPTFGGGTKVEIKSSASTKGPSVFPLAPSSKSTSGGTAALGCLVKDYFPEPVTVSWNSGALTSGVHTFPAVLQSSGLYSLKSVVTVPSSSLGTQTYICNVNHKPSNTKVDKKVEPKSCDKTHTCPPCPAPELLGGPSVFLFPPKPKDTLMISRTPEVTCVVVDVSHEDPEVKFNWYVDGVEVHNAKTKPREEQYNSTYRVVSVLTVLHQDWLNGKEYKCKVSNKALPAPIEKTISKAKGQPREPQVYTLPPCRDELTKNQVSLWCLVKGFYPSDIAVEWESNGQPENNYKTTPPVLDSDGSFFLYSKLTVDKSRWQQGNVFSCSVMHEALHNHYTQKSLSLSPG

SEQ ID NO: 596 - protein, 606 aa, synthetic construct
  REGION 1..606: note = B13A_VH-CH1/K147E/K213E/CLD201/hole/DHS/RF
QVQLQQSGAELVKPGASVKISCKASGYAFSNYWMNWVKQRPGKGLEWIGQIYPGDGDTNYNGNFKGKATLTADKSSSTAYIQLSSLTSEDSAVYFCGRGFIATVVEVFDHWGLGTTLTVSSASTKGPSVFPLAPSSKSTSGGTAALGCLVEDYFPEPVTVSWNSGALTSGVHTFPAVLQSSGLYSLSSVVTVPSSSLGTQTYICNVNHKPSNTKVDEKVEPKSCTDWSPYADQSIKVRISLKSALGDKAYEWNDNEMYLFRSSVAYAMRQYFLKVKNQMILFGEEDVRVANLKPRISFNFFVTAPKNVSDIIPRTEVEKAIRMSRSRINDAFRLNDNSLEFLGIQPTLGPPNQPPVSTSTSPTRSMAPGAVHLPQPVSTRDKTHTCPPCPAPELLGGPSVFLFPPKPKDTLMISRTPEVTCVVVDVSHEDPEVKFNWYVDGVEVHNAKTKPREEQYNSTYRVVSVLTVDHHDWLNGKEYKCKVSNKALPAPIEKTISKAKGQPREPQVCTLPPSRDELTKNQVSLSCAVKGFYPSDIAVEWESNGQPENNYKTTPPVLDSDGSFFLVSKLTVDKSRWQQGNVFSCSVMHEALHSRFTQKSLSLSPG

SEQ ID NO: 597 - protein, 442 aa, synthetic construct
  REGION 1..442: note = O24A_VK-x-CH1/knob/DHS
DIVLTQSPASLAVFLGQRATISCRASKSVSTSGYSYMHWYQQRPGQPPKLLIYLASNLESGVPARFSGSGSGTDFTLNIHPVEEEDAATYYCQHSRELPPTFGGGTKVEIKSSASTKGPSVFPLAPSSKSTSGGTAALGCLVKDYFPEPVTVSWNSGALTSGVHTFPAVLQSSGLYSLSSVVTVPSSSLGTQTYICNVNHKPSNTKVDKKVEPKSCDKTHTCPPCPAPELLGGPSVFLFPPKPKDTLMISRTPEVTCVVVDVSHEDPEVKFNWYVDGVEVHNAKTKPREEQYNSTYRVVSVLTVDHHDWLNGKEYKCKVSNKALPAPIEKTISKAKGQPREPQVYTLPPCRDELTKNQVSLWCLVKGFYPSDIAVEWESNGQPENNYKTTPPVLDSDGSFFLYSKLTVDKSRWQQGNVFSCSVMHEALHSHYTQKSLSLSPG

SEQ ID NO: 598 - protein, 606 aa, synthetic construct
  REGION 1..606: note = B13A_VH-CH1/N84S/Q39K/S183E/CLD201/hole/DHS/RF
QVQLQQSGAELVKPGASVKISCKASGYAFSNYWMNWVKKRPGKGLEWIGQIYPGDGDTNYNGNFKGKATLTADKSSSTAYIQLSSLTSEDSAVYFCGRGFIATVVEVFDHWGLGTTLTVSSASTKGPSVFPLAPSSKSTSGGTAALGCLVKDYFPEPVTVSWNSGALTSGVHTFPAVLQSSGLYSLESVVTVPSSSLGTQTYICNVNHKPSNTKVDKKVEPKSCTDWSPYADQSIKVRISLKSALGDKAYEWNDNEMYLFRSSVAYAMRQYFLKVKNQMILFGEEDVRVANLKPRISFNFFVTAPKNVSDIIPRTEVEKAIRMSRSRINDAFRLNDNSLEFLGIQPTLGPPNQPPVSTSTSPTRSMAPGAVHLPQPVSTRDKTHTCPPCPAPELLGGPSVFLFPPKPKDTLMISRTPEVTCVVVDVSHEDPEVKFNWYVDGVEVHNAKTKPREEQYNSTYRVVSVLTVDHHDWLNGKEYKCKVSNKALPAPIEKTISKAKGQPREPQVCTLPPSRDELTKNQVSLSCAVKGFYPSDIAVEWESNGQPENNYKTTPPVLDSDGSFFLVSKLTVDKSRWQQGNVFSCSVMHEALHSRFTQKSLSLSPG

SEQ ID NO: 599 - protein, 442 aa, synthetic construct
  REGION 1..442: note = O24A_VK-x-CH1/Q38E/S183K/knob/DHS
DIVLTQSPASLAVFLGQRATISCRASKSVSTSGYSYMHWYQERPGQPPKLLIYLASNLESGVPARFSGSGSGTDFTLNIHPVEEEDAATYYCQHSRELPPTFGGGTKVEIKSSASTKGPSVFPLAPSSKSTSGGTAALGCLVKDYFPEPVTVSWNSGALTSGVHTFPAVLQSSGLYSLKSVVTVPSSSLGTQTYICNVNHKPSNTKVDKKVEPKSCDKTHTCPPCPAPELLGGPSVFLFPPKPKDTLMISRTPEVTCVVVDVSHEDPEVKFNWYVDGVEVHNAKTKPREEQYNSTYRVVSVLTVDHHDWLNGKEYKCKVSNKALPAPIEKTISKAKGQPREPQVYTLPPCRDELTKNQVSLWCLVKGFYPSDIAVEWESNGQPENNYKTTPPVLDSDGSFFLYSKLTVDKSRWQQGNVFSCSVMHEALHSHYTQKSLSLSPG

SEQ ID NO: 600 - protein, 442 aa, synthetic construct
  REGION 1..442: note = O24A_VK-x-CH1/Q38K/S183K/knob/DHS
DIVLTQSPASLAVFLGQRATISCRASKSVSTSGYSYMHWYQKRPGQPPKLLIYLASNLESGVPARFSGSGSGTDFTLNIHPVEEEDAATYYCQHSRELPPTFGGGTKVEIKSSASTKGPSVFPLAPSSKSTSGGTAALGCLVKDYFPEPVTVSWNSGALTSGVHTFPAVLQSSGLYSLKSVVTVPSSSLGTQTYICNVNHKPSNTKVDKKVEPKSCDKTHTCPPCPAPELLGGPSVFLFPPKPKDTLMISRTPEVTCVVVDVSHEDPEVKFNWYVDGVEVHNAKTKPREEQYNSTYRVVSVLTVDHHDWLNGKEYKCKVSNKALPAPIEKTISKAKGQPREPQVYTLPPCRDELTKNQVSLWCLVKGFYPSDIAVEWESNGQPENNYKTTPPVLDSDGSFFLYSKLTVDKSRWQQGNVFSCSVMHEALHSHYTQKSLSLSPG

SEQ ID NO: 601 - protein, 603 aa, synthetic construct
  REGION 1..603: note = O24A_VH-CH1/K147E/K213E/CLD201/hole/RF
QAYLQQSGAELVRPGASVKMSCKASGYTFTSYSMHWVKQTPRQGLEWIGAIYPGNDDTSYNQKFKGKATLTVDRSSSTAYMQLSSLTSEDSAVYFCTRDYSNYPFDYWGQGTTLTVSSASTKGPSVFPLAPSSKSTSGGTAALGCLVEDYFPEPVTVSWNSGALTSGVHTFPAVLQSSGLYSLSSVVTVPSSSLGTQTYICNVNHKPSNTKVDEKVEPKSCTDWSPYADQSIKVRISLKSALGDKAYEWNDNEMYLFRSSVAYAMRQYFLKVKNQMILFGEEDVRVANLKPRISFNFFVTAPKNVSDIIPRTEVEKAIRMSRSRINDAFRLNDNSLEFLGIQPTLGPPNQPPVSTSTSPTRSMAPGAVHLPQPVSTRDKTHTCPPCPAPELLGGPSVFLFPPKPKDTLMISRTPEVTCVVVDVSHEDPEVKFNWYVDGVEVHNAKTKPREEQYNSTYRVVSVLTVLHQDWLNGKEYKCKVSNKALPAPIEKTISKAKGQPREPQVCTLPPSRDELTKNQVSLSCAVKGFYPSDIAVEWESNGQPENNYKTTPPVLDSDGSFFLVSKLTVDKSRWQQGNVFSCSVMHEALHNRFTQKSLSLSPG

SEQ ID NO: 602 - protein, 438 aa, synthetic construct
  REGION 1..438: note = B13A_VK-x-CH1/knob
DIQMTQTTSSLSASLGDRVTISCRASQDISNYLNWYQQKPDGTVKLLIYYTSRLQSGVPSRFSGSGTGTDYSLTISNLEQEDIATYFCQQGNTLPWTFGGGTKVEIKSSASTKGPSVFPLAPSSKSTSGGTAALGCLVKDYFPEPVTVSWNSGALTSGVHTFPAVLQSSGLYSLSSVVTVPSSSLGTQTYICNVNHKPSNTKVDKKVEPKSCDKTHTCPPCPAPELLGGPSVFLFPPKPKDTLMISRTPEVTCVVVDVSHEDPEVKFNWYVDGVEVHNAKTKPREEQYNSTYRVVSVLTVLHQDWLNGKEYKCKVSNKALPAPIEKTISKAKGQPREPQVYTLPPCRDELTKNQVSLWCLVKGFYPSDIAVEWESNGQPENNYKTTPPVLDSDGSFFLYSKLTVDKSRWQQGNVFSCSVMHEALHNHYTQKSLSLSPG

SEQ ID NO: 603 - protein, 603 aa, synthetic construct
  REGION 1..603: note = O24A_VH-CH1/N84S/Q39K/S183E/CLD201/hole/RF
QAYLQQSGAELVRPGASVKMSCKASGYTFTSYSMHWVKKTPRQGLEWIGAIYPGNDDTSYNQKFKGKATLTVDRSSSTAYMQLSSLTSEDSAVYFCTRDYSNYPFDYWGQGTTLTVSSASTKGPSVFPLAPSSKSTSGGTAALGCLVKDYFPEPVTVSWNSGALTSGVHTFPAVLQSSGLYSLESVVTVPSSSLGTQTYICNVNHKPSNTKVDKKVEPKSCTDWSPYADQSIKVRISLKSALGDKAYEWNDNEMYLFRSSVAYAMRQYFLKVKNQMILFGEEDVRVANLKPRISFNFFVTAPKNVSDIIPRTEVEKAIRMSRSRINDAFRLNDNSLEFLGIQPTLGPPNQPPVSTSTSPTRSMAPGAVHLPQPVSTRDKTHTCPPCPAPELLGGPSVFLFPPKPKDTLMISRTPEVTCVVVDVSHEDPEVKFNWYVDGVEVHNAKTKPREEQYNSTYRVVSVLTVLHQDWLNGKEYKCKVSNKALPAPIEKTISKAKGQPREPQVCTLPPSRDELTKNQVSLSCAVKGFYPSDIAVEWESNGQPENNYKTTPPVLDSDGSFFLVSKLTVDKSRWQQGNVFSCSVMHEALHNRFTQKSLSLSPG

SEQ ID NO: 604 - protein, 438 aa, synthetic construct
  REGION 1..438: note = B13A_VK-x-CH1/Q38E/S183K/knob
DIQMTQTTSSLSASLGDRVTISCRASQDISNYLNWYQEKPDGTVKLLIYYTSRLQSGVPSRFSGSGTGTDYSLTISNLEQEDIATYFCQQGNTLPWTFGGGTKVEIKSSASTKGPSVFPLAPSSKSTSGGTAALGCLVKDYFPEPVTVSWNSGALTSGVHTFPAVLQSSGLYSLKSVVTVPSSSLGTQTYICNVNHKPSNTKVDKKVEPKSCDKTHTCPPCPAPELLGGPSVFLFPPKPKDTLMISRTPEVTCVVVDVSHEDPEVKFNWYVDGVEVHNAKTKPREEQYNSTYRVVSVLTVLHQDWLNGKEYKCKVSNKALPAPIEKTISKAKGQPREPQVYTLPPCRDELTKNQVSLWCLVKGFYPSDIAVEWESNGQPENNYKTTPPVLDSDGSFFLYSKLTVDKSRWQQGNVFSCSVMHEALHNHYTQKSLSLSPG

SEQ ID NO: 605 - protein, 438 aa, synthetic construct
  REGION 1..438: note = B13A_VK-x-CH1/Q38K/S183K/knob
DIQMTQTTSSLSASLGDRVTISCRASQDISNYLNWYQKKPDGTVKLLIYYTSRLQSGVPSRFSGSGTGTDYSLTISNLEQEDIATYFCQQGNTLPWTFGGGTKVEIKSSASTKGPSVFPLAPSSKSTSGGTAALGCLVKDYFPEPVTVSWNSGALTSGVHTFPAVLQSSGLYSLKSVVTVPSSSLGTQTYICNVNHKPSNTKVDKKVEPKSCDKTHTCPPCPAPELLGGPSVFLFPPKPKDTLMISRTPEVTCVVVDVSHEDPEVKFNWYVDGVEVHNAKTKPREEQYNSTYRVVSVLTVLHQDWLNGKEYKCKVSNKALPAPIEKTISKAKGQPREPQVYTLPPCRDELTKNQVSLWCLVKGFYPSDIAVEWESNGQPENNYKTTPPVLDSDGSFFLYSKLTVDKSRWQQGNVFSCSVMHEALHNHYTQKSLSLSPG

SEQ ID NO: 606 - protein, 603 aa, synthetic construct
  REGION 1..603: note = O24A_VH-CH1/K147E/K213E/CLD201/hole/DHS/RF
QAYLQQSGAELVRPGASVKMSCKASGYTFTSYSMHWVKQTPRQGLEWIGAIYPGNDDTSYNQKFKGKATLTVDRSSSTAYMQLSSLTSEDSAVYFCTRDYSNYPFDYWGQGTTLTVSSASTKGPSVFPLAPSSKSTSGGTAALGCLVEDYFPEPVTVSWNSGALTSGVHTFPAVLQSSGLYSLSSVVTVPSSSLGTQTYICNVNHKPSNTKVDEKVEPKSCTDWSPYADQSIKVRISLKSALGDKAYEWNDNEMYLFRSSVAYAMRQYFLKVKNQMILFGEEDVRVANLKPRISFNFFVTAPKNVSDIIPRTEVEKAIRMSRSRINDAFRLNDNSLEFLGIQPTLGPPNQPPVSTSTSPTRSMAPGAVHLPQPVSTRDKTHTCPPCPAPELLGGPSVFLFPPKPKDTLMISRTPEVTCVVVDVSHEDPEVKFNWYVDGVEVHNAKTKPREEQYNSTYRVVSVLTVDHHDWLNGKEYKCKVSNKALPAPIEKTISKAKGQPREPQVCTLPPSRDELTKNQVSLSCAVKGFYPSDIAVEWESNGQPENNYKTTPPVLDSDGSFFLVSKLTVDKSRWQQGNVFSCSVMHEALHSRFTQKSLSLSPG

SEQ ID NO: 607 - protein, 438 aa, synthetic construct
  REGION 1..438: note = B13A_VK-x-CH1/knob/DHS
DIQMTQTTSSLSASLGDRVTISCRASQDISNYLNWYQQKPDGTVKLLIYYTSRLQSGVPSRFSGSGTGTDYSLTISNLEQEDIATYFCQQGNTLPWTFGGGTKVEIKSSASTKGPSVFPLAPSSKSTSGGTAALGCLVKDYFPEPVTVSWNSGALTSGVHTFPAVLQSSGLYSLSSVVTVPSSSLGTQTYICNVNHKPSNTKVDKKVEPKSCDKTHTCPPCPAPELLGGPSVFLFPPKPKDTLMISRTPEVTCVVVDVSHEDPEVKFNWYVDGVEVHNAKTKPREEQYNSTYRVVSVLTVDHHDWLNGKEYKCKVSNKALPAPIEKTISKAKGQPREPQVYTLPPCRDELTKNQVSLWCLVKGFYPSDIAVEWESNGQPENNYKTTPPVLDSDGSFFLYSKLTVDKSRWQQGNVFSCSVMHEALHSHYTQKSLSLSPG

SEQ ID NO: 608 - protein, 603 aa, synthetic construct
  REGION 1..603: note = O24A_VH-CH1/N84S/Q39K/S183E/CLD201/hole/DHS/RF
QAYLQQSGAELVRPGASVKMSCKASGYTFTSYSMHWVKKTPRQGLEWIGAIYPGNDDTSYNQKFKGKATLTVDRSSSTAYMQLSSLTSEDSAVYFCTRDYSNYPFDYWGQGTTLTVSSASTKGPSVFPLAPSSKSTSGGTAALGCLVKDYFPEPVTVSWNSGALTSGVHTFPAVLQSSGLYSLESVVTVPSSSLGTQTYICNVNHKPSNTKVDKKVEPKSCTDWSPYADQSIKVRISLKSALGDKAYEWNDNEMYLFRSSVAYAMRQYFLKVKNQMILFGEEDVRVANLKPRISFNFFVTAPKNVSDIIPRTEVEKAIRMSRSRINDAFRLNDNSLEFLGIQPTLGPPNQPPVSTSTSPTRSMAPGAVHLPQPVSTRDKTHTCPPCPAPELLGGPSVFLFPPKPKDTLMISRTPEVTCVVVDVSHEDPEVKFNWYVDGVEVHNAKTKPREEQYNSTYRVVSVLTVDHHDWLNGKEYKCKVSNKALPAPIEKTISKAKGQPREPQVCTLPPSRDELTKNQVSLSCAVKGFYPSDIAVEWESNGQPENNYKTTPPVLDSDGSFFLVSKLTVDKSRWQQGNVFSCSVMHEALHSRFTQKSLSLSPG

SEQ ID NO: 609 - protein, 438 aa, synthetic construct
  REGION 1..438: note = B13A_VK-x-CH1/Q38E/S183K/knob/DHS
DIQMTQTTSSLSASLGDRVTISCRASQDISNYLNWYQEKPDGTVKLLIYYTSRLQSGVPSRFSGSGTGTDYSLTISNLEQEDIATYFCQQGNTLPWTFGGGTKVEIKSSASTKGPSVFPLAPSSKSTSGGTAALGCLVKDYFPEPVTVSWNSGALTSGVHTFPAVLQSSGLYSLKSVVTVPSSSLGTQTYICNVNHKPSNTKVDKKVEPKSCDKTHTCPPCPAPELLGGPSVFLFPPKPKDTLMISRTPEVTCVVVDVSHEDPEVKFNWYVDGVEVHNAKTKPREEQYNSTYRVVSVLTVDHHDWLNGKEYKCKVSNKALPAPIEKTISKAKGQPREPQVYTLPPCRDELTKNQVSLWCLVKGFYPSDIAVEWESNGQPENNYKTTPPVLDSDGSFFLYSKLTVDKSRWQQGNVFSCSVMHEALHSHYTQKSLSLSPG

SEQ ID NO: 610 - protein, 438 aa, synthetic construct
  REGION 1..438: note = B13A_VK-x-CH1/Q38K/S183K/knob/DHS
DIQMTQTTSSLSASLGDRVTISCRASQDISNYLNWYQKKPDGTVKLLIYYTSRLQSGVPSRFSGSGTGTDYSLTISNLEQEDIATYFCQQGNTLPWTFGGGTKVEIKSSASTKGPSVFPLAPSSKSTSGGTAALGCLVKDYFPEPVTVSWNSGALTSGVHTFPAVLQSSGLYSLKSVVTVPSSSLGTQTYICNVNHKPSNTKVDKKVEPKSCDKTHTCPPCPAPELLGGPSVFLFPPKPKDTLMISRTPEVTCVVVDVSHEDPEVKFNWYVDGVEVHNAKTKPREEQYNSTYRVVSVLTVDHHDWLNGKEYKCKVSNKALPAPIEKTISKAKGQPREPQVYTLPPCRDELTKNQVSLWCLVKGFYPSDIAVEWESNGQPENNYKTTPPVLDSDGSFFLYSKLTVDKSRWQQGNVFSCSVMHEALHSHYTQKSLSLSPG

SEQ ID NO: 611 - protein, 606 aa, synthetic construct
  REGION 1..606: note = B13A_VH-CH1/K147E/K213E/CLD201/knob
QVQLQQSGAELVKPGASVKISCKASGYAFSNYWMNWVKQRPGKGLEWIGQIYPGDGDTNYNGNFKGKATLTADKSSSTAYIQLSSLTSEDSAVYFCGRGFIATVVEVFDHWGLGTTLTVSSASTKGPSVFPLAPSSKSTSGGTAALGCLVEDYFPEPVTVSWNSGALTSGVHTFPAVLQSSGLYSLSSVVTVPSSSLGTQTYICNVNHKPSNTKVDEKVEPKSCTDWSPYADQSIKVRISLKSALGDKAYEWNDNEMYLFRSSVAYAMRQYFLKVKNQMILFGEEDVRVANLKPRISFNFFVTAPKNVSDIIPRTEVEKAIRMSRSRINDAFRLNDNSLEFLGIQPTLGPPNQPPVSTSTSPTRSMAPGAVHLPQPVSTRDKTHTCPPCPAPELLGGPSVFLFPPKPKDTLMISRTPEVTCVVVDVSHEDPEVKFNWYVDGVEVHNAKTKPREEQYNSTYRVVSVLTVLHQDWLNGKEYKCKVSNKALPAPIEKTISKAKGQPREPQVYTLPPCRDELTKNQVSLWCLVKGFYPSDIAVEWESNGQPENNYKTTPPVLDSDGSFFLYSKLTVDKSRWQQGNVFSCSVMHEALHNHYTQKSLSLSPG

SEQ ID NO: 612 - protein, 442 aa, synthetic construct
  REGION 1..442: note = O24A_VK-x-CH1/hole/RF
DIVLTQSPASLAVFLGQRATISCRASKSVSTSGYSYMHWYQQRPGQPPKLLIYLASNLESGVPARFSGSGSGTDFTLNIHPVEEEDAATYYCQHSRELPPTFGGGTKVEIKSSASTKGPSVFPLAPSSKSTSGGTAALGCLVKDYFPEPVTVSWNSGALTSGVHTFPAVLQSSGLYSLSSVVTVPSSSLGTQTYICNVNHKPSNTKVDKKVEPKSCDKTHTCPPCPAPELLGGPSVFLFPPKPKDTLMISRTPEVTCVVVDVSHEDPEVKFNWYVDGVEVHNAKTKPREEQYNSTYRVVSVLTVLHQDWLNGKEYKCKVSNKALPAPIEKTISKAKGQPREPQVCTLPPSRDELTKNQVSLSCAVKGFYPSDIAVEWESNGQPENNYKTTPPVLDSDGSFFLVSKLTVDKSRWQQGNVFSCSVMHEALHNRFTQKSLSLSPG

SEQ ID NO: 613 - protein, 606 aa, synthetic construct
  REGION 1..606: note = B13A_VH-CH1/N84S/Q39K/S183E/CLD201/knob
QVQLQQSGAELVKPGASVKISCKASGYAFSNYWMNWVKKRPGKGLEWIGQIYPGDGDTNYNGNFKGKATLTADKSSSTAYIQLSSLTSEDSAVYFCGRGFIATVVEVFDHWGLGTTLTVSSASTKGPSVFPLAPSSKSTSGGTAALGCLVKDYFPEPVTVSWNSGALTSGVHTFPAVLQSSGLYSLESVVTVPSSSLGTQTYICNVNHKPSNTKVDKKVEPKSCTDWSPYADQSIKVRISLKSALGDKAYEWNDNEMYLFRSSVAYAMRQYFLKVKNQMILFGEEDVRVANLKPRISFNFFVTAPKNVSDIIPRTEVEKAIRMSRSRINDAFRLNDNSLEFLGIQPTLGPPNQPPVSTSTSPTRSMAPGAVHLPQPVSTRDKTHTCPPCPAPELLGGPSVFLFPPKPKDTLMISRTPEVTCVVVDVSHEDPEVKFNWYVDGVEVHNAKTKPREEQYNSTYRVVSVLTVLHQDWLNGKEYKCKVSNKALPAPIEKTISKAKGQPREPQVYTLPPCRDELTKNQVSLWCLVKGFYPSDIAVEWESNGQPENNYKTTPPVLDSDGSFFLYSKLTVDKSRWQQGNVFSCSVMHEALHNHYTQKSLSLSPG

SEQ ID NO: 614 - protein, 442 aa, synthetic construct
  REGION 1..442: note = O24A_VK-x-CH1/Q38E/S183K/hole/RF
DIVLTQSPASLAVFLGQRATISCRASKSVSTSGYSYMHWYQERPGQPPKLLIYLASNLESGVPARFSGSGSGTDFTLNIHPVEEEDAATYYCQHSRELPPTFGGGTKVEIKSSASTKGPSVFPLAPSSKSTSGGTAALGCLVKDYFPEPVTVSWNSGALTSGVHTFPAVLQSSGLYSLKSVVTVPSSSLGTQTYICNVNHKPSNTKVDKKVEPKSCDKTHTCPPCPAPELLGGPSVFLFPPKPKDTLMISRTPEVTCVVVDVSHEDPEVKFNWYVDGVEVHNAKTKPREEQYNSTYRVVSVLTVLHQDWLNGKEYKCKVSNKALPAPIEKTISKAKGQPREPQVCTLPPSRDELTKNQVSLSCAVKGFYPSDIAVEWESNGQPENNYKTTPPVLDSDGSFFLVSKLTVDKSRWQQGNVFSCSVMHEALHNRFTQKSLSLSPG

SEQ ID NO: 615 - protein, 442 aa, synthetic construct
  REGION 1..442: note = O24A_VK-x-CH1/Q38K/S183K/hole/RF
DIVLTQSPASLAVFLGQRATISCRASKSVSTSGYSYMHWYQKRPGQPPKLLIYLASNLESGVPARFSGSGSGTDFTLNIHPVEEEDAATYYCQHSRELPPTFGGGTKVEIKSSASTKGPSVFPLAPSSKSTSGGTAALGCLVKDYFPEPVTVSWNSGALTSGVHTFPAVLQSSGLYSLKSVVTVPSSSLGTQTYICNVNHKPSNTKVDKKVEPKSCDKTHTCPPCPAPELLGGPSVFLFPPKPKDTLMISRTPEVTCVVVDVSHEDPEVKFNWYVDGVEVHNAKTKPREEQYNSTYRVVSVLTVLHQDWLNGKEYKCKVSNKALPAPIEKTISKAKGQPREPQVCTLPPSRDELTKNQVSLSCAVKGFYPSDIAVEWESNGQPENNYKTTPPVLDSDGSFFLVSKLTVDKSRWQQGNVFSCSVMHEALHNRFTQKSLSLSPG

SEQ ID NO: 616 - protein, 606 aa, synthetic construct
  REGION 1..606: note = B13A_VH-CH1/K147E/K213E/CLD201/knob/DHS
QVQLQQSGAELVKPGASVKISCKASGYAFSNYWMNWVKQRPGKGLEWIGQIYPGDGDTNYNGNFKGKATLTADKSSSTAYIQLSSLTSEDSAVYFCGRGFIATVVEVFDHWGLGTTLTVSSASTKGPSVFPLAPSSKSTSGGTAALGCLVEDYFPEPVTVSWNSGALTSGVHTFPAVLQSSGLYSLSSVVTVPSSSLGTQTYICNVNHKPSNTKVDEKVEPKSCTDWSPYADQSIKVRISLKSALGDKAYEWNDNEMYLFRSSVAYAMRQYFLKVKNQMILFGEEDVRVANLKPRISFNFFVTAPKNVSDIIPRTEVEKAIRMSRSRINDAFRLNDNSLEFLGIQPTLGPPNQPPVSTSTSPTRSMAPGAVHLPQPVSTRDKTHTCPPCPAPELLGGPSVFLFPPKPKDTLMISRTPEVTCVVVDVSHEDPEVKFNWYVDGVEVHNAKTKPREEQYNSTYRVVSVLTVDHHDWLNGKEYKCKVSNKALPAPIEKTISKAKGQPREPQVYTLPPCRDELTKNQVSLWCLVKGFYPSDIAVEWESNGQPENNYKTTPPVLDSDGSFFLYSKLTVDKSRWQQGNVFSCSVMHEALHSHYTQKSLSLSPG

SEQ ID NO: 617 - protein, 442 aa, synthetic construct
  REGION 1..442: note = O24A_VK-x-CH1/hole/DHS/RF
DIVLTQSPASLAVFLGQRATISCRASKSVSTSGYSYMHWYQQRPGQPPKLLIYLASNLESGVPARFSGSGSGTDFTLNIHPVEEEDAATYYCQHSRELPPTFGGGTKVEIKSSASTKGPSVFPLAPSSKSTSGGTAALGCLVKDYFPEPVTVSWNSGALTSGVHTFPAVLQSSGLYSLSSVVTVPSSSLGTQTYICNVNHKPSNTKVDKKVEPKSCDKTHTCPPCPAPELLGGPSVFLFPPKPKDTLMISRTPEVTCVVVDVSHEDPEVKFNWYVDGVEVHNAKTKPREEQYNSTYRVVSVLTVDHHDWLNGKEYKCKVSNKALPAPIEKTISKAKGQPREPQVCTLPPSRDELTKNQVSLSCAVKGFYPSDIAVEWESNGQPENNYKTTPPVLDSDGSFFLVSKLTVDKSRWQQGNVFSCSVMHEALHSRFTQKSLSLSPG

SEQ ID NO: 618 - protein, 606 aa, synthetic construct
  REGION 1..606: note = B13A_VH-CH1/N84S/Q39K/S183E/CLD201/knob/DHS
QVQLQQSGAELVKPGASVKISCKASGYAFSNYWMNWVKKRPGKGLEWIGQIYPGDGDTNYNGNFKGKATLTADKSSSTAYIQLSSLTSEDSAVYFCGRGFIATVVEVFDHWGLGTTLTVSSASTKGPSVFPLAPSSKSTSGGTAALGCLVKDYFPEPVTVSWNSGALTSGVHTFPAVLQSSGLYSLESVVTVPSSSLGTQTYICNVNHKPSNTKVDKKVEPKSCTDWSPYADQSIKVRISLKSALGDKAYEWNDNEMYLFRSSVAYAMRQYFLKVKNQMILFGEEDVRVANLKPRISFNFFVTAPKNVSDIIPRTEVEKAIRMSRSRINDAFRLNDNSLEFLGIQPTLGPPNQPPVSTSTSPTRSMAPGAVHLPQPVSTRDKTHTCPPCPAPELLGGPSVFLFPPKPKDTLMISRTPEVTCVVVDVSHEDPEVKFNWYVDGVEVHNAKTKPREEQYNSTYRVVSVLTVDHHDWLNGKEYKCKVSNKALPAPIEKTISKAKGQPREPQVYTLPPCRDELTKNQVSLWCLVKGFYPSDIAVEWESNGQPENNYKTTPPVLDSDGSFFLYSKLTVDKSRWQQGNVFSCSVMHEALHSHYTQKSLSLSPG

SEQ ID NO: 619 - protein, 442 aa, synthetic construct
  REGION 1..442: note = O24A_VK-x-CH1/Q38E/S183K/hole/DHS/RF
DIVLTQSPASLAVFLGQRATISCRASKSVSTSGYSYMHWYQERPGQPPKLLIYLASNLESGVPARFSGSGSGTDFTLNIHPVEEEDAATYYCQHSRELPPTFGGGTKVEIKSSASTKGPSVFPLAPSSKSTSGGTAALGCLVKDYFPEPVTVSWNSGALTSGVHTFPAVLQSSGLYSLKSVVTVPSSSLGTQTYICNVNHKPSNTKVDKKVEPKSCDKTHTCPPCPAPELLGGPSVFLFPPKPKDTLMISRTPEVTCVVVDVSHEDPEVKFNWYVDGVEVHNAKTKPREEQYNSTYRVVSVLTVDHHDWLNGKEYKCKVSNKALPAPIEKTISKAKGQPREPQVCTLPPSRDELTKNQVSLSCAVKGFYPSDIAVEWESNGQPENNYKTTPPVLDSDGSFFLVSKLTVDKSRWQQGNVFSCSVMHEALHSRFTQKSLSLSPG

SEQ ID NO: 620 - protein, 442 aa, synthetic construct
  REGION 1..442: note = O24A_VK-x-CH1/Q38K/S183K/hole/DHS/RF
DIVLTQSPASLAVFLGQRATISCRASKSVSTSGYSYMHWYQKRPGQPPKLLIYLASNLESGVPARFSGSGSGTDFTLNIHPVEEEDAATYYCQHSRELPPTFGGGTKVEIKSSASTKGPSVFPLAPSSKSTSGGTAALGCLVKDYFPEPVTVSWNSGALTSGVHTFPAVLQSSGLYSLKSVVTVPSSSLGTQTYICNVNHKPSNTKVDKKVEPKSCDKTHTCPPCPAPELLGGPSVFLFPPKPKDTLMISRTPEVTCVVVDVSHEDPEVKFNWYVDGVEVHNAKTKPREEQYNSTYRVVSVLTVDHHDWLNGKEYKCKVSNKALPAPIEKTISKAKGQPREPQVCTLPPSRDELTKNQVSLSCAVKGFYPSDIAVEWESNGQPENNYKTTPPVLDSDGSFFLVSKLTVDKSRWQQGNVFSCSVMHEALHSRFTQKSLSLSPG

SEQ ID NO: 621 - protein, 603 aa, synthetic construct
  REGION 1..603: note = O24A_VH-CH1/K147E/K213E/CLD201/knob
QAYLQQSGAELVRPGASVKMSCKASGYTFTSYSMHWVKQTPRQGLEWIGAIYPGNDDTSYNQKFKGKATLTVDRSSSTAYMQLSSLTSEDSAVYFCTRDYSNYPFDYWGQGTTLTVSSASTKGPSVFPLAPSSKSTSGGTAALGCLVEDYFPEPVTVSWNSGALTSGVHTFPAVLQSSGLYSLSSVVTVPSSSLGTQTYICNVNHKPSNTKVDEKVEPKSCTDWSPYADQSIKVRISLKSALGDKAYEWNDNEMYLFRSSVAYAMRQYFLKVKNQMILFGEEDVRVANLKPRISFNFFVTAPKNVSDIIPRTEVEKAIRMSRSRINDAFRLNDNSLEFLGIQPTLGPPNQPPVSTSTSPTRSMAPGAVHLPQPVSTRDKTHTCPPCPAPELLGGPSVFLFPPKPKDTLMISRTPEVTCVVVDVSHEDPEVKFNWYVDGVEVHNAKTKPREEQYNSTYRVVSVLTVLHQDWLNGKEYKCKVSNKALPAPIEKTISKAKGQPREPQVYTLPPCRDELTKNQVSLWCLVKGFYPSDIAVEWESNGQPENNYKTTPPVLDSDGSFFLYSKLTVDKSRWQQGNVFSCSVMHEALHNHYTQKSLSLSPG

SEQ ID NO: 622 - protein, 438 aa, synthetic construct
  REGION 1..438: note = B13A_VK-x-CH1/hole/RF
DIQMTQTTSSLSASLGDRVTISCRASQDISNYLNWYQQKPDGTVKLLIYYTSRLQSGVPSRFSGSGTGTDYSLTISNLEQEDIATYFCQQGNTLPWTFGGGTKVEIKSSASTKGPSVFPLAPSSKSTSGGTAALGCLVKDYFPEPVTVSWNSGALTSGVHTFPAVLQSSGLYSLSSVVTVPSSSLGTQTYICNVNHKPSNTKVDKKVEPKSCDKTHTCPPCPAPELLGGPSVFLFPPKPKDTLMISRTPEVTCVVVDVSHEDPEVKFNWYVDGVEVHNAKTKPREEQYNSTYRVVSVLTVLHQDWLNGKEYKCKVSNKALPAPIEKTISKAKGQPREPQVCTLPPSRDELTKNQVSLSCAVKGFYPSDIAVEWESNGQPENNYKTTPPVLDSDGSFFLVSKLTVDKSRWQQGNVFSCSVMHEALHNRFTQKSLSLSPG

SEQ ID NO: 623 - protein, 603 aa, synthetic construct
  REGION 1..603: note = O24A_VH-CH1/N84S/Q39K/S183E/CLD201/knob
QAYLQQSGAELVRPGASVKMSCKASGYTFTSYSMHWVKKTPRQGLEWIGAIYPGNDDTSYNQKFKGKATLTVDRSSSTAYMQLSSLTSEDSAVYFCTRDYSNYPFDYWGQGTTLTVSSASTKGPSVFPLAPSSKSTSGGTAALGCLVKDYFPEPVTVSWNSGALTSGVHTFPAVLQSSGLYSLESVVTVPSSSLGTQTYICNVNHKPSNTKVDKKVEPKSCTDWSPYADQSIKVRISLKSALGDKAYEWNDNEMYLFRSSVAYAMRQYFLKVKNQMILFGEEDVRVANLKPRISFNFFVTAPKNVSDIIPRTEVEKAIRMSRSRINDAFRLNDNSLEFLGIQPTLGPPNQPPVSTSTSPTRSMAPGAVHLPQPVSTRDKTHTCPPCPAPELLGGPSVFLFPPKPKDTLMISRTPEVTCVVVDVSHEDPEVKFNWYVDGVEVHNAKTKPREEQYNSTYRVVSVLTVLHQDWLNGKEYKCKVSNKALPAPIEKTISKAKGQPREPQVYTLPPCRDELTKNQVSLWCLVKGFYPSDIAVEWESNGQPENNYKTTPPVLDSDGSFFLYSKLTVDKSRWQQGNVFSCSVMHEALHNHYTQKSLSLSPG

SEQ ID NO: 624 - protein, 438 aa, synthetic construct
  REGION 1..438: note = B13A_VK-x-CH1/Q38E/S183K/hole/RF
DIQMTQTTSSLSASLGDRVTISCRASQDISNYLNWYQEKPDGTVKLLIYYTSRLQSGVPSRFSGSGTGTDYSLTISNLEQEDIATYFCQQGNTLPWTFGGGTKVEIKSSASTKGPSVFPLAPSSKSTSGGTAALGCLVKDYFPEPVTVSWNSGALTSGVHTFPAVLQSSGLYSLKSVVTVPSSSLGTQTYICNVNHKPSNTKVDKKVEPKSCDKTHTCPPCPAPELLGGPSVFLFPPKPKDTLMISRTPEVTCVVVDVSHEDPEVKFNWYVDGVEVHNAKTKPREEQYNSTYRVVSVLTVLHQDWLNGKEYKCKVSNKALPAPIEKTISKAKGQPREPQVCTLPPSRDELTKNQVSLSCAVKGFYPSDIAVEWESNGQPENNYKTTPPVLDSDGSFFLVSKLTVDKSRWQQGNVFSCSVMHEALHNRFTQKSLSLSPG

SEQ ID NO: 625 - protein, 438 aa, synthetic construct
  REGION 1..438: note = B13A_VK-x-CH1/Q38K/S183K/hole/RF
DIQMTQTTSSLSASLGDRVTISCRASQDISNYLNWYQKKPDGTVKLLIYYTSRLQSGVPSRFSGSGTGTDYSLTISNLEQEDIATYFCQQGNTLPWTFGGGTKVEIKSSASTKGPSVFPLAPSSKSTSGGTAALGCLVKDYFPEPVTVSWNSGALTSGVHTFPAVLQSSGLYSLKSVVTVPSSSLGTQTYICNVNHKPSNTKVDKKVEPKSCDKTHTCPPCPAPELLGGPSVFLFPPKPKDTLMISRTPEVTCVVVDVSHEDPEVKFNWYVDGVEVHNAKTKPREEQYNSTYRVVSVLTVLHQDWLNGKEYKCKVSNKALPAPIEKTISKAKGQPREPQVCTLPPSRDELTKNQVSLSCAVKGFYPSDIAVEWESNGQPENNYKTTPPVLDSDGSFFLVSKLTVDKSRWQQGNVFSCSVMHEALHNRFTQKSLSLSPG

SEQ ID NO: 626 - protein, 603 aa, synthetic construct
  REGION 1..603: note = O24A_VH-CH1/K147E/K213E/CLD201/knob/DHS
QAYLQQSGAELVRPGASVKMSCKASGYTFTSYSMHWVKQTPRQGLEWIGAIYPGNDDTSYNQKFKGKATLTVDRSSSTAYMQLSSLTSEDSAVYFCTRDYSNYPFDYWGQGTTLTVSSASTKGPSVFPLAPSSKSTSGGTAALGCLVEDYFPEPVTVSWNSGALTSGVHTFPAVLQSSGLYSLSSVVTVPSSSLGTQTYICNVNHKPSNTKVDEKVEPKSCTDWSPYADQSIKVRISLKSALGDKAYEWNDNEMYLFRSSVAYAMRQYFLKVKNQMILFGEEDVRVANLKPRISFNFFVTAPKNVSDIIPRTEVEKAIRMSRSRINDAFRLNDNSLEFLGIQPTLGPPNQPPVSTSTSPTRSMAPGAVHLPQPVSTRDKTHTCPPCPAPELLGGPSVFLFPPKPKDTLMISRTPEVTCVVVDVSHEDPEVKFNWYVDGVEVHNAKTKPREEQYNSTYRVVSVLTVDHHDWLNGKEYKCKVSNKALPAPIEKTISKAKGQPREPQVYTLPPCRDELTKNQVSLWCLVKGFYPSDIAVEWESNGQPENNYKTTPPVLDSDGSFFLYSKLTVDKSRWQQGNVFSCSVMHEALHSHYTQKSLSLSPG

SEQ ID NO: 627 - protein, 438 aa, synthetic construct
  REGION 1..438: note = B13A_VK-x-CH1/hole/DHS/RF
DIQMTQTTSSLSASLGDRVTISCRASQDISNYLNWYQQKPDGTVKLLIYYTSRLQSGVPSRFSGSGTGTDYSLTISNLEQEDIATYFCQQGNTLPWTFGGGTKVEIKSSASTKGPSVFPLAPSSKSTSGGTAALGCLVKDYFPEPVTVSWNSGALTSGVHTFPAVLQSSGLYSLSSVVTVPSSSLGTQTYICNVNHKPSNTKVDKKVEPKSCDKTHTCPPCPAPELLGGPSVFLFPPKPKDTLMISRTPEVTCVVVDVSHEDPEVKFNWYVDGVEVHNAKTKPREEQYNSTYRVVSVLTVDHHDWLNGKEYKCKVSNKALPAPIEKTISKAKGQPREPQVCTLPPSRDELTKNQVSLSCAVKGFYPSDIAVEWESNGQPENNYKTTPPVLDSDGSFFLVSKLTVDKSRWQQGNVFSCSVMHEALHSRFTQKSLSLSPG

SEQ ID NO: 628 - protein, 603 aa, synthetic construct
  REGION 1..603: note = O24A_VH-CH1/N84S/Q39K/S183E/CLD201/knob/DHS
QAYLQQSGAELVRPGASVKMSCKASGYTFTSYSMHWVKKTPRQGLEWIGAIYPGNDDTSYNQKFKGKATLTVDRSSSTAYMQLSSLTSEDSAVYFCTRDYSNYPFDYWGQGTTLTVSSASTKGPSVFPLAPSSKSTSGGTAALGCLVKDYFPEPVTVSWNSGALTSGVHTFPAVLQSSGLYSLESVVTVPSSSLGTQTYICNVNHKPSNTKVDKKVEPKSCTDWSPYADQSIKVRISLKSALGDKAYEWNDNEMYLFRSSVAYAMRQYFLKVKNQMILFGEEDVRVANLKPRISFNFFVTAPKNVSDIIPRTEVEKAIRMSRSRINDAFRLNDNSLEFLGIQPTLGPPNQPPVSTSTSPTRSMAPGAVHLPQPVSTRDKTHTCPPCPAPELLGGPSVFLFPPKPKDTLMISRTPEVTCVVVDVSHEDPEVKFNWYVDGVEVHNAKTKPREEQYNSTYRVVSVLTVDHHDWLNGKEYKCKVSNKALPAPIEKTISKAKGQPREPQVYTLPPCRDELTKNQVSLWCLVKGFYPSDIAVEWESNGQPENNYKTTPPVLDSDGSFFLYSKLTVDKSRWQQGNVFSCSVMHEALHSHYTQKSLSLSPG

SEQ ID NO: 629 - protein, 438 aa, synthetic construct
  REGION 1..438: note = B13A_VK-x-CH1/Q38E/S183K/hole/DHS/RF
DIQMTQTTSSLSASLGDRVTISCRASQDISNYLNWYQEKPDGTVKLLIYYTSRLQSGVPSRFSGSGTGTDYSLTISNLEQEDIATYFCQQGNTLPWTFGGGTKVEIKSSASTKGPSVFPLAPSSKSTSGGTAALGCLVKDYFPEPVTVSWNSGALTSGVHTFPAVLQSSGLYSLKSVVTVPSSSLGTQTYICNVNHKPSNTKVDKKVEPKSCDKTHTCPPCPAPELLGGPSVFLFPPKPKDTLMISRTPEVTCVVVDVSHEDPEVKFNWYVDGVEVHNAKTKPREEQYNSTYRVVSVLTVDHHDWLNGKEYKCKVSNKALPAPIEKTISKAKGQPREPQVCTLPPSRDELTKNQVSLSCAVKGFYPSDIAVEWESNGQPENNYKTTPPVLDSDGSFFLVSKLTVDKSRWQQGNVFSCSVMHEALHSRFTQKSLSLSPG

SEQ ID NO: 630 - protein, 438 aa, synthetic construct
  REGION 1..438: note = B13A_VK-x-CH1/Q38K/S183K/hole/DHS/RF
DIQMTQTTSSLSASLGDRVTISCRASQDISNYLNWYQKKPDGTVKLLIYYTSRLQSGVPSRFSGSGTGTDYSLTISNLEQEDIATYFCQQGNTLPWTFGGGTKVEIKSSASTKGPSVFPLAPSSKSTSGGTAALGCLVKDYFPEPVTVSWNSGALTSGVHTFPAVLQSSGLYSLKSVVTVPSSSLGTQTYICNVNHKPSNTKVDKKVEPKSCDKTHTCPPCPAPELLGGPSVFLFPPKPKDTLMISRTPEVTCVVVDVSHEDPEVKFNWYVDGVEVHNAKTKPREEQYNSTYRVVSVLTVDHHDWLNGKEYKCKVSNKALPAPIEKTISKAKGQPREPQVCTLPPSRDELTKNQVSLSCAVKGFYPSDIAVEWESNGQPENNYKTTPPVLDSDGSFFLVSKLTVDKSRWQQGNVFSCSVMHEALHSRFTQKSLSLSPG

SEQ ID NO: 631 - protein, 214 aa, synthetic construct
  REGION 1..214: note = B13A_VK-Ck/E123R/Q124K
DIQMTQTTSSLSASLGDRVTISCRASQDISNYLNWYQQKPDGTVKLLIYYTSRLQSGVPSRFSGSGTGTDYSLTISNLEQEDIATYFCQQGNTLPWTFGGGTKLEIKRTVAAPSVFIFPPSDRKLKSGTASVVCLLNNFYPREAKVQWKVDNALQSGNSQESVTEQDSKDSTYSLSSTLTLSKADYEKHKVYACEVTHQGLSSPVTKSFNRGEC

SEQ ID NO: 632 - protein, 225 aa, synthetic construct
  REGION 1..225: note = O24A_VH-x-CK
QAYLQQSGAELVRPGASVKMSCKASGYTFTSYSMHWVKQTPRQGLEWIGAIYPGNDDTSYNQKFKGKATLTVDRSSSTAYMQLSSLTSEDSAVYFCTRDYSNYPFDYWGQGTLVTVSSASVAAPSVFIFPPSDEQLKSGTASVVCLLNNFYPREAKVQWKVDNALQSGNSQESVTEQDSKDSTYSLSSTLTLSKADYEKHKVYACEVTHQGLSSPVTKSFNRGEC

SEQ ID NO: 633 - protein, 214 aa, synthetic construct
  REGION 1..214: note = B13A_VK-CK/Q38E/V133K
DIQMTQTTSSLSASLGDRVTISCRASQDISNYLNWYQEKPDGTVKLLIYYTSRLQSGVPSRFSGSGTGTDYSLTISNLEQEDIATYFCQQGNTLPWTFGGGTKLEIKRTVAAPSVFIFPPSDEQLKSGTASVKCLLNNFYPREAKVQWKVDNALQSGNSQESVTEQDSKDSTYSLSSTLTLSKADYEKHKVYACEVTHQGLSSPVTKSFNRGEC

SEQ ID NO: 634 - protein, 225 aa, synthetic construct
  REGION 1..225: note = O24A_VH-x-CK/Q39K/V133E
QAYLQQSGAELVRPGASVKMSCKASGYTFTSYSMHWVKKTPRQGLEWIGAIYPGNDDTSYNQKFKGKATLTVDRSSSTAYMQLSSLTSEDSAVYFCTRDYSNYPFDYWGQGTLVTVSSASVAAPSVFIFPPSDEQLKSGTASVECLLNNFYPREAKVQWKVDNALQSGNSQESVTEQDSKDSTYSLSSTLTLSKADYEKHKVYACEVTHQGLSSPVTKSFNRGEC

SEQ ID NO: 635 - protein, 225 aa, synthetic construct
  REGION 1..225: note = O24A_VH-x-CK/Q39E/V133E
QAYLQQSGAELVRPGASVKMSCKASGYTFTSYSMHWVKETPRQGLEWIGAIYPGNDDTSYNQKFKGKATLTVDRSSSTAYMQLSSLTSEDSAVYFCTRDYSNYPFDYWGQGTLVTVSSASVAAPSVFIFPPSDEQLKSGTASVECLLNNFYPREAKVQWKVDNALQSGNSQESVTEQDSKDSTYSLSSTLTLSKADYEKHKVYACEVTHQGLSSPVTKSFNRGEC

SEQ ID NO: 636 - protein, 218 aa, synthetic construct
  REGION 1..218: note = O24A_VK-Ck/E123R/Q124K
DIVLTQSPASLAVFLGQRATISCRASKSVSTSGYSYMHWYQQRPGQPPKLLIYLASNLESGVPARFSGSGSGTDFTLNIHPVEEEDAATYYCQHSRELPPTFGGGTKLEIKRTVAAPSVFIFPPSDRKLKSGTASVVCLLNNFYPREAKVQWKVDNALQSGNSQESVTEQDSKDSTYSLSSTLTLSKADYEKHKVYACEVTHQGLSSPVTKSFNRGEC

SEQ ID NO: 637 - protein, 228 aa, synthetic construct
  REGION 1..228: note = B13A_VH-x-CK
QVQLQQSGAELVKPGASVKISCKASGYAFSNYWMNWVKQRPGKGLEWIGQIYPGDGDTNYNGNFKGKATLTADKSSSTAYIQLSSLTSEDSAVYFCGRGFIATVVEVFDHWGLGTLVTVSSASVAAPSVFIFPPSDEQLKSGTASVVCLLNNFYPREAKVQWKVDNALQSGNSQESVTEQDSKDSTYSLSSTLTLSKADYEKHKVYACEVTHQGLSSPVTKSFNRGEC

SEQ ID NO: 638 - protein, 218 aa, synthetic construct
  REGION 1..218: note = O24A_VK-CK/Q38E/V133K
DIVLTQSPASLAVFLGQRATISCRASKSVSTSGYSYMHWYQERPGQPPKLLIYLASNLESGVPARFSGSGSGTDFTLNIHPVEEEDAATYYCQHSRELPPTFGGGTKLEIKRTVAAPSVFIFPPSDEQLKSGTASVKCLLNNFYPREAKVQWKVDNALQSGNSQESVTEQDSKDSTYSLSSTLTLSKADYEKHKVYACEVTHQGLSSPVTKSFNRGEC

SEQ ID NO: 639 - protein, 228 aa, synthetic construct
  REGION 1..228: note = B13A_VH-x-CK/Q39K/V133E
QVQLQQSGAELVKPGASVKISCKASGYAFSNYWMNWVKKRPGKGLEWIGQIYPGDGDTNYNGNFKGKATLTADKSSSTAYIQLSSLTSEDSAVYFCGRGFIATVVEVFDHWGLGTLVTVSSASVAAPSVFIFPPSDEQLKSGTASVECLLNNFYPREAKVQWKVDNALQSGNSQESVTEQDSKDSTYSLSSTLTLSKADYEKHKVYACEVTHQGLSSPVTKSFNRGEC

SEQ ID NO: 640 - protein, 228 aa, synthetic construct
  REGION 1..228: note = B13A_VH-x-CK/Q39E/V133E
QVQLQQSGAELVKPGASVKISCKASGYAFSNYWMNWVKERPGKGLEWIGQIYPGDGDTNYNGNFKGKATLTADKSSSTAYIQLSSLTSEDSAVYFCGRGFIATVVEVFDHWGLGTLVTVSSASVAAPSVFIFPPSDEQLKSGTASVECLLNNFYPREAKVQWKVDNALQSGNSQESVTEQDSKDSTYSLSSTLTLSKADYEKHKVYACEVTHQGLSSPVTKSFNRGEC

SEQ ID NO: 641 - protein, 451 aa, synthetic construct
  REGION 1..451: note = Da_VH-CH1
EVQLLESGGGLVQPGGSLRLSCAVSGFTFNSFAMSWVRQAPGKGLEWVSAISGSGGGTYYADSVKGRFTISRDNSKNTLYLQMNSLRAEDTAVYFCAKDKILWFGEPVFDYWGQGTLVTVSSASTKGPSVFPLAPSSKSTSGGTAALGCLVKDYFPEPVTVSWNSGALTSGVHTFPAVLQSSGLYSLSSVVTVPSSSLGTQTYICNVNHKPSNTKVDKRVEPKSCDKTHTCPPCPAPELLGGPSVFLFPPKPKDTLMISRTPEVTCVVVDVSHEDPEVKFNWYVDGVEVHNAKTKPREEQYNSTYRVVSVLTVLHQDWLNGKEYKCKVSNKALPAPIEKTISKAKGQPREPQVYTLPPSREEMTKNQVSLTCLVKGFYPSDIAVEWESNGQPENNYKTTPPVLDSDGSFFLYSKLTVDKSRWQQGNVFSCSVMHEALHNHYTQKSLSLSPG

SEQ ID NO: 642 - protein, 451 aa, synthetic construct
  REGION 1..451: note = Da_VH-CH1/PGLALA
EVQLLESGGGLVQPGGSLRLSCAVSGFTFNSFAMSWVRQAPGKGLEWVSAISGSGGGTYYADSVKGRFTISRDNSKNTLYLQMNSLRAEDTAVYFCAKDKILWFGEPVFDYWGQGTLVTVSSASTKGPSVFPLAPSSKSTSGGTAALGCLVKDYFPEPVTVSWNSGALTSGVHTFPAVLQSSGLYSLSSVVTVPSSSLGTQTYICNVNHKPSNTKVDKRVEPKSCDKTHTCPPCPAPEAAGGPSVFLFPPKPKDTLMISRTPEVTCVVVDVSHEDPEVKFNWYVDGVEVHNAKTKPREEQYNSTYRVVSVLTVLHQDWLNGKEYKCKVSNKALGAPIEKTISKAKGQPREPQVYTLPPSREEMTKNQVSLTCLVKGFYPSDIAVEWESNGQPENNYKTTPPVLDSDGSFFLYSKLTVDKSRWQQGNVFSCSVMHEALHNHYTQKSLSLSPG

SEQ ID NO: 643 - protein, 607 aa, synthetic construct
  REGION 1..607: note = Da_VH-CH1/N84S/CLD201/hole/RF
EVQLLESGGGLVQPGGSLRLSCAVSGFTFNSFAMSWVRQAPGKGLEWVSAISGSGGGTYYADSVKGRFTISRDNSKNTLYLQMSSLRAEDTAVYFCAKDKILWFGEPVFDYWGQGTLVTVSSASTKGPSVFPLAPSSKSTSGGTAALGCLVKDYFPEPVTVSWNSGALTSGVHTFPAVLQSSGLYSLSSVVTVPSSSLGTQTYICNVNHKPSNTKVDKKVEPKSCTDWSPYADQSIKVRISLKSALGDKAYEWNDNEMYLFRSSVAYAMRQYFLKVKNQMILFGEEDVRVANLKPRISFNFFVTAPKNVSDIIPRTEVEKAIRMSRSRINDAFRLNDNSLEFLGIQPTLGPPNQPPVSTSTSPTRSMAPGAVHLPQPVSTRDKTHTCPPCPAPELLGGPSVFLFPPKPKDTLMISRTPEVTCVVVDVSHEDPEVKFNWYVDGVEVHNAKTKPREEQYNSTYRVVSVLTVLHQDWLNGKEYKCKVSNKALPAPIEKTISKAKGQPREPQVCTLPPSRDELTKNQVSLSCAVKGFYPSDIAVEWESNGQPENNYKTTPPVLDSDGSFFLVSKLTVDKSRWQQGNVFSCSVMHEALHNRFTQKSLSLSPG

SEQ ID NO: 644 - protein, 451 aa, synthetic construct
  REGION 1..451: note = Da_VH-CH1/N84S/knob
EVQLLESGGGLVQPGGSLRLSCAVSGFTFNSFAMSWVRQAPGKGLEWVSAISGSGGGTYYADSVKGRFTISRDNSKNTLYLQMSSLRAEDTAVYFCAKDKILWFGEPVFDYWGQGTLVTVSSASTKGPSVFPLAPSSKSTSGGTAALGCLVKDYFPEPVTVSWNSGALTSGVHTFPAVLQSSGLYSLSSVVTVPSSSLGTQTYICNVNHKPSNTKVDKKVEPKSCDKTHTCPPCPAPELLGGPSVFLFPPKPKDTLMISRTPEVTCVVVDVSHEDPEVKFNWYVDGVEVHNAKTKPREEQYNSTYRVVSVLTVLHQDWLNGKEYKCKVSNKALPAPIEKTISKAKGQPREPQVYTLPPCRDELTKNQVSLWCLVKGFYPSDIAVEWESNGQPENNYKTTPPVLDSDGSFFLYSKLTVDKSRWQQGNVFSCSVMHEALHNHYTQKSLSLSPG

SEQ ID NO: 645 - protein, 607 aa, synthetic construct
  REGION 1..607: note = Da_VH-CH1/N84S/CLD201/hole/PGLALA/RF
EVQLLESGGGLVQPGGSLRLSCAVSGFTFNSFAMSWVRQAPGKGLEWVSAISGSGGGTYYADSVKGRFTISRDNSKNTLYLQMSSLRAEDTAVYFCAKDKILWFGEPVFDYWGQGTLVTVSSASTKGPSVFPLAPSSKSTSGGTAALGCLVKDYFPEPVTVSWNSGALTSGVHTFPAVLQSSGLYSLSSVVTVPSSSLGTQTYICNVNHKPSNTKVDKKVEPKSCTDWSPYADQSIKVRISLKSALGDKAYEWNDNEMYLFRSSVAYAMRQYFLKVKNQMILFGEEDVRVANLKPRISFNFFVTAPKNVSDIIPRTEVEKAIRMSRSRINDAFRLNDNSLEFLGIQPTLGPPNQPPVSTSTSPTRSMAPGAVHLPQPVSTRDKTHTCPPCPAPEAAGGPSVFLFPPKPKDTLMISRTPEVTCVVVDVSHEDPEVKFNWYVDGVEVHNAKTKPREEQYNSTYRVVSVLTVLHQDWLNGKEYKCKVSNKALGAPIEKTISKAKGQPREPQVCTLPPSRDELTKNQVSLSCAVKGFYPSDIAVEWESNGQPENNYKTTPPVLDSDGSFFLVSKLTVDKSRWQQGNVFSCSVMHEALHNRFTQKSLSLSPG

SEQ ID NO: 646 - protein, 451 aa, synthetic construct
  REGION 1..451: note = Da_VH-CH1/N84S/knob/PGLALA
EVQLLESGGGLVQPGGSLRLSCAVSGFTFNSFAMSWVRQAPGKGLEWVSAISGSGGGTYYADSVKGRFTISRDNSKNTLYLQMSSLRAEDTAVYFCAKDKILWFGEPVFDYWGQGTLVTVSSASTKGPSVFPLAPSSKSTSGGTAALGCLVKDYFPEPVTVSWNSGALTSGVHTFPAVLQSSGLYSLSSVVTVPSSSLGTQTYICNVNHKPSNTKVDKKVEPKSCDKTHTCPPCPAPEAAGGPSVFLFPPKPKDTLMISRTPEVTCVVVDVSHEDPEVKFNWYVDGVEVHNAKTKPREEQYNSTYRVVSVLTVLHQDWLNGKEYKCKVSNKALGAPIEKTISKAKGQPREPQVYTLPPCRDELTKNQVSLWCLVKGFYPSDIAVEWESNGQPENNYKTTPPVLDSDGSFFLYSKLTVDKSRWQQGNVFSCSVMHEALHNHYTQKSLSLSPG

SEQ ID NO: 647 - protein, 607 aa, synthetic construct
  REGION 1..607: note = Da_VH-CH1/N84S/K147E/K213E/CLD201/hole/PGLALA/RF
EVQLLESGGGLVQPGGSLRLSCAVSGFTFNSFAMSWVRQAPGKGLEWVSAISGSGGGTYYADSVKGRFTISRDNSKNTLYLQMSSLRAEDTAVYFCAKDKILWFGEPVFDYWGQGTLVTVSSASTKGPSVFPLAPSSKSTSGGTAALGCLVEDYFPEPVTVSWNSGALTSGVHTFPAVLQSSGLYSLSSVVTVPSSSLGTQTYICNVNHKPSNTKVDEKVEPKSCTDWSPYADQSIKVRISLKSALGDKAYEWNDNEMYLFRSSVAYAMRQYFLKVKNQMILFGEEDVRVANLKPRISFNFFVTAPKNVSDIIPRTEVEKAIRMSRSRINDAFRLNDNSLEFLGIQPTLGPPNQPPVSTSTSPTRSMAPGAVHLPQPVSTRDKTHTCPPCPAPEAAGGPSVFLFPPKPKDTLMISRTPEVTCVVVDVSHEDPEVKFNWYVDGVEVHNAKTKPREEQYNSTYRVVSVLTVLHQDWLNGKEYKCKVSNKALGAPIEKTISKAKGQPREPQVCTLPPSRDELTKNQVSLSCAVKGFYPSDIAVEWESNGQPENNYKTTPPVLDSDGSFFLVSKLTVDKSRWQQGNVFSCSVMHEALHNRFTQKSLSLSPG

SEQ ID NO: 648 - protein, 441 aa, synthetic construct
  REGION 1..441: note = HA9_VK-x-CH1/knob/PGLALA
DIELTQSPSSLSASVGDRVTITCRSNTGTVTTSNYASWYQQKPGKAPKGLIGHTNNRAPGVPSRFSGSLSGADATLTISSLQPEDLATYYCALWYNNHWVFGQGTKVEIKSSASTKGPSVFPLAPSSKSTSGGTAALGCLVKDYFPEPVTVSWNSGALTSGVHTFPAVLQSSGLYSLSSVVTVPSSSLGTQTYICNVNHKPSNTKVDKKVEPKSCDKTHTCPPCPAPEAAGGPSVFLFPPKPKDTLMISRTPEVTCVVVDVSHEDPEVKFNWYVDGVEVHNAKTKPREEQYNSTYRVVSVLTVLHQDWLNGKEYKCKVSNKALGAPIEKTISKAKGQPREPQVYTLPPCRDELTKNQVSLWCLVKGFYPSDIAVEWESNGQPENNYKTTPPVLDSDGSFFLYSKLTVDKSRWQQGNVFSCSVMHEALHNHYTQKSLSLSPG

SEQ ID NO: 649 - protein, 607 aa, synthetic construct
  REGION 1..607: note = Da_VH-CH1/N84S/Q39K/S183E/CLD201/hole/PGLALA/RF
EVQLLESGGGLVQPGGSLRLSCAVSGFTFNSFAMSWVRKAPGKGLEWVSAISGSGGGTYYADSVKGRFTISRDNSKNTLYLQMSSLRAEDTAVYFCAKDKILWFGEPVFDYWGQGTLVTVSSASTKGPSVFPLAPSSKSTSGGTAALGCLVKDYFPEPVTVSWNSGALTSGVHTFPAVLQSSGLYSLESVVTVPSSSLGTQTYICNVNHKPSNTKVDKKVEPKSCTDWSPYADQSIKVRISLKSALGDKAYEWNDNEMYLFRSSVAYAMRQYFLKVKNQMILFGEEDVRVANLKPRISFNFFVTAPKNVSDIIPRTEVEKAIRMSRSRINDAFRLNDNSLEFLGIQPTLGPPNQPPVSTSTSPTRSMAPGAVHLPQPVSTRDKTHTCPPCPAPEAAGGPSVFLFPPKPKDTLMISRTPEVTCVVVDVSHEDPEVKFNWYVDGVEVHNAKTKPREEQYNSTYRVVSVLTVLHQDWLNGKEYKCKVSNKALGAPIEKTISKAKGQPREPQVCTLPPSRDELTKNQVSLSCAVKGFYPSDIAVEWESNGQPENNYKTTPPVLDSDGSFFLVSKLTVDKSRWQQGNVFSCSVMHEALHNRFTQKSLSLSPG

SEQ ID NO: 650 - protein, 441 aa, synthetic construct
  REGION 1..441: note = HA9_VK-x-CH1/Q38E/S183K/knob/PGLALA
DIELTQSPSSLSASVGDRVTITCRSNTGTVTTSNYASWYQEKPGKAPKGLIGHTNNRAPGVPSRFSGSLSGADATLTISSLQPEDLATYYCALWYNNHWVFGQGTKVEIKSSASTKGPSVFPLAPSSKSTSGGTAALGCLVKDYFPEPVTVSWNSGALTSGVHTFPAVLQSSGLYSLKSVVTVPSSSLGTQTYICNVNHKPSNTKVDKKVEPKSCDKTHTCPPCPAPEAAGGPSVFLFPPKPKDTLMISRTPEVTCVVVDVSHEDPEVKFNWYVDGVEVHNAKTKPREEQYNSTYRVVSVLTVLHQDWLNGKEYKCKVSNKALGAPIEKTISKAKGQPREPQVYTLPPCRDELTKNQVSLWCLVKGFYPSDIAVEWESNGQPENNYKTTPPVLDSDGSFFLYSKLTVDKSRWQQGNVFSCSVMHEALHNHYTQKSLSLSPG

SEQ ID NO: 651 - protein, 441 aa, synthetic construct
  REGION 1..441: note = HA9_VK-x-CH1/Q38K/S183K/knob/PGLALA
DIELTQSPSSLSASVGDRVTITCRSNTGTVTTSNYASWYQKKPGKAPKGLIGHTNNRAPGVPSRFSGSLSGADATLTISSLQPEDLATYYCALWYNNHWVFGQGTKVEIKSSASTKGPSVFPLAPSSKSTSGGTAALGCLVKDYFPEPVTVSWNSGALTSGVHTFPAVLQSSGLYSLKSVVTVPSSSLGTQTYICNVNHKPSNTKVDKKVEPKSCDKTHTCPPCPAPEAAGGPSVFLFPPKPKDTLMISRTPEVTCVVVDVSHEDPEVKFNWYVDGVEVHNAKTKPREEQYNSTYRVVSVLTVLHQDWLNGKEYKCKVSNKALGAPIEKTISKAKGQPREPQVYTLPPCRDELTKNQVSLWCLVKGFYPSDIAVEWESNGQPENNYKTTPPVLDSDGSFFLYSKLTVDKSRWQQGNVFSCSVMHEALHNHYTQKSLSLSPG

SEQ ID NO: 652 - protein, 602 aa, synthetic construct
  REGION 1..602: note = HA9_VH-CH1/N84S/K147E/K213E/CLD201/hole/PGLALA/RF
EVQLQESGGGLVQPGDSLRLSCAASGFTFSNYWLGWIRQAPGKGPEWVGDIYPGGGYTNYNEKFKGRFTISADTSKNIAYLQVSSLRAEDTAVYYCARSASWYFDVWGQGTLVTVSSASTKGPSVFPLAPSSKSTSGGTAALGCLVEDYFPEPVTVSWNSGALTSGVHTFPAVLQSSGLYSLSSVVTVPSSSLGTQTYICNVNHKPSNTKVDEKVEPKSCTDWSPYADQSIKVRISLKSALGDKAYEWNDNEMYLFRSSVAYAMRQYFLKVKNQMILFGEEDVRVANLKPRISFNFFVTAPKNVSDIIPRTEVEKAIRMSRSRINDAFRLNDNSLEFLGIQPTLGPPNQPPVSTSTSPTRSMAPGAVHLPQPVSTRDKTHTCPPCPAPEAAGGPSVFLFPPKPKDTLMISRTPEVTCVVVDVSHEDPEVKFNWYVDGVEVHNAKTKPREEQYNSTYRVVSVLTVLHQDWLNGKEYKCKVSNKALGAPIEKTISKAKGQPREPQVCTLPPSRDELTKNQVSLSCAVKGFYPSDIAVEWESNGQPENNYKTTPPVLDSDGSFFLVSKLTVDKSRWQQGNVFSCSVMHEALHNRFTQKSLSLSPG

SEQ ID NO: 653 - protein, 438 aa, synthetic construct
  REGION 1..438: note = Da_VK-x-CH1/knob/PGLALA
EIVLTQSPATLSLSPGERATLSCRASQSVSSYLAWYQQKPGQAPRLLIYDASNRATGIPARFSGSGSGTDFTLTISSLEPEDFAVYYCQQRSNWPPTFGQGTKVEIKSSASTKGPSVFPLAPSSKSTSGGTAALGCLVKDYFPEPVTVSWNSGALTSGVHTFPAVLQSSGLYSLSSVVTVPSSSLGTQTYICNVNHKPSNTKVDKKVEPKSCDKTHTCPPCPAPEAAGGPSVFLFPPKPKDTLMISRTPEVTCVVVDVSHEDPEVKFNWYVDGVEVHNAKTKPREEQYNSTYRVVSVLTVLHQDWLNGKEYKCKVSNKALGAPIEKTISKAKGQPREPQVYTLPPCRDELTKNQVSLWCLVKGFYPSDIAVEWESNGQPENNYKTTPPVLDSDGSFFLYSKLTVDKSRWQQGNVFSCSVMHEALHNHYTQKSLSLSPG

SEQ ID NO: 654 - protein, 602 aa, synthetic construct
  REGION 1..602: note = HA9_VH-CH1/N84S/Q39K/S183E/CLD201/hole/PGLALA/RF
EVQLQESGGGLVQPGDSLRLSCAASGFTFSNYWLGWIRKAPGKGPEWVGDIYPGGGYTNYNEKFKGRFTISADTSKNIAYLQVSSLRAEDTAVYYCARSASWYFDVWGQGTLVTVSSASTKGPSVFPLAPSSKSTSGGTAALGCLVKDYFPEPVTVSWNSGALTSGVHTFPAVLQSSGLYSLESVVTVPSSSLGTQTYICNVNHKPSNTKVDKKVEPKSCTDWSPYADQSIKVRISLKSALGDKAYEWNDNEMYLFRSSVAYAMRQYFLKVKNQMILFGEEDVRVANLKPRISFNFFVTAPKNVSDIIPRTEVEKAIRMSRSRINDAFRLNDNSLEFLGIQPTLGPPNQPPVSTSTSPTRSMAPGAVHLPQPVSTRDKTHTCPPCPAPEAAGGPSVFLFPPKPKDTLMISRTPEVTCVVVDVSHEDPEVKFNWYVDGVEVHNAKTKPREEQYNSTYRVVSVLTVLHQDWLNGKEYKCKVSNKALGAPIEKTISKAKGQPREPQVCTLPPSRDELTKNQVSLSCAVKGFYPSDIAVEWESNGQPENNYKTTPPVLDSDGSFFLVSKLTVDKSRWQQGNVFSCSVMHEALHNRFTQKSLSLSPG

SEQ ID NO: 655 - protein, 438 aa, synthetic construct
  REGION 1..438: note = Da_VK-x-CH1/Q38E/S183K/knob/PGLALA
EIVLTQSPATLSLSPGERATLSCRASQSVSSYLAWYQEKPGQAPRLLIYDASNRATGIPARFSGSGSGTDFTLTISSLEPEDFAVYYCQQRSNWPPTFGQGTKVEIKSSASTKGPSVFPLAPSSKSTSGGTAALGCLVKDYFPEPVTVSWNSGALTSGVHTFPAVLQSSGLYSLKSVVTVPSSSLGTQTYICNVNHKPSNTKVDKKVEPKSCDKTHTCPPCPAPEAAGGPSVFLFPPKPKDTLMISRTPEVTCVVVDVSHEDPEVKFNWYVDGVEVHNAKTKPREEQYNSTYRVVSVLTVLHQDWLNGKEYKCKVSNKALGAPIEKTISKAKGQPREPQVYTLPPCRDELTKNQVSLWCLVKGFYPSDIAVEWESNGQPENNYKTTPPVLDSDGSFFLYSKLTVDKSRWQQGNVFSCSVMHEALHNHYTQKSLSLSPG

SEQ ID NO: 656 - protein, 438 aa, synthetic construct
  REGION 1..438: note = Da_VK-x-CH1/Q38K/S183K/knob/PGLALA
EIVLTQSPATLSLSPGERATLSCRASQSVSSYLAWYQKKPGQAPRLLIYDASNRATGIPARFSGSGSGTDFTLTISSLEPEDFAVYYCQQRSNWPPTFGQGTKVEIKSSASTKGPSVFPLAPSSKSTSGGTAALGCLVKDYFPEPVTVSWNSGALTSGVHTFPAVLQSSGLYSLKSVVTVPSSSLGTQTYICNVNHKPSNTKVDKKVEPKSCDKTHTCPPCPAPEAAGGPSVFLFPPKPKDTLMISRTPEVTCVVVDVSHEDPEVKFNWYVDGVEVHNAKTKPREEQYNSTYRVVSVLTVLHQDWLNGKEYKCKVSNKALGAPIEKTISKAKGQPREPQVYTLPPCRDELTKNQVSLWCLVKGFYPSDIAVEWESNGQPENNYKTTPPVLDSDGSFFLYSKLTVDKSRWQQGNVFSCSVMHEALHNHYTQKSLSLSPG

SEQ ID NO: 657 - protein, 440 aa, synthetic construct
  REGION 1..440: note = Sp34_VK-CH1/knob/PGLALA
QAVVTQEPSLTVSPGGTVTLTCGSSTGAVTTSNYANWVQEKPGQAFRGLIGGTNKRAPGTPARFSGSLLGGKAALTLSGAQPEDEAEYYCALWYSNLWVFGGGTKLTVLSSASTKGPSVFPLAPSSKSTSGGTAALGCLVKDYFPEPVTVSWNSGALTSGVHTFPAVLQSSGLYSLSSVVTVPSSSLGTQTYICNVNHKPSNTKVDKKVEPKSCDKTHTCPPCPAPEAAGGPSVFLFPPKPKDTLMISRTPEVTCVVVDVSHEDPEVKFNWYVDGVEVHNAKTKPREEQYNSTYRVVSVLTVLHQDWLNGKEYKCKVSNKALGAPIEKTISKAKGQPREPQVYTLPPCRDELTKNQVSLWCLVKGFYPSDIAVEWESNGQPENNYKTTPPVLDSDGSFFLYSKLTVDKSRWQQGNVFSCSVMHEALHNHYTQKSLSLSPG

SEQ ID NO: 658 - protein, 440 aa, synthetic construct
  REGION 1..440: note = Sp34_VK-CH1/knob/Q38E/S183K/PGLALA
QAVVTQEPSLTVSPGGTVTLTCGSSTGAVTTSNYANWVQEKPGQAFRGLIGGTNKRAPGTPARFSGSLLGGKAALTLSGAQPEDEAEYYCALWYSNLWVFGGGTKLTVLSSASTKGPSVFPLAPSSKSTSGGTAALGCLVKDYFPEPVTVSWNSGALTSGVHTFPAVLQSSGLYSLKSVVTVPSSSLGTQTYICNVNHKPSNTKVDKKVEPKSCDKTHTCPPCPAPEAAGGPSVFLFPPKPKDTLMISRTPEVTCVVVDVSHEDPEVKFNWYVDGVEVHNAKTKPREEQYNSTYRVVSVLTVLHQDWLNGKEYKCKVSNKALGAPIEKTISKAKGQPREPQVYTLPPCRDELTKNQVSLWCLVKGFYPSDIAVEWESNGQPENNYKTTPPVLDSDGSFFLYSKLTVDKSRWQQGNVFSCSVMHEALHNHYTQKSLSLSPG

SEQ ID NO: 659 - protein, 440 aa, synthetic construct
  REGION 1..440: note = Sp34_VK-CH1/knob/Q38K/S183K/PGLALA
QAVVTQEPSLTVSPGGTVTLTCGSSTGAVTTSNYANWVQKKPGQAFRGLIGGTNKRAPGTPARFSGSLLGGKAALTLSGAQPEDEAEYYCALWYSNLWVFGGGTKLTVLSSASTKGPSVFPLAPSSKSTSGGTAALGCLVKDYFPEPVTVSWNSGALTSGVHTFPAVLQSSGLYSLKSVVTVPSSSLGTQTYICNVNHKPSNTKVDKKVEPKSCDKTHTCPPCPAPEAAGGPSVFLFPPKPKDTLMISRTPEVTCVVVDVSHEDPEVKFNWYVDGVEVHNAKTKPREEQYNSTYRVVSVLTVLHQDWLNGKEYKCKVSNKALGAPIEKTISKAKGQPREPQVYTLPPCRDELTKNQVSLWCLVKGFYPSDIAVEWESNGQPENNYKTTPPVLDSDGSFFLYSKLTVDKSRWQQGNVFSCSVMHEALHNHYTQKSLSLSPG

SEQ ID NO: 660 - protein, 440 aa, synthetic construct
  REGION 1..440: note = Sp34_VK-CH1/knob/PGLALA/RF
QAVVTQEPSLTVSPGGTVTLTCGSSTGAVTTSNYANWVQEKPGQAFRGLIGGTNKRAPGTPARFSGSLLGGKAALTLSGAQPEDEAEYYCALWYSNLWVFGGGTKLTVLSSASTKGPSVFPLAPSSKSTSGGTAALGCLVKDYFPEPVTVSWNSGALTSGVHTFPAVLQSSGLYSLSSVVTVPSSSLGTQTYICNVNHKPSNTKVDKKVEPKSCDKTHTCPPCPAPEAAGGPSVFLFPPKPKDTLMISRTPEVTCVVVDVSHEDPEVKFNWYVDGVEVHNAKTKPREEQYNSTYRVVSVLTVLHQDWLNGKEYKCKVSNKALGAPIEKTISKAKGQPREPQVYTLPPCRDELTKNQVSLWCLVKGFYPSDIAVEWESNGQPENNYKTTPPVLDSDGSFFLYSKLTVDKSRWQQGNVFSCSVMHEALHNRFTQKSLSLSPG

SEQ ID NO: 661 - protein, 440 aa, synthetic construct
  REGION 1..440: note = Sp34_VK-CH1/knob/Q38E/S183K/PGLALA/RF
QAVVTQEPSLTVSPGGTVTLTCGSSTGAVTTSNYANWVQEKPGQAFRGLIGGTNKRAPGTPARFSGSLLGGKAALTLSGAQPEDEAEYYCALWYSNLWVFGGGTKLTVLSSASTKGPSVFPLAPSSKSTSGGTAALGCLVKDYFPEPVTVSWNSGALTSGVHTFPAVLQSSGLYSLKSVVTVPSSSLGTQTYICNVNHKPSNTKVDKKVEPKSCDKTHTCPPCPAPEAAGGPSVFLFPPKPKDTLMISRTPEVTCVVVDVSHEDPEVKFNWYVDGVEVHNAKTKPREEQYNSTYRVVSVLTVLHQDWLNGKEYKCKVSNKALGAPIEKTISKAKGQPREPQVYTLPPCRDELTKNQVSLWCLVKGFYPSDIAVEWESNGQPENNYKTTPPVLDSDGSFFLYSKLTVDKSRWQQGNVFSCSVMHEALHNRFTQKSLSLSPG

SEQ ID NO: 662 - protein, 440 aa, synthetic construct
  REGION 1..440: note = Sp34_VK-CH1/knob/Q38K/S183K/PGLALA/RF
QAVVTQEPSLTVSPGGTVTLTCGSSTGAVTTSNYANWVQKKPGQAFRGLIGGTNKRAPGTPARFSGSLLGGKAALTLSGAQPEDEAEYYCALWYSNLWVFGGGTKLTVLSSASTKGPSVFPLAPSSKSTSGGTAALGCLVKDYFPEPVTVSWNSGALTSGVHTFPAVLQSSGLYSLKSVVTVPSSSLGTQTYICNVNHKPSNTKVDKKVEPKSCDKTHTCPPCPAPEAAGGPSVFLFPPKPKDTLMISRTPEVTCVVVDVSHEDPEVKFNWYVDGVEVHNAKTKPREEQYNSTYRVVSVLTVLHQDWLNGKEYKCKVSNKALGAPIEKTISKAKGQPREPQVYTLPPCRDELTKNQVSLWCLVKGFYPSDIAVEWESNGQPENNYKTTPPVLDSDGSFFLYSKLTVDKSRWQQGNVFSCSVMHEALHNRFTQKSLSLSPG

SEQ ID NO: 663 - protein, 447 aa, synthetic construct
  REGION 1..447: note = 4C8_VH-CH1
QVQLVQSGAEVKKPGSSVKVSCKASGYTFTSYVMHWVRQAPGQGLEWMGYIIPYNDATKYNEKFKGRVTITADKSTSTAYMELSSLRSEDTAVYYCARYNYDGYFDVWGQGTLVTVSSASTKGPSVFPLAPSSKSTSGGTAALGCLVKDYFPEPVTVSWNSGALTSGVHTFPAVLQSSGLYSLSSVVTVPSSSLGTQTYICNVNHKPSNTKVDKKVEPKSCDKTHTCPPCPAPELLGGPSVFLFPPKPKDTLMISRTPEVTCVVVDVSHEDPEVKFNWYVDGVEVHNAKTKPREEQYNSTYRVVSVLTVLHQDWLNGKEYKCKVSNKALPAPIEKTISKAKGQPREPQVYTLPPSRDELTKNQVSLTCLVKGFYPSDIAVEWESNGQPENNYKTTPPVLDSDGSFFLYSKLTVDKSRWQQGNVFSCSVMHEALHNHYTQKSLSLSPG

SEQ ID NO: 664 - protein, 447 aa, synthetic construct
  REGION 1..447: note = 4C8_VH-CH1/SIDE
QVQLVQSGAEVKKPGSSVKVSCKASGYTFTSYVMHWVRQAPGQGLEWMGYIIPYNDATKYNEKFKGRVTITADKSTSTAYMELSSLRSEDTAVYYCARYNYDGYFDVWGQGTLVTVSSASTKGPSVFPLAPSSKSTSGGTAALGCLVKDYFPEPVTVSWNSGALTSGVHTFPAVLQSSGLYSLSSVVTVPSSSLGTQTYICNVNHKPSNTKVDKKVEPKSCDKTHTCPPCPAPELLGGPDVFLFPPKPKDTLMISRTPEVTCVVVDVSHEDPEVKFNWYVDGVEVHNAKTKPREEQYNSTYRVVSVLTVLHQDWLNGKEYKCKVSNKALPAPEEKTISKAKGQPREPQVYTLPPSRDELTKNQVSLTCLVKGFYPSDIAVEWESNGQPENNYKTTPPVLDSDGSFFLYSKLTVDKSRWQQGNVFSCSVMHEALHNHYTQKSLSLSPG

SEQ ID NO: 665 - protein, 603 aa, synthetic construct
  REGION 1..603: note = 4C8_VH-CH1/CLD201/hole/RF
QVQLVQSGAEVKKPGSSVKVSCKASGYTFTSYVMHWVRQAPGQGLEWMGYIIPYNDATKYNEKFKGRVTITADKSTSTAYMELSSLRSEDTAVYYCARYNYDGYFDVWGQGTLVTVSSASTKGPSVFPLAPSSKSTSGGTAALGCLVKDYFPEPVTVSWNSGALTSGVHTFPAVLQSSGLYSLSSVVTVPSSSLGTQTYICNVNHKPSNTKVDKKVEPKSCTDWSPYADQSIKVRISLKSALGDKAYEWNDNEMYLFRSSVAYAMRQYFLKVKNQMILFGEEDVRVANLKPRISFNFFVTAPKNVSDIIPRTEVEKAIRMSRSRINDAFRLNDNSLEFLGIQPTLGPPNQPPVSTSTSPTRSMAPGAVHLPQPVSTRDKTHTCPPCPAPELLGGPSVFLFPPKPKDTLMISRTPEVTCVVVDVSHEDPEVKFNWYVDGVEVHNAKTKPREEQYNSTYRVVSVLTVLHQDWLNGKEYKCKVSNKALPAPIEKTISKAKGQPREPQVCTLPPSRDELTKNQVSLSCAVKGFYPSDIAVEWESNGQPENNYKTTPPVLDSDGSFFLVSKLTVDKSRWQQGNVFSCSVMHEALHNRFTQKSLSLSPG

SEQ ID NO: 666 - protein, 447 aa, synthetic construct
  REGION 1..447: note = 4C8_VH-CH1/knob
QVQLVQSGAEVKKPGSSVKVSCKASGYTFTSYVMHWVRQAPGQGLEWMGYIIPYNDATKYNEKFKGRVTITADKSTSTAYMELSSLRSEDTAVYYCARYNYDGYFDVWGQGTLVTVSSASTKGPSVFPLAPSSKSTSGGTAALGCLVKDYFPEPVTVSWNSGALTSGVHTFPAVLQSSGLYSLSSVVTVPSSSLGTQTYICNVNHKPSNTKVDKKVEPKSCDKTHTCPPCPAPELLGGPSVFLFPPKPKDTLMISRTPEVTCVVVDVSHEDPEVKFNWYVDGVEVHNAKTKPREEQYNSTYRVVSVLTVLHQDWLNGKEYKCKVSNKALPAPIEKTISKAKGQPREPQVYTLPPCRDELTKNQVSLWCLVKGFYPSDIAVEWESNGQPENNYKTTPPVLDSDGSFFLYSKLTVDKSRWQQGNVFSCSVMHEALHNHYTQKSLSLSPG

SEQ ID NO: 667 - protein, 603 aa, synthetic construct
  REGION 1..603: note = 4C8_VH-CH1/CLD201/hole/SIDE/RF
QVQLVQSGAEVKKPGSSVKVSCKASGYTFTSYVMHWVRQAPGQGLEWMGYIIPYNDATKYNEKFKGRVTITADKSTSTAYMELSSLRSEDTAVYYCARYNYDGYFDVWGQGTLVTVSSASTKGPSVFPLAPSSKSTSGGTAALGCLVKDYFPEPVTVSWNSGALTSGVHTFPAVLQSSGLYSLSSVVTVPSSSLGTQTYICNVNHKPSNTKVDKKVEPKSCTDWSPYADQSIKVRISLKSALGDKAYEWNDNEMYLFRSSVAYAMRQYFLKVKNQMILFGEEDVRVANLKPRISFNFFVTAPKNVSDIIPRTEVEKAIRMSRSRINDAFRLNDNSLEFLGIQPTLGPPNQPPVSTSTSPTRSMAPGAVHLPQPVSTRDKTHTCPPCPAPELLGGPDVFLFPPKPKDTLMISRTPEVTCVVVDVSHEDPEVKFNWYVDGVEVHNAKTKPREEQYNSTYRVVSVLTVLHQDWLNGKEYKCKVSNKALPAPEEKTISKAKGQPREPQVCTLPPSRDELTKNQVSLSCAVKGFYPSDIAVEWESNGQPENNYKTTPPVLDSDGSFFLVSKLTVDKSRWQQGNVFSCSVMHEALHNRFTQKSLSLSPG

SEQ ID NO: 668 - protein, 447 aa, synthetic construct
  REGION 1..447: note = 4C8_VH-CH1/knob/SIDE
QVQLVQSGAEVKKPGSSVKVSCKASGYTFTSYVMHWVRQAPGQGLEWMGYIIPYNDATKYNEKFKGRVTITADKSTSTAYMELSSLRSEDTAVYYCARYNYDGYFDVWGQGTLVTVSSASTKGPSVFPLAPSSKSTSGGTAALGCLVKDYFPEPVTVSWNSGALTSGVHTFPAVLQSSGLYSLSSVVTVPSSSLGTQTYICNVNHKPSNTKVDKKVEPKSCDKTHTCPPCPAPELLGGPDVFLFPPKPKDTLMISRTPEVTCVVVDVSHEDPEVKFNWYVDGVEVHNAKTKPREEQYNSTYRVVSVLTVLHQDWLNGKEYKCKVSNKALPAPEEKTISKAKGQPREPQVYTLPPCRDELTKNQVSLWCLVKGFYPSDIAVEWESNGQPENNYKTTPPVLDSDGSFFLYSKLTVDKSRWQQGNVFSCSVMHEALHNHYTQKSLSLSPG

SEQ ID NO: 669 - protein, 603 aa, synthetic construct
  REGION 1..603: note = 4C8_VH-CH1/K147E/K213E/CLD201/hole/PGLALA/RF
QVQLVQSGAEVKKPGSSVKVSCKASGYTFTSYVMHWVRQAPGQGLEWMGYIIPYNDATKYNEKFKGRVTITADKSTSTAYMELSSLRSEDTAVYYCARYNYDGYFDVWGQGTLVTVSSASTKGPSVFPLAPSSKSTSGGTAALGCLVEDYFPEPVTVSWNSGALTSGVHTFPAVLQSSGLYSLSSVVTVPSSSLGTQTYICNVNHKPSNTKVDEKVEPKSCTDWSPYADQSIKVRISLKSALGDKAYEWNDNEMYLFRSSVAYAMRQYFLKVKNQMILFGEEDVRVANLKPRISFNFFVTAPKNVSDIIPRTEVEKAIRMSRSRINDAFRLNDNSLEFLGIQPTLGPPNQPPVSTSTSPTRSMAPGAVHLPQPVSTRDKTHTCPPCPAPEAAGGPSVFLFPPKPKDTLMISRTPEVTCVVVDVSHEDPEVKFNWYVDGVEVHNAKTKPREEQYNSTYRVVSVLTVLHQDWLNGKEYKCKVSNKALGAPIEKTISKAKGQPREPQVCTLPPSRDELTKNQVSLSCAVKGFYPSDIAVEWESNGQPENNYKTTPPVLDSDGSFFLVSKLTVDKSRWQQGNVFSCSVMHEALHNRFTQKSLSLSPG

SEQ ID NO: 670 - protein, 603 aa, synthetic construct
  REGION 1..603: note = 4C8_VH-CH1/Q39K/S183E/CLD201/hole/PGLALA/RF
QVQLVQSGAEVKKPGSSVKVSCKASGYTFTSYVMHWVRKAPGQGLEWMGYIIPYNDATKYNEKFKGRVTITADKSTSTAYMELSSLRSEDTAVYYCARYNYDGYFDVWGQGTLVTVSSASTKGPSVFPLAPSSKSTSGGTAALGCLVKDYFPEPVTVSWNSGALTSGVHTFPAVLQSSGLYSLESVVTVPSSSLGTQTYICNVNHKPSNTKVDKKVEPKSCTDWSPYADQSIKVRISLKSALGDKAYEWNDNEMYLFRSSVAYAMRQYFLKVKNQMILFGEEDVRVANLKPRISFNFFVTAPKNVSDIIPRTEVEKAIRMSRSRINDAFRLNDNSLEFLGIQPTLGPPNQPPVSTSTSPTRSMAPGAVHLPQPVSTRDKTHTCPPCPAPEAAGGPSVFLFPPKPKDTLMISRTPEVTCVVVDVSHEDPEVKFNWYVDGVEVHNAKTKPREEQYNSTYRVVSVLTVLHQDWLNGKEYKCKVSNKALGAPIEKTISKAKGQPREPQVCTLPPSRDELTKNQVSLSCAVKGFYPSDIAVEWESNGQPENNYKTTPPVLDSDGSFFLVSKLTVDKSRWQQGNVFSCSVMHEALHNRFTQKSLSLSPG

SEQ ID NO: 671 - protein, 603 aa, synthetic construct
  REGION 1..603: note = 4C8_VH-CH1/K147E/K213E/CLD201/hole/RF
QVQLVQSGAEVKKPGSSVKVSCKASGYTFTSYVMHWVRQAPGQGLEWMGYIIPYNDATKYNEKFKGRVTITADKSTSTAYMELSSLRSEDTAVYYCARYNYDGYFDVWGQGTLVTVSSASTKGPSVFPLAPSSKSTSGGTAALGCLVEDYFPEPVTVSWNSGALTSGVHTFPAVLQSSGLYSLSSVVTVPSSSLGTQTYICNVNHKPSNTKVDEKVEPKSCTDWSPYADQSIKVRISLKSALGDKAYEWNDNEMYLFRSSVAYAMRQYFLKVKNQMILFGEEDVRVANLKPRISFNFFVTAPKNVSDIIPRTEVEKAIRMSRSRINDAFRLNDNSLEFLGIQPTLGPPNQPPVSTSTSPTRSMAPGAVHLPQPVSTRDKTHTCPPCPAPELLGGPSVFLFPPKPKDTLMISRTPEVTCVVVDVSHEDPEVKFNWYVDGVEVHNAKTKPREEQYNSTYRVVSVLTVLHQDWLNGKEYKCKVSNKALPAPIEKTISKAKGQPREPQVCTLPPSRDELTKNQVSLSCAVKGFYPSDIAVEWESNGQPENNYKTTPPVLDSDGSFFLVSKLTVDKSRWQQGNVFSCSVMHEALHNRFTQKSLSLSPG

SEQ ID NO: 672 - protein, 438 aa, synthetic construct
  REGION 1..438: note = Da_VK-x-CH1/knob
EIVLTQSPATLSLSPGERATLSCRASQSVSSYLAWYQQKPGQAPRLLIYDASNRATGIPARFSGSGSGTDFTLTISSLEPEDFAVYYCQQRSNWPPTFGQGTKVEIKSSASTKGPSVFPLAPSSKSTSGGTAALGCLVKDYFPEPVTVSWNSGALTSGVHTFPAVLQSSGLYSLSSVVTVPSSSLGTQTYICNVNHKPSNTKVDKKVEPKSCDKTHTCPPCPAPELLGGPSVFLFPPKPKDTLMISRTPEVTCVVVDVSHEDPEVKFNWYVDGVEVHNAKTKPREEQYNSTYRVVSVLTVLHQDWLNGKEYKCKVSNKALPAPIEKTISKAKGQPREPQVYTLPPCRDELTKNQVSLWCLVKGFYPSDIAVEWESNGQPENNYKTTPPVLDSDGSFFLYSKLTVDKSRWQQGNVFSCSVMHEALHNHYTQKSLSLSPG

SEQ ID NO: 673 - protein, 603 aa, synthetic construct
  REGION 1..603: note = 4C8_VH-CH1/Q39K/S183E/CLD201/hole/RF
QVQLVQSGAEVKKPGSSVKVSCKASGYTFTSYVMHWVRKAPGQGLEWMGYIIPYNDATKYNEKFKGRVTITADKSTSTAYMELSSLRSEDTAVYYCARYNYDGYFDVWGQGTLVTVSSASTKGPSVFPLAPSSKSTSGGTAALGCLVKDYFPEPVTVSWNSGALTSGVHTFPAVLQSSGLYSLESVVTVPSSSLGTQTYICNVNHKPSNTKVDKKVEPKSCTDWSPYADQSIKVRISLKSALGDKAYEWNDNEMYLFRSSVAYAMRQYFLKVKNQMILFGEEDVRVANLKPRISFNFFVTAPKNVSDIIPRTEVEKAIRMSRSRINDAFRLNDNSLEFLGIQPTLGPPNQPPVSTSTSPTRSMAPGAVHLPQPVSTRDKTHTCPPCPAPELLGGPSVFLFPPKPKDTLMISRTPEVTCVVVDVSHEDPEVKFNWYVDGVEVHNAKTKPREEQYNSTYRVVSVLTVLHQDWLNGKEYKCKVSNKALPAPIEKTISKAKGQPREPQVCTLPPSRDELTKNQVSLSCAVKGFYPSDIAVEWESNGQPENNYKTTPPVLDSDGSFFLVSKLTVDKSRWQQGNVFSCSVMHEALHNRFTQKSLSLSPG

SEQ ID NO: 674 - protein, 438 aa, synthetic construct
  REGION 1..438: note = Da_VK-x-CH1/Q38E/S183K/knob
EIVLTQSPATLSLSPGERATLSCRASQSVSSYLAWYQEKPGQAPRLLIYDASNRATGIPARFSGSGSGTDFTLTISSLEPEDFAVYYCQQRSNWPPTFGQGTKVEIKSSASTKGPSVFPLAPSSKSTSGGTAALGCLVKDYFPEPVTVSWNSGALTSGVHTFPAVLQSSGLYSLKSVVTVPSSSLGTQTYICNVNHKPSNTKVDKKVEPKSCDKTHTCPPCPAPELLGGPSVFLFPPKPKDTLMISRTPEVTCVVVDVSHEDPEVKFNWYVDGVEVHNAKTKPREEQYNSTYRVVSVLTVLHQDWLNGKEYKCKVSNKALPAPIEKTISKAKGQPREPQVYTLPPCRDELTKNQVSLWCLVKGFYPSDIAVEWESNGQPENNYKTTPPVLDSDGSFFLYSKLTVDKSRWQQGNVFSCSVMHEALHNHYTQKSLSLSPG

SEQ ID NO: 675 - protein, 438 aa, synthetic construct
  REGION 1..438: note = Da_VK-x-CH1/Q38K/S183K/knob
EIVLTQSPATLSLSPGERATLSCRASQSVSSYLAWYQKKPGQAPRLLIYDASNRATGIPARFSGSGSGTDFTLTISSLEPEDFAVYYCQQRSNWPPTFGQGTKVEIKSSASTKGPSVFPLAPSSKSTSGGTAALGCLVKDYFPEPVTVSWNSGALTSGVHTFPAVLQSSGLYSLKSVVTVPSSSLGTQTYICNVNHKPSNTKVDKKVEPKSCDKTHTCPPCPAPELLGGPSVFLFPPKPKDTLMISRTPEVTCVVVDVSHEDPEVKFNWYVDGVEVHNAKTKPREEQYNSTYRVVSVLTVLHQDWLNGKEYKCKVSNKALPAPIEKTISKAKGQPREPQVYTLPPCRDELTKNQVSLWCLVKGFYPSDIAVEWESNGQPENNYKTTPPVLDSDGSFFLYSKLTVDKSRWQQGNVFSCSVMHEALHNHYTQKSLSLSPG

SEQ ID NO: 676 - protein, 450 aa, synthetic construct
  REGION 1..450: note = B34_VH-CH1
QVQLVQSGAEVKKPGASVKVSCKASGYTFTNHIIHWVRQAPGQGLEWMGYINPYPGYHAYNEKFQGRATMTSDTSTSTVYMELSSLRSEDTAVYYCARDGYYRDTDVLDYWGQGTLVTVSSASTKGPSVFPLAPSSKSTSGGTAALGCLVKDYFPEPVTVSWNSGALTSGVHTFPAVLQSSGLYSLSSVVTVPSSSLGTQTYICNVNHKPSNTKVDKKVEPKSCDKTHTCPPCPAPELLGGPSVFLFPPKPKDTLMISRTPEVTCVVVDVSHEDPEVKFNWYVDGVEVHNAKTKPREEQYNSTYRVVSVLTVLHQDWLNGKEYKCKVSNKALPAPIEKTISKAKGQPREPQVYTLPPSRDELTKNQVSLTCLVKGFYPSDIAVEWESNGQPENNYKTTPPVLDSDGSFFLYSKLTVDKSRWQQGNVFSCSVMHEALHNHYTQKSLSLSPG

SEQ ID NO: 677 - protein, 450 aa, synthetic construct
  REGION 1..450: note = B34_VH-CH1/SIDE
QVQLVQSGAEVKKPGASVKVSCKASGYTFTNHIIHWVRQAPGQGLEWMGYINPYPGYHAYNEKFQGRATMTSDTSTSTVYMELSSLRSEDTAVYYCARDGYYRDTDVLDYWGQGTLVTVSSASTKGPSVFPLAPSSKSTSGGTAALGCLVKDYFPEPVTVSWNSGALTSGVHTFPAVLQSSGLYSLSSVVTVPSSSLGTQTYICNVNHKPSNTKVDKKVEPKSCDKTHTCPPCPAPELLGGPDVFLFPPKPKDTLMISRTPEVTCVVVDVSHEDPEVKFNWYVDGVEVHNAKTKPREEQYNSTYRVVSVLTVLHQDWLNGKEYKCKVSNKALPAPEEKTISKAKGQPREPQVYTLPPSRDELTKNQVSLTCLVKGFYPSDIAVEWESNGQPENNYKTTPPVLDSDGSFFLYSKLTVDKSRWQQGNVFSCSVMHEALHNHYTQKSLSLSPG

SEQ ID NO: 678 - protein, 606 aa, synthetic construct
  REGION 1..606: note = B34_VH-CH1/CLD201/hole/RF
QVQLVQSGAEVKKPGASVKVSCKASGYTFTNHIIHWVRQAPGQGLEWMGYINPYPGYHAYNEKFQGRATMTSDTSTSTVYMELSSLRSEDTAVYYCARDGYYRDTDVLDYWGQGTLVTVSSASTKGPSVFPLAPSSKSTSGGTAALGCLVKDYFPEPVTVSWNSGALTSGVHTFPAVLQSSGLYSLSSVVTVPSSSLGTQTYICNVNHKPSNTKVDKKVEPKSCTDWSPYADQSIKVRISLKSALGDKAYEWNDNEMYLFRSSVAYAMRQYFLKVKNQMILFGEEDVRVANLKPRISFNFFVTAPKNVSDIIPRTEVEKAIRMSRSRINDAFRLNDNSLEFLGIQPTLGPPNQPPVSTSTSPTRSMAPGAVHLPQPVSTRDKTHTCPPCPAPELLGGPSVFLFPPKPKDTLMISRTPEVTCVVVDVSHEDPEVKFNWYVDGVEVHNAKTKPREEQYNSTYRVVSVLTVLHQDWLNGKEYKCKVSNKALPAPIEKTISKAKGQPREPQVCTLPPSRDELTKNQVSLSCAVKGFYPSDIAVEWESNGQPENNYKTTPPVLDSDGSFFLVSKLTVDKSRWQQGNVFSCSVMHEALHNRFTQKSLSLSPG

SEQ ID NO: 679 - protein, 450 aa, synthetic construct
  REGION 1..450: note = B34_VH-CH1/knob
QVQLVQSGAEVKKPGASVKVSCKASGYTFTNHIIHWVRQAPGQGLEWMGYINPYPGYHAYNEKFQGRATMTSDTSTSTVYMELSSLRSEDTAVYYCARDGYYRDTDVLDYWGQGTLVTVSSASTKGPSVFPLAPSSKSTSGGTAALGCLVKDYFPEPVTVSWNSGALTSGVHTFPAVLQSSGLYSLSSVVTVPSSSLGTQTYICNVNHKPSNTKVDKKVEPKSCDKTHTCPPCPAPELLGGPSVFLFPPKPKDTLMISRTPEVTCVVVDVSHEDPEVKFNWYVDGVEVHNAKTKPREEQYNSTYRVVSVLTVLHQDWLNGKEYKCKVSNKALPAPIEKTISKAKGQPREPQVYTLPPCRDELTKNQVSLWCLVKGFYPSDIAVEWESNGQPENNYKTTPPVLDSDGSFFLYSKLTVDKSRWQQGNVFSCSVMHEALHNHYTQKSLSLSPG

SEQ ID NO: 680 - protein, 606 aa, synthetic construct
  REGION 1..606: note = B34_VH-CH1/CLD201/hole/SIDE/RF
QVQLVQSGAEVKKPGASVKVSCKASGYTFTNHIIHWVRQAPGQGLEWMGYINPYPGYHAYNEKFQGRATMTSDTSTSTVYMELSSLRSEDTAVYYCARDGYYRDTDVLDYWGQGTLVTVSSASTKGPSVFPLAPSSKSTSGGTAALGCLVKDYFPEPVTVSWNSGALTSGVHTFPAVLQSSGLYSLSSVVTVPSSSLGTQTYICNVNHKPSNTKVDKKVEPKSCTDWSPYADQSIKVRISLKSALGDKAYEWNDNEMYLFRSSVAYAMRQYFLKVKNQMILFGEEDVRVANLKPRISFNFFVTAPKNVSDIIPRTEVEKAIRMSRSRINDAFRLNDNSLEFLGIQPTLGPPNQPPVSTSTSPTRSMAPGAVHLPQPVSTRDKTHTCPPCPAPELLGGPDVFLFPPKPKDTLMISRTPEVTCVVVDVSHEDPEVKFNWYVDGVEVHNAKTKPREEQYNSTYRVVSVLTVLHQDWLNGKEYKCKVSNKALPAPEEKTISKAKGQPREPQVCTLPPSRDELTKNQVSLSCAVKGFYPSDIAVEWESNGQPENNYKTTPPVLDSDGSFFLVSKLTVDKSRWQQGNVFSCSVMHEALHNRFTQKSLSLSPG

SEQ ID NO: 681 - protein, 450 aa, synthetic construct
  REGION 1..450: note = B34_VH-CH1/knob/SIDE
QVQLVQSGAEVKKPGASVKVSCKASGYTFTNHIIHWVRQAPGQGLEWMGYINPYPGYHAYNEKFQGRATMTSDTSTSTVYMELSSLRSEDTAVYYCARDGYYRDTDVLDYWGQGTLVTVSSASTKGPSVFPLAPSSKSTSGGTAALGCLVKDYFPEPVTVSWNSGALTSGVHTFPAVLQSSGLYSLSSVVTVPSSSLGTQTYICNVNHKPSNTKVDKKVEPKSCDKTHTCPPCPAPELLGGPDVFLFPPKPKDTLMISRTPEVTCVVVDVSHEDPEVKFNWYVDGVEVHNAKTKPREEQYNSTYRVVSVLTVLHQDWLNGKEYKCKVSNKALPAPEEKTISKAKGQPREPQVYTLPPCRDELTKNQVSLWCLVKGFYPSDIAVEWESNGQPENNYKTTPPVLDSDGSFFLYSKLTVDKSRWQQGNVFSCSVMHEALHNHYTQKSLSLSPG

SEQ ID NO: 682 - protein, 606 aa, synthetic construct
  REGION 1..606: note = B34_VH-CH1/K147E/K213E/CLD201/hole/PGLALA/RF
QVQLVQSGAEVKKPGASVKVSCKASGYTFTNHIIHWVRQAPGQGLEWMGYINPYPGYHAYNEKFQGRATMTSDTSTSTVYMELSSLRSEDTAVYYCARDGYYRDTDVLDYWGQGTLVTVSSASTKGPSVFPLAPSSKSTSGGTAALGCLVEDYFPEPVTVSWNSGALTSGVHTFPAVLQSSGLYSLSSVVTVPSSSLGTQTYICNVNHKPSNTKVDEKVEPKSCTDWSPYADQSIKVRISLKSALGDKAYEWNDNEMYLFRSSVAYAMRQYFLKVKNQMILFGEEDVRVANLKPRISFNFFVTAPKNVSDIIPRTEVEKAIRMSRSRINDAFRLNDNSLEFLGIQPTLGPPNQPPVSTSTSPTRSMAPGAVHLPQPVSTRDKTHTCPPCPAPEAAGGPSVFLFPPKPKDTLMISRTPEVTCVVVDVSHEDPEVKFNWYVDGVEVHNAKTKPREEQYNSTYRVVSVLTVLHQDWLNGKEYKCKVSNKALGAPIEKTISKAKGQPREPQVCTLPPSRDELTKNQVSLSCAVKGFYPSDIAVEWESNGQPENNYKTTPPVLDSDGSFFLVSKLTVDKSRWQQGNVFSCSVMHEALHNRFTQKSLSLSPG

SEQ ID NO: 683 - protein, 606 aa, synthetic construct
  REGION 1..606: note = B34_VH-CH1/Q39K/S183E/CLD201/hole/PGLALA/RF
QVQLVQSGAEVKKPGASVKVSCKASGYTFTNHIIHWVRKAPGQGLEWMGYINPYPGYHAYNEKFQGRATMTSDTSTSTVYMELSSLRSEDTAVYYCARDGYYRDTDVLDYWGQGTLVTVSSASTKGPSVFPLAPSSKSTSGGTAALGCLVKDYFPEPVTVSWNSGALTSGVHTFPAVLQSSGLYSLESVVTVPSSSLGTQTYICNVNHKPSNTKVDKKVEPKSCTDWSPYADQSIKVRISLKSALGDKAYEWNDNEMYLFRSSVAYAMRQYFLKVKNQMILFGEEDVRVANLKPRISFNFFVTAPKNVSDIIPRTEVEKAIRMSRSRINDAFRLNDNSLEFLGIQPTLGPPNQPPVSTSTSPTRSMAPGAVHLPQPVSTRDKTHTCPPCPAPEAAGGPSVFLFPPKPKDTLMISRTPEVTCVVVDVSHEDPEVKFNWYVDGVEVHNAKTKPREEQYNSTYRVVSVLTVLHQDWLNGKEYKCKVSNKALGAPIEKTISKAKGQPREPQVCTLPPSRDELTKNQVSLSCAVKGFYPSDIAVEWESNGQPENNYKTTPPVLDSDGSFFLVSKLTVDKSRWQQGNVFSCSVMHEALHNRFTQKSLSLSPG

SEQ ID NO: 684 - protein, 606 aa, synthetic construct
  REGION 1..606: note = B34_VH-CH1/K147E/K213E/CLD201/hole/RF
QVQLVQSGAEVKKPGASVKVSCKASGYTFTNHIIHWVRQAPGQGLEWMGYINPYPGYHAYNEKFQGRATMTSDTSTSTVYMELSSLRSEDTAVYYCARDGYYRDTDVLDYWGQGTLVTVSSASTKGPSVFPLAPSSKSTSGGTAALGCLVEDYFPEPVTVSWNSGALTSGVHTFPAVLQSSGLYSLSSVVTVPSSSLGTQTYICNVNHKPSNTKVDEKVEPKSCTDWSPYADQSIKVRISLKSALGDKAYEWNDNEMYLFRSSVAYAMRQYFLKVKNQMILFGEEDVRVANLKPRISFNFFVTAPKNVSDIIPRTEVEKAIRMSRSRINDAFRLNDNSLEFLGIQPTLGPPNQPPVSTSTSPTRSMAPGAVHLPQPVSTRDKTHTCPPCPAPELLGGPSVFLFPPKPKDTLMISRTPEVTCVVVDVSHEDPEVKFNWYVDGVEVHNAKTKPREEQYNSTYRVVSVLTVLHQDWLNGKEYKCKVSNKALPAPIEKTISKAKGQPREPQVCTLPPSRDELTKNQVSLSCAVKGFYPSDIAVEWESNGQPENNYKTTPPVLDSDGSFFLVSKLTVDKSRWQQGNVFSCSVMHEALHNRFTQKSLSLSPG

SEQ ID NO: 685 - protein, 606 aa, synthetic construct
  REGION 1..606: note = B34_VH-CH1/Q39K/S183E/CLD201/hole/RF
QVQLVQSGAEVKKPGASVKVSCKASGYTFTNHIIHWVRKAPGQGLEWMGYINPYPGYHAYNEKFQGRATMTSDTSTSTVYMELSSLRSEDTAVYYCARDGYYRDTDVLDYWGQGTLVTVSSASTKGPSVFPLAPSSKSTSGGTAALGCLVKDYFPEPVTVSWNSGALTSGVHTFPAVLQSSGLYSLESVVTVPSSSLGTQTYICNVNHKPSNTKVDKKVEPKSCTDWSPYADQSIKVRISLKSALGDKAYEWNDNEMYLFRSSVAYAMRQYFLKVKNQMILFGEEDVRVANLKPRISFNFFVTAPKNVSDIIPRTEVEKAIRMSRSRINDAFRLNDNSLEFLGIQPTLGPPNQPPVSTSTSPTRSMAPGAVHLPQPVSTRDKTHTCPPCPAPELLGGPSVFLFPPKPKDTLMISRTPEVTCVVVDVSHEDPEVKFNWYVDGVEVHNAKTKPREEQYNSTYRVVSVLTVLHQDWLNGKEYKCKVSNKALPAPIEKTISKAKGQPREPQVCTLPPSRDELTKNQVSLSCAVKGFYPSDIAVEWESNGQPENNYKTTPPVLDSDGSFFLVSKLTVDKSRWQQGNVFSCSVMHEALHNRFTQKSLSLSPG

SEQ ID NO: 686 - protein, 214 aa, synthetic construct
  REGION 1..214: note = Da_VK-CK
EIVLTQSPATLSLSPGERATLSCRASQSVSSYLAWYQQKPGQAPRLLIYDASNRATGIPARFSGSGSGTDFTLTISSLEPEDFAVYYCQQRSNWPPTFGQGTKVEIKRTVAAPSVFIFPPSDEQLKSGTASVVCLLNNFYPREAKVQWKVDNALQSGNSQESVTEQDSKDSTYSLSSTLTLSKADYEKHKVYACEVTHQGLSSPVTKSFNRGEC

SEQ ID NO: 687 - protein, 214 aa, synthetic construct
  REGION 1..214: note = Da_VK-Ck/E123R/Q124K
EIVLTQSPATLSLSPGERATLSCRASQSVSSYLAWYQQKPGQAPRLLIYDASNRATGIPARFSGSGSGTDFTLTISSLEPEDFAVYYCQQRSNWPPTFGQGTKVEIKRTVAAPSVFIFPPSDRKLKSGTASVVCLLNNFYPREAKVQWKVDNALQSGNSQESVTEQDSKDSTYSLSSTLTLSKADYEKHKVYACEVTHQGLSSPVTKSFNRGEC

SEQ ID NO: 688 - protein, 224 aa, synthetic construct
  REGION 1..224: note = HA9_VH-x-CK/N84S
EVQLQESGGGLVQPGDSLRLSCAASGFTFSNYWLGWIRQAPGKGPEWVGDIYPGGGYTNYNEKFKGRFTISADTSKNIAYLQVSSLRAEDTAVYYCARSASWYFDVWGQGTLVTVSSASVAAPSVFIFPPSDEQLKSGTASVVCLLNNFYPREAKVQWKVDNALQSGNSQESVTEQDSKDSTYSLSSTLTLSKADYEKHKVYACEVTHQGLSSPVTKSFNRGEC

SEQ ID NO: 689 - protein, 214 aa, synthetic construct
  REGION 1..214: note = Da_VK-CK/Q38E/V133K
EIVLTQSPATLSLSPGERATLSCRASQSVSSYLAWYQEKPGQAPRLLIYDASNRATGIPARFSGSGSGTDFTLTISSLEPEDFAVYYCQQRSNWPPTFGQGTKVEIKRTVAAPSVFIFPPSDEQLKSGTASVKCLLNNFYPREAKVQWKVDNALQSGNSQESVTEQDSKDSTYSLSSTLTLSKADYEKHKVYACEVTHQGLSSPVTKSFNRGEC

SEQ ID NO: 690 - protein, 224 aa, synthetic construct
  REGION 1..224: note = HA9_VH-x-CK/N84S/Q39K/V133E
EVQLQESGGGLVQPGDSLRLSCAASGFTFSNYWLGWIRKAPGKGPEWVGDIYPGGGYTNYNEKFKGRFTISADTSKNIAYLQVSSLRAEDTAVYYCARSASWYFDVWGQGTLVTVSSASVAAPSVFIFPPSDEQLKSGTASVECLLNNFYPREAKVQWKVDNALQSGNSQESVTEQDSKDSTYSLSSTLTLSKADYEKHKVYACEVTHQGLSSPVTKSFNRGEC

SEQ ID NO: 691 - protein, 224 aa, synthetic construct
  REGION 1..224: note = HA9_VH-x-CK/N84S/Q39E/V133E
EVQLQESGGGLVQPGDSLRLSCAASGFTFSNYWLGWIREAPGKGPEWVGDIYPGGGYTNYNEKFKGRFTISADTSKNIAYLQVSSLRAEDTAVYYCARSASWYFDVWGQGTLVTVSSASVAAPSVFIFPPSDEQLKSGTASVECLLNNFYPREAKVQWKVDNALQSGNSQESVTEQDSKDSTYSLSSTLTLSKADYEKHKVYACEVTHQGLSSPVTKSFNRGEC

SEQ ID NO: 692 - protein, 217 aa, synthetic construct
  REGION 1..217: note = HA9_VK-Ck/E123R/Q124K
DIELTQSPSSLSASVGDRVTITCRSNTGTVTTSNYASWYQQKPGKAPKGLIGHTNNRAPGVPSRFSGSLSGADATLTISSLQPEDLATYYCALWYNNHWVFGQGTKVEIKRTVAAPSVFIFPPSDRKLKSGTASVVCLLNNFYPREAKVQWKVDNALQSGNSQESVTEQDSKDSTYSLSSTLTLSKADYEKHKVYACEVTHQGLSSPVTKSFNRGEC

SEQ ID NO: 693 - protein, 229 aa, synthetic construct
  REGION 1..229: note = Da_VH-x-CK/N84S
EVQLLESGGGLVQPGGSLRLSCAVSGFTFNSFAMSWVRQAPGKGLEWVSAISGSGGGTYYADSVKGRFTISRDNSKNTLYLQMSSLRAEDTAVYFCAKDKILWFGEPVFDYWGQGTLVTVSSASVAAPSVFIFPPSDEQLKSGTASVVCLLNNFYPREAKVQWKVDNALQSGNSQESVTEQDSKDSTYSLSSTLTLSKADYEKHKVYACEVTHQGLSSPVTKSFNRGEC

SEQ ID NO: 694 - protein, 217 aa, synthetic construct
  REGION 1..217: note = HA9_VK-CK/Q38E/V133K
DIELTQSPSSLSASVGDRVTITCRSNTGTVTTSNYASWYQEKPGKAPKGLIGHTNNRAPGVPSRFSGSLSGADATLTISSLQPEDLATYYCALWYNNHWVFGQGTKVEIKRTVAAPSVFIFPPSDEQLKSGTASVKCLLNNFYPREAKVQWKVDNALQSGNSQESVTEQDSKDSTYSLSSTLTLSKADYEKHKVYACEVTHQGLSSPVTKSFNRGEC

SEQ ID NO: 695 - protein, 229 aa, synthetic construct
  REGION 1..229: note = Da_VH-x-CK/N84S/Q39K/V133E
EVQLLESGGGLVQPGGSLRLSCAVSGFTFNSFAMSWVRKAPGKGLEWVSAISGSGGGTYYADSVKGRFTISRDNSKNTLYLQMSSLRAEDTAVYFCAKDKILWFGEPVFDYWGQGTLVTVSSASVAAPSVFIFPPSDEQLKSGTASVECLLNNFYPREAKVQWKVDNALQSGNSQESVTEQDSKDSTYSLSSTLTLSKADYEKHKVYACEVTHQGLSSPVTKSFNRGEC

SEQ ID NO: 696 - protein, 229 aa, synthetic construct
  REGION 1..229: note = Da_VH-x-CK/N84S/Q39E/V133E
EVQLLESGGGLVQPGGSLRLSCAVSGFTFNSFAMSWVREAPGKGLEWVSAISGSGGGTYYADSVKGRFTISRDNSKNTLYLQMSSLRAEDTAVYFCAKDKILWFGEPVFDYWGQGTLVTVSSASVAAPSVFIFPPSDEQLKSGTASVECLLNNFYPREAKVQWKVDNALQSGNSQESVTEQDSKDSTYSLSSTLTLSKADYEKHKVYACEVTHQGLSSPVTKSFNRGEC

SEQ ID NO: 697 - protein, 232 aa, synthetic construct
  REGION 1..232: note = Sp34_VH-cK/N84S
EVQLLESGGGLVQPGGSLRLSCAASGFTFSTYAMNWVRQAPGKGLEWVSRIRSKYNNYATYYADSVKGRFTISRDDSKNTLYLQMSSLRAEDTAVYYCVRHGNFGNSYVSWFAYWGQGTLVTVSSASVAAPSVFIFPPSDEQLKSGTASVVCLLNNFYPREAKVQWKVDNALQSGNSQESVTEQDSKDSTYSLSSTLTLSKADYEKHKVYACEVTHQGLSSPVTKSFNRGEC

SEQ ID NO: 698 - protein, 232 aa, synthetic construct
  REGION 1..232: note = Sp34_VH-CK/N84S/Q39K/V133E
EVQLLESGGGLVQPGGSLRLSCAASGFTFSTYAMNWVRKAPGKGLEWVSRIRSKYNNYATYYADSVKGRFTISRDDSKNTLYLQMSSLRAEDTAVYYCVRHGNFGNSYVSWFAYWGQGTLVTVSSASVAAPSVFIFPPSDEQLKSGTASVECLLNNFYPREAKVQWKVDNALQSGNSQESVTEQDSKDSTYSLSSTLTLSKADYEKHKVYACEVTHQGLSSPVTKSFNRGEC

SEQ ID NO: 699 - protein, 232 aa, synthetic construct
  REGION 1..232: note = Sp34_VH-CK/N84S/Q39E/V133E
EVQLLESGGGLVQPGGSLRLSCAASGFTFSTYAMNWVREAPGKGLEWVSRIRSKYNNYATYYADSVKGRFTISRDDSKNTLYLQMSSLRAEDTAVYYCVRHGNFGNSYVSWFAYWGQGTLVTVSSASVAAPSVFIFPPSDEQLKSGTASVECLLNNFYPREAKVQWKVDNALQSGNSQESVTEQDSKDSTYSLSSTLTLSKADYEKHKVYACEVTHQGLSSPVTKSFNRGEC

SEQ ID NO: 700 - protein, 214 aa, synthetic construct
  REGION 1..214: note = 4C8_VK-CK
EIVLTQSPATLSLSPGERATLSCRASQSISDYLHWYQQKPGQAPRLLIYYASQSITGIPARFSGSGSGTDFTLTISSLEPEDFAVYYCQNGHSFPPTFGGGTKVEIKRTVAAPSVFIFPPSDEQLKSGTASVVCLLNNFYPREAKVQWKVDNALQSGNSQESVTEQDSKDSTYSLSSTLTLSKADYEKHKVYACEVTHQGLSSPVTKSFNRGEC

SEQ ID NO: 701 - protein, 214 aa, synthetic construct
  REGION 1..214: note = 4C8_VK-Ck/E123R/Q124K
EIVLTQSPATLSLSPGERATLSCRASQSISDYLHWYQQKPGQAPRLLIYYASQSITGIPARFSGSGSGTDFTLTISSLEPEDFAVYYCQNGHSFPPTFGGGTKVEIKRTVAAPSVFIFPPSDRKLKSGTASVVCLLNNFYPREAKVQWKVDNALQSGNSQESVTEQDSKDSTYSLSSTLTLSKADYEKHKVYACEVTHQGLSSPVTKSFNRGEC

SEQ ID NO: 702 - protein, 214 aa, synthetic construct
  REGION 1..214: note = 4C8_VK-CK/Q38E/V133K
EIVLTQSPATLSLSPGERATLSCRASQSISDYLHWYQEKPGQAPRLLIYYASQSITGIPARFSGSGSGTDFTLTISSLEPEDFAVYYCQNGHSFPPTFGGGTKVEIKRTVAAPSVFIFPPSDEQLKSGTASVKCLLNNFYPREAKVQWKVDNALQSGNSQESVTEQDSKDSTYSLSSTLTLSKADYEKHKVYACEVTHQGLSSPVTKSFNRGEC

SEQ ID NO: 703 - protein, 214 aa, synthetic construct
  REGION 1..214: note = B34_VK-CK
DIQMTQSPSSLSASVGDRVTITCQASQDISNYLNWYQQKPGKAPKLLIYYTSRLHTGVPSRFSGSGSGTDFTFTISSLEPEDIATYYCQQGNTLPWTFGQGTKVEIKRTVAAPSVFIFPPSDEQLKSGTASVVCLLNNFYPREAKVQWKVDNALQSGNSQESVTEQDSKDSTYSLSSTLTLSKADYEKHKVYACEVTHQGLSSPVTKSFNRGEC

SEQ ID NO: 704 - protein, 214 aa, synthetic construct
  REGION 1..214: note = B34_VK-Ck/E123R/Q124K
DIQMTQSPSSLSASVGDRVTITCQASQDISNYLNWYQQKPGKAPKLLIYYTSRLHTGVPSRFSGSGSGTDFTFTISSLEPEDIATYYCQQGNTLPWTFGQGTKVEIKRTVAAPSVFIFPPSDRKLKSGTASVVCLLNNFYPREAKVQWKVDNALQSGNSQESVTEQDSKDSTYSLSSTLTLSKADYEKHKVYACEVTHQGLSSPVTKSFNRGEC

SEQ ID NO: 705 - protein, 214 aa, synthetic construct
  REGION 1..214: note = B34_VK-CK/Q38E/V133K
DIQMTQSPSSLSASVGDRVTITCQASQDISNYLNWYQEKPGKAPKLLIYYTSRLHTGVPSRFSGSGSGTDFTFTISSLEPEDIATYYCQQGNTLPWTFGQGTKVEIKRTVAAPSVFIFPPSDEQLKSGTASVKCLLNNFYPREAKVQWKVDNALQSGNSQESVTEQDSKDSTYSLSSTLTLSKADYEKHKVYACEVTHQGLSSPVTKSFNRGEC

SEQ ID NO: 706 - protein, 221 aa, synthetic construct
  REGION 1..221: note = Fc6/knob/PGLALA
CPPCPAPEAAGGPSVFLFPPKPKDTLMISRTPEVTCVVVDVSHEDPEVKFNWYVDGVEVHNAKTKPREEQYNSTYRVVSVLTVLHQDWLNGKEYKCKVSNKALGAPIEKTISKAKGQPREPQVYTLPPCRDELTKNQVSLWCLVKGFYPSDIAVEWESNGQPENNYKTTPPVLDSDGSFFLYSKLTVDKSRWQQGNVFSCSVMHEALHNHYTQKSLSLSPG

SEQ ID NO: 707 - protein, 606 aa, synthetic construct
  REGION 1..606: note = R_VH-CH1/K147E/K213E/CLD201/hole/RF
QVQLQQPGAELVKPGASVKMSCKASGYTFTSYNMHWVKQTPGRGLEWIGAIYPGNGDTSYNQKFKGKATLTADKSSSTAYMQLSSLTSEDSAVYYCARSTYYGGDWYFNVWGAGTTVTVSAASTKGPSVFPLAPSSKSTSGGTAALGCLVEDYFPEPVTVSWNSGALTSGVHTFPAVLQSSGLYSLSSVVTVPSSSLGTQTYICNVNHKPSNTKVDEKVEPKSCTDWSPYADQSIKVRISLKSALGDKAYEWNDNEMYLFRSSVAYAMRQYFLKVKNQMILFGEEDVRVANLKPRISFNFFVTAPKNVSDIIPRTEVEKAIRMSRSRINDAFRLNDNSLEFLGIQPTLGPPNQPPVSTSTSPTRSMAPGAVHLPQPVSTRDKTHTCPPCPAPELLGGPSVFLFPPKPKDTLMISRTPEVTCVVVDVSHEDPEVKFNWYVDGVEVHNAKTKPREEQYNSTYRVVSVLTVLHQDWLNGKEYKCKVSNKALPAPIEKTISKAKGQPREPQVCTLPPSRDELTKNQVSLSCAVKGFYPSDIAVEWESNGQPENNYKTTPPVLDSDGSFFLVSKLTVDKSRWQQGNVFSCSVMHEALHNRFTQKSLSLSPG

SEQ ID NO: 708 - protein, 438 aa, synthetic construct
  REGION 1..438: note = FMC63_VK-x-CH1/knob
DIQMTQTTSSLSASLGDRVTISCRASQDISKYLNWYQQKPDGTVKLLIYHTSRLHSGVPSRFSGSGSGTDYSLTISNLEQEDIATYFCQQGNTLPYTFGGGTKVEIKSSASTKGPSVFPLAPSSKSTSGGTAALGCLVKDYFPEPVTVSWNSGALTSGVHTFPAVLQSSGLYSLSSVVTVPSSSLGTQTYICNVNHKPSNTKVDKKVEPKSCDKTHTCPPCPAPELLGGPSVFLFPPKPKDTLMISRTPEVTCVVVDVSHEDPEVKFNWYVDGVEVHNAKTKPREEQYNSTYRVVSVLTVLHQDWLNGKEYKCKVSNKALPAPIEKTISKAKGQPREPQVYTLPPCRDELTKNQVSLWCLVKGFYPSDIAVEWESNGQPENNYKTTPPVLDSDGSFFLYSKLTVDKSRWQQGNVFSCSVMHEALHNHYTQKSLSLSPG

SEQ ID NO: 709 - protein, 606 aa, synthetic construct
  REGION 1..606: note = R_VH-CH1/Q39K/S183E/CLD201/hole/RF
QVQLQQPGAELVKPGASVKMSCKASGYTFTSYNMHWVKKTPGRGLEWIGAIYPGNGDTSYNQKFKGKATLTADKSSSTAYMQLSSLTSEDSAVYYCARSTYYGGDWYFNVWGAGTTVTVSAASTKGPSVFPLAPSSKSTSGGTAALGCLVKDYFPEPVTVSWNSGALTSGVHTFPAVLQSSGLYSLESVVTVPSSSLGTQTYICNVNHKPSNTKVDKKVEPKSCTDWSPYADQSIKVRISLKSALGDKAYEWNDNEMYLFRSSVAYAMRQYFLKVKNQMILFGEEDVRVANLKPRISFNFFVTAPKNVSDIIPRTEVEKAIRMSRSRINDAFRLNDNSLEFLGIQPTLGPPNQPPVSTSTSPTRSMAPGAVHLPQPVSTRDKTHTCPPCPAPELLGGPSVFLFPPKPKDTLMISRTPEVTCVVVDVSHEDPEVKFNWYVDGVEVHNAKTKPREEQYNSTYRVVSVLTVLHQDWLNGKEYKCKVSNKALPAPIEKTISKAKGQPREPQVCTLPPSRDELTKNQVSLSCAVKGFYPSDIAVEWESNGQPENNYKTTPPVLDSDGSFFLVSKLTVDKSRWQQGNVFSCSVMHEALHNRFTQKSLSLSPG

SEQ ID NO: 710 - protein, 438 aa, synthetic construct
  REGION 1..438: note = FMC63_VK-x-CH1/Q38E/S183K/knob
DIQMTQTTSSLSASLGDRVTISCRASQDISKYLNWYQEKPDGTVKLLIYHTSRLHSGVPSRFSGSGSGTDYSLTISNLEQEDIATYFCQQGNTLPYTFGGGTKVEIKSSASTKGPSVFPLAPSSKSTSGGTAALGCLVKDYFPEPVTVSWNSGALTSGVHTFPAVLQSSGLYSLKSVVTVPSSSLGTQTYICNVNHKPSNTKVDKKVEPKSCDKTHTCPPCPAPELLGGPSVFLFPPKPKDTLMISRTPEVTCVVVDVSHEDPEVKFNWYVDGVEVHNAKTKPREEQYNSTYRVVSVLTVLHQDWLNGKEYKCKVSNKALPAPIEKTISKAKGQPREPQVYTLPPCRDELTKNQVSLWCLVKGFYPSDIAVEWESNGQPENNYKTTPPVLDSDGSFFLYSKLTVDKSRWQQGNVFSCSVMHEALHNHYTQKSLSLSPG

SEQ ID NO: 711 - protein, 438 aa, synthetic construct
  REGION 1..438: note = FMC63_VK-x-CH1/Q38K/S183K/knob
DIQMTQTTSSLSASLGDRVTISCRASQDISKYLNWYQKKPDGTVKLLIYHTSRLHSGVPSRFSGSGSGTDYSLTISNLEQEDIATYFCQQGNTLPYTFGGGTKVEIKSSASTKGPSVFPLAPSSKSTSGGTAALGCLVKDYFPEPVTVSWNSGALTSGVHTFPAVLQSSGLYSLKSVVTVPSSSLGTQTYICNVNHKPSNTKVDKKVEPKSCDKTHTCPPCPAPELLGGPSVFLFPPKPKDTLMISRTPEVTCVVVDVSHEDPEVKFNWYVDGVEVHNAKTKPREEQYNSTYRVVSVLTVLHQDWLNGKEYKCKVSNKALPAPIEKTISKAKGQPREPQVYTLPPCRDELTKNQVSLWCLVKGFYPSDIAVEWESNGQPENNYKTTPPVLDSDGSFFLYSKLTVDKSRWQQGNVFSCSVMHEALHNHYTQKSLSLSPG

SEQ ID NO: 712 - protein, 605 aa, synthetic construct
  REGION 1..605: note = FMC63_VH-CH1/N84S/K147E/K213E/CLD201/hole/RF
EVKLQESGPGLVAPSQSLSVTCTVSGVSLPDYGVSWIRQPPRKGLEWLGVIWGSETTYYNSALKSRLTIIKDNSKSQVFLKMSSLQTDDTAIYYCAKHYYYGGSYAMDYWGQGTSVTVSSASTKGPSVFPLAPSSKSTSGGTAALGCLVEDYFPEPVTVSWNSGALTSGVHTFPAVLQSSGLYSLSSVVTVPSSSLGTQTYICNVNHKPSNTKVDEKVEPKSCTDWSPYADQSIKVRISLKSALGDKAYEWNDNEMYLFRSSVAYAMRQYFLKVKNQMILFGEEDVRVANLKPRISFNFFVTAPKNVSDIIPRTEVEKAIRMSRSRINDAFRLNDNSLEFLGIQPTLGPPNQPPVSTSTSPTRSMAPGAVHLPQPVSTRDKTHTCPPCPAPELLGGPSVFLFPPKPKDTLMISRTPEVTCVVVDVSHEDPEVKFNWYVDGVEVHNAKTKPREEQYNSTYRVVSVLTVLHQDWLNGKEYKCKVSNKALPAPIEKTISKAKGQPREPQVCTLPPSRDELTKNQVSLSCAVKGFYPSDIAVEWESNGQPENNYKTTPPVLDSDGSFFLVSKLTVDKSRWQQGNVFSCSVMHEALHNRFTQKSLSLSPG

SEQ ID NO: 713 - protein, 437 aa, synthetic construct
  REGION 1..437: note = R_VK-x-CH1/knob
QIVLSQSPAILSASPGEKVTMTCRASSSVSYIHWFQQKPGSSPKPWIYATSNLASGVPVRFSGSGSGTSYSLTISRVEAEDAATYYCQQWTSNPPTFGGGTKVEIKSSASTKGPSVFPLAPSSKSTSGGTAALGCLVKDYFPEPVTVSWNSGALTSGVHTFPAVLQSSGLYSLSSVVTVPSSSLGTQTYICNVNHKPSNTKVDKKVEPKSCDKTHTCPPCPAPELLGGPSVFLFPPKPKDTLMISRTPEVTCVVVDVSHEDPEVKFNWYVDGVEVHNAKTKPREEQYNSTYRVVSVLTVLHQDWLNGKEYKCKVSNKALPAPIEKTISKAKGQPREPQVYTLPPCRDELTKNQVSLWCLVKGFYPSDIAVEWESNGQPENNYKTTPPVLDSDGSFFLYSKLTVDKSRWQQGNVFSCSVMHEALHNHYTQKSLSLSPG

SEQ ID NO: 714 - protein, 605 aa, synthetic construct
  REGION 1..605: note = FMC63_VH-CH1/N84S/Q39K/S183E/CLD201/hole/RF
EVKLQESGPGLVAPSQSLSVTCTVSGVSLPDYGVSWIRKPPRKGLEWLGVIWGSETTYYNSALKSRLTIIKDNSKSQVFLKMSSLQTDDTAIYYCAKHYYYGGSYAMDYWGQGTSVTVSSASTKGPSVFPLAPSSKSTSGGTAALGCLVKDYFPEPVTVSWNSGALTSGVHTFPAVLQSSGLYSLESVVTVPSSSLGTQTYICNVNHKPSNTKVDKKVEPKSCTDWSPYADQSIKVRISLKSALGDKAYEWNDNEMYLFRSSVAYAMRQYFLKVKNQMILFGEEDVRVANLKPRISFNFFVTAPKNVSDIIPRTEVEKAIRMSRSRINDAFRLNDNSLEFLGIQPTLGPPNQPPVSTSTSPTRSMAPGAVHLPQPVSTRDKTHTCPPCPAPELLGGPSVFLFPPKPKDTLMISRTPEVTCVVVDVSHEDPEVKFNWYVDGVEVHNAKTKPREEQYNSTYRVVSVLTVLHQDWLNGKEYKCKVSNKALPAPIEKTISKAKGQPREPQVCTLPPSRDELTKNQVSLSCAVKGFYPSDIAVEWESNGQPENNYKTTPPVLDSDGSFFLVSKLTVDKSRWQQGNVFSCSVMHEALHNRFTQKSLSLSPG

SEQ ID NO: 715 - protein, 437 aa, synthetic construct
  REGION 1..437: note = R_VK-x-CH1/Q38E/S183K/knob
QIVLSQSPAILSASPGEKVTMTCRASSSVSYIHWFQEKPGSSPKPWIYATSNLASGVPVRFSGSGSGTSYSLTISRVEAEDAATYYCQQWTSNPPTFGGGTKVEIKSSASTKGPSVFPLAPSSKSTSGGTAALGCLVKDYFPEPVTVSWNSGALTSGVHTFPAVLQSSGLYSLKSVVTVPSSSLGTQTYICNVNHKPSNTKVDKKVEPKSCDKTHTCPPCPAPELLGGPSVFLFPPKPKDTLMISRTPEVTCVVVDVSHEDPEVKFNWYVDGVEVHNAKTKPREEQYNSTYRVVSVLTVLHQDWLNGKEYKCKVSNKALPAPIEKTISKAKGQPREPQVYTLPPCRDELTKNQVSLWCLVKGFYPSDIAVEWESNGQPENNYKTTPPVLDSDGSFFLYSKLTVDKSRWQQGNVFSCSVMHEALHNHYTQKSLSLSPG

SEQ ID NO: 716 - protein, 437 aa, synthetic construct
  REGION 1..437: note = R_VK-x-CH1/Q38K/S183K/knob
QIVLSQSPAILSASPGEKVTMTCRASSSVSYIHWFQKKPGSSPKPWIYATSNLASGVPVRFSGSGSGTSYSLTISRVEAEDAATYYCQQWTSNPPTFGGGTKVEIKSSASTKGPSVFPLAPSSKSTSGGTAALGCLVKDYFPEPVTVSWNSGALTSGVHTFPAVLQSSGLYSLKSVVTVPSSSLGTQTYICNVNHKPSNTKVDKKVEPKSCDKTHTCPPCPAPELLGGPSVFLFPPKPKDTLMISRTPEVTCVVVDVSHEDPEVKFNWYVDGVEVHNAKTKPREEQYNSTYRVVSVLTVLHQDWLNGKEYKCKVSNKALPAPIEKTISKAKGQPREPQVYTLPPCRDELTKNQVSLWCLVKGFYPSDIAVEWESNGQPENNYKTTPPVLDSDGSFFLYSKLTVDKSRWQQGNVFSCSVMHEALHNHYTQKSLSLSPG

SEQ ID NO: 717 - protein, 1019 aa, synthetic construct
  REGION 1..1019: note = FMC63_VK-x-CH1/knob/41BBL
DIQMTQTTSSLSASLGDRVTISCRASQDISKYLNWYQQKPDGTVKLLIYHTSRLHSGVPSRFSGSGSGTDYSLTISNLEQEDIATYFCQQGNTLPYTFGGGTKVEIKSSASTKGPSVFPLAPSSKSTSGGTAALGCLVKDYFPEPVTVSWNSGALTSGVHTFPAVLQSSGLYSLSSVVTVPSSSLGTQTYICNVNHKPSNTKVDKKVEPKSCDKTHTCPPCPAPELLGGPSVFLFPPKPKDTLMISRTPEVTCVVVDVSHEDPEVKFNWYVDGVEVHNAKTKPREEQYNSTYRVVSVLTVLHQDWLNGKEYKCKVSNKALPAPIEKTISKAKGQPREPQVYTLPPCRDELTKNQVSLWCLVKGFYPSDIAVEWESNGQPENNYKTTPPVLDSDGSFFLYSKLTVDKSRWQQGNVFSCSVMHEALHNHYTQKSLSLSPGGGGSGGGGSREGPELSPDDPAGLLDLRQGMFAQLVAQNVLLIDGPLSWYSDPGLAGVSLTGGLSYKEDTKELVVAKAGVYYVFFQLELRRVVAGEGSGSVSLALHLQPLRSAAGAAALALTVDLPPASSEARNSAFGFQGRLLHLSAGQRLGVHLHTEARARHAWQLTQGATVLGLFRVTPEIPAGLPSPRSEGGGGSGGGGSREGPELSPDDPAGLLDLRQGMFAQLVAQNVLLIDGPLSWYSDPGLAGVSLTGGLSYKEDTKELVVAKAGVYYVFFQLELRRVVAGEGSGSVSLALHLQPLRSAAGAAALALTVDLPPASSEARNSAFGFQGRLLHLSAGQRLGVHLHTEARARHAWQLTQGATVLGLFRVTPEIPAGLPSPRSEGGGGSGGGGSREGPELSPDDPAGLLDLRQGMFAQLVAQNVLLIDGPLSWYSDPGLAGVSLTGGLSYKEDTKELVVAKAGVYYVFFQLELRRVVAGEGSGSVSLALHLQPLRSAAGAAALALTVDLPPASSEARNSAFGFQGRLLHLSAGQRLGVHLHTEARARHAWQLTQGATVLGLFRVTPEIPAGLPSPRSE

SEQ ID NO: 718 - protein, 1019 aa, synthetic construct
  REGION 1..1019: note = FMC63_VK-x-CH1/Q38E/S183K/knob/41BBL
DIQMTQTTSSLSASLGDRVTISCRASQDISKYLNWYQEKPDGTVKLLIYHTSRLHSGVPSRFSGSGSGTDYSLTISNLEQEDIATYFCQQGNTLPYTFGGGTKVEIKSSASTKGPSVFPLAPSSKSTSGGTAALGCLVKDYFPEPVTVSWNSGALTSGVHTFPAVLQSSGLYSLKSVVTVPSSSLGTQTYICNVNHKPSNTKVDKKVEPKSCDKTHTCPPCPAPELLGGPSVFLFPPKPKDTLMISRTPEVTCVVVDVSHEDPEVKFNWYVDGVEVHNAKTKPREEQYNSTYRVVSVLTVLHQDWLNGKEYKCKVSNKALPAPIEKTISKAKGQPREPQVYTLPPCRDELTKNQVSLWCLVKGFYPSDIAVEWESNGQPENNYKTTPPVLDSDGSFFLYSKLTVDKSRWQQGNVFSCSVMHEALHNHYTQKSLSLSPGGGGSGGGGSREGPELSPDDPAGLLDLRQGMFAQLVAQNVLLIDGPLSWYSDPGLAGVSLTGGLSYKEDTKELVVAKAGVYYVFFQLELRRVVAGEGSGSVSLALHLQPLRSAAGAAALALTVDLPPASSEARNSAFGFQGRLLHLSAGQRLGVHLHTEARARHAWQLTQGATVLGLFRVTPEIPAGLPSPRSEGGGGSGGGGSREGPELSPDDPAGLLDLRQGMFAQLVAQNVLLIDGPLSWYSDPGLAGVSLTGGLSYKEDTKELVVAKAGVYYVFFQLELRRVVAGEGSGSVSLALHLQPLRSAAGAAALALTVDLPPASSEARNSAFGFQGRLLHLSAGQRLGVHLHTEARARHAWQLTQGATVLGLFRVTPEIPAGLPSPRSEGGGGSGGGGSREGPELSPDDPAGLLDLRQGMFAQLVAQNVLLIDGPLSWYSDPGLAGVSLTGGLSYKEDTKELVVAKAGVYYVFFQLELRRVVAGEGSGSVSLALHLQPLRSAAGAAALALTVDLPPASSEARNSAFGFQGRLLHLSAGQRLGVHLHTEARARHAWQLTQGATVLGLFRVTPEIPAGLPSPRSE

SEQ ID NO: 719 - protein, 1019 aa, synthetic construct
  REGION 1..1019: note = FMC63_VK-x-CH1/Q38K/S183K/knob/41BBL
DIQMTQTTSSLSASLGDRVTISCRASQDISKYLNWYQKKPDGTVKLLIYHTSRLHSGVPSRFSGSGSGTDYSLTISNLEQEDIATYFCQQGNTLPYTFGGGTKVEIKSSASTKGPSVFPLAPSSKSTSGGTAALGCLVKDYFPEPVTVSWNSGALTSGVHTFPAVLQSSGLYSLKSVVTVPSSSLGTQTYICNVNHKPSNTKVDKKVEPKSCDKTHTCPPCPAPELLGGPSVFLFPPKPKDTLMISRTPEVTCVVVDVSHEDPEVKFNWYVDGVEVHNAKTKPREEQYNSTYRVVSVLTVLHQDWLNGKEYKCKVSNKALPAPIEKTISKAKGQPREPQVYTLPPCRDELTKNQVSLWCLVKGFYPSDIAVEWESNGQPENNYKTTPPVLDSDGSFFLYSKLTVDKSRWQQGNVFSCSVMHEALHNHYTQKSLSLSPGGGGSGGGGSREGPELSPDDPAGLLDLRQGMFAQLVAQNVLLIDGPLSWYSDPGLAGVSLTGGLSYKEDTKELVVAKAGVYYVFFQLELRRVVAGEGSGSVSLALHLQPLRSAAGAAALALTVDLPPASSEARNSAFGFQGRLLHLSAGQRLGVHLHTEARARHAWQLTQGATVLGLFRVTPEIPAGLPSPRSEGGGGSGGGGSREGPELSPDDPAGLLDLRQGMFAQLVAQNVLLIDGPLSWYSDPGLAGVSLTGGLSYKEDTKELVVAKAGVYYVFFQLELRRVVAGEGSGSVSLALHLQPLRSAAGAAALALTVDLPPASSEARNSAFGFQGRLLHLSAGQRLGVHLHTEARARHAWQLTQGATVLGLFRVTPEIPAGLPSPRSEGGGGSGGGGSREGPELSPDDPAGLLDLRQGMFAQLVAQNVLLIDGPLSWYSDPGLAGVSLTGGLSYKEDTKELVVAKAGVYYVFFQLELRRVVAGEGSGSVSLALHLQPLRSAAGAAALALTVDLPPASSEARNSAFGFQGRLLHLSAGQRLGVHLHTEARARHAWQLTQGATVLGLFRVTPEIPAGLPSPRSE

SEQ ID NO: 720 - protein, 1018 aa, synthetic construct
  REGION 1..1018: note = R_VK-x-CH1/knob/41BBL
QIVLSQSPAILSASPGEKVTMTCRASSSVSYIHWFQQKPGSSPKPWIYATSNLASGVPVRFSGSGSGTSYSLTISRVEAEDAATYYCQQWTSNPPTFGGGTKVEIKSSASTKGPSVFPLAPSSKSTSGGTAALGCLVKDYFPEPVTVSWNSGALTSGVHTFPAVLQSSGLYSLSSVVTVPSSSLGTQTYICNVNHKPSNTKVDKKVEPKSCDKTHTCPPCPAPELLGGPSVFLFPPKPKDTLMISRTPEVTCVVVDVSHEDPEVKFNWYVDGVEVHNAKTKPREEQYNSTYRVVSVLTVLHQDWLNGKEYKCKVSNKALPAPIEKTISKAKGQPREPQVYTLPPCRDELTKNQVSLWCLVKGFYPSDIAVEWESNGQPENNYKTTPPVLDSDGSFFLYSKLTVDKSRWQQGNVFSCSVMHEALHNHYTQKSLSLSPGGGGSGGGGSREGPELSPDDPAGLLDLRQGMFAQLVAQNVLLIDGPLSWYSDPGLAGVSLTGGLSYKEDTKELVVAKAGVYYVFFQLELRRVVAGEGSGSVSLALHLQPLRSAAGAAALALTVDLPPASSEARNSAFGFQGRLLHLSAGQRLGVHLHTEARARHAWQLTQGATVLGLFRVTPEIPAGLPSPRSEGGGGSGGGGSREGPELSPDDPAGLLDLRQGMFAQLVAQNVLLIDGPLSWYSDPGLAGVSLTGGLSYKEDTKELVVAKAGVYYVFFQLELRRVVAGEGSGSVSLALHLQPLRSAAGAAALALTVDLPPASSEARNSAFGFQGRLLHLSAGQRLGVHLHTEARARHAWQLTQGATVLGLFRVTPEIPAGLPSPRSEGGGGSGGGGSREGPELSPDDPAGLLDLRQGMFAQLVAQNVLLIDGPLSWYSDPGLAGVSLTGGLSYKEDTKELVVAKAGVYYVFFQLELRRVVAGEGSGSVSLALHLQPLRSAAGAAALALTVDLPPASSEARNSAFGFQGRLLHLSAGQRLGVHLHTEARARHAWQLTQGATVLGLFRVTPEIPAGLPSPRSE

SEQ ID NO: 721 - protein, 1018 aa, synthetic construct
  REGION 1..1018: note = R_VK-x-CH1/Q38E/S183K/knob/41BBL
QIVLSQSPAILSASPGEKVTMTCRASSSVSYIHWFQEKPGSSPKPWIYATSNLASGVPVRFSGSGSGTSYSLTISRVEAEDAATYYCQQWTSNPPTFGGGTKVEIKSSASTKGPSVFPLAPSSKSTSGGTAALGCLVKDYFPEPVTVSWNSGALTSGVHTFPAVLQSSGLYSLKSVVTVPSSSLGTQTYICNVNHKPSNTKVDKKVEPKSCDKTHTCPPCPAPELLGGPSVFLFPPKPKDTLMISRTPEVTCVVVDVSHEDPEVKFNWYVDGVEVHNAKTKPREEQYNSTYRVVSVLTVLHQDWLNGKEYKCKVSNKALPAPIEKTISKAKGQPREPQVYTLPPCRDELTKNQVSLWCLVKGFYPSDIAVEWESNGQPENNYKTTPPVLDSDGSFFLYSKLTVDKSRWQQGNVFSCSVMHEALHNHYTQKSLSLSPGGGGSGGGGSREGPELSPDDPAGLLDLRQGMFAQLVAQNVLLIDGPLSWYSDPGLAGVSLTGGLSYKEDTKELVVAKAGVYYVFFQLELRRVVAGEGSGSVSLALHLQPLRSAAGAAALALTVDLPPASSEARNSAFGFQGRLLHLSAGQRLGVHLHTEARARHAWQLTQGATVLGLFRVTPEIPAGLPSPRSEGGGGSGGGGSREGPELSPDDPAGLLDLRQGMFAQLVAQNVLLIDGPLSWYSDPGLAGVSLTGGLSYKEDTKELVVAKAGVYYVFFQLELRRVVAGEGSGSVSLALHLQPLRSAAGAAALALTVDLPPASSEARNSAFGFQGRLLHLSAGQRLGVHLHTEARARHAWQLTQGATVLGLFRVTPEIPAGLPSPRSEGGGGSGGGGSREGPELSPDDPAGLLDLRQGMFAQLVAQNVLLIDGPLSWYSDPGLAGVSLTGGLSYKEDTKELVVAKAGVYYVFFQLELRRVVAGEGSGSVSLALHLQPLRSAAGAAALALTVDLPPASSEARNSAFGFQGRLLHLSAGQRLGVHLHTEARARHAWQLTQGATVLGLFRVTPEIPAGLPSPRSE

SEQ ID NO: 722 - protein, 1018 aa, synthetic construct
  REGION 1..1018: note = R_VK-x-CH1/Q38K/S183K/knob/41BBL
QIVLSQSPAILSASPGEKVTMTCRASSSVSYIHWFQKKPGSSPKPWIYATSNLASGVPVRFSGSGSGTSYSLTISRVEAEDAATYYCQQWTSNPPTFGGGTKVEIKSSASTKGPSVFPLAPSSKSTSGGTAALGCLVKDYFPEPVTVSWNSGALTSGVHTFPAVLQSSGLYSLKSVVTVPSSSLGTQTYICNVNHKPSNTKVDKKVEPKSCDKTHTCPPCPAPELLGGPSVFLFPPKPKDTLMISRTPEVTCVVVDVSHEDPEVKFNWYVDGVEVHNAKTKPREEQYNSTYRVVSVLTVLHQDWLNGKEYKCKVSNKALPAPIEKTISKAKGQPREPQVYTLPPCRDELTKNQVSLWCLVKGFYPSDIAVEWESNGQPENNYKTTPPVLDSDGSFFLYSKLTVDKSRWQQGNVFSCSVMHEALHNHYTQKSLSLSPGGGGSGGGGSREGPELSPDDPAGLLDLRQGMFAQLVAQNVLLIDGPLSWYSDPGLAGVSLTGGLSYKEDTKELVVAKAGVYYVFFQLELRRVVAGEGSGSVSLALHLQPLRSAAGAAALALTVDLPPASSEARNSAFGFQGRLLHLSAGQRLGVHLHTEARARHAWQLTQGATVLGLFRVTPEIPAGLPSPRSEGGGGSGGGGSREGPELSPDDPAGLLDLRQGMFAQLVAQNVLLIDGPLSWYSDPGLAGVSLTGGLSYKEDTKELVVAKAGVYYVFFQLELRRVVAGEGSGSVSLALHLQPLRSAAGAAALALTVDLPPASSEARNSAFGFQGRLLHLSAGQRLGVHLHTEARARHAWQLTQGATVLGLFRVTPEIPAGLPSPRSEGGGGSGGGGSREGPELSPDDPAGLLDLRQGMFAQLVAQNVLLIDGPLSWYSDPGLAGVSLTGGLSYKEDTKELVVAKAGVYYVFFQLELRRVVAGEGSGSVSLALHLQPLRSAAGAAALALTVDLPPASSEARNSAFGFQGRLLHLSAGQRLGVHLHTEARARHAWQLTQGATVLGLFRVTPEIPAGLPSPRSE

SEQ ID NO: 723 - protein, 606 aa, synthetic construct
  REGION 1..606: note = R_VH-CH1/K147E/K213E/CLD201/hole/PGLALA/RF
QVQLQQPGAELVKPGASVKMSCKASGYTFTSYNMHWVKQTPGRGLEWIGAIYPGNGDTSYNQKFKGKATLTADKSSSTAYMQLSSLTSEDSAVYYCARSTYYGGDWYFNVWGAGTTVTVSAASTKGPSVFPLAPSSKSTSGGTAALGCLVEDYFPEPVTVSWNSGALTSGVHTFPAVLQSSGLYSLSSVVTVPSSSLGTQTYICNVNHKPSNTKVDEKVEPKSCTDWSPYADQSIKVRISLKSALGDKAYEWNDNEMYLFRSSVAYAMRQYFLKVKNQMILFGEEDVRVANLKPRISFNFFVTAPKNVSDIIPRTEVEKAIRMSRSRINDAFRLNDNSLEFLGIQPTLGPPNQPPVSTSTSPTRSMAPGAVHLPQPVSTRDKTHTCPPCPAPEAAGGPSVFLFPPKPKDTLMISRTPEVTCVVVDVSHEDPEVKFNWYVDGVEVHNAKTKPREEQYNSTYRVVSVLTVLHQDWLNGKEYKCKVSNKALGAPIEKTISKAKGQPREPQVCTLPPSRDELTKNQVSLSCAVKGFYPSDIAVEWESNGQPENNYKTTPPVLDSDGSFFLVSKLTVDKSRWQQGNVFSCSVMHEALHNRFTQKSLSLSPG

SEQ ID NO: 724 - protein, 1019 aa, synthetic construct
  REGION 1..1019: note = FMC63_VK-x-CH1/knob/PGLALA/41BBL
DIQMTQTTSSLSASLGDRVTISCRASQDISKYLNWYQQKPDGTVKLLIYHTSRLHSGVPSRFSGSGSGTDYSLTISNLEQEDIATYFCQQGNTLPYTFGGGTKVEIKSSASTKGPSVFPLAPSSKSTSGGTAALGCLVKDYFPEPVTVSWNSGALTSGVHTFPAVLQSSGLYSLSSVVTVPSSSLGTQTYICNVNHKPSNTKVDKKVEPKSCDKTHTCPPCPAPEAAGGPSVFLFPPKPKDTLMISRTPEVTCVVVDVSHEDPEVKFNWYVDGVEVHNAKTKPREEQYNSTYRVVSVLTVLHQDWLNGKEYKCKVSNKALGAPIEKTISKAKGQPREPQVYTLPPCRDELTKNQVSLWCLVKGFYPSDIAVEWESNGQPENNYKTTPPVLDSDGSFFLYSKLTVDKSRWQQGNVFSCSVMHEALHNHYTQKSLSLSPGGGGSGGGGSREGPELSPDDPAGLLDLRQGMFAQLVAQNVLLIDGPLSWYSDPGLAGVSLTGGLSYKEDTKELVVAKAGVYYVFFQLELRRVVAGEGSGSVSLALHLQPLRSAAGAAALALTVDLPPASSEARNSAFGFQGRLLHLSAGQRLGVHLHTEARARHAWQLTQGATVLGLFRVTPEIPAGLPSPRSEGGGGSGGGGSREGPELSPDDPAGLLDLRQGMFAQLVAQNVLLIDGPLSWYSDPGLAGVSLTGGLSYKEDTKELVVAKAGVYYVFFQLELRRVVAGEGSGSVSLALHLQPLRSAAGAAALALTVDLPPASSEARNSAFGFQGRLLHLSAGQRLGVHLHTEARARHAWQLTQGATVLGLFRVTPEIPAGLPSPRSEGGGGSGGGGSREGPELSPDDPAGLLDLRQGMFAQLVAQNVLLIDGPLSWYSDPGLAGVSLTGGLSYKEDTKELVVAKAGVYYVFFQLELRRVVAGEGSGSVSLALHLQPLRSAAGAAALALTVDLPPASSEARNSAFGFQGRLLHLSAGQRLGVHLHTEARARHAWQLTQGATVLGLFRVTPEIPAGLPSPRSE

SEQ ID NO: 725 - protein, 606 aa, synthetic construct
  REGION 1..606: note = R_VH-CH1/Q39K/S183E/CLD201/hole/PGLALA/RF
QVQLQQPGAELVKPGASVKMSCKASGYTFTSYNMHWVKKTPGRGLEWIGAIYPGNGDTSYNQKFKGKATLTADKSSSTAYMQLSSLTSEDSAVYYCARSTYYGGDWYFNVWGAGTTVTVSAASTKGPSVFPLAPSSKSTSGGTAALGCLVKDYFPEPVTVSWNSGALTSGVHTFPAVLQSSGLYSLESVVTVPSSSLGTQTYICNVNHKPSNTKVDKKVEPKSCTDWSPYADQSIKVRISLKSALGDKAYEWNDNEMYLFRSSVAYAMRQYFLKVKNQMILFGEEDVRVANLKPRISFNFFVTAPKNVSDIIPRTEVEKAIRMSRSRINDAFRLNDNSLEFLGIQPTLGPPNQPPVSTSTSPTRSMAPGAVHLPQPVSTRDKTHTCPPCPAPEAAGGPSVFLFPPKPKDTLMISRTPEVTCVVVDVSHEDPEVKFNWYVDGVEVHNAKTKPREEQYNSTYRVVSVLTVLHQDWLNGKEYKCKVSNKALGAPIEKTISKAKGQPREPQVCTLPPSRDELTKNQVSLSCAVKGFYPSDIAVEWESNGQPENNYKTTPPVLDSDGSFFLVSKLTVDKSRWQQGNVFSCSVMHEALHNRFTQKSLSLSPG

SEQ ID NO: 726 - protein, 1019 aa, synthetic construct
  REGION 1..1019: note = FMC63_VK-x-CH1/Q38E/S183K/knob/PGLALA/41BBL
DIQMTQTTSSLSASLGDRVTISCRASQDISKYLNWYQEKPDGTVKLLIYHTSRLHSGVPSRFSGSGSGTDYSLTISNLEQEDIATYFCQQGNTLPYTFGGGTKVEIKSSASTKGPSVFPLAPSSKSTSGGTAALGCLVKDYFPEPVTVSWNSGALTSGVHTFPAVLQSSGLYSLKSVVTVPSSSLGTQTYICNVNHKPSNTKVDKKVEPKSCDKTHTCPPCPAPEAAGGPSVFLFPPKPKDTLMISRTPEVTCVVVDVSHEDPEVKFNWYVDGVEVHNAKTKPREEQYNSTYRVVSVLTVLHQDWLNGKEYKCKVSNKALGAPIEKTISKAKGQPREPQVYTLPPCRDELTKNQVSLWCLVKGFYPSDIAVEWESNGQPENNYKTTPPVLDSDGSFFLYSKLTVDKSRWQQGNVFSCSVMHEALHNHYTQKSLSLSPGGGGSGGGGSREGPELSPDDPAGLLDLRQGMFAQLVAQNVLLIDGPLSWYSDPGLAGVSLTGGLSYKEDTKELVVAKAGVYYVFFQLELRRVVAGEGSGSVSLALHLQPLRSAAGAAALALTVDLPPASSEARNSAFGFQGRLLHLSAGQRLGVHLHTEARARHAWQLTQGATVLGLFRVTPEIPAGLPSPRSEGGGGSGGGGSREGPELSPDDPAGLLDLRQGMFAQLVAQNVLLIDGPLSWYSDPGLAGVSLTGGLSYKEDTKELVVAKAGVYYVFFQLELRRVVAGEGSGSVSLALHLQPLRSAAGAAALALTVDLPPASSEARNSAFGFQGRLLHLSAGQRLGVHLHTEARARHAWQLTQGATVLGLFRVTPEIPAGLPSPRSEGGGGSGGGGSREGPELSPDDPAGLLDLRQGMFAQLVAQNVLLIDGPLSWYSDPGLAGVSLTGGLSYKEDTKELVVAKAGVYYVFFQLELRRVVAGEGSGSVSLALHLQPLRSAAGAAALALTVDLPPASSEARNSAFGFQGRLLHLSAGQRLGVHLHTEARARHAWQLTQGATVLGLFRVTPEIPAGLPSPRSE

SEQ ID NO: 727 - protein, 1019 aa, synthetic construct
  REGION 1..1019: note = FMC63_VK-x-CH1/Q38K/S183K/knob/PGLALA/41BBL
DIQMTQTTSSLSASLGDRVTISCRASQDISKYLNWYQKKPDGTVKLLIYHTSRLHSGVPSRFSGSGSGTDYSLTISNLEQEDIATYFCQQGNTLPYTFGGGTKVEIKSSASTKGPSVFPLAPSSKSTSGGTAALGCLVKDYFPEPVTVSWNSGALTSGVHTFPAVLQSSGLYSLKSVVTVPSSSLGTQTYICNVNHKPSNTKVDKKVEPKSCDKTHTCPPCPAPEAAGGPSVFLFPPKPKDTLMISRTPEVTCVVVDVSHEDPEVKFNWYVDGVEVHNAKTKPREEQYNSTYRVVSVLTVLHQDWLNGKEYKCKVSNKALGAPIEKTISKAKGQPREPQVYTLPPCRDELTKNQVSLWCLVKGFYPSDIAVEWESNGQPENNYKTTPPVLDSDGSFFLYSKLTVDKSRWQQGNVFSCSVMHEALHNHYTQKSLSLSPGGGGSGGGGSREGPELSPDDPAGLLDLRQGMFAQLVAQNVLLIDGPLSWYSDPGLAGVSLTGGLSYKEDTKELVVAKAGVYYVFFQLELRRVVAGEGSGSVSLALHLQPLRSAAGAAALALTVDLPPASSEARNSAFGFQGRLLHLSAGQRLGVHLHTEARARHAWQLTQGATVLGLFRVTPEIPAGLPSPRSEGGGGSGGGGSREGPELSPDDPAGLLDLRQGMFAQLVAQNVLLIDGPLSWYSDPGLAGVSLTGGLSYKEDTKELVVAKAGVYYVFFQLELRRVVAGEGSGSVSLALHLQPLRSAAGAAALALTVDLPPASSEARNSAFGFQGRLLHLSAGQRLGVHLHTEARARHAWQLTQGATVLGLFRVTPEIPAGLPSPRSEGGGGSGGGGSREGPELSPDDPAGLLDLRQGMFAQLVAQNVLLIDGPLSWYSDPGLAGVSLTGGLSYKEDTKELVVAKAGVYYVFFQLELRRVVAGEGSGSVSLALHLQPLRSAAGAAALALTVDLPPASSEARNSAFGFQGRLLHLSAGQRLGVHLHTEARARHAWQLTQGATVLGLFRVTPEIPAGLPSPRSE

SEQ ID NO: 728 - protein, 605 aa, synthetic construct
  REGION 1..605: note = FMC63_VH-CH1/N84S/K147E/K213E/CLD201/hole/PGLALA/RF
EVKLQESGPGLVAPSQSLSVTCTVSGVSLPDYGVSWIRQPPRKGLEWLGVIWGSETTYYNSALKSRLTIIKDNSKSQVFLKMSSLQTDDTAIYYCAKHYYYGGSYAMDYWGQGTSVTVSSASTKGPSVFPLAPSSKSTSGGTAALGCLVEDYFPEPVTVSWNSGALTSGVHTFPAVLQSSGLYSLSSVVTVPSSSLGTQTYICNVNHKPSNTKVDEKVEPKSCTDWSPYADQSIKVRISLKSALGDKAYEWNDNEMYLFRSSVAYAMRQYFLKVKNQMILFGEEDVRVANLKPRISFNFFVTAPKNVSDIIPRTEVEKAIRMSRSRINDAFRLNDNSLEFLGIQPTLGPPNQPPVSTSTSPTRSMAPGAVHLPQPVSTRDKTHTCPPCPAPEAAGGPSVFLFPPKPKDTLMISRTPEVTCVVVDVSHEDPEVKFNWYVDGVEVHNAKTKPREEQYNSTYRVVSVLTVLHQDWLNGKEYKCKVSNKALGAPIEKTISKAKGQPREPQVCTLPPSRDELTKNQVSLSCAVKGFYPSDIAVEWESNGQPENNYKTTPPVLDSDGSFFLVSKLTVDKSRWQQGNVFSCSVMHEALHNRFTQKSLSLSPG

SEQ ID NO: 729 - protein, 1018 aa, synthetic construct
  REGION 1..1018: note = R_VK-x-CH1/knob/PGLALA/41BBL
QIVLSQSPAILSASPGEKVTMTCRASSSVSYIHWFQQKPGSSPKPWIYATSNLASGVPVRFSGSGSGTSYSLTISRVEAEDAATYYCQQWTSNPPTFGGGTKVEIKSSASTKGPSVFPLAPSSKSTSGGTAALGCLVKDYFPEPVTVSWNSGALTSGVHTFPAVLQSSGLYSLSSVVTVPSSSLGTQTYICNVNHKPSNTKVDKKVEPKSCDKTHTCPPCPAPEAAGGPSVFLFPPKPKDTLMISRTPEVTCVVVDVSHEDPEVKFNWYVDGVEVHNAKTKPREEQYNSTYRVVSVLTVLHQDWLNGKEYKCKVSNKALGAPIEKTISKAKGQPREPQVYTLPPCRDELTKNQVSLWCLVKGFYPSDIAVEWESNGQPENNYKTTPPVLDSDGSFFLYSKLTVDKSRWQQGNVFSCSVMHEALHNHYTQKSLSLSPGGGGSGGGGSREGPELSPDDPAGLLDLRQGMFAQLVAQNVLLIDGPLSWYSDPGLAGVSLTGGLSYKEDTKELVVAKAGVYYVFFQLELRRVVAGEGSGSVSLALHLQPLRSAAGAAALALTVDLPPASSEARNSAFGFQGRLLHLSAGQRLGVHLHTEARARHAWQLTQGATVLGLFRVTPEIPAGLPSPRSEGGGGSGGGGSREGPELSPDDPAGLLDLRQGMFAQLVAQNVLLIDGPLSWYSDPGLAGVSLTGGLSYKEDTKELVVAKAGVYYVFFQLELRRVVAGEGSGSVSLALHLQPLRSAAGAAALALTVDLPPASSEARNSAFGFQGRLLHLSAGQRLGVHLHTEARARHAWQLTQGATVLGLFRVTPEIPAGLPSPRSEGGGGSGGGGSREGPELSPDDPAGLLDLRQGMFAQLVAQNVLLIDGPLSWYSDPGLAGVSLTGGLSYKEDTKELVVAKAGVYYVFFQLELRRVVAGEGSGSVSLALHLQPLRSAAGAAALALTVDLPPASSEARNSAFGFQGRLLHLSAGQRLGVHLHTEARARHAWQLTQGATVLGLFRVTPEIPAGLPSPRSE

SEQ ID NO: 730 - protein, 605 aa, synthetic construct
  REGION 1..605: note = FMC63_VH-CH1/N84S/Q39K/S183E/CLD201/hole/PGLALA/RF
EVKLQESGPGLVAPSQSLSVTCTVSGVSLPDYGVSWIRKPPRKGLEWLGVIWGSETTYYNSALKSRLTIIKDNSKSQVFLKMSSLQTDDTAIYYCAKHYYYGGSYAMDYWGQGTSVTVSSASTKGPSVFPLAPSSKSTSGGTAALGCLVKDYFPEPVTVSWNSGALTSGVHTFPAVLQSSGLYSLESVVTVPSSSLGTQTYICNVNHKPSNTKVDKKVEPKSCTDWSPYADQSIKVRISLKSALGDKAYEWNDNEMYLFRSSVAYAMRQYFLKVKNQMILFGEEDVRVANLKPRISFNFFVTAPKNVSDIIPRTEVEKAIRMSRSRINDAFRLNDNSLEFLGIQPTLGPPNQPPVSTSTSPTRSMAPGAVHLPQPVSTRDKTHTCPPCPAPEAAGGPSVFLFPPKPKDTLMISRTPEVTCVVVDVSHEDPEVKFNWYVDGVEVHNAKTKPREEQYNSTYRVVSVLTVLHQDWLNGKEYKCKVSNKALGAPIEKTISKAKGQPREPQVCTLPPSRDELTKNQVSLSCAVKGFYPSDIAVEWESNGQPENNYKTTPPVLDSDGSFFLVSKLTVDKSRWQQGNVFSCSVMHEALHNRFTQKSLSLSPG

SEQ ID NO: 731 - protein, 1018 aa, synthetic construct
  REGION 1..1018: note = R_VK-x-CH1/Q38E/S183K/knob/PGLALA/41BBL
QIVLSQSPAILSASPGEKVTMTCRASSSVSYIHWFQEKPGSSPKPWIYATSNLASGVPVRFSGSGSGTSYSLTISRVEAEDAATYYCQQWTSNPPTFGGGTKVEIKSSASTKGPSVFPLAPSSKSTSGGTAALGCLVKDYFPEPVTVSWNSGALTSGVHTFPAVLQSSGLYSLKSVVTVPSSSLGTQTYICNVNHKPSNTKVDKKVEPKSCDKTHTCPPCPAPEAAGGPSVFLFPPKPKDTLMISRTPEVTCVVVDVSHEDPEVKFNWYVDGVEVHNAKTKPREEQYNSTYRVVSVLTVLHQDWLNGKEYKCKVSNKALGAPIEKTISKAKGQPREPQVYTLPPCRDELTKNQVSLWCLVKGFYPSDIAVEWESNGQPENNYKTTPPVLDSDGSFFLYSKLTVDKSRWQQGNVFSCSVMHEALHNHYTQKSLSLSPGGGGSGGGGSREGPELSPDDPAGLLDLRQGMFAQLVAQNVLLIDGPLSWYSDPGLAGVSLTGGLSYKEDTKELVVAKAGVYYVFFQLELRRVVAGEGSGSVSLALHLQPLRSAAGAAALALTVDLPPASSEARNSAFGFQGRLLHLSAGQRLGVHLHTEARARHAWQLTQGATVLGLFRVTPEIPAGLPSPRSEGGGGSGGGGSREGPELSPDDPAGLLDLRQGMFAQLVAQNVLLIDGPLSWYSDPGLAGVSLTGGLSYKEDTKELVVAKAGVYYVFFQLELRRVVAGEGSGSVSLALHLQPLRSAAGAAALALTVDLPPASSEARNSAFGFQGRLLHLSAGQRLGVHLHTEARARHAWQLTQGATVLGLFRVTPEIPAGLPSPRSEGGGGSGGGGSREGPELSPDDPAGLLDLRQGMFAQLVAQNVLLIDGPLSWYSDPGLAGVSLTGGLSYKEDTKELVVAKAGVYYVFFQLELRRVVAGEGSGSVSLALHLQPLRSAAGAAALALTVDLPPASSEARNSAFGFQGRLLHLSAGQRLGVHLHTEARARHAWQLTQGATVLGLFRVTPEIPAGLPSPRSE

SEQ ID NO: 732 - protein, 1018 aa, synthetic construct
  REGION 1..1018: note = R_VK-x-CH1/Q38K/S183K/knob/PGLALA/41BBL
QIVLSQSPAILSASPGEKVTMTCRASSSVSYIHWFQKKPGSSPKPWIYATSNLASGVPVRFSGSGSGTSYSLTISRVEAEDAATYYCQQWTSNPPTFGGGTKVEIKSSASTKGPSVFPLAPSSKSTSGGTAALGCLVKDYFPEPVTVSWNSGALTSGVHTFPAVLQSSGLYSLKSVVTVPSSSLGTQTYICNVNHKPSNTKVDKKVEPKSCDKTHTCPPCPAPEAAGGPSVFLFPPKPKDTLMISRTPEVTCVVVDVSHEDPEVKFNWYVDGVEVHNAKTKPREEQYNSTYRVVSVLTVLHQDWLNGKEYKCKVSNKALGAPIEKTISKAKGQPREPQVYTLPPCRDELTKNQVSLWCLVKGFYPSDIAVEWESNGQPENNYKTTPPVLDSDGSFFLYSKLTVDKSRWQQGNVFSCSVMHEALHNHYTQKSLSLSPGGGGSGGGGSREGPELSPDDPAGLLDLRQGMFAQLVAQNVLLIDGPLSWYSDPGLAGVSLTGGLSYKEDTKELVVAKAGVYYVFFQLELRRVVAGEGSGSVSLALHLQPLRSAAGAAALALTVDLPPASSEARNSAFGFQGRLLHLSAGQRLGVHLHTEARARHAWQLTQGATVLGLFRVTPEIPAGLPSPRSEGGGGSGGGGSREGPELSPDDPAGLLDLRQGMFAQLVAQNVLLIDGPLSWYSDPGLAGVSLTGGLSYKEDTKELVVAKAGVYYVFFQLELRRVVAGEGSGSVSLALHLQPLRSAAGAAALALTVDLPPASSEARNSAFGFQGRLLHLSAGQRLGVHLHTEARARHAWQLTQGATVLGLFRVTPEIPAGLPSPRSEGGGGSGGGGSREGPELSPDDPAGLLDLRQGMFAQLVAQNVLLIDGPLSWYSDPGLAGVSLTGGLSYKEDTKELVVAKAGVYYVFFQLELRRVVAGEGSGSVSLALHLQPLRSAAGAAALALTVDLPPASSEARNSAFGFQGRLLHLSAGQRLGVHLHTEARARHAWQLTQGATVLGLFRVTPEIPAGLPSPRSE

SEQ ID NO: 733 - protein, 213 aa, synthetic construct
  REGION 1..213: note = R_VK-Ck/E123R/Q124K
QIVLSQSPAILSASPGEKVTMTCRASSSVSYIHWFQQKPGSSPKPWIYATSNLASGVPVRFSGSGSGTSYSLTISRVEAEDAATYYCQQWTSNPPTFGGGTKLEIKRTVAAPSVFIFPPSDRKLKSGTASVVCLLNNFYPREAKVQWKVDNALQSGNSQESVTEQDSKDSTYSLSSTLTLSKADYEKHKVYACEVTHQGLSSPVTKSFNRGEC

SEQ ID NO: 734 - protein, 227 aa, synthetic construct
  REGION 1..227: note = FMC63_VH-x-CK/N84S
EVKLQESGPGLVAPSQSLSVTCTVSGVSLPDYGVSWIRQPPRKGLEWLGVIWGSETTYYNSALKSRLTIIKDNSKSQVFLKMSSLQTDDTAIYYCAKHYYYGGSYAMDYWGQGTLVTVSSASVAAPSVFIFPPSDEQLKSGTASVVCLLNNFYPREAKVQWKVDNALQSGNSQESVTEQDSKDSTYSLSSTLTLSKADYEKHKVYACEVTHQGLSSPVTKSFNRGEC

SEQ ID NO: 735 - protein, 213 aa, synthetic construct
  REGION 1..213: note = R_VK-CK/Q38E/V133K
QIVLSQSPAILSASPGEKVTMTCRASSSVSYIHWFQEKPGSSPKPWIYATSNLASGVPVRFSGSGSGTSYSLTISRVEAEDAATYYCQQWTSNPPTFGGGTKLEIKRTVAAPSVFIFPPSDEQLKSGTASVKCLLNNFYPREAKVQWKVDNALQSGNSQESVTEQDSKDSTYSLSSTLTLSKADYEKHKVYACEVTHQGLSSPVTKSFNRGEC

SEQ ID NO: 736 - protein, 227 aa, synthetic construct
  REGION 1..227: note = FMC63_VH-x-CK/N84S/Q39K/V133E
EVKLQESGPGLVAPSQSLSVTCTVSGVSLPDYGVSWIRKPPRKGLEWLGVIWGSETTYYNSALKSRLTIIKDNSKSQVFLKMSSLQTDDTAIYYCAKHYYYGGSYAMDYWGQGTLVTVSSASVAAPSVFIFPPSDEQLKSGTASVECLLNNFYPREAKVQWKVDNALQSGNSQESVTEQDSKDSTYSLSSTLTLSKADYEKHKVYACEVTHQGLSSPVTKSFNRGEC

SEQ ID NO: 737 - protein, 227 aa, synthetic construct
  REGION 1..227: note = FMC63_VH-x-CK/N84S/Q39E/V133E
EVKLQESGPGLVAPSQSLSVTCTVSGVSLPDYGVSWIREPPRKGLEWLGVIWGSETTYYNSALKSRLTIIKDNSKSQVFLKMSSLQTDDTAIYYCAKHYYYGGSYAMDYWGQGTLVTVSSASVAAPSVFIFPPSDEQLKSGTASVECLLNNFYPREAKVQWKVDNALQSGNSQESVTEQDSKDSTYSLSSTLTLSKADYEKHKVYACEVTHQGLSSPVTKSFNRGEC

SEQ ID NO: 738 - protein, 214 aa, synthetic construct
  REGION 1..214: note = FMC63_VK-Ck/E123R/Q124K
DIQMTQTTSSLSASLGDRVTISCRASQDISKYLNWYQQKPDGTVKLLIYHTSRLHSGVPSRFSGSGSGTDYSLTISNLEQEDIATYFCQQGNTLPYTFGGGTKLEIKRTVAAPSVFIFPPSDRKLKSGTASVVCLLNNFYPREAKVQWKVDNALQSGNSQESVTEQDSKDSTYSLSSTLTLSKADYEKHKVYACEVTHQGLSSPVTKSFNRGEC

SEQ ID NO: 739 - protein, 228 aa, synthetic construct
  REGION 1..228: note = R_VH-x-CK
QVQLQQPGAELVKPGASVKMSCKASGYTFTSYNMHWVKQTPGRGLEWIGAIYPGNGDTSYNQKFKGKATLTADKSSSTAYMQLSSLTSEDSAVYYCARSTYYGGDWYFNVWGAGTLVTVSSASVAAPSVFIFPPSDEQLKSGTASVVCLLNNFYPREAKVQWKVDNALQSGNSQESVTEQDSKDSTYSLSSTLTLSKADYEKHKVYACEVTHQGLSSPVTKSFNRGEC

SEQ ID NO: 740 - protein, 214 aa, synthetic construct
  REGION 1..214: note = FMC63_VK-CK/Q38E/V133K
DIQMTQTTSSLSASLGDRVTISCRASQDISKYLNWYQEKPDGTVKLLIYHTSRLHSGVPSRFSGSGSGTDYSLTISNLEQEDIATYFCQQGNTLPYTFGGGTKLEIKRTVAAPSVFIFPPSDEQLKSGTASVKCLLNNFYPREAKVQWKVDNALQSGNSQESVTEQDSKDSTYSLSSTLTLSKADYEKHKVYACEVTHQGLSSPVTKSFNRGEC

SEQ ID NO: 741 - protein, 228 aa, synthetic construct
  REGION 1..228: note = R_VH-x-CK/Q39K/V133E
QVQLQQPGAELVKPGASVKMSCKASGYTFTSYNMHWVKKTPGRGLEWIGAIYPGNGDTSYNQKFKGKATLTADKSSSTAYMQLSSLTSEDSAVYYCARSTYYGGDWYFNVWGAGTLVTVSSASVAAPSVFIFPPSDEQLKSGTASVECLLNNFYPREAKVQWKVDNALQSGNSQESVTEQDSKDSTYSLSSTLTLSKADYEKHKVYACEVTHQGLSSPVTKSFNRGEC

SEQ ID NO: 742 - protein, 228 aa, synthetic construct
  REGION 1..228: note = R_VH-x-CK/Q39E/V133E
QVQLQQPGAELVKPGASVKMSCKASGYTFTSYNMHWVKETPGRGLEWIGAIYPGNGDTSYNQKFKGKATLTADKSSSTAYMQLSSLTSEDSAVYYCARSTYYGGDWYFNVWGAGTLVTVSSASVAAPSVFIFPPSDEQLKSGTASVECLLNNFYPREAKVQWKVDNALQSGNSQESVTEQDSKDSTYSLSSTLTLSKADYEKHKVYACEVTHQGLSSPVTKSFNRGEC

SEQ ID NO: 743 - protein, 216 aa, synthetic construct
  REGION 1..216: note = EM901-L1_BCMA/VK-CK
EIVLTQSPGTLSLSPGERATLSCRASQSVSDEYLSWYQQKPGQAPRLLIHSASTRATGIPDRFSGSGSGTDFTLAISRLEPEDFAVYYCQQYGYPPDFTFGQGTKVEIKRTVAAPSVFIFPPSDRKLKSGTASVVCLLNNFYPREAKVQWKVDNALQSGNSQESVTEQDSKDSTYSLSSTLTLSKADYEKHKVYACEVTHQGLSSPVTKSFNRGEC

SEQ ID NO: 744 - protein, 232 aa, synthetic construct; identical to SEQ ID NO: 39
  REGION 1..232: note = EM901-L2_CD3/VH-CL

SEQ ID NO: 745 - protein, 670 aa, synthetic construct
  REGION 1..670: note = EM901-H1_BCMA/VH-CH1_CD3/VL-CH1
EVQLLESGGGLVQPGGSLRLSCAASGFTFSDNAMGWVRQAPGKGLEWVSAISGPGSSTYYADSVKGRFTISRDNSKNTLYLQMNSLRAEDTAVYYCAKVLGWFDYWGQGTLVTVSSASTKGPSVFPLAPSSKSTSGGTAALGCLVEDYFPEPVTVSWNSGALTSGVHTFPAVLQSSGLYSLSSVVTVPSSSLGTQTYICNVNHKPSNTKVDEKVEPKSCDGGGGSGGGGSQAVVTQEPSLTVSPGGTVTLTCGSSTGAVTTSNYANWVQEKPGQAFRGLIGGTNKRAPGTPARFSGSLLGGKAALTLSGAQPEDEAEYYCALWYSNLWVFGGGTKLTVLSSASTKGPSVFPLAPSSKSTSGGTAALGCLVKDYFPEPVTVSWNSGALTSGVHTFPAVLQSSGLYSLSSVVTVPSSSLGTQTYICNVNHKPSNTKVDKKVEPKSCDKTHTCPPCPAPEAAGGPSVFLFPPKPKDTLMISRTPEVTCVVVDVSHEDPEVKFNWYVDGVEVHNAKTKPREEQYNSTYRVVSVLTVLHQDWLNGKEYKCKVSNKALGAPIEKTISKAKGQPREPQVYTLPPCRDELTKNQVSLWCLVKGFYPSDIAVEWESNGQPENNYKTTPPVLDSDGSFFLYSKLTVDKSRWQQGNVFSCSVMHEALHNHYTQKSLSLSPG

SEQ ID NO: 746 - protein, 445 aa, synthetic construct
  REGION 1..445: note = EM901-H2_BCMA/VH-CH1
EVQLLESGGGLVQPGGSLRLSCAASGFTFSDNAMGWVRQAPGKGLEWVSAISGPGSSTYYADSVKGRFTISRDNSKNTLYLQMNSLRAEDTAVYYCAKVLGWFDYWGQGTLVTVSSASTKGPSVFPLAPSSKSTSGGTAALGCLVEDYFPEPVTVSWNSGALTSGVHTFPAVLQSSGLYSLSSVVTVPSSSLGTQTYICNVNHKPSNTKVDEKVEPKSCDKTHTCPPCPAPEAAGGPSVFLFPPKPKDTLMISRTPEVTCVVVDVSHEDPEVKFNWYVDGVEVHNAKTKPREEQYNSTYRVVSVLTVLHQDWLNGKEYKCKVSNKALGAPIEKTISKAKGQPREPQVCTLPPSRDELTKNQVSLSCAVKGFYPSDIAVEWESNGQPENNYKTTPPVLDSDGSFFLVSKLTVDKSRWQQGNVFSCSVMHEALHNHYTQKSLSLSPG

SEQ ID NO: 747 - protein, 221 aa, synthetic construct; identical to SEQ ID NO: 73
  REGION 1..221: note = Fc6/hole/PGLALA/RF

SEQ ID NO: 748 - protein, 216 aa, synthetic construct
  REGION 1..216: note = 42-L_BCMA/VK-CK
EIVLTQSPGTLSLSPGERATLSCRASQSVSDEYLSWYQQKPGQAPRLLIHSASTRATGIPDRFSGSGSGTDFTLAISRLEPEDFAVYYCQQYGYPPDFTFGQGTKVEIKRTVAAPSVFIFPPSDEQLKSGTASVVCLLNNFYPREAKVQWKVDNALQSGNSQESVTEQDSKDSTYSLSSTLTLSKADYEKHKVYACEVTHQGLSSPVTKSFNRGEC

SEQ ID NO: 749 - protein, 445 aa, synthetic construct
  REGION 1..445: note = 42-H_BCMA/VH-CH1/knob/PGLALA
EVQLLESGGGLVQPGGSLRLSCAASGFTFSDNAMGWVRQAPGKGLEWVSAISGPGSSTYYADSVKGRFTISRDNSKNTLYLQMNSLRAEDTAVYYCAKVLGWFDYWGQGTLVTVSSASTKGPSVFPLAPSSKSTSGGTAALGCLVKDYFPEPVTVSWNSGALTSGVHTFPAVLQSSGLYSLSSVVTVPSSSLGTQTYICNVNHKPSNTKVDKKVEPKSCDKTHTCPPCPAPEAAGGPSVFLFPPKPKDTLMISRTPEVTCVVVDVSHEDPEVKFNWYVDGVEVHNAKTKPREEQYNSTYRVVSVLTVLHQDWLNGKEYKCKVSNKALGAPIEKTISKAKGQPREPQVYTLPPCRDELTKNQVSLWCLVKGFYPSDIAVEWESNGQPENNYKTTPPVLDSDGSFFLYSKLTVDKSRWQQGNVFSCSVMHEALHNHYTQKSLSLSPG

SEQ ID NO: 750 - protein, 219 aa, synthetic construct; identical to SEQ ID NO: 38
  REGION 1..219: note = Glofitamab-L1_CD20/VK-CK

SEQ ID NO: 751 - protein, 232 aa, synthetic construct; identical to SEQ ID NO: 39
  REGION 1..232: note = Glofitamab-L2_CD3/VH-CL

SEQ ID NO: 752 - protein, 673 aa, synthetic construct; identical to SEQ ID NO: 40
  REGION 1..673: note = Glofitamab-H1_CD20/VH-CH1_CD3/VL-CH1

SEQ ID NO: 753 - protein, 448 aa, synthetic construct; identical to SEQ ID NO: 41
  REGION 1..448: note = Glofitamab-H2_CD20/VH-CH1

SEQ ID NO: 754 - protein, 219 aa, synthetic construct; identical to SEQ ID NO: 46
  REGION 1..219: note = Ob-L_CD20/VK-CK

SEQ ID NO: 755 - protein, 448 aa, synthetic construct; identical to SEQ ID NO: 47
  REGION 1..448: note = Ob-H_CD20/VH-CH1/knob/PGLALA

SEQ ID NO: 756 - protein, 111 aa, synthetic construct
  REGION 1..111: note = 9-K4A_VK
DIVLTQSPASLAVSLGQRATISCRASKSVSTSGYSYMHWYQQKPGQPPKLLIYLASNLESGVPARFSGSGSGTDFTLNIHPVEEEDAATYYCQHSRELPPTFGGGTKLEIK

SEQ ID NO: 757 - protein, 118 aa, synthetic construct
  REGION 1..118: note = 9-K4A_VH
QAYLQQSGAELVRPGASVKMSCKASGYTFPNYSFHWVKQTPRQGLEWIGAIYPGNDDTSYNQRFKGKATLTVDKSSSTAYMQLSSLTSEDSAVYFCARDYSNYPFDCWGQGTTLTVSS

SEQ ID NO: 758 - protein, 111 aa, synthetic construct; identical to SEQ ID NO: 756
  REGION 1..111: note = 5-P24_VK

SEQ ID NO: 759 - protein, 118 aa, synthetic construct
  REGION 1..118: note = 5-P24_VH
QAYLQQSGAELVRPGASVKMSCKASGYTFTSYSMHWVKQTPRQGLEWIGAIYPGNGDTSYTQKFKGKATLTVDKSSSTAYMQLSSLTSEDSAVYFCARDYSNYPFDYWGQGTTLTVSS

SEQ ID NO: 760 - protein, 111 aa, synthetic construct
  REGION 1..111: note = 3-P7A_VK
DIVLTQSPASLPVSLGQRATISCRASKSVSTSGYSYMHWYQQRPGQPPKLLIYLASNLESGVPARFSASGSGTDFTLNIHPVEEEDAATYYCQHSRELPPTFGGGTKVEIK

SEQ ID NO: 761 - protein, 118 aa, synthetic construct
  REGION 1..118: note = 3-P7A_VH
QAYLQQSGAELVRPGASVKMSCKASGYTFTSYSMHWVKQTPRQGLEWIGAIYPGNDDTSYNQKFKGKATLTVDKSSSTAYMQLSSLTSEDSAVYFCTRDYTNYPFDYWGQGTTLTVSS

SEQ ID NO: 762 - protein, 112 aa, synthetic construct
  REGION 1..112: note = 10-L12A_VK
DIVLTQSPASLAVSLGQRATISCRASKSVSTSGYSYLHWYQQKPGQPPKLLLIYLASNLESGVPARFSGSGSGTDFTLNIHPVEEEDAATYYCQHSRELPPTFGGGTKLEIK

SEQ ID NO: 763 - protein, 118 aa, synthetic construct
  REGION 1..118: note = 10-L12A_VH
QAYLQQSGAELVRPGASVKMSCKASGYTFTSYSMHWVKQTPRQGLEWIGAIYPGNGDTSYNQKFKGKATLTVDKSSSTAYMQLSSLTSEDSAVYFCTRDYSNYPFDYWGQGTTLTVSS

SEQ ID NO: 764 - protein, 723 aa, synthetic construct
  REGION 1..723: note = ACE2 ECD (18-740)
QSTIEEQAKTFLDKFNHEAEDLFYQSSLASWNYNTNITEENVQNMNNAGDKWSAFLKEQSTLAQMYPLQEIQNLTVKLQLQALQQNGSSVLSEDKSKRLNTILNTMSTIYSTGKVCNPDNPQECLLLEPGLNEIMANSLDYNERLWAWESWRSEVGKQLRPLYEEYVVLKNEMARANHYEDYGDYWRGDYEVNGVDGYDYSRGQLIEDVEHTFEEIKPLYEHLHAYVRAKLMNAYPSYISPIGCLPAHLLGDMWGRFWTNLYSLTVPFGQKPNIDVTDAMVDQAWDAQRIFKEAEKFFVSVGLPNMTQGFWENSMLTDPGNVQKAVCHPTAWDLGKGDFRILMCTKVTMDDFLTAHHEMGHIQYDMAYAAQPFLLRNGANEGFHEAVGEIMSLSAATPKHLKSIGLLSPDFQEDNETEINFLLKQALTIVGTLPFTYMLEKWRWMVFKGEIPKDQWMKKWWEMKREIVGVVEPVPHDETYCDPASLFHVSNDYSFIRYYTRTLYQFQFQEALCQAAKHEGPLHKCDISNSTEAGQKLFNMLRLGKSEPWTLALENVVGAKNMNVRPLLNYFEPLFTWLKDQNKNSFVGWSTDWSPYADQSIKVRISLKSALGDKAYEWNDNEMYLFRSSVAYAMRQYFLKVKNQMILFGEEDVRVANLKPRISFNFFVTAPKNVSDIIPRTEVEKAIRMSRSRINDAFRLNDNSLEFLGIQPTLGPPNQPPVS

SEQ ID NO: 765 - protein, 723 aa, synthetic construct
  REGION 1..723: note = ACE2 ECD (18-740) R273Q
QSTIEEQAKTFLDKFNHEAEDLFYQSSLASWNYNTNITEENVQNMNNAGDKWSAFLKEQSTLAQMYPLQEIQNLTVKLQLQALQQNGSSVLSEDKSKRLNTILNTMSTIYSTGKVCNPDNPQECLLLEPGLNEIMANSLDYNERLWAWESWRSEVGKQLRPLYEEYVVLKNEMARANHYEDYGDYWRGDYEVNGVDGYDYSRGQLIEDVEHTFEEIKPLYEHLHAYVRAKLMNAYPSYISPIGCLPAHLLGDMWGQFWTNLYSLTVPFGQKPNIDVTDAMVDQAWDAQRIFKEAEKFFVSVGLPNMTQGFWENSMLTDPGNVQKAVCHPTAWDLGKGDFRILMCTKVTMDDFLTAHHEMGHIQYDMAYAAQPFLLRNGANEGFHEAVGEIMSLSAATPKHLKSIGLLSPDFQEDNETEINFLLKQALTIVGTLPFTYMLEKWRWMVFKGEIPKDQWMKKWWEMKREIVGVVEPVPHDETYCDPASLFHVSNDYSFIRYYTRTLYQFQFQEALCQAAKHEGPLHKCDISNSTEAGQKLFNMLRLGKSEPWTLALENVVGAKNMNVRPLLNYFEPLFTWLKDQNKNSFVGWSTDWSPYADQSIKVRISLKSALGDKAYEWNDNEMYLFRSSVAYAMRQYFLKVKNQMILFGEEDVRVANLKPRISFNFFVTAPKNVSDIIPRTEVEKAIRMSRSRINDAFRLNDNSLEFLGIQPTLGPPNQPPVS

SEQ ID NO: 766 - protein, 723 aa, synthetic construct
  REGION 1..723: note = ACE2 ECD (18-740) R273A
QSTIEEQAKTFLDKFNHEAEDLFYQSSLASWNYNTNITEENVQNMNNAGDKWSAFLKEQSTLAQMYPLQEIQNLTVKLQLQALQQNGSSVLSEDKSKRLNTILNTMSTIYSTGKVCNPDNPQECLLLEPGLNEIMANSLDYNERLWAWESWRSEVGKQLRPLYEEYVVLKNEMARANHYEDYGDYWRGDYEVNGVDGYDYSRGQLIEDVEHTFEEIKPLYEHLHAYVRAKLMNAYPSYISPIGCLPAHLLGDMWGAFWTNLYSLTVPFGQKPNIDVTDAMVDQAWDAQRIFKEAEKFFVSVGLPNMTQGFWENSMLTDPGNVQKAVCHPTAWDLGKGDFRILMCTKVTMDDFLTAHHEMGHIQYDMAYAAQPFLLRNGANEGFHEAVGEIMSLSAATPKHLKSIGLLSPDFQEDNETEINFLLKQALTIVGTLPFTYMLEKWRWMVFKGEIPKDQWMKKWWEMKREIVGVVEPVPHDETYCDPASLFHVSNDYSFIRYYTRTLYQFQFQEALCQAAKHEGPLHKCDISNSTEAGQKLFNMLRLGKSEPWTLALENVVGAKNMNVRPLLNYFEPLFTWLKDQNKNSFVGWSTDWSPYADQSIKVRISLKSALGDKAYEWNDNEMYLFRSSVAYAMRQYFLKVKNQMILFGEEDVRVANLKPRISFNFFVTAPKNVSDIIPRTEVEKAIRMSRSRINDAFRLNDNSLEFLGIQPTLGPPNQPPVS

SEQ ID NO: 767 - protein, 723 aa, synthetic construct
  REGION 1..723: note = ACE2 ECD (18-740) R273G
QSTIEEQAKTFLDKFNHEAEDLFYQSSLASWNYNTNITEENVQNMNNAGDKWSAFLKEQSTLAQMYPLQEIQNLTVKLQLQALQQNGSSVLSEDKSKRLNTILNTMSTIYSTGKVCNPDNPQECLLLEPGLNEIMANSLDYNERLWAWESWRSEVGKQLRPLYEEYVVLKNEMARANHYEDYGDYWRGDYEVNGVDGYDYSRGQLIEDVEHTFEEIKPLYEHLHAYVRAKLMNAYPSYISPIGCLPAHLLGDMWGGFWTNLYSLTVPFGQKPNIDVTDAMVDQAWDAQRIFKEAEKFFVSVGLPNMTQGFWENSMLTDPGNVQKAVCHPTAWDLGKGDFRILMCTKVTMDDFLTAHHEMGHIQYDMAYAAQPFLLRNGANEGFHEAVGEIMSLSAATPKHLKSIGLLSPDFQEDNETEINFLLKQALTIVGTLPFTYMLEKWRWMVFKGEIPKDQWMKKWWEMKREIVGVVEPVPHDETYCDPASLFHVSNDYSFIRYYTRTLYQFQFQEALCQAAKHEGPLHKCDISNSTEAGQKLFNMLRLGKSEPWTLALENVVGAKNMNVRPLLNYFEPLFTWLKDQNKNSFVGWSTDWSPYADQSIKVRISLKSALGDKAYEWNDNEMYLFRSSVAYAMRQYFLKVKNQMILFGEEDVRVANLKPRISFNFFVTAPKNVSDIIPRTEVEKAIRMSRSRINDAFRLNDNSLEFLGIQPTLGPPNQPPVS

SEQ ID NO: 768 - protein, 723 aa, synthetic construct
  REGION 1..723: note = ACE2 ECD (18-740) R273V
QSTIEEQAKTFLDKFNHEAEDLFYQSSLASWNYNTNITEENVQNMNNAGDKWSAFLKEQSTLAQMYPLQEIQNLTVKLQLQALQQNGSSVLSEDKSKRLNTILNTMSTIYSTGKVCNPDNPQECLLLEPGLNEIMANSLDYNERLWAWESWRSEVGKQLRPLYEEYVVLKNEMARANHYEDYGDYWRGDYEVNGVDGYDYSRGQLIEDVEHTFEEIKPLYEHLHAYVRAKLMNAYPSYISPIGCLPAHLLGDMWGVFWTNLYSLTVPFGQKPNIDVTDAMVDQAWDAQRIFKEAEKFFVSVGLPNMTQGFWENSMLTDPGNVQKAVCHPTAWDLGKGDFRILMCTKVTMDDFLTAHHEMGHIQYDMAYAAQPFLLRNGANEGFHEAVGEIMSLSAATPKHLKSIGLLSPDFQEDNETEINFLLKQALTIVGTLPFTYMLEKWRWMVFKGEIPKDQWMKKWWEMKREIVGVVEPVPHDETYCDPASLFHVSNDYSFIRYYTRTLYQFQFQEALCQAAKHEGPLHKCDISNSTEAGQKLFNMLRLGKSEPWTLALENVVGAKNMNVRPLLNYFEPLFTWLKDQNKNSFVGWSTDWSPYADQSIKVRISLKSALGDKAYEWNDNEMYLFRSSVAYAMRQYFLKVKNQMILFGEEDVRVANLKPRISFNFFVTAPKNVSDIIPRTEVEKAIRMSRSRINDAFRLNDNSLEFLGIQPTLGPPNQPPVS

SEQ ID NO: 769 - protein, 723 aa, synthetic construct
  REGION 1..723: note = ACE2 ECD (18-740) H378A
QSTIEEQAKTFLDKFNHEAEDLFYQSSLASWNYNTNITEENVQNMNNAGDKWSAFLKEQSTLAQMYPLQEIQNLTVKLQLQALQQNGSSVLSEDKSKRLNTILNTMSTIYSTGKVCNPDNPQECLLLEPGLNEIMANSLDYNERLWAWESWRSEVGKQLRPLYEEYVVLKNEMARANHYEDYGDYWRGDYEVNGVDGYDYSRGQLIEDVEHTFEEIKPLYEHLHAYVRAKLMNAYPSYISPIGCLPAHLLGDMWGRFWTNLYSLTVPFGQKPNIDVTDAMVDQAWDAQRIFKEAEKFFVSVGLPNMTQGFWENSMLTDPGNVQKAVCHPTAWDLGKGDFRILMCTKVTMDDFLTAHHEMGAIQYDMAYAAQPFLLRNGANEGFHEAVGEIMSLSAATPKHLKSIGLLSPDFQEDNETEINFLLKQALTIVGTLPFTYMLEKWRWMVFKGEIPKDQWMKKWWEMKREIVGVVEPVPHDETYCDPASLFHVSNDYSFIRYYTRTLYQFQFQEALCQAAKHEGPLHKCDISNSTEAGQKLFNMLRLGKSEPWTLALENVVGAKNMNVRPLLNYFEPLFTWLKDQNKNSFVGWSTDWSPYADQSIKVRISLKSALGDKAYEWNDNEMYLFRSSVAYAMRQYFLKVKNQMILFGEEDVRVANLKPRISFNFFVTAPKNVSDIIPRTEVEKAIRMSRSRINDAFRLNDNSLEFLGIQPTLGPPNQPPVS

SEQ ID NO: 770 - protein, 723 aa, synthetic construct
  REGION 1..723: note = ACE2 ECD (18-740) E402A
QSTIEEQAKTFLDKFNHEAEDLFYQSSLASWNYNTNITEENVQNMNNAGDKWSAFLKEQSTLAQMYPLQEIQNLTVKLQLQALQQNGSSVLSEDKSKRLNTILNTMSTIYSTGKVCNPDNPQECLLLEPGLNEIMANSLDYNERLWAWESWRSEVGKQLRPLYEEYVVLKNEMARANHYEDYGDYWRGDYEVNGVDGYDYSRGQLIEDVEHTFEEIKPLYEHLHAYVRAKLMNAYPSYISPIGCLPAHLLGDMWGRFWTNLYSLTVPFGQKPNIDVTDAMVDQAWDAQRIFKEAEKFFVSVGLPNMTQGFWENSMLTDPGNVQKAVCHPTAWDLGKGDFRILMCTKVTMDDFLTAHHEMGHIQYDMAYAAQPFLLRNGANEGFHAAVGEIMSLSAATPKHLKSIGLLSPDFQEDNETEINFLLKQALTIVGTLPFTYMLEKWRWMVFKGEIPKDQWMKKWWEMKREIVGVVEPVPHDETYCDPASLFHVSNDYSFIRYYTRTLYQFQFQEALCQAAKHEGPLHKCDISNSTEAGQKLFNMLRLGKSEPWTLALENVVGAKNMNVRPLLNYFEPLFTWLKDQNKNSFVGWSTDWSPYADQSIKVRISLKSALGDKAYEWNDNEMYLFRSSVAYAMRQYFLKVKNQMILFGEEDVRVANLKPRISFNFFVTAPKNVSDIIPRTEVEKAIRMSRSRINDAFRLNDNSLEFLGIQPTLGPPNQPPVS

SEQ ID NO: 771 - protein, 598 aa, synthetic construct
  REGION 1..598: note = ACE2 PD (18-615)
QSTIEEQAKTFLDKFNHEAEDLFYQSSLASWNYNTNITEENVQNMNNAGDKWSAFLKEQSTLAQMYPLQEIQNLTVKLQLQALQQNGSSVLSEDKSKRLNTILNTMSTIYSTGKVCNPDNPQECLLLEPGLNEIMANSLDYNERLWAWESWRSEVGKQLRPLYEEYVVLKNEMARANHYEDYGDYWRGDYEVNGVDGYDYSRGQLIEDVEHTFEEIKPLYEHLHAYVRAKLMNAYPSYISPIGCLPAHLLGDMWGRFWTNLYSLTVPFGQKPNIDVTDAMVDQAWDAQRIFKEAEKFFVSVGLPNMTQGFWENSMLTDPGNVQKAVCHPTAWDLGKGDFRILMCTKVTMDDFLTAHHEMGHIQYDMAYAAQPFLLRNGANEGFHEAVGEIMSLSAATPKHLKSIGLLSPDFQEDNETEINFLLKQALTIVGTLPFTYMLEKWRWMVFKGEIPKDQWMKKWWEMKREIVGVVEPVPHDETYCDPASLFHVSNDYSFIRYYTRTLYQFQFQEALCQAAKHEGPLHKCDISNSTEAGQKLFNMLRLGKSEPWTLALENVVGAKNMNVRPLLNYFEPLFTWLKDQNKNSFVGWSTDWSPYAD

SEQ ID NO: 772 - protein, 598 aa, synthetic construct
  REGION 1..598: note = ACE2 PD (18-615) R273Q
QSTIEEQAKTFLDKFNHEAEDLFYQSSLASWNYNTNITEENVQNMNNAGDKWSAFLKEQSTLAQMYPLQEIQNLTVKLQLQALQQNGSSVLSEDKSKRLNTILNTMSTIYSTGKVCNPDNPQECLLLEPGLNEIMANSLDYNERLWAWESWRSEVGKQLRPLYEEYVVLKNEMARANHYEDYGDYWRGDYEVNGVDGYDYSRGQLIEDVEHTFEEIKPLYEHLHAYVRAKLMNAYPSYISPIGCLPAHLLGDMWGQFWTNLYSLTVPFGQKPNIDVTDAMVDQAWDAQRIFKEAEKFFVSVGLPNMTQGFWENSMLTDPGNVQKAVCHPTAWDLGKGDFRILMCTKVTMDDFLTAHHEMGHIQYDMAYAAQPFLLRNGANEGFHEAVGEIMSLSAATPKHLKSIGLLSPDFQEDNETEINFLLKQALTIVGTLPFTYMLEKWRWMVFKGEIPKDQWMKKWWEMKREIVGVVEPVPHDETYCDPASLFHVSNDYSFIRYYTRTLYQFQFQEALCQAAKHEGPLHKCDISNSTEAGQKLFNMLRLGKSEPWTLALENVVGAKNMNVRPLLNYFEPLFTWLKDQNKNSFVGWSTDWSPYAD

SEQ ID NO: 773 - protein, 598 aa, synthetic construct
  REGION 1..598: note = ACE2 PD (18-615) R273A
QSTIEEQAKTFLDKFNHEAEDLFYQSSLASWNYNTNITEENVQNMNNAGDKWSAFLKEQSTLAQMYPLQEIQNLTVKLQLQALQQNGSSVLSEDKSKRLNTILNTMSTIYSTGKVCNPDNPQECLLLEPGLNEIMANSLDYNERLWAWESWRSEVGKQLRPLYEEYVVLKNEMARANHYEDYGDYWRGDYEVNGVDGYDYSRGQLIEDVEHTFEEIKPLYEHLHAYVRAKLMNAYPSYISPIGCLPAHLLGDMWGAFWTNLYSLTVPFGQKPNIDVTDAMVDQAWDAQRIFKEAEKFFVSVGLPNMTQGFWENSMLTDPGNVQKAVCHPTAWDLGKGDFRILMCTKVTMDDFLTAHHEMGHIQYDMAYAAQPFLLRNGANEGFHEAVGEIMSLSAATPKHLKSIGLLSPDFQEDNETEINFLLKQALTIVGTLPFTYMLEKWRWMVFKGEIPKDQWMKKWWEMKREIVGVVEPVPHDETYCDPASLFHVSNDYSFIRYYTRTLYQFQFQEALCQAAKHEGPLHKCDISNSTEAGQKLFNMLRLGKSEPWTLALENVVGAKNMNVRPLLNYFEPLFTWLKDQNKNSFVGWSTDWSPYAD

SEQ ID NO: 774 - protein, 598 aa, synthetic construct
  REGION 1..598: note = ACE2 PD (18-615) R273G
QSTIEEQAKTFLDKFNHEAEDLFYQSSLASWNYNTNITEENVQNMNNAGDKWSAFLKEQSTLAQMYPLQEIQNLTVKLQLQALQQNGSSVLSEDKSKRLNTILNTMSTIYSTGKVCNPDNPQECLLLEPGLNEIMANSLDYNERLWAWESWRSEVGKQLRPLYEEYVVLKNEMARANHYEDYGDYWRGDYEVNGVDGYDYSRGQLIEDVEHTFEEIKPLYEHLHAYVRAKLMNAYPSYISPIGCLPAHLLGDMWGGFWTNLYSLTVPFGQKPNIDVTDAMVDQAWDAQRIFKEAEKFFVSVGLPNMTQGFWENSMLTDPGNVQKAVCHPTAWDLGKGDFRILMCTKVTMDDFLTAHHEMGHIQYDMAYAAQPFLLRNGANEGFHEAVGEIMSLSAATPKHLKSIGLLSPDFQEDNETEINFLLKQALTIVGTLPFTYMLEKWRWMVFKGEIPKDQWMKKWWEMKREIVGVVEPVPHDETYCDPASLFHVSNDYSFIRYYTRTLYQFQFQEALCQAAKHEGPLHKCDISNSTEAGQKLFNMLRLGKSEPWTLALENVVGAKNMNVRPLLNYFEPLFTWLKDQNKNSFVGWSTDWSPYAD

SEQ ID NO: 775 - protein, 598 aa, synthetic construct
  REGION 1..598: note = ACE2 PD (18-615) R273V
QSTIEEQAKTFLDKFNHEAEDLFYQSSLASWNYNTNITEENVQNMNNAGDKWSAFLKEQSTLAQMYPLQEIQNLTVKLQLQALQQNGSSVLSEDKSKRLNTILNTMSTIYSTGKVCNPDNPQECLLLEPGLNEIMANSLDYNERLWAWESWRSEVGKQLRPLYEEYVVLKNEMARANHYEDYGDYWRGDYEVNGVDGYDYSRGQLIEDVEHTFEEIKPLYEHLHAYVRAKLMNAYPSYISPIGCLPAHLLGDMWGVFWTNLYSLTVPFGQKPNIDVTDAMVDQAWDAQRIFKEAEKFFVSVGLPNMTQGFWENSMLTDPGNVQKAVCHPTAWDLGKGDFRILMCTKVTMDDFLTAHHEMGHIQYDMAYAAQPFLLRNGANEGFHEAVGEIMSLSAATPKHLKSIGLLSPDFQEDNETEINFLLKQALTIVGTLPFTYMLEKWRWMVFKGEIPKDQWMKKWWEMKREIVGVVEPVPHDETYCDPASLFHVSNDYSFIRYYTRTLYQFQFQEALCQAAKHEGPLHKCDISNSTEAGQKLFNMLRLGKSEPWTLALENVVGAKNMNVRPLLNYFEPLFTWLKDQNKNSFVGWSTDWSPYAD

SEQ ID NO: 776 - protein, 598 aa, synthetic construct
  REGION 1..598: note = ACE2 PD (18-615) H378A
QSTIEEQAKTFLDKFNHEAEDLFYQSSLASWNYNTNITEENVQNMNNAGDKWSAFLKEQSTLAQMYPLQEIQNLTVKLQLQALQQNGSSVLSEDKSKRLNTILNTMSTIYSTGKVCNPDNPQECLLLEPGLNEIMANSLDYNERLWAWESWRSEVGKQLRPLYEEYVVLKNEMARANHYEDYGDYWRGDYEVNGVDGYDYSRGQLIEDVEHTFEEIKPLYEHLHAYVRAKLMNAYPSYISPIGCLPAHLLGDMWGRFWTNLYSLTVPFGQKPNIDVTDAMVDQAWDAQRIFKEAEKFFVSVGLPNMTQGFWENSMLTDPGNVQKAVCHPTAWDLGKGDFRILMCTKVTMDDFLTAHHEMGAIQYDMAYAAQPFLLRNGANEGFHEAVGEIMSLSAATPKHLKSIGLLSPDFQEDNETEINFLLKQALTIVGTLPFTYMLEKWRWMVFKGEIPKDQWMKKWWEMKREIVGVVEPVPHDETYCDPASLFHVSNDYSFIRYYTRTLYQFQFQEALCQAAKHEGPLHKCDISNSTEAGQKLFNMLRLGKSEPWTLALENVVGAKNMNVRPLLNYFEPLFTWLKDQNKNSFVGWSTDWSPYAD

SEQ ID NO: 777 - protein, 598 aa, synthetic construct
  REGION 1..598: note = ACE2 PD (18-615) E402A
QSTIEEQAKTFLDKFNHEAEDLFYQSSLASWNYNTNITEENVQNMNNAGDKWSAFLKEQSTLAQMYPLQEIQNLTVKLQLQALQQNGSSVLSEDKSKRLNTILNTMSTIYSTGKVCNPDNPQECLLLEPGLNEIMANSLDYNERLWAWESWRSEVGKQLRPLYEEYVVLKNEMARANHYEDYGDYWRGDYEVNGVDGYDYSRGQLIEDVEHTFEEIKPLYEHLHAYVRAKLMNAYPSYISPIGCLPAHLLGDMWGRFWTNLYSLTVPFGQKPNIDVTDAMVDQAWDAQRIFKEAEKFFVSVGLPNMTQGFWENSMLTDPGNVQKAVCHPTAWDLGKGDFRILMCTKVTMDDFLTAHHEMGHIQYDMAYAAQPFLLRNGANEGFHAAVGEIMSLSAATPKHLKSIGLLSPDFQEDNETEINFLLKQALTIVGTLPFTYMLEKWRWMVFKGEIPKDQWMKKWWEMKREIVGVVEPVPHDETYCDPASLFHVSNDYSFIRYYTRTLYQFQFQEALCQAAKHEGPLHKCDISNSTEAGQKLFNMLRLGKSEPWTLALENVVGAKNMNVRPLLNYFEPLFTWLKDQNKNSFVGWSTDWSPYAD

SEQ ID NO: 778 - protein, 594 aa, synthetic construct
  REGION 1..594: note = ACE2 PD (18-611)
QSTIEEQAKTFLDKFNHEAEDLFYQSSLASWNYNTNITEENVQNMNNAGDKWSAFLKEQSTLAQMYPLQEIQNLTVKLQLQALQQNGSSVLSEDKSKRLNTILNTMSTIYSTGKVCNPDNPQECLLLEPGLNEIMANSLDYNERLWAWESWRSEVGKQLRPLYEEYVVLKNEMARANHYEDYGDYWRGDYEVNGVDGYDYSRGQLIEDVEHTFEEIKPLYEHLHAYVRAKLMNAYPSYISPIGCLPAHLLGDMWGRFWTNLYSLTVPFGQKPNIDVTDAMVDQAWDAQRIFKEAEKFFVSVGLPNMTQGFWENSMLTDPGNVQKAVCHPTAWDLGKGDFRILMCTKVTMDDFLTAHHEMGHIQYDMAYAAQPFLLRNGANEGFHEAVGEIMSLSAATPKHLKSIGLLSPDFQEDNETEINFLLKQALTIVGTLPFTYMLEKWRWMVFKGEIPKDQWMKKWWEMKREIVGVVEPVPHDETYCDPASLFHVSNDYSFIRYYTRTLYQFQFQEALCQAAKHEGPLHKCDISNSTEAGQKLFNMLRLGKSEPWTLALENVVGAKNMNVRPLLNYFEPLFTWLKDQNKNSFVGWSTDWS

SEQ ID NO: 779 - protein, 590 aa, synthetic construct
  REGION 1..590: note = ACE2 PD (18-607)
QSTIEEQAKTFLDKFNHEAEDLFYQSSLASWNYNTNITEENVQNMNNAGDKWSAFLKEQSTLAQMYPLQEIQNLTVKLQLQALQQNGSSVLSEDKSKRLNTILNTMSTIYSTGKVCNPDNPQECLLLEPGLNEIMANSLDYNERLWAWESWRSEVGKQLRPLYEEYVVLKNEMARANHYEDYGDYWRGDYEVNGVDGYDYSRGQLIEDVEHTFEEIKPLYEHLHAYVRAKLMNAYPSYISPIGCLPAHLLGDMWGRFWTNLYSLTVPFGQKPNIDVTDAMVDQAWDAQRIFKEAEKFFVSVGLPNMTQGFWENSMLTDPGNVQKAVCHPTAWDLGKGDFRILMCTKVTMDDFLTAHHEMGHIQYDMAYAAQPFLLRNGANEGFHEAVGEIMSLSAATPKHLKSIGLLSPDFQEDNETEINFLLKQALTIVGTLPFTYMLEKWRWMVFKGEIPKDQWMKKWWEMKREIVGVVEPVPHDETYCDPASLFHVSNDYSFIRYYTRTLYQFQFQEALCQAAKHEGPLHKCDISNSTEAGQKLFNMLRLGKSEPWTLALENVVGAKNMNVRPLLNYFEPLFTWLKDQNKNSFVGWS

SEQ ID NO: 780 - protein, 8 aa, synthetic construct
  REGION 1..8: note = ACE2 (608-615)
TDWSPYAD

SEQ ID NO: 781 - protein, 4 aa, synthetic construct
  REGION 1..4: note = ACE2 (608-611)
TDWS

SEQ ID NO: 782 - protein, 125 aa, synthetic construct
  REGION 1..125: note = ACE2 CLD (616-740) Dimerizing Polypeptide
QSIKVRISLKSALGDKAYEWNDNEMYLFRSSVAYAMRQYFLKVKNQMILFGEEDVRVANLKPRISFNFFVTAPKNVSDIIPRTEVEKAIRMSRSRINDAFRLNDNSLEFLGIQPTLGPPNQPPVS

SEQ ID NO: 783 - protein, 127 aa, synthetic construct
  REGION 1..127: note = Collectrin (TMEM27) Dimerizing Polypeptide (15-141)
ELCQPGAENAFKVRLSIRTALGDKAYAWDTNEEYLFKAMVAFSMRKVPNREATEISHVLLCNVTQRVSFWFVVTDPSKNHTLPAVEVQSAIRMNKNRINNAFFLNDQTLEFLKIPSTLAPPMDPSVP

SEQ ID NO: 784 - protein, 119 aa, synthetic construct
  REGION 1..119: note = Collectrin (TMEM27) Dimerizing Polypeptide (23-141) C75A
NAFKVRLSIRTALGDKAYAWDTNEEYLFKAMVAFSMRKVPNREATEISHVLLANVTQRVSFWFVVTDPSKNHTLPAVEVQSAIRMNKNRINNAFFLNDQTLEFLKIPSTLAPPMDPSVP

SEQ ID NO: 785 - protein, 127 aa, synthetic construct
  REGION 1..127: note = ACE2 (608-615)/Collectrin (23-141) C75A Dimerizing Polypeptide
TDWSPYADNAFKVRLSIRTALGDKAYAWDTNEEYLFKAMVAFSMRKVPNREATEISHVLLANVTQRVSFWFVVTDPSKNHTLPAVEVQSAIRMNKNRINNAFFLNDQTLEFLKIPSTLAPPMDPSVP

SEQ ID NO: 786 - protein, 131 aa, synthetic construct
  REGION 1..131: note = ACE2 (608-611)/Collectrin (15-141) Dimerizing Polypeptide
TDWSELCQPGAENAFKVRLSIRTALGDKAYAWDTNEEYLFKAMVAFSMRKVPNREATEISHVLLCNVTQRVSFWFVVTDPSKNHTLPAVEVQSAIRMNKNRINNAFFLNDQTLEFLKIPSTLAPPMDPSVP

SEQ ID NO: 787 - protein, 171 aa, synthetic construct
  REGION 1..171: note = TNFSF1 (LTA) (35-205) Trimerizing Polypeptide
LPGVGLTPSAAQTARQHPKMHLAHSTLKPAAHLIGDPSKQNSLLWRANTDRAFLQDGFSLSNNSLLVPTSGIYFVYSQVVFSGKAYSPKATSSPLYLAHEVQLFSSQYPFHVPLLSSQKMVYPGLQEPWLHSMYHGAAFQLTQGDQLSTHTDGIPHLVLSPSTVFFGAFAL

SEQ ID NO: 788 - protein, 147 aa, synthetic construct
  REGION 1..147: note = TNFSF1 (LTA) (59-205) Trimerizing Polypeptide
STLKPAAHLIGDPSKQNSLLWRANTDRAFLQDGFSLSNNSLLVPTSGIYFVYSQVVFSGKAYSPKATSSPLYLAHEVQLFSSQYPFHVPLLSSQKMVYPGLQEPWLHSMYHGAAFQLTQGDQLSTHTDGIPHLVLSPSTVFFGAFAL

SEQ ID NO: 789 - protein, 146 aa, synthetic construct
  REGION 1..146: note = TNFSF1 (LTA) (60-205) Trimerizing Polypeptide
TLKPAAHLIGDPSKQNSLLWRANTDRAFLQDGFSLSNNSLLVPTSGIYFVYSQVVFSGKAYSPKATSSPLYLAHEVQLFSSQYPFHVPLLSSQKMVYPGLQEPWLHSMYHGAAFQLTQGDQLSTHTDGIPHLVLSPSTVFFGAFAL

SEQ ID NO: 790 - protein, 142 aa, synthetic construct
  REGION 1..142: note = TNFSF1 (LTA) (64-205) Trimerizing Polypeptide
AAHLIGDPSKQNSLLWRANTDRAFLQDGFSLSNNSLLVPTSGIYFVYSQVVFSGKAYSPKATSSPLYLAHEVQLFSSQYPFHVPLLSSQKMVYPGLQEPWLHSMYHGAAFQLTQGDQLSTHTDGIPHLVLSPSTVFFGAFAL

SEQ ID NO: 791 - protein, 177 aa, synthetic construct
  REGION 1..177: note = TNFSF2 (TNF) (57-233) Trimerizing Polypeptide
GPQREEFPRDLSLISPLAQAVRSSSRTPSDKPVAHVVANPQAEGQLQWLNRRANALLANGVELRDNQLVVPSEGLYLIYSQVLFKGQGCPSTHVLLTHTISRIAVSYQTKVNLLSAIKSPCQRETPEGAEAKPWYEPIYLGGVFQLEKGDRLSAEINRPDYLDFAESGQVYFGIIAL

SEQ ID NO: 792 - protein, 148 aa, synthetic construct
  REGION 1..148: note = TNFSF2 (TNF) (86-233) Trimerizing Polypeptide
DKPVAHVVANPQAEGQLQWLNRRANALLANGVELRDNQLVVPSEGLYLIYSQVLFKGQGCPSTHVLLTHTISRIAVSYQTKVNLLSAIKSPCQRETPEGAEAKPWYEPIYLGGVFQLEKGDRLSAEINRPDYLDFAESGQVYFGIIAL

SEQ ID NO: 793 - protein, 196 aa, synthetic construct
  REGION 1..196: note = TNFSF3 (LTB) (49-244) Trimerizing Polypeptide
QDQGGLVTETADPGAQAQQGLGFQKLPEEEPETDLSPGLPAAHLIGAPLKGQGLGWETTKEQAFLTSGTQFSDAEGLALPQDGLYYLYCLVGYRGRAPPGGGDPQGRSVTLRSSLYRAGGAYGPGTPELLLEGAETVTPVLDPARRQGYGPLWYTSVGFGGLVQLRRGERVYVNISHPDMVDFARGKTFFGAVMVG

SEQ ID NO: 794 - protein, 163 aa, synthetic construct
  REGION 1..163: note = TNFSF3 (LTB) (82-244) Trimerizing Polypeptide
DLSPGLPAAHLIGAPLKGQGLGWETTKEQAFLTSGTQFSDAEGLALPQDGLYYLYCLVGYRGRAPPGGGDPQGRSVTLRSSLYRAGGAYGPGTPELLLEGAETVTPVLDPARRQGYGPLWYTSVGFGGLVQLRRGERVYVNISHPDMVDFARGKTFFGAVMVG

SEQ ID NO: 795 - protein, 159 aa, synthetic construct
  REGION 1..159: note = TNFSF3 (LTB) (86-244) Trimerizing Polypeptide
GLPAAHLIGAPLKGQGLGWETTKEQAFLTSGTQFSDAEGLALPQDGLYYLYCLVGYRGRAPPGGGDPQGRSVTLRSSLYRAGGAYGPGTPELLLEGAETVTPVLDPARRQGYGPLWYTSVGFGGLVQLRRGERVYVNISHPDMVDFARGKTFFGAVMVG

SEQ ID NO: 796 - protein, 133 aa, synthetic construct
  REGION 1..133: note = TNFSF4 (OX40L) (51-183) Trimerizing Polypeptide
QVSHRYPRIQSIKVQFTEYKKEKGFILTSQKEDEIMKVQNNSVIINCDGFYLISLKGYFSQEVNISLHYQKDEEPLFQLKKVRSVNSLMVASLTYKDKVYLNVTTDNTSLDDFHVNGGELILIHQNPGEFCVL

SEQ ID NO: 797 - protein, 132 aa, synthetic construct
  REGION 1..132: note = TNFSF4 (OX40L) (52-183) Trimerizing Polypeptide
VSHRYPRIQSIKVQFTEYKKEKGFILTSQKEDEIMKVQNNSVIINCDGFYLISLKGYFSQEVNISLHYQKDEEPLFQLKKVRSVNSLMVASLTYKDKVYLNVTTDNTSLDDFHVNGGELILIHQNPGEFCVL

SEQ ID NO: 798 - protein, 129 aa, synthetic construct
  REGION 1..129: note = TNFSF4 (OX40L) (55-183) Trimerizing Polypeptide
RYPRIQSIKVQFTEYKKEKGFILTSQKEDEIMKVQNNSVIINCDGFYLISLKGYFSQEVNISLHYQKDEEPLFQLKKVRSVNSLMVASLTYKDKVYLNVTTDNTSLDDFHVNGGELILIHQNPGEFCVL

SEQ ID NO: 799 - protein, 215 aa, synthetic construct
  REGION 1..215: note = TNFSF5 (CD40L) (47-261) Trimerizing Polypeptide
HRRLDKIEDERNLHEDFVFMKTIQRCNTGERSLSLLNCEEIKSQFEGFVKDIMLNKEETKKENSFEMQKGDQNPQIAAHVISEASSKTTSVLQWAEKGYYTMSNNLVTLENGKQLTVKRQGLYYIYAQVTFCSNREASSQAPFIASLCLKSPGRFERILLRAANTHSSAKPCGQQSIHLGGVFELQPGASVFVNVTDPSQVSHGTGFTSFGLLKL

SEQ ID NO: 800 - protein, 150 aa, synthetic construct
  REGION 1..150: note = TNFSF5 (CD40L) (112-261) Trimerizing Polypeptide
EMQKGDQNPQIAAHVISEASSKTTSVLQWAEKGYYTMSNNLVTLENGKQLTVKRQGLYYIYAQVTFCSNREASSQAPFIASLCLKSPGRFERILLRAANTHSSAKPCGQQSIHLGGVFELQPGASVFVNVTDPSQVSHGTGFTSFGLLKL

SEQ ID NO: 801 - protein, 145 aa, synthetic construct
  REGION 1..145: note = TNFSF5 (CD40L) (117-261) Trimerizing Polypeptide
DQNPQIAAHVISEASSKTTSVLQWAEKGYYTMSNNLVTLENGKQLTVKRQGLYYIYAQVTFCSNREASSQAPFIASLCLKSPGRFERILLRAANTHSSAKPCGQQSIHLGGVFELQPGASVFVNVTDPSQVSHGTGFTSFGLLKL

SEQ ID NO: 802 - protein, 141 aa, synthetic construct
  REGION 1..141: note = TNFSF5 (CD40L) (121-261) Trimerizing Polypeptide
QIAAHVISEASSKTTSVLQWAEKGYYTMSNNLVTLENGKQLTVKRQGLYYIYAQVTFCSNREASSQAPFIASLCLKSPGRFERILLRAANTHSSAKPCGQQSIHLGGVFELQPGASVFVNVTDPSQVSHGTGFTSFGLLKL

SEQ ID NO: 803 - protein, 179 aa, synthetic construct
  REGION 1..179: note = TNFSF6 (FASL, CD95L) (103-281) Trimerizing Polypeptide
QLFHLQKELAELRESTSQMHTASSLEKQIGHPSPPPEKKELRKVAHLTGKSNSRSMPLEWEDTYGIVLLSGVKYKKGGLVINETGLYFVYSKVYFRGQSCNNLPLSHKVYMRNSKYPQDLVMMEGKMMSYCTTGQMWARSSYLGAVFNLTSADHLYVNVSELSLVNFEESQTFFGLYKL

SEQ ID NO: 804 - protein, 138 aa, synthetic construct
  REGION 1..138: note = TNFSF6 (FASL, CD95L) (144-281) Trimerizing Polypeptide
RKVAHLTGKSNSRSMPLEWEDTYGIVLLSGVKYKKGGLVINETGLYFVYSKVYFRGQSCNNLPLSHKVYMRNSKYPQDLVMMEGKMMSYCTTGQMWARSSYLGAVFNLTSADHLYVNVSELSLVNFEESQTFFGLYKL

SEQ ID NO: 805 - protein, 137 aa, synthetic construct
  REGION 1..137: note = TNFSF6 (FASL, CD95L) (145-281) Trimerizing Polypeptide
KVAHLTGKSNSRSMPLEWEDTYGIVLLSGVKYKKGGLVINETGLYFVYSKVYFRGQSCNNLPLSHKVYMRNSKYPQDLVMMEGKMMSYCTTGQMWARSSYLGAVFNLTSADHLYVNVSELSLVNFEESQTFFGLYKL

SEQ ID NO: 806 - protein, 136 aa, synthetic construct
  REGION 1..136: note = TNFSF6 (FASL, CD95L) (146-281) Trimerizing Polypeptide
VAHLTGKSNSRSMPLEWEDTYGIVLLSGVKYKKGGLVINETGLYFVYSKVYFRGQSCNNLPLSHKVYMRNSKYPQDLVMMEGKMMSYCTTGQMWARSSYLGAVFNLTSADHLYVNVSELSLVNFEESQTFFGLYKL

SEQ ID NO: 807 - protein, 155 aa, synthetic construct
  REGION 1..155: note = TNFSF7 (CD27L) (39-193) Trimerizing Polypeptide
QRFAQAQQQLPLESLGWDVAELQLNHTGPQQDPRLYWQGGPALGRSFLHGPELDKGQLRIHRDGIYMVHIQVTLAICSSTTASRHHPTTLAVGICSPASRSISLLRLSFHQGCTIASQRLTPLARGDTLCTNLTGTLLPSRNTDETFFGVQWVRP

SEQ ID NO: 808 - protein, 143 aa, synthetic construct
  REGION 1..143: note = TNFSF7 (CD27L) (51-193) Trimerizing Polypeptide
ESLGWDVAELQLNHTGPQQDPRLYWQGGPALGRSFLHGPELDKGQLRIHRDGIYMVHIQVTLAICSSTTASRHHPTTLAVGICSPASRSISLLRLSFHQGCTIASQRLTPLARGDTLCTNLTGTLLPSRNTDETFFGVQWVRP

SEQ ID NO: 809 - protein, 138 aa, synthetic construct
  REGION 1..138: note = TNFSF7 (CD27L) (56-193) Trimerizing Polypeptide
DVAELQLNHTGPQQDPRLYWQGGPALGRSFLHGPELDKGQLRIHRDGIYMVHIQVTLAICSSTTASRHHPTTLAVGICSPASRSISLLRLSFHQGCTIASQRLTPLARGDTLCTNLTGTLLPSRNTDETFFGVQWVRP

SEQ ID NO: 810 - protein, 172 aa, synthetic construct
  REGION 1..172: note = TNFSF8 (CD30L) (63-234) Trimerizing Polypeptide
QRTDSIPNSPDNVPLKGGNCSEDLLCILKRAPFKKSWAYLQVAKHLNKTKLSWNKDGILHGVRYQDGNLVIQFPGLYFIICQLQFLVQCPNNSVDLKLELLINKHIKKQALVTVCESGMQTKHVYQNLSQFLLDYLQVNTTISVNVDTFQYIDTSTFPLENVLSIFLYSNSD

SEQ ID NO: 811 - protein, 138 aa, synthetic construct
  REGION 1..138: note = TNFSF8 (CD30L) (97-234) Trimerizing Polypeptide
KSWAYLQVAKHLNKTKLSWNKDGILHGVRYQDGNLVIQFPGLYFIICQLQFLVQCPNNSVDLKLELLINKHIKKQALVTVCESGMQTKHVYQNLSQFLLDYLQVNTTISVNVDTFQYIDTSTFPLENVLSIFLYSNSD

SEQ ID NO: 812 - protein, 137 aa, synthetic construct
  REGION 1..137: note = TNFSF8 (CD30L) (98-234) Trimerizing Polypeptide
SWAYLQVAKHLNKTKLSWNKDGILHGVRYQDGNLVIQFPGLYFIICQLQFLVQCPNNSVDLKLELLINKHIKKQALVTVCESGMQTKHVYQNLSQFLLDYLQVNTTISVNVDTFQYIDTSTFPLENVLSIFLYSNSD

SEQ ID NO: 813 - protein, 133 aa, synthetic construct
  REGION 1..133: note = TNFSF8 (CD30L) (102-234) Trimerizing Polypeptide
LQVAKHLNKTKLSWNKDGILHGVRYQDGNLVIQFPGLYFIICQLQFLVQCPNNSVDLKLELLINKHIKKQALVTVCESGMQTKHVYQNLSQFLLDYLQVNTTISVNVDTFQYIDTSTFPLENVLSIFLYSNSD

SEQ ID NO: 814 - protein, 205 aa, synthetic construct
  REGION 1..205: note = TNFSF9 (4-1BBL) (50-254) Trimerizing Polypeptide
ACPWAVSGARASPGSAASPRLREGPELSPDDPAGLLDLRQGMFAQLVAQNVLLIDGPLSWYSDPGLAGVSLTGGLSYKEDTKELVVAKAGVYYVFFQLELRRVVAGEGSGSVSLALHLQPLRSAAGAAALALTVDLPPASSEARNSAFGFQGRLLHLSAGQRLGVHLHTEARARHAWQLTQGATVLGLFRVTPEIPAGLPSPRSE

SEQ ID NO: 815 - protein, 184 aa, synthetic construct
  REGION 1..184: note = TNFSF9 (4-1BBL) (71-254) Trimerizing Polypeptide
REGPELSPDDPAGLLDLRQGMFAQLVAQNVLLIDGPLSWYSDPGLAGVSLTGGLSYKEDTKELVVAKAGVYYVFFQLELRRVVAGEGSGSVSLALHLQPLRSAAGAAALALTVDLPPASSEARNSAFGFQGRLLHLSAGQRLGVHLHTEARARHAWQLTQGATVLGLFRVTPEIPAGLPSPRSE

SEQ ID NO: 816 - protein, 169 aa, synthetic construct
  REGION 1..169: note = TNFSF9 (4-1BBL) (86-254) Trimerizing Polypeptide
DLRQGMFAQLVAQNVLLIDGPLSWYSDPGLAGVSLTGGLSYKEDTKELVVAKAGVYYVFFQLELRRVVAGEGSGSVSLALHLQPLRSAAGAAALALTVDLPPASSEARNSAFGFQGRLLHLSAGQRLGVHLHTEARARHAWQLTQGATVLGLFRVTPEIPAGLPSPRSE

SEQ ID NO: 817 - protein, 243 aa, synthetic construct
  REGION 1..243: note = TNFSF10 (TRAIL) (39-281) Trimerizing Polypeptide
TNELKQMQDKYSKSGIACFLKEDDSYWDPNDEESMNSPCWQVKWQLRQLVRKMILRTSEETISTVQEKQQNISPLVRERGPQRVAAHITGTRGRSNTLSSPNSKNEKALGRKINSWESSRSGHSFLSNLHLRNGELVIHEKGFYYIYSQTYFRFQEEIKENTKNDKQMVQYIYKYTSYPDPILLMKSARNSCWSKDAEYGLYSIYQGGIFELKENDRIFVSVTNEHLIDMDHEASFFGAFLVG

SEQ ID NO: 818 - protein, 162 aa, synthetic construct
  REGION 1..162: note = TNFSF10 (TRAIL) (120-281) Trimerizing Polypeptide
QRVAAHITGTRGRSNTLSSPNSKNEKALGRKINSWESSRSGHSFLSNLHLRNGELVIHEKGFYYIYSQTYFRFQEEIKENTKNDKQMVQYIYKYTSYPDPILLMKSARNSCWSKDAEYGLYSIYQGGIFELKENDRIFVSVTNEHLIDMDHEASFFGAFLVG

SEQ ID NO: 819 - protein, 161 aa, synthetic construct
  REGION 1..161: note = TNFSF10 (TRAIL) (121-281) Trimerizing Polypeptide
RVAAHITGTRGRSNTLSSPNSKNEKALGRKINSWESSRSGHSFLSNLHLRNGELVIHEKGFYYIYSQTYFRFQEEIKENTKNDKQMVQYIYKYTSYPDPILLMKSARNSCWSKDAEYGLYSIYQGGIFELKENDRIFVSVTNEHLIDMDHEASFFGAFLVG

SEQ ID NO: 820 - protein, 160 aa, synthetic construct
  REGION 1..160: note = TNFSF10 (TRAIL) (122-281) Trimerizing Polypeptide
VAAHITGTRGRSNTLSSPNSKNEKALGRKINSWESSRSGHSFLSNLHLRNGELVIHEKGFYYIYSQTYFRFQEEIKENTKNDKQMVQYIYKYTSYPDPILLMKSARNSCWSKDAEYGLYSIYQGGIFELKENDRIFVSVTNEHLIDMDHEASFFGAFLVG

SEQ ID NO: 821 - protein, 249 aa, synthetic construct
  REGION 1..249: note = TNFSF11 (RANKL) (69-317) Trimerizing Polypeptide
YFRAQMDPNRISEDGTHCIYRILRLHENADFQDTTLESQDTKLIPDSCRRIKQAFQGAVQKELQHIVGSQHIRAEKAMVDGSWLDLAKRSKLEAQPFAHLTINATDIPSGSHKVSLSSWYHDRGWAKISNMTFSNGKLIVNQDGFYYLYANICFRHHETSGDLATEYLQLMVYVTKTSIKIPSSHTLMKGGSTKYWSGNSEFHFYSINVGGFFKLRSGEEISIEVSNPSLLDPDQDATYFGAFKVRDID

SEQ ID NO: 822 - protein, 157 aa, synthetic construct
  REGION 1..157: note = TNFSF11 (RANKL) (161-317) Trimerizing Polypeptide
EAQPFAHLTINATDIPSGSHKVSLSSWYHDRGWAKISNMTFSNGKLIVNQDGFYYLYANICFRHHETSGDLATEYLQLMVYVTKTSIKIPSSHTLMKGGSTKYWSGNSEFHFYSINVGGFFKLRSGEEISIEVSNPSLLDPDQDATYFGAFKVRDID

SEQ ID NO: 823 - protein, 207 aa, synthetic construct
  REGION 1..207: note = TNFSF12 (TWEAK) (43-249) Trimerizing Polypeptide
SLGSRASLSAQEPAQEELVAEEDQDPSELNPQTEESQDPAPFLNRLVRPRRSAPKGRKTRARRAIAAHYEVHPRPGQDGAQAGVDGTVSGWEEARINSSSPLRYNRQIGEFIVTRAGLYYLYCQVHFDEGKAVYLKLDLLVDGVLALRCLEEFSATAASSLGPQLRLCQVSGLLALRPGSSLRIRTLPWAHLKAAPFLTYFGLFQVH

SEQ ID NO: 824 - protein, 147 aa, synthetic construct
  REGION 1..147: note = TNFSF12 (TWEAK) (103-249) Trimerizing Polypeptide
ARRAIAAHYEVHPRPGQDGAQAGVDGTVSGWEEARINSSSPLRYNRQIGEFIVTRAGLYYLYCQVHFDEGKAVYLKLDLLVDGVLALRCLEEFSATAASSLGPQLRLCQVSGLLALRPGSSLRIRTLPWAHLKAAPFLTYFGLFQVH

SEQ ID NO: 825 - protein, 146 aa, synthetic construct
  REGION 1..146: note = TNFSF12 (TWEAK) (104-249) Trimerizing Polypeptide
RRAIAAHYEVHPRPGQDGAQAGVDGTVSGWEEARINSSSPLRYNRQIGEFIVTRAGLYYLYCQVHFDEGKAVYLKLDLLVDGVLALRCLEEFSATAASSLGPQLRLCQVSGLLALRPGSSLRIRTLPWAHLKAAPFLTYFGLFQVH

SEQ ID NO: 826 - protein, 145 aa, synthetic construct
  REGION 1..145: note = TNFSF12 (TWEAK) (105-249) Trimerizing Polypeptide
RAIAAHYEVHPRPGQDGAQAGVDGTVSGWEEARINSSSPLRYNRQIGEFIVTRAGLYYLYCQVHFDEGKAVYLKLDLLVDGVLALRCLEEFSATAASSLGPQLRLCQVSGLLALRPGSSLRIRTLPWAHLKAAPFLTYFGLFQVH

SEQ ID NO: 827 - protein, 144 aa, synthetic construct
  REGION 1..144: note = TNFSF12 (TWEAK) (106-249) Trimerizing Polypeptide
AIAAHYEVHPRPGQDGAQAGVDGTVSGWEEARINSSSPLRYNRQIGEFIVTRAGLYYLYCQVHFDEGKAVYLKLDLLVDGVLALRCLEEFSATAASSLGPQLRLCQVSGLLALRPGSSLRIRTLPWAHLKAAPFLTYFGLFQVH

SEQ ID NO: 828 - protein, 143 aa, synthetic construct
  REGION 1..143: note = TNFSF13 (APRIL1) (105-247) Trimerizing Polypeptide
AVLTQKQKKQHSVLHLVPINATSKDDSDVTEVMWQPALRRGRGLQAQGYGVRIQDAGVYLLYSQVLFQDVTFTMGQVVSREGQGRQETLFRCIRSMPSHPDRAYNSCYSAGVFHLHQGDILSVIIPRARAKLNLSPHGTFLGF

SEQ ID NO: 829 - protein, 136 aa, synthetic construct
  REGION 1..136: note = TNFSF13 (APRIL1) (112-247) Trimerizing Polypeptide
KKQHSVLHLVPINATSKDDSDVTEVMWQPALRRGRGLQAQGYGVRIQDAGVYLLYSQVLFQDVTFTMGQVVSREGQGRQETLFRCIRSMPSHPDRAYNSCYSAGVFHLHQGDILSVIIPRARAKLNLSPHGTFLGF

SEQ ID NO: 830 - protein, 146 aa, synthetic construct
  REGION 1..146: note = TNFSF13 (APRIL2) (105-250) Trimerizing Polypeptide
AVLTQKQKKQHSVLHLVPINATSKDDSDVTEVMWQPALRRGRGLQAQGYGVRIQDAGVYLLYSQVLFQDVTFTMGQVVSREGQGRQETLFRCIRSMPSHPDRAYNSCYSAGVFHLHQGDILSVIIPRARAKLNLSPHGTFLGFVKL

SEQ ID NO: 831 - protein, 139 aa, synthetic construct
  REGION 1..139: note = TNFSF13 (APRIL2) (112-250) Trimerizing Polypeptide
KKQHSVLHLVPINATSKDDSDVTEVMWQPALRRGRGLQAQGYGVRIQDAGVYLLYSQVLFQDVTFTMGQVVSREGQGRQETLFRCIRSMPSHPDRAYNSCYSAGVFHLHQGDILSVIIPRARAKLNLSPHGTFLGFVKL

SEQ ID NO: 832 - protein, 218 aa, synthetic construct
  REGION 1..218: note = TNFSF13B (BAFF) (68-285) Trimerizing Polypeptide
QVAALQGDLASLRAELQGHHAEKLPAGAGAPKAGLEEAPAVTAGLKIFEPPAPGEGNSSQNSRNKRAVQGPEETVTQDCLQLIADSETPTIQKGSYTFVPWLLSFKRGSALEEKENKILVKETGYFFIYGQVLYTDKTYAMGHLIQRKKVHVFGDELSLVTLFRCIQNMPETLPNNSCYSAGIAKLEEGDELQLAIPRENAQISLDGDVTFFGALKLL

SEQ ID NO: 833 - protein, 146 aa, synthetic construct
  REGION 1..146: note = TNFSF13B (BAFF) (140-285) Trimerizing Polypeptide
ETVTQDCLQLIADSETPTIQKGSYTFVPWLLSFKRGSALEEKENKILVKETGYFFIYGQVLYTDKTYAMGHLIQRKKVHVFGDELSLVTLFRCIQNMPETLPNNSCYSAGIAKLEEGDELQLAIPRENAQISLDGDVTFFGALKLL

SEQ ID NO: 834 - protein, 182 aa, synthetic construct
  REGION 1..182: note = TNFSF14 (LIGHT) (59-240) Trimerizing Polypeptide
LQLHWRLGEMVTRLPDGPAGSWEQLIQERRSHEVNPAAHLTGANSSLTGSGGPLLWETQLGLAFLRGLSYHDGALVVTKAGYYYIYSKVQLGGVGCPLGLASTITHGLYKRTPRYPEELELLVSQQSPCGRATSSSRVWWDSSFLGGVVHLEAGEKVVVRVLDERLVRLRDGTRSYFGAFMV

SEQ ID NO: 835 - protein, 148 aa, synthetic construct
  REGION 1..148: note = TNFSF14 (LIGHT) (93-240) Trimerizing Polypeptide
NPAAHLTGANSSLTGSGGPLLWETQLGLAFLRGLSYHDGALVVTKAGYYYIYSKVQLGGVGCPLGLASTITHGLYKRTPRYPEELELLVSQQSPCGRATSSSRVWWDSSFLGGVVHLEAGEKVVVRVLDERLVRLRDGTRSYFGAFMV

SEQ ID NO: 836 - protein, 147 aa, synthetic construct
  REGION 1..147: note = TNFSF14 (LIGHT) (94-240) Trimerizing Polypeptide
PAAHLTGANSSLTGSGGPLLWETQLGLAFLRGLSYHDGALVVTKAGYYYIYSKVQLGGVGCPLGLASTITHGLYKRTPRYPEELELLVSQQSPCGRATSSSRVWWDSSFLGGVVHLEAGEKVVVRVLDERLVRLRDGTRSYFGAFMV

SEQ ID NO: 837 - protein, 146 aa, synthetic construct
  REGION 1..146: note = TNFSF14 (LIGHT) (95-240) Trimerizing Polypeptide
AAHLTGANSSLTGSGGPLLWETQLGLAFLRGLSYHDGALVVTKAGYYYIYSKVQLGGVGCPLGLASTITHGLYKRTPRYPEELELLVSQQSPCGRATSSSRVWWDSSFLGGVVHLEAGEKVVVRVLDERLVRLRDGTRSYFGAFMV

SEQ ID NO: 838 - protein, 195 aa, synthetic construct
  REGION 1..195: note = TNFSF15 (TL1) (57-251) Trimerizing Polypeptide
SQLRAQGEACVQFQALKGQEFAPSHQQVYAPLRADGDKPRAHLTVVRQTPTQHFKNQFPALHWEHELGLAFTKNRMNYTNKFLLIPESGDYFIYSQVTFRGMTSECSEIRQAGRPNKPDSITVVITKVTDSYPEPTQLLMGTKSVCEVGSNWFQPIYLGAMFSLQEGDKLMVNVSDISLVDYTKEDKTFFGAFLL

SEQ ID NO: 839 - protein, 161 aa, synthetic construct
  REGION 1..161: note = TNFSF15 (TL1) (91-251) Trimerizing Polypeptide
DGDKPRAHLTVVRQTPTQHFKNQFPALHWEHELGLAFTKNRMNYTNKFLLIPESGDYFIYSQVTFRGMTSECSEIRQAGRPNKPDSITVVITKVTDSYPEPTQLLMGTKSVCEVGSNWFQPIYLGAMFSLQEGDKLMVNVSDISLVDYTKEDKTFFGAFLL

SEQ ID NO: 840 - protein, 159 aa, synthetic construct
  REGION 1..159: note = TNFSF15 (TL1) (93-251) Trimerizing Polypeptide
DKPRAHLTVVRQTPTQHFKNQFPALHWEHELGLAFTKNRMNYTNKFLLIPESGDYFIYSQVTFRGMTSECSEIRQAGRPNKPDSITVVITKVTDSYPEPTQLLMGTKSVCEVGSNWFQPIYLGAMFSLQEGDKLMVNVSDISLVDYTKEDKTFFGAFLL

SEQ ID NO: 841 - protein, 155 aa, synthetic construct
  REGION 1..155: note = TNFSF15 (TL1) (97-251) Trimerizing Polypeptide
AHLTVVRQTPTQHFKNQFPALHWEHELGLAFTKNRMNYTNKFLLIPESGDYFIYSQVTFRGMTSECSEIRQAGRPNKPDSITVVITKVTDSYPEPTQLLMGTKSVCEVGSNWFQPIYLGAMFSLQEGDKLMVNVSDISLVDYTKEDKTFFGAFLL

SEQ ID NO: 842 - protein, 128 aa, synthetic construct
  REGION 1..128: note = TNFSF18 (GITRL) (72-199) Trimerizing Polypeptide
QLETAKEPCMAKFGPLPSKWQMASSEPPCVNKVSDWKLEILQNGLYLIYGQVAPNANYNDVAPFEVRLYKNKDMIQTLTNKSKIQNVGGTYELHVGDTIDLIFNSEHQVLKNNTYWGIILLANPQFIS

SEQ ID NO: 843 - protein, 126 aa, synthetic construct
  REGION 1..126: note = TNFSF18 (GITRL) (74-199) Trimerizing Polypeptide
ETAKEPCMAKFGPLPSKWQMASSEPPCVNKVSDWKLEILQNGLYLIYGQVAPNANYNDVAPFEVRLYKNKDMIQTLTNKSKIQNVGGTYELHVGDTIDLIFNSEHQVLKNNTYWGIILLANPQFIS

SEQ ID NO: 844 - protein, 582 aa, synthetic construct
  REGION 1..582: note = sc4-1BBL
GGGGSGGGGSREGPELSPDDPAGLLDLRQGMFAQLVAQNVLLIDGPLSWYSDPGLAGVSLTGGLSYKEDTKELVVAKAGVYYVFFQLELRRVVAGEGSGSVSLALHLQPLRSAAGAAALALTVDLPPASSEARNSAFGFQGRLLHLSAGQRLGVHLHTEARARHAWQLTQGATVLGLFRVTPEIPAGLPSPRSEGGGGSGGGGSREGPELSPDDPAGLLDLRQGMFAQLVAQNVLLIDGPLSWYSDPGLAGVSLTGGLSYKEDTKELVVAKAGVYYVFFQLELRRVVAGEGSGSVSLALHLQPLRSAAGAAALALTVDLPPASSEARNSAFGFQGRLLHLSAGQRLGVHLHTEARARHAWQLTQGATVLGLFRVTPEIPAGLPSPRSEGGGGSGGGGSREGPELSPDDPAGLLDLRQGMFAQLVAQNVLLIDGPLSWYSDPGLAGVSLTGGLSYKEDTKELVVAKAGVYYVFFQLELRRVVAGEGSGSVSLALHLQPLRSAAGAAALALTVDLPPASSEARNSAFGFQGRLLHLSAGQRLGVHLHTEARARHAWQLTQGATVLGLFRVTPEIPAGLPSPRSE

SEQ ID NO: 845 - protein, 420 aa, synthetic construct
  REGION 1..420: note = scOX40L
GGGSGGGQVSHRYPRIQSIKVQFTEYKKEKGFILTSQKEDEIMKVQNNSVIINCDGFYLISLKGYFSQEVNISLHYQKDEEPLFQLKKVRSVNSLMVASLTYKDKVYLNVTTDNTSLDDFHVNGGELILIHQNPGEFCVLGGGSGGGQVSHRYPRIQSIKVQFTEYKKEKGFILTSQKEDEIMKVQNNSVIINCDGFYLISLKGYFSQEVNISLHYQKDEEPLFQLKKVRSVNSLMVASLTYKDKVYLNVTTDNTSLDDFHVNGGELILIHQNPGEFCVLGGGSGGGQVSHRYPRIQSIKVQFTEYKKEKGFILTSQKEDEIMKVQNNSVIINCDGFYLISLKGYFSQEVNISLHYQKDEEPLFQLKKVRSVNSLMVASLTYKDKVYLNVTTDNTSLDDFHVNGGELILIHQNPGEFCVL

SEQ ID NO: 846 - protein, 414 aa, synthetic construct
  REGION 1..414: note = scGITRL
GGSGGGGSGGQLETAKEPCMAKFGPLPSKWQMASSEPPCVNKVSDWKLEILQNGLYLIYGQVAPNANYNDVAPFEVRLYKNKDMIQTLTNKSKIQNVGGTYELHVGDTIDLIFNSEHQVLKNNTYWGIILLANPQFISGGSGGGGSGGQLETAKEPCMAKFGPLPSKWQMASSEPPCVNKVSDWKLEILQNGLYLIYGQVAPNANYNDVAPFEVRLYKNKDMIQTLTNKSKIQNVGGTYELHVGDTIDLIFNSEHQVLKNNTYWGIILLANPQFISGGSGGGGSGGQLETAKEPCMAKFGPLPSKWQMASSEPPCVNKVSDWKLEILQNGLYLIYGQVAPNANYNDVAPFEVRLYKNKDMIQTLTNKSKIQNVGGTYELHVGDTIDLIFNSEHQVLKNNTYWGIILLANPQFIS

SEQ ID NO: 847 - protein, 159 aa, synthetic construct
  REGION 1..159: note = IL1A (P01583) ECD
SAPFSFLSNVKYNFMRIIKYEFILNDALNQSIIRANDQYLTAAALHNLDEAVKFDMGAYKSSKDDAKITVILRISKTQLYVTAQDEDQPVLLKEMPEIPKTITGSETNLLFFWETHGTKNYFTSVAHPNLFIATKQDYWVCLAGGPPSITDFQILENQA

SEQ ID NO: 848 - protein, 153 aa, synthetic construct
  REGION 1..153: note = IL1B (P01584) ECD
APVRSLNCTLRDSQQKSLVMSGPYELKALHLQGQDMEQQVVFSMSFVQGEESNDKIPVALGLKEKNLYLSCVLKDDKPTLQLESVDPKNYPKKKMEKRFVFNKIEINNKLEFESAQFPNWYISTSQAENMPVFLGGTKGGQDITDFTMQFVSS

SEQ ID NO: 849 - protein, 133 aa, synthetic construct [sequence omitted]

SEQ ID NO: 850 - protein, 133 aa, synthetic construct
  REGION 1..133: note = IL3 (P08700) ECD
APMTQTTPLKTSWVNCSNMIDEIITHLKQPPLPLLDFNNLNGEDQDILMENNLRRPNLEAFNRAVKSLQNASAIESILKNLLPCLPLATAAPTRHPIHIKDGDWNEFRRKLTFYLKTLENAQAQQTTLSLAIF

SEQ ID NO: 851 - protein, 129 aa, synthetic construct [sequence omitted]

SEQ ID NO: 852 - protein, 115 aa, synthetic construct
  REGION 1..115: note = IL5 (P05113) ECD
IPTEIPTSALVKETLALLSTHRTLLIANETLRIPVPVHKNHQLCTEEIFQGIGTLESQTVQGGTVERLFKNLSLIKKYIDGQKKKCGEERRRVNQFLDYLQEFLGVMNTEWIIES

SEQ ID NO: 853 - protein, 183 aa, synthetic construct
  REGION 1..183: note = IL6 (P05231) ECD
VPPGEDSKDVAAPHRQPLTSSERIDKQIRYILDGISALRKETCNKSNMCESSKEALAENNLNLPKMAEKDGCFQSGFNEETCLVKIITGLLEFEVYLEYLQNRFESSEEQARAVQMSTKVLIQFLQKKAKNLDAITTPDPTTNASLLTKLQAQNQWLQDMTTHLILRSFKEFLQSSLRALRQM

SEQ ID NO: 854 - protein, 152 aa, synthetic construct
  REGION 1..152: note = IL7 (P13232) ECD
DCDIEGKDGKQYESVLMVSIDQLLDSMKEIGSNCLNNEFNFFKRHICDANKEGMFLFRAARKLRQFLKMNSTGDFDLHLLKVSEGTTILLNCTGQVKGRKPAALGEAQPTKSLEENKSLKEQKKLNDLCFLKRLLQEIKTCWNKILMGTKEH

SEQ ID NO: 855 - protein, 79 aa, synthetic construct
  REGION 1..79: note = IL8 (P10145) ECD
EGAVLPRSAKELRCQCIKTYSKPFHPKFIKELRVIESGPHCANTEIIVKLSDGRELCLDPKENWVQRVVEKFLKRAENS

SEQ ID NO: 856 - protein, 230 aa, synthetic construct
  REGION 1..230: note = IL9 (Q01113) ECD
SVTGEGQGPRSRTFTCLTNNILRIDCHWSAPELGQGSSPWLLFTSNQAPGGTHKCILRGSECTVVLPPEAVLVPSDNFTITFHHCMSGREQVSLVDPEYLPRRHVKLDPPSDLQSNISSGHCILTWSISPALEPMTTLLSYELAFKKQEEAWEQAQHRDHIVGVTWLILEAFELDPGFIHEARLRVQMATLEDDVVEEERYTGQWSEWSQPVCFQAPQRQGPLIPPWGWP

SEQ ID NO: 857 - protein, 160 aa, synthetic construct
  REGION 1..160: note = IL10 (P22301) ECD
SPGQGTQSENSCTHFPGNLPNMLRDLRDAFSRVKTFFQMKDQLDNLLLKESLLEDFKGYLGCQALSEMIQFYLEEVMPQAENQDPDIKAHVNSLGENLKTLRLRLRRCHRFLPCENKSKAVEQVKNAFNKLQEKGIYKAMSEFDIFINYIEAYMTMKIRN

SEQ ID NO: 858 - protein, 178 aa, synthetic construct
  REGION 1..178: note = IL11 (P20809) ECD
PGPPPGPPRVSPDPRAELDSTVLLTRSLLADTRQLAAQLRDKFPADGDHNLDSLPTLAMSAGALGALQLPGVLTRLRADLLSYLRHVQWLRRAGGSSLKTLEPELGTLQARLDRLLRRLQLLMSRLALPQPPPDPPAPPLAPPSSAWGGIRAAHAILGGLHLTLDWAVRGLLLLKTRL

SEQ ID NO: 859 - protein, 197 aa, synthetic construct
  REGION 1..197: note = IL12A (P29459) ECD
RNLPVATPDPGMFPCLHHSQNLLRAVSNMLQKARQTLEFYPCTSEEIDHEDITKDKTSTVEACLPLELTKNESCLNSRETSFITNGSCLASRKTSFMMALCLSSIYEDLKMYQVEFKTMNAKLLMDPKRQIFLDQNMLAVIDELMQALNFNSETVPQKSSLEEPDFYKTKIKLCILLHAFRIRAVTIDRVMSYLNAS

SEQ ID NO: 860 - protein, 306 aa, synthetic construct
  REGION 1..306: note = IL12B (P29460) ECD
IWELKKDVYVVELDWYPDAPGEMVVLTCDTPEEDGITWTLDQSSEVLGSGKTLTIQVKEFGDAGQYTCHKGGEVLSHSLLLLHKKEDGIWSTDILKDQKEPKNKTFLRCEAKNYSGRFTCWWLTTISTDLTFSVKSSRGSSDPQGVTCGAATLSAERVRGDNKEYEYSVECQEDSACPAAEESLPIEVMVDAVHKLKYENYTSSFFIRDIIKPDPPKNLQLKPLKNSRQVEVSWEYPDTWSTPHSYFSLTFCVQVQGKSKREKKDRVFTDKTSATVICRKNASISVRAQDRYYSSSWSEWASVPCS

SEQ ID NO: 861 - protein, 122 aa, synthetic construct
  REGION 1..122: note = IL13 (P35225) ECD
LTCLGGFASPGPVPPSTALRELIEELVNITQNQKAPLCNGSMVWSINLTAGMYCAALESLINVSGCSAIEKTQRMLSGFCPHKVSAGQFSSLHVRDTKIEVAQFVKDLLLHLKKLFREGRFN

SEQ ID NO: 862 - protein, 114 aa, synthetic construct
  REGION 1..114: note = IL15 (P40933) ECD
NWVNVISDLKKIEDLIQSMHIDATLYTESDVHPSCKVTAMKCFLLELQVISLESGDASIHDTVENLIILANNSLSSNGNVTESGCKECEELEEKNIKEFLQSFVHIVQMFINTS

SEQ ID NO: 863 - protein, 121 aa, synthetic construct
  REGION 1..121: note = IL16 (Q14005) ECD
SAASASAASDVSVESTAEATVCTVTLEKMSAGLGFSLEGGKGSLHGDKPLTINRIFKGAASEQSETVQPGDEILQLGGTAMQGLTRFEAWNIIKALPDGPVTIVIRRKSLQSKETTAAGDS

SEQ ID NO: 864 - protein, 132 aa, synthetic construct
  REGION 1..132: note = IL17A (Q16552) ECD
GITIPRNPGCPNSEDKNFPRTVMVNLNIHNRNTNTNPKRSSDYYNRSTSPWNLHRNEDPERYPSVIWEAKCRHLGCINADGNVDYHMNSVPIQQEILVLRREPPHCPNSFRLEKILVSVGCTCVTPIVHHVA

SEQ ID NO: 865 - protein, 160 aa, synthetic construct
  REGION 1..160: note = IL17B (Q9UHF5) ECD
QPRSPKSKRKGQGRPGPLAPGPHQVPLDLVSRMKPYARMEEYERNIEEMVAQLRNSSELAQRKCEVNLQLWMSNKRSLSPWGYSINHDPSRIPVDLPEARCLCLGCVNPFTMQEDRSMVSVPVFSQVPVRRRLCPPPPRTGPCRQRAVMETIAVGCTCIF

SEQ ID NO: 866 - protein, 179 aa, synthetic construct
  REGION 1..179: note = IL17C (Q9P0M4) ECD
HHDPSLRGHPHSHGTPHCYSAEELPLGQAPPHLLARGAKWGQALPVALVSSLEAASHRGRHERPSATTQCPVLRPEEVLEADTHQRSISPWRYRVDTDEDRYPQKLAFAECLCRGCIDARTGRETAALNSVRLLQSLLVLRRRPCSRDGSGLPTPGAFAFHTEFIHVPVGCTCVLPRSV

SEQ ID NO: 867 - protein, 187 aa, synthetic construct
  REGION 1..187: note = IL17D (Q8TAD2) ECD
AGAPRAGRRPARPRGCADRPEELLEQLYGRLAAGVLSAFHHTLQLGPREQARNASCPAGGRPADRRFRPPTNLRSVSPWAYRISYDPARYPRYLPEAYCLCRGCLTGLFGEEDVRFRSAPVYMPTVVLRRTPACAGGRSVYTEAYVTIPVGCTCVPEPEKDADSINSSIDKQGAKLLLGPNDAPAGP

SEQ ID NO: 868 - protein, 133 aa, synthetic construct [sequence omitted]

SEQ ID NO: 869 - protein, 157 aa, synthetic construct
  REGION 1..157: note = IL18 (Q14116) ECD
YFGKLESKLSVIRNLNDQVLFIDQGNRPLFEDMTDSDCRDNAPRTIFIISMYKDSQPRGMAVTISVKCEKISTLSCENKIISFKEMNPPDNIKDTKSDIIFFQRSVPGHDNKMQFESSSYEGYFLACEKERDLFKLILKKEDELGDRSIMFTVQNED

SEQ ID NO: 870 - protein, 153 aa, synthetic construct
  REGION 1..153: note = IL19 (Q9UHD0) ECD
LRRCLISTDMHHIEESFQEIKRAIQAKDTFPNVTILSTLETLQIIKPLDVCCVTKNLLAFYVDRVFKDHQEPNPKILRKISSIANSFLYMQKTLRQCQEQRQCHCRQEATNATRVIHDNYDQLEVHAAAIKSLGELDVFLAWINKNHEVMFSA

SEQ ID NO: 871 - protein, 152 aa, synthetic construct
  REGION 1..152: note = IL20 (Q9NYY1) ECD
LKTLNLGSCVIATNLQEIRNGFSEIRGSVQAKDGNIDIRILRRTESLQDTKPANRCCLLRHLLRLYLDRVFKNYQTPDHYTLRKISSLANSFLTIKKDLRLCHAHMTCHCGEEAMKKYSQILSHFEKLEPQAAVVKALGELDILLQWMEETE

SEQ ID NO: 872 - protein, 138 aa, synthetic construct
  REGION 1..138: note = IL21 (Q9HBE4) ECD
HKSSSQGQDRHMIRMRQLIDIVDQLKNYVNDLVPEFLPAPEDVETNCEWSAFSCFQKAQLKSANTGNNERIINVSIKKLKRKPPSTNAGRRQKHRLTCPSCDSYEKKPPKEFLERFKSLLQKMIHQHLSSRTHGSEDS

SEQ ID NO: 873 - protein, 146 aa, synthetic construct
  REGION 1..146: note = IL22 (Q9GZX6) ECD
APISSHCRLDKSNFQQPYITNRTFMLAKEASLADNNTDVRLIGEKLFHGVSMSERCYLMKQVLNFTLEEVLFPQSDRFQPYMQEVVPFLARLSNRLSTCHIEGDDLHIQRNVQKLKDTVKKLGESGEIKAIGELDLLFMSLRNACI

SEQ ID NO: 874 - protein, 332 aa, synthetic construct
  REGION 1..332: note = IL23R (Q5VWK5) ECD
GITNINCSGHIWVEPATIFKMGMNISIYCQAAIKNCQPRKLHFYKNGIKERFQITRINKTTARLWYKNFLEPHASMYCTAECPKHFQETLICGKDISSGYPPDIPDEVTCVIYEYSGNMTCTWNAGKLTYIDTKYVVHVKSLETEEEQQYLTSSYINISTDSLQGGKKYLVWVQAANALGMEESKQLQIHLDDIVIPSAAVISRAETINATVPKTIIYWDSQTTIEKVSCEMRYKATTNQTWNVKEFDTNFTYVQQSEFYLEPNIKYVFQVRCQETGKRYWQPWSSLFFHKTPETVPQVTSKAFQHDTWNSGLTVASISTGHLTSDNRGDIG

SEQ ID NO: 875 - protein, 170 aa, synthetic construct
  REGION 1..170: note = IL23A (Q9NPF7) ECD
RAVPGGSSPAWTQCQQLSQKLCTLAWSAHPLVGHMDLREEGDEETTNDVPHIQCGDGCDPQGLRDNSQFCLQRIHQGLIFYEKLLGSDIFTGEPSLLPDSPVGQLHASLLGLSQLLQPEGHHWETQQIPSLSPSQPWQRLLLRFKILRSLQAFVAVAARVFAHGAATLSP

SEQ ID NO: 876 - protein, 155 aa, synthetic construct
  REGION 1..155: note = IL24 (Q13007) ECD
QEFHFGPCQVKGVVPQKLWEAFWAVKDTMQAQDNITSARLLQQEVLQNVSDAESCYLVHTLLEFYLKTVFKNYHNRTVEVRTLKSFSTLANNFVLIVSQLQPSQENEMFSIRDSAHRRFLLFRRAFKQLDVEAALTKALGEVDILLTWMQKFYKL

SEQ ID NO: 877 - protein, 145 aa, synthetic construct
  REGION 1..145: note = IL25 (Q9H293) ECD
YSHWPSCCPSKGQDTSEELLRWSTVPVPPLEPARPNRHPESCRASEDGPLNSRAISPWRYELDRDLNRLPQDLYHARCLCPHCVSLQTGSHMDPRGNSELLYHNQTVFYRRPCHGEKGTHKGYCLERRLYRVSLACVCVRPRVMG

SEQ ID NO: 878 - protein, 150 aa, synthetic construct
  REGION 1..150: note = IL26 (Q9NPH9) ECD
KHKQSSFTKSCYPRGTLSQAVDALYIKAAWLKATIPEDRIKNIRLLKKKTKKQFMKNCQFQEQLLSFFMEDVFGQLQLQGCKKIRFVEDFHSLRQKLSHCISCASSAREMKSITRMKRIFYRIGNKGIYKAISELDILLSWIKKLLESSQ

SEQ ID NO: 879 - protein, 215 aa, synthetic construct
  REGION 1..215: note = IL27A (Q8NEV9) ECD
FPRPPGRPQLSLQELRREFTVSLHLARKLLSEVRGQAHRFAESHLPGVNLYLLPLGEQLPDVSLTFQAWRRLSDPERLCFISTTLQPFHALLGGLGTQGRWTNMERMQLWAMRLDLRDLQRHLRFQVLAAGFNLPEEEEEEEEEEEEERKGLLPGALGSALQGPAQVSWPQLLSTYRLLHSLELVLSRAVRELLLLSKAGHSVWPLGFPTLSPQP

SEQ ID NO: 880 - protein, 209 aa, synthetic construct
  REGION 1..209: note = IL27B (Q14213) ECD
RKGPPAALTLPRVQCRASRYPIAVDCSWTLPPAPNSTSPVSFIATYRLGMAARGHSWPCLQQTPTSTSCTITDVQLFSMAPYVLNVTAVHPWGSSSSFVPFITEHIIKPDPPEGVRLSPLAERQLQVQWEPPGSWPFPEIFSLKYWIRYKRQGAARFHRVGPIEATSFILRAVRPRARYYVQVAAQDLTDYGELSDWSLPATATMSLGK

SEQ ID NO: 881 - protein, 181 aa, synthetic construct
  REGION 1..181: note = IL29 (Q8IU54) ECD
GPVPTSKPTTTGKGCHIGRFKSLSPQELASFKKARDALEESLKLKNWSCSSPVFPGNWDLRLLQVRERPVALEAELALTLKVLEAAAGPALEDVLDQPLHTLHHILSQLQACIQPQPTAGPRPRGRLHHWLHRLQEAPKKESAGCLEASVTFNLFRLLTRDLKYVADGNLCLRTSTHPEST

SEQ ID NO: 882 - protein, 141 aa, synthetic construct [sequence omitted]

SEQ ID NO: 883 - protein, 204 aa, synthetic construct
  REGION 1..204: note = IL32 (P24001) ECD
AWVSACDTEDTVGHLGPWRDKDPALWCQLCLSSQHQAIERFYDKMQNAESGRGQVMSSLAELEDDFKEGYLETVAAYYEEQHPELTPLLEKERDGLRCRGNRSPVPDVEDPATEEPGESFCDKVMRWFQAMLQRLQTWWHGVLAWVKEKVVALVHAVQALWKQFQSFCCSLSELFMSSFQSYGAPRGDKEELTPQKCSEPQSSK

SEQ ID NO: 884 - protein, 176 aa, synthetic construct
  REGION 1..176: note = IL33 (O95760) ECD
AFGISGVQKYTRALHDSSITGISPITEYLASLSTYNDQSITFALEDESYEIYVEDLKKDEKKDKVLLSYYESQHPSNESGDGVDGKMLMVTLSPTKDFWLHANNKEHSVELHKCEKPLPDQAFFVLHNMHSNCVSFECKTDPGVFIGVKDNHLALIKVDSSENLCTENILFKLSET

SEQ ID NO: 885 - protein, 222 aa, synthetic construct
  REGION 1..222: note = IL34 (Q6ZMJ4) ECD
NEPLEMWPLTQNEECTVTGFLRDKLQYRSRLQYMKHYFPINYKISVPYEGVFRIANVTRLQRAQVSERELRYLWVLVSLSATESVQDVLLEGHPSWKYLQEVETLLLNVQQGLTDVEVSPKVESVLSLLNAPGPNLKLVRPKALLDNCFRVMELLYCSCCKQSSVLNWQDCEVPSPQSCSPEPSLQYAATQLYPPPPWSPSSPPHSTGSVRPVRAQGEGLLP

SEQ ID NO: 886 - protein, 153 aa, synthetic construct
  REGION 1..153: note = IL36A (Q9UHA7) ECD
KIDTPQQGSIQDINHRVWVLQDQTLIAVPRKDRMSPVTIALISCRHVETLEKDRGNPIYLGLNGLNLCLMCAKVGDQPTLQLKEKDIMDLYNQPEPVKSFLFYHSQSGRNSTFESVAFPGWFIAVSSEGGCPLILTQELGKANTTDFGLTMLF

SEQ ID NO: 887 - protein, 160 aa, synthetic construct
  REGION 1..160: note = IL36B (Q9NZH7 ) ECD
REAAPKSYAIRDSRQMVWVLSGNSLIAAPLSRSIKPVTLHLIACRDTEFSDKEKGNMVYLGIKGKDLCLFCAEIQGKPTLQLKLQGSQDNIGKDTCWKLVGIHTCINLDVRESCFMGTLDQWGIGVGRKKWKSSFQHHHLRKKDKDFSSMRTNIGMPGRM

SEQ ID NO: 888 - protein, 152 aa, synthetic construct
  REGION 1..152: note = IL36G (Q9NZH8 ) ECD
SMCKPITGTINDLNQQVWTLQGQNLVAVPRSDSVTPVTVAVITCKYPEALEQGRGDPIYLGIQNPEMCLYCEKVGEQPTLQLKEQKIMDLYGQPEPVKPFLFYRAKTGRTSTLESVAFPDWFIASSKRDQPIILTSELGKSYNTAFELNIND

SEQ ID NO: 889 - protein, 173 aa, synthetic construct
  REGION 1..173: note = IL37 (Q9NZH6 ) ECD
VHTSPKVKNLNPKKFSIHDQDHKVLVLDSGNLIAVPDKNYIRPEIFFALASSLSSASAEKGSPILLGVSKGEFCLYCDKDKGQSHPSLQLKKEKLMKLAAQKESARRPFIFYRAQVGSWNMLESAAHPGWFICTSCNCNEPVGVTDKFENRKHIEFSFQPVCKAEMSPSEVSD

SEQ ID NO: 890 - protein, 245 aa, synthetic construct
  REGION 1..245: note = IL40 (Q6UX52 ) ECD
REEEITPVVSIAYKVLEVFPKGRWVLITCCAPQPPPPITYSLCGTKNIKVAKKVVKTHEPASFNLNVTLKSSPDLLTYFCWASSTSGAHVDSARLQMHWELWSKPVSELRANFTLQDRGAGPRVEMICQASSGSPPITNSLIGKDGQVHLQQRPCHRQPANFSFLPSQTSDWFWCQAANNANVQHSALTVVPPGGDQKMEDWQGPLESPILALPLYRSTRRLSEEEFGGFRIGNGEVRGRKAAAM

SEQ ID NO: 891 - protein, 271 aa, synthetic construct
  REGION 1..271: note = IL1A (P01583) SP+PP+ECD
MAKVPDMFEDLKNCYSENEEDSSSIDHLSLNQKSFYHVSYGPLHEGCMDQSVSLSISETSKTSKLTFKESMVVVATNGKVLKKRRLSLSQSITDDDLEAIANDSEEEIIKPRSAPFSFLSNVKYNFMRIIKYEFILNDALNQSIIRANDQYLTAAALHNLDEAVKFDMGAYKSSKDDAKITVILRISKTQLYVTAQDEDQPVLLKEMPEIPKTITGSETNLLFFWETHGTKNYFTSVAHPNLFIATKQDYWVCLAGGPPSITDFQILENQA

SEQ ID NO: 892 - protein, 269 aa, synthetic construct
  REGION 1..269: note = IL1B (P01584) SP+PP+ECD
MAEVPELASEMMAYYSGNEDDLFFEADGPKQMKCSFQDLDLCPLDGGIQLRISDHHYSKGFRQAASVVVAMDKLRKMLVPCPQTFQENDLSTFFPFIFEEEPIFFDTWDNEAYVHDAPVRSLNCTLRDSQQKSLVMSGPYELKALHLQGQDMEQQVVFSMSFVQGEESNDKIPVALGLKEKNLYLSCVLKDDKPTLQLESVDPKNYPKKKMEKRFVFNKIEINNKLEFESAQFPNWYISTSQAENMPVFLGGTKGGQDITDFTMQFVSS

SEQ ID NO: 893 - protein, 153 aa, synthetic construct
  REGION 1..153: note = IL2 (P60568) SP+PP+ECD
MYRMQLLSCIALSLALVTNSAPTSSSTKKTQLQLEHLLLDLQMILNGINNYKNPKLTRMLTFKFYMPKKATELKHLQCLEEELKPLEEVLNLAQSKNFHLRPRDLISNINVIVLELKGSETTFMCEYADETATIVEFLNRWITFCQSIISTLT

SEQ ID NO: 894 - protein, 152 aa, synthetic construct
  REGION 1..152: note = IL3 (P08700) SP+PP+ECD
MSRLPVLLLLQLLVRPGLQAPMTQTTPLKTSWVNCSNMIDEIITHLKQPPLPLLDFNNLNGEDQDILMENNLRRPNLEAFNRAVKSLQNASAIESILKNLLPCLPLATAAPTRHPIHIKDGDWNEFRRKLTFYLKTLENAQAQQTTLSLAIF

SEQ ID NO: 895 - protein, 153 aa, synthetic construct [sequence omitted]

SEQ ID NO: 896 - protein, 134 aa, synthetic construct
  REGION 1..134: note = IL5 (P05113) SP+PP+ECD
MRMLLHLSLLALGAAYVYAIPTEIPTSALVKETLALLSTHRTLLIANETLRIPVPVHKNHQLCTEEIFQGIGTLESQTVQGGTVERLFKNLSLIKKYIDGQKKKCGEERRRVNQFLDYLQEFLGVMNTEWIIES

SEQ ID NO: 897 - protein, 212 aa, synthetic construct
  REGION 1..212: note = IL6 (P05231) SP+PP+ECD
MNSFSTSAFGPVAFSLGLLLVLPAAFPAPVPPGEDSKDVAAPHRQPLTSSERIDKQIRYILDGISALRKETCNKSNMCESSKEALAENNLNLPKMAEKDGCFQSGFNEETCLVKIITGLLEFEVYLEYLQNRFESSEEQARAVQMSTKVLIQFLQKKAKNLDAITTPDPTTNASLLTKLQAQNQWLQDMTTHLILRSFKEFLQSSLRALRQM

SEQ ID NO: 898 - protein, 177 aa, synthetic construct
  REGION 1..177: note = IL7 (P13232) SP+PP+ECD
MFHVSFRYIFGLPPLILVLLPVASSDCDIEGKDGKQYESVLMVSIDQLLDSMKEIGSNCLNNEFNFFKRHICDANKEGMFLFRAARKLRQFLKMNSTGDFDLHLLKVSEGTTILLNCTGQVKGRKPAALGEAQPTKSLEENKSLKEQKKLNDLCFLKRLLQEIKTCWNKILMGTKEH

SEQ ID NO: 899 - protein, 99 aa, synthetic construct
  REGION 1..99: note = IL8 (P10145) SP+PP+ECD
MTSKLAVALLAAFLISAALCEGAVLPRSAKELRCQCIKTYSKPFHPKFIKELRVIESGPHCANTEIIVKLSDGRELCLDPKENWVQRVVEKFLKRAENS

SEQ ID NO: 900 - protein, 270 aa, synthetic construct
  REGION 1..270: note = IL9 (Q01113) SP+PP+ECD
MGLGRCIWEGWTLESEALRRDMGTWLLACICICTCVCLGVSVTGEGQGPRSRTFTCLTNNILRIDCHWSAPELGQGSSPWLLFTSNQAPGGTHKCILRGSECTVVLPPEAVLVPSDNFTITFHHCMSGREQVSLVDPEYLPRRHVKLDPPSDLQSNISSGHCILTWSISPALEPMTTLLSYELAFKKQEEAWEQAQHRDHIVGVTWLILEAFELDPGFIHEARLRVQMATLEDDVVEEERYTGQWSEWSQPVCFQAPQRQGPLIPPWGWP

SEQ ID NO: 901 - protein, 178 aa, synthetic construct
  REGION 1..178: note = IL10 (P22301) SP+PP+ECD
MHSSALLCCLVLLTGVRASPGQGTQSENSCTHFPGNLPNMLRDLRDAFSRVKTFFQMKDQLDNLLLKESLLEDFKGYLGCQALSEMIQFYLEEVMPQAENQDPDIKAHVNSLGENLKTLRLRLRRCHRFLPCENKSKAVEQVKNAFNKLQEKGIYKAMSEFDIFINYIEAYMTMKIRN

SEQ ID NO: 902 - protein, 199 aa, synthetic construct
  REGION 1..199: note = IL11 (P20809) SP+PP+ECD
MNCVCRLVLVVLSLWPDTAVAPGPPPGPPRVSPDPRAELDSTVLLTRSLLADTRQLAAQLRDKFPADGDHNLDSLPTLAMSAGALGALQLPGVLTRLRADLLSYLRHVQWLRRAGGSSLKTLEPELGTLQARLDRLLRRLQLLMSRLALPQPPPDPPAPPLAPPSSAWGGIRAAHAILGGLHLTLDWAVRGLLLLKTRL

SEQ ID NO: 903 - protein, 219 aa, synthetic construct
  REGION 1..219: note = IL12A (P29459) SP+PP+ECD
MCPARSLLLVATLVLLDHLSLARNLPVATPDPGMFPCLHHSQNLLRAVSNMLQKARQTLEFYPCTSEEIDHEDITKDKTSTVEACLPLELTKNESCLNSRETSFITNGSCLASRKTSFMMALCLSSIYEDLKMYQVEFKTMNAKLLMDPKRQIFLDQNMLAVIDELMQALNFNSETVPQKSSLEEPDFYKTKIKLCILLHAFRIRAVTIDRVMSYLNAS

SEQ ID NO: 904 - protein, 328 aa, synthetic construct
  REGION 1..328: note = IL12B (P29460) SP+PP+ECD
MCHQQLVISWFSLVFLASPLVAIWELKKDVYVVELDWYPDAPGEMVVLTCDTPEEDGITWTLDQSSEVLGSGKTLTIQVKEFGDAGQYTCHKGGEVLSHSLLLLHKKEDGIWSTDILKDQKEPKNKTFLRCEAKNYSGRFTCWWLTTISTDLTFSVKSSRGSSDPQGVTCGAATLSAERVRGDNKEYEYSVECQEDSACPAAEESLPIEVMVDAVHKLKYENYTSSFFIRDIIKPDPPKNLQLKPLKNSRQVEVSWEYPDTWSTPHSYFSLTFCVQVQGKSKREKKDRVFTDKTSATVICRKNASISVRAQDRYYSSSWSEWASVPCS

SEQ ID NO: 905 - protein, 146 aa, synthetic construct [sequence omitted]

SEQ ID NO: 906 - protein, 162 aa, synthetic construct
  REGION 1..162: note = IL15 (P40933) SP+PP+ECD
MRISKPHLRSISIQCYLCLLLNSHFLTEAGIHVFILGCFSAGLPKTEANWVNVISDLKKIEDLIQSMHIDATLYTESDVHPSCKVTAMKCFLLELQVISLESGDASIHDTVENLIILANNSLSSNGNVTESGCKECEELEEKNIKEFLQSFVHIVQMFINTS

SEQ ID NO: 907 - protein, 1332 aa, synthetic construct
  REGION 1..1332: note = IL16 (Q14005) SP+PP+ECD
MESHSRAGKSRKSAKFRSISRSLMLCNAKTSDDGSSPDEKYPDPFEISLAQGKEGIFHSSVQLADTSEAGPSSVPDLALASEAAQLQAAGNDRGKTCRRIFFMKESSTASSREKPGKLEAQSSNFLFPKACHQRARSNSTSVNPYCTREIDFPMTKKSAAPTDRQPYSLCSNRKSLSQQLDCPAGKAAGTSRPTRSLSTAQLVQPSGGLQASVISNIVLMKGQAKGLGFSIVGGKDSIYGPIGIYVKTIFAGGAAAADGRLQEGDEILELNGESMAGLTHQDALQKFKQAKKGLLTLTVRTRLTAPPSLCSHLSPPLCRSLSSSTCITKDSSSFALESPSAPISTAKPNYRIMVEVSLQKEAGVGLGIGLCSVPYFQCISGIFVHTLSPGSVAHLDGRLRCGDEIVEISDSPVHCLTLNEVYTILSHCDPGPVPIIVSRHPDPQVSEQQLKEAVAQAVENTKFGKERHQWSLEGVKRLESSWHGRPTLEKEREKNSAPPHRRAQKVMIRSSSDSSYMSGSPGGSPGSGSAEKPSSDVDISTHSPSLPLAREPVVLSIASSRLPQESPPLPESRDSHPPLRLKKSFEILVRKPMSSKPKPPPRKYFKSDSDPQKSLEERENSSCSSGHTPPTCGQEARELLPLLLPQEDTAGRSPSASAGCPGPGIGPQTKSSTEGEPGWRRASPVTQTSPIKHPLLKRQARMDYSFDTTAEDPWVRISDCIKNLFSPIMSENHGHMPLQPNASLNEEEGTQGHPDGTPPKLDTANGTPKVYKSADSSTVKKGPPVAPKPAWFRQSLKGLRNRASDPRGLPDPALSTQPAPASREHLGSHIRASSSSSSIRQRISSFETFGSSQLPDKGAQRLSLQPSSGEAAKPLGKHEEGRFSGLLGRGAAPTLVPQQPEQVLSSGSPAASEARDPGVSESPPPGRQPNQKTLPPGPDPLLRLLSTQAEESQGPVLKMPSQRARSFPLTRSQSCETKLLDEKTSKLYSISSQVSSAVMKSLLCLPSSISCAQTPCIPKEGASPTSSSNEDSAANGSAETSALDTGFSLNLSELREYTEGLTEAKEDDDGDHSSLQSGQSVISLLSSEELKKLIEEVKVLDEATLKQLDGIHVTILHKEEGAGLGFSLAGGADLENKVITVHRVFPNGLASQEGTIQKGNEVLSINGKSLKGTTHHDALAILRQAREPRQAVIVTRKLTPEAMPDLNSSTDSAASASAASDVSVESTAEATVCTVTLEKMSAGLGFSLEGGKGSLHGDKPLTINRIFKGAASEQSETVQPGDEILQLGGTAMQGLTRFEAWNIIKALPDGPVTIVIRRKSLQSKETTAAGDS

SEQ ID NO: 908 - protein, 155 aa, synthetic construct
  REGION 1..155: note = IL17A (Q16552) SP+PP+ECD
MTPGKTSLVSLLLLLSLEAIVKAGITIPRNPGCPNSEDKNFPRTVMVNLNIHNRNTNTNPKRSSDYYNRSTSPWNLHRNEDPERYPSVIWEAKCRHLGCINADGNVDYHMNSVPIQQEILVLRREPPHCPNSFRLEKILVSVGCTCVTPIVHHVA

SEQ ID NO: 909 - protein, 180 aa, synthetic construct
  REGION 1..180: note = IL17B (Q9UHF5) SP+PP+ECD
MDWPHNLLFLLTISIFLGLGQPRSPKSKRKGQGRPGPLAPGPHQVPLDLVSRMKPYARMEEYERNIEEMVAQLRNSSELAQRKCEVNLQLWMSNKRSLSPWGYSINHDPSRIPVDLPEARCLCLGCVNPFTMQEDRSMVSVPVFSQVPVRRRLCPPPPRTGPCRQRAVMETIAVGCTCIF

SEQ ID NO: 910 - protein, 197 aa, synthetic construct
  REGION 1..197: note = IL17C (Q9P0M4) SP+PP+ECD
MTLLPGLLFLTWLHTCLAHHDPSLRGHPHSHGTPHCYSAEELPLGQAPPHLLARGAKWGQALPVALVSSLEAASHRGRHERPSATTQCPVLRPEEVLEADTHQRSISPWRYRVDTDEDRYPQKLAFAECLCRGCIDARTGRETAALNSVRLLQSLLVLRRRPCSRDGSGLPTPGAFAFHTEFIHVPVGCTCVLPRSV

SEQ ID NO: 911 - protein, 202 aa, synthetic construct
  REGION 1..202: note = IL17D (Q8TAD2) SP+PP+ECD
MLVAGFLLALPPSWAAGAPRAGRRPARPRGCADRPEELLEQLYGRLAAGVLSAFHHTLQLGPREQARNASCPAGGRPADRRFRPPTNLRSVSPWAYRISYDPARYPRYLPEAYCLCRGCLTGLFGEEDVRFRSAPVYMPTVVLRRTPACAGGRSVYTEAYVTIPVGCTCVPEPEKDADSINSSIDKQGAKLLLGPNDAPAGP

SEQ ID NO: 912 - protein, 163 aa, synthetic construct
  REGION 1..163: note = IL17F (Q96PD4) SP+PP+ECD
MTVKTLHGPAMVKYLLLSILGLAFLSEAAARKIPKVGHTFFQKPESCPPVPGGSMKLDIGIINENQRVSMSRNIESRSTSPWNYTVTWDPNRYPSEVVQAQCRNLGCINAQGKEDISMNSVPIQQETLVVRRKHQGCSVSFQLEKVLVTVGCTCVTPVIHHVQ

SEQ ID NO: 913 - protein, 193 aa, synthetic construct
  REGION 1..193: note = IL18 (Q14116) SP+PP+ECD
MAAEPVEDNCINFVAMKFIDNTLYFIAEDDENLESDYFGKLESKLSVIRNLNDQVLFIDQGNRPLFEDMTDSDCRDNAPRTIFIISMYKDSQPRGMAVTISVKCEKISTLSCENKIISFKEMNPPDNIKDTKSDIIFFQRSVPGHDNKMQFESSSYEGYFLACEKERDLFKLILKKEDELGDRSIMFTVQNED

SEQ ID NO: 914 - protein, 177 aa, synthetic construct
  REGION 1..177: note = IL19 (Q9UHD0) SP+PP+ECD
MKLQCVSLWLLGTILILCSVDNHGLRRCLISTDMHHIEESFQEIKRAIQAKDTFPNVTILSTLETLQIIKPLDVCCVTKNLLAFYVDRVFKDHQEPNPKILRKISSIANSFLYMQKTLRQCQEQRQCHCRQEATNATRVIHDNYDQLEVHAAAIKSLGELDVFLAWINKNHEVMFSA

SEQ ID NO: 915 - protein, 176 aa, synthetic construct
  REGION 1..176: note = IL20 (Q9NYY1) SP+PP+ECD
MKASSLAFSLLSAAFYLLWTPSTGLKTLNLGSCVIATNLQEIRNGFSEIRGSVQAKDGNIDIRILRRTESLQDTKPANRCCLLRHLLRLYLDRVFKNYQTPDHYTLRKISSLANSFLTIKKDLRLCHAHMTCHCGEEAMKKYSQILSHFEKLEPQAAVVKALGELDILLQWMEETE

SEQ ID NO: 916 - protein, 162 aa, synthetic construct
  REGION 1..162: note = IL21 (Q9HBE4) SP+PP+ECD
MRSSPGNMERIVICLMVIFLGTLVHKSSSQGQDRHMIRMRQLIDIVDQLKNYVNDLVPEFLPAPEDVETNCEWSAFSCFQKAQLKSANTGNNERIINVSIKKLKRKPPSTNAGRRQKHRLTCPSCDSYEKKPPKEFLERFKSLLQKMIHQHLSSRTHGSEDS

SEQ ID NO: 917 - protein, 179 aa, synthetic construct
  REGION 1..179: note = IL22 (Q9GZX6) SP+PP+ECD
MAALQKSVSSFLMGTLATSCLLLLALLVQGGAAAPISSHCRLDKSNFQQPYITNRTFMLAKEASLADNNTDVRLIGEKLFHGVSMSERCYLMKQVLNFTLEEVLFPQSDRFQPYMQEVVPFLARLSNRLSTCHIEGDDLHIQRNVQKLKDTVKKLGESGEIKAIGELDLLFMSLRNACI

SEQ ID NO: 918 - protein, 629 aa, synthetic construct
  REGION 1..629: note = IL23R (Q5VWK5) SP+PP+ECD
MNQVTIQWDAVIALYILFSWCHGGITNINCSGHIWVEPATIFKMGMNISIYCQAAIKNCQPRKLHFYKNGIKERFQITRINKTTARLWYKNFLEPHASMYCTAECPKHFQETLICGKDISSGYPPDIPDEVTCVIYEYSGNMTCTWNAGKLTYIDTKYVVHVKSLETEEEQQYLTSSYINISTDSLQGGKKYLVWVQAANALGMEESKQLQIHLDDIVIPSAAVISRAETINATVPKTIIYWDSQTTIEKVSCEMRYKATTNQTWNVKEFDTNFTYVQQSEFYLEPNIKYVFQVRCQETGKRYWQPWSSLFFHKTPETVPQVTSKAFQHDTWNSGLTVASISTGHLTSDNRGDIGLLLGMIVFAVMLSILSLIGIFNRSFRTGIKRRILLLIPKWLYEDIPNMKNSNVVKMLQENSELMNNNSSEQVLYVDPMITEIKEIFIPEHKPTDYKKENTGPLETRDYPQNSLFDNTTVVYIPDLNTGYKPQISNFLPEGSHLSNNNEITSLTLKPPVDSLDSGNNPRLQKHPNFAFSVSSVNSLSNTIFLGELSLILNQGECSSPDIQNSVEEETTMLLENDSPSETIPEQTLLPDEFVSCLGIVNEELPSINTYFPQNILESHFNRISLLEK

SEQ ID NO: 919 - protein, 189 aa, synthetic construct
  REGION 1..189: note = IL23A (Q9NPF7) SP+PP+ECD
MLGSRAVMLLLLLPWTAQGRAVPGGSSPAWTQCQQLSQKLCTLAWSAHPLVGHMDLREEGDEETTNDVPHIQCGDGCDPQGLRDNSQFCLQRIHQGLIFYEKLLGSDIFTGEPSLLPDSPVGQLHASLLGLSQLLQPEGHHWETQQIPSLSPSQPWQRLLLRFKILRSLQAFVAVAARVFAHGAATLSP

SEQ ID NO: 920 - protein, 206 aa, synthetic construct
  REGION 1..206: note = IL24 (Q13007) SP+PP+ECD
MNFQQRLQSLWTLARPFCPPLLATASQMQMVVLPCLGFTLLLWSQVSGAQGQEFHFGPCQVKGVVPQKLWEAFWAVKDTMQAQDNITSARLLQQEVLQNVSDAESCYLVHTLLEFYLKTVFKNYHNRTVEVRTLKSFSTLANNFVLIVSQLQPSQENEMFSIRDSAHRRFLLFRRAFKQLDVEAALTKALGEVDILLTWMQKFYKL

SEQ ID NO: 921 - protein, 177 aa, synthetic construct
  REGION 1..177: note = IL25 (Q9H293) SP+PP+ECD
MRERPRLGEDSSLISLFLQVVAFLAMVMGTHTYSHWPSCCPSKGQDTSEELLRWSTVPVPPLEPARPNRHPESCRASEDGPLNSRAISPWRYELDRDLNRLPQDLYHARCLCPHCVSLQTGSHMDPRGNSELLYHNQTVFYRRPCHGEKGTHKGYCLERRLYRVSLACVCVRPRVMG

SEQ ID NO: 922 - protein, 171 aa, synthetic construct
  REGION 1..171: note = IL26 (Q9NPH9) SP+PP+ECD
MLVNFILRCGLLLVTLSLAIAKHKQSSFTKSCYPRGTLSQAVDALYIKAAWLKATIPEDRIKNIRLLKKKTKKQFMKNCQFQEQLLSFFMEDVFGQLQLQGCKKIRFVEDFHSLRQKLSHCISCASSAREMKSITRMKRIFYRIGNKGIYKAISELDILLSWIKKLLESSQ

SEQ ID NO: 923 - protein, 243 aa, synthetic construct
  REGION 1..243: note = IL27A (Q8NEV9) SP+PP+ECD
MGQTAGDLGWRLSLLLLPLLLVQAGVWGFPRPPGRPQLSLQELRREFTVSLHLARKLLSEVRGQAHRFAESHLPGVNLYLLPLGEQLPDVSLTFQAWRRLSDPERLCFISTTLQPFHALLGGLGTQGRWTNMERMQLWAMRLDLRDLQRHLRFQVLAAGFNLPEEEEEEEEEEEEERKGLLPGALGSALQGPAQVSWPQLLSTYRLLHSLELVLSRAVRELLLLSKAGHSVWPLGFPTLSPQP

SEQ ID NO: 924 - protein, 229 aa, synthetic construct
  REGION 1..229: note = IL27B (Q14213) SP+PP+ECD
MTPQLLLALVLWASCPPCSGRKGPPAALTLPRVQCRASRYPIAVDCSWTLPPAPNSTSPVSFIATYRLGMAARGHSWPCLQQTPTSTSCTITDVQLFSMAPYVLNVTAVHPWGSSSSFVPFITEHIIKPDPPEGVRLSPLAERQLQVQWEPPGSWPFPEIFSLKYWIRYKRQGAARFHRVGPIEATSFILRAVRPRARYYVQVAAQDLTDYGELSDWSLPATATMSLGK

SEQ ID NO: 925 - protein, 200 aa, synthetic construct
  REGION 1..200: note = IL29 (Q8IU54) SP+PP+ECD
MAAAWTVVLVTLVLGLAVAGPVPTSKPTTTGKGCHIGRFKSLSPQELASFKKARDALEESLKLKNWSCSSPVFPGNWDLRLLQVRERPVALEAELALTLKVLEAAAGPALEDVLDQPLHTLHHILSQLQACIQPQPTAGPRPRGRLHHWLHRLQEAPKKESAGCLEASVTFNLFRLLTRDLKYVADGNLCLRTSTHPEST

SEQ ID NO: 926 - protein, 164 aa, synthetic construct
  REGION 1..164: note = IL31 (Q6EBC2) SP+PP+ECD
MASHSGPSTSVLFLFCCLGGWLASHTLPVRLLRPSDDVQKIVEELQSLSKMLLKDVEEEKGVLVSQNYTLPCLSPDAQPPNNIHSPAIRAYLKTIRQLDNKSVIDEIIEHLDKLIFQDAPETNISVPTDTHECKRFILTISQQFSECMDLALKSLTSGAQQATT

SEQ ID NO: 927 - protein, 234 aa, synthetic construct
  REGION 1..234: note = IL32 (P24001) SP+PP+ECD
MCFPKVLSDDMKKLKARMVMLLPTSAQGLGAWVSACDTEDTVGHLGPWRDKDPALWCQLCLSSQHQAIERFYDKMQNAESGRGQVMSSLAELEDDFKEGYLETVAAYYEEQHPELTPLLEKERDGLRCRGNRSPVPDVEDPATEEPGESFCDKVMRWFQAMLQRLQTWWHGVLAWVKEKVVALVHAVQALWKQFQSFCCSLSELFMSSFQSYGAPRGDKEELTPQKCSEPQSSK

SEQ ID NO: 928 - protein, 270 aa, synthetic construct
  REGION 1..270: note = IL33 (O95760) SP+PP+ECD
MKPKMKYSTNKISTAKWKNTASKALCFKLGKSQQKAKEVCPMYFMKLRSGLMIKKEACYFRRETTKRPSLKTGRKHKRHLVLAACQQQSTVECFAFGISGVQKYTRALHDSSITGISPITEYLASLSTYNDQSITFALEDESYEIYVEDLKKDEKKDKVLLSYYESQHPSNESGDGVDGKMLMVTLSPTKDFWLHANNKEHSVELHKCEKPLPDQAFFVLHNMHSNCVSFECKTDPGVFIGVKDNHLALIKVDSSENLCTENILFKLSET

SEQ ID NO: 929 - protein, 242 aa, synthetic construct
  REGION 1..242: note = IL34 (Q6ZMJ4) SP+PP+ECD
MPRGFTWLRYLGIFLGVALGNEPLEMWPLTQNEECTVTGFLRDKLQYRSRLQYMKHYFPINYKISVPYEGVFRIANVTRLQRAQVSERELRYLWVLVSLSATESVQDVLLEGHPSWKYLQEVETLLLNVQQGLTDVEVSPKVESVLSLLNAPGPNLKLVRPKALLDNCFRVMELLYCSCCKQSSVLNWQDCEVPSPQSCSPEPSLQYAATQLYPPPPWSPSSPPHSTGSVRPVRAQGEGLLP

SEQ ID NO: 930 - protein, 158 aa, synthetic construct
  REGION 1..158: note = IL36A (Q9UHA7) SP+PP+ECD
MEKALKIDTPQQGSIQDINHRVWVLQDQTLIAVPRKDRMSPVTIALISCRHVETLEKDRGNPIYLGLNGLNLCLMCAKVGDQPTLQLKEKDIMDLYNQPEPVKSFLFYHSQSGRNSTFESVAFPGWFIAVSSEGGCPLILTQELGKANTTDFGLTMLF

SEQ ID NO: 931 - protein, 164 aa, synthetic construct
  REGION 1..164: note = IL36B (Q9NZH7 ) SP+PP+ECD
MNPQREAAPKSYAIRDSRQMVWVLSGNSLIAAPLSRSIKPVTLHLIACRDTEFSDKEKGNMVYLGIKGKDLCLFCAEIQGKPTLQLKLQGSQDNIGKDTCWKLVGIHTCINLDVRESCFMGTLDQWGIGVGRKKWKSSFQHHHLRKKDKDFSSMRTNIGMPGRM

SEQ ID NO: 932 - protein, 169 aa, synthetic construct
  REGION 1..169: note = IL36G (Q9NZH8 ) SP+PP+ECD
MRGTPGDADGGGRAVYQSMCKPITGTINDLNQQVWTLQGQNLVAVPRSDSVTPVTVAVITCKYPEALEQGRGDPIYLGIQNPEMCLYCEKVGEQPTLQLKEQKIMDLYGQPEPVKPFLFYRAKTGRTSTLESVAFPDWFIASSKRDQPIILTSELGKSYNTAFELNIND

SEQ ID NO: 933 - protein, 218 aa, synthetic construct
  REGION 1..218: note = IL37 (Q9NZH6 ) SP+PP+ECD
MSFVGENSGVKMGSEDWEKDEPQCCLEDPAGSPLEPGPSLPTMNFVHTSPKVKNLNPKKFSIHDQDHKVLVLDSGNLIAVPDKNYIRPEIFFALASSLSSASAEKGSPILLGVSKGEFCLYCDKDKGQSHPSLQLKKEKLMKLAAQKESARRPFIFYRAQVGSWNMLESAAHPGWFICTSCNCNEPVGVTDKFENRKHIEFSFQPVCKAEMSPSEVSD

SEQ ID NO: 934 - protein, 265 aa, synthetic construct
  REGION 1..265: note = IL40 (Q6UX52 ) SP+PP+ECD
MGLPGLFCLAVLAASSFSKAREEEITPVVSIAYKVLEVFPKGRWVLITCCAPQPPPPITYSLCGTKNIKVAKKVVKTHEPASFNLNVTLKSSPDLLTYFCWASSTSGAHVDSARLQMHWELWSKPVSELRANFTLQDRGAGPRVEMICQASSGSPPITNSLIGKDGQVHLQQRPCHRQPANFSFLPSQTSDWFWCQAANNANVQHSALTVVPPGGDQKMEDWQGPLESPILALPLYRSTRRLSEEEFGGFRIGNGEVRGRKAAAM

SEQ ID NO: 935 - protein, 1227 aa, synthetic construct
  REGION 1..1227: note = ACE (P12821) ECD
LDPGLQPGNFSADEAGAQLFAQSYNSSAEQVLFQSVAASWAHDTNITAENARRQEEAALLSQEFAEAWGQKAKELYEPIWQNFTDPQLRRIIGAVRTLGSANLPLAKRQQYNALLSNMSRIYSTAKVCLPNKTATCWSLDPDLTNILASSRSYAMLLFAWEGWHNAAGIPLKPLYEDFTALSNEAYKQDGFTDTGAYWRSWYNSPTFEDDLEHLYQQLEPLYLNLHAFVRRALHRRYGDRYINLRGPIPAHLLGDMWAQSWENIYDMVVPFPDKPNLDVTSTMLQQGWNATHMFRVAEEFFTSLELSPMPPEFWEGSMLEKPADGREVVCHASAWDFYNRKDFRIKQCTRVTMDQLSTVHHEMGHIQYYLQYKDLPVSLRRGANPGFHEAIGDVLALSVSTPEHLHKIGLLDRVTNDTESDINYLLKMALEKIAFLPFGYLVDQWRWGVFSGRTPPSRYNFDWWYLRTKYQGICPPVTRNETHFDAGAKFHVPNVTPYIRYFVSFVLQFQFHEALCKEAGYEGPLHQCDIYRSTKAGAKLRKVLQAGSSRPWQEVLKDMVGLDALDAQPLLKYFQPVTQWLQEQNQQNGEVLGWPEYQWHPPLPDNYPEGIDLVTDEAEASKFVEEYDRTSQVVWNEYAEANWNYNTNITTETSKILLQKNMQIANHTLKYGTQARKFDVNQLQNTTIKRIIKKVQDLERAALPAQELEEYNKILLDMETTYSVATVCHPNGSCLQLEPDLTNVMATSRKYEDLLWAWEGWRDKAGRAILQFYPKYVELINQAARLNGYVDAGDSWRSMYETPSLEQDLERLFQELQPLYLNLHAYVRRALHRHYGAQHINLEGPIPAHLLGNMWAQTWSNIYDLVVPFPSAPSMDTTEAMLKQGWTPRRMFKEADDFFTSLGLLPVPPEFWNKSMLEKPTDGREVVCHASAWDFYNGKDFRIKQCTTVNLEDLVVAHHEMGHIQYFMQYKDLPVALREGANPGFHEAIGDVLALSVSTPKHLHSLNLLSSEGGSDEHDINFLMKMALDKIAFIPFSYLVDQWRWRVFDGSITKENYNQEWWSLRLKYQGLCPPVPRTQGDFDPGAKFHIPSSVPYIRYFVSFIIQFQFHEALCQAAGHTGPLHKCDIYQSKEAGQRLATAMKLGFSRPWPEAMQLITGQPNMSASAMLSYFKPLLDWLRTENELHGEKLGWPQYNWTPNSARSEGPLPDSGRVSFLGLDLDAQQAR

SEQ ID NO: 936 - protein, 723 aa, synthetic construct; identical to SEQ ID NO: 764
  REGION 1..723: note = ACE2 (Q9BYF1) ECD

SEQ ID NO: 937 - protein, 350 aa, synthetic construct
  REGION 1..350: note = ACP2 (P11117) ECD
RSLRFVTLLYRHGDRSPVKTYPKDPYQEEEWPQGFGQLTKEGMLQHWELGQALRQRYHGFLNTSYHRQEVYVRSTDFDRTLMSAEANLAGLFPPNGMQRFNPNISWQPIPVHTVPITEDRLLKFPLGPCPRYEQLQNETRQTPEYQNESSRNAQFLDMVANETGLTDLTLETVWNVYDTLFCEQTHGLRLPPWASPQTMQRLSRLKDFSFRFLFGIYQQAEKARLQGGVLLAQIRKNLTLMATTSQLPKLLVYSAHDTTLVALQMALDVYNGEQAPYASCHIFELYQEDSGNFSVEMYFRNESDKAPWPLSLPGCPHRCPLQDFLRLTEPVVPKDWQQECQLASGPADTE

SEQ ID NO: 938 - protein, 367 aa, synthetic construct
  REGION 1..367: note = ACPT (Q9BZG2) ECD
LPEGPLVFVALVFRHGDRAPLASYPMDPHKEVASTLWPRGLGQLTTEGVRQQLELGRFLRSRYEAFLSPEYRREEVYIRSTDFDRTLESAQANLAGLFPEAAPGSPEARWRPIPVHTVPVAEDKLLRFPMRSCPRYHELLREATEAAEYQEALEGWTGFLSRLENFTGLSLVGEPLRRAWKVLDTLMCQQAHGLPLPAWASPDVLRTLAQISALDIGAHVGPPRAAEKAQLTGGILLNAILANFSRVQRLGLPLKMVMYSAHDSTLLALQGALGLYDGHTPPYAACLGFEFRKHLGNPAKDGGNVTVSLFYRNDSAHLPLPLSLPGCPAPCPLGRFYQLTAPARPPAHGVSCHGPYEAAIPPAPVVP

SEQ ID NO: 939 - protein, 103 aa, synthetic construct
  REGION 1..103: note = ACVR1 (Q04771) ECD
MEDEKPKVNPKLYMCVCEGLSCGNEDHCEGQQCFSSLSINDGFHVYQKGCFQVYEQGKMTCKTPPSPGQAVECCQGDWCNRNITAQLPTKGKSFPGTQNFHLE

SEQ ID NO: 940 - protein, 103 aa, synthetic construct
  REGION 1..103: note = ACVR1B (P36896) ECD
SGPRGVQALLCACTSCLQANYTCETDGACMVSIFNLDGMEHHVRTCIPKVELVPAGKPFYCLSSEDLRNTHCCYTDYCNRIDLRVPSGHLKEPEHPSMWGPVE

SEQ ID NO: 941 - protein, 92 aa, synthetic construct
  REGION 1..92: note = ACVR1C (Q8NER5) ECD
LSPGLKCVCLLCDSSNFTCQTEGACWASVMLTNGKEQVIKSCVSLPELNAQVFCHSSNNVTKTECCFTDFCNNITLHLPTASPNAPKLGPME

SEQ ID NO: 942 - protein, 116 aa, synthetic construct
  REGION 1..116: note = ACVR2A (P27037) ECD
AILGRSETQECLFFNANWEKDRTNQTGVEPCYGDKDKRRHCFATWKNISGSIEIVKQGCWLDDINCYDRTDCVEKKDSPEVYFCCCEGNMCNEKFSYFPEMEVTQPTSNPVTPKPP

SEQ ID NO: 943 - protein, 119 aa, synthetic construct
  REGION 1..119: note = ACVR2B (Q13705) ECD
SGRGEAETRECIYYNANWELERTNQSGLERCEGEQDKRLHCYASWRNSSGTIELVKKGCWLDDFNCYDRQECVATEENPQVYFCCCEGNFCNERFTHLPEAGGPEVTYEPPPTAPTLLT

SEQ ID NO: 944 - protein, 97 aa, synthetic construct
  REGION 1..97: note = ACVRL1 (P37023) ECD
DPVKPSRGPLVTCTCESPHCKGPTCRGAWCTVVLVREEGRHPQEHRGCGNLHRELCRGRPTEFVNHYCCDSHLCNHNVSLVLEATQPPSEQPGTDGQ

SEQ ID NO: 945 - protein, 653 aa, synthetic construct
  REGION 1..653: note = ADAM10 (O14672) ECD
QYGNPLNKYIRHYEGLSYNVDSLHQKHQRAKRAVSHEDQFLRLDFHAHGRHFNLRMKRDTSLFSDEFKVETSNKVLDYDTSHIYTGHIYGEEGSFSHGSVIDGRFEGFIQTRGGTFYVEPAERYIKDRTLPFHSVIYHEDDINYPHKYGPQGGCADHSVFERMRKYQMTGVEEVTQIPQEEHAANGPELLRKKRTTSAEKNTCQLYIQTDHLFFKYYGTREAVIAQISSHVKAIDTIYQTTDFSGIRNISFMVKRIRINTTADEKDPTNPFRFPNIGVEKFLELNSEQNHDDYCLAYVFTDRDFDDGVLGLAWVGAPSGSSGGICEKSKLYSDGKKKSLNTGIITVQNYGSHVPPKVSHITFAHEVGHNFGSPHDSGTECTPGESKNLGQKENGNYIMYARATSGDKLNNNKFSLCSIRNISQVLEKKRNNCFVESGQPICGNGMVEQGEECDCGYSDQCKDECCFDANQPEGRKCKLKPGKQCSPSQGPCCTAQCAFKSKSEKCRDDSDCAREGICNGFTALCPASDPKPNFTDCNRHTQVCINGQCAGSICEKYGLEECTCASSDGKDDKELCHVCCMKKMDPSTCASTGSVQWSRHFSGRTITLQPGSPCNDFRGYCDVFMRCRLVDADGPLARLKKAIFSPELYENIAE

SEQ ID NO: 946 - protein, 509 aa, synthetic construct
  REGION 1..509: note = ADAM11 (O75078) ECD
QVRRGHPTVHSETKYVELIVINDHQLFEQMRQSVVLTSNFAKSVVNLADVIYKEQLNTRIVLVAMETWADGDKIQVQDDLLETLARLMVYRREGLPEPSDATHLFSGRTFQSTSSGAAYVGGICSLSHGGGVNEYGNMGAMAVTLAQTLGQNLGMMWNKHRSSAGDCKCPDIWLGCIMEDTGFYLPRKFSRCSIDEYNQFLQEGGGSCLFNKPLKLLDPPECGNGFVEAGEECDCGSVQECSRAGGNCCKKCTLTHDAMCSDGLCCRRCKYEPRGVSCREAVNECDIAETCTGDSSQCPPNLHKLDGYYCDHEQGRCYGGRCKTRDRQCQVLWGHAAADRFCYEKLNVEGTERGSCGRKGSGWVQCSKQDVLCGFLLCVNISGAPRLGDLVGDISSVTFYHQGKELDCRGGHVQLADGSDLSYVEDGTACGPNMLCLDHRCLPASAFNFSTCPGSGERRICSHHGVCSNEGKCICQPDWTGKDCSIHNPLPTSPPTGETERYKGPSGTN

SEQ ID NO: 947 - protein, 501 aa, synthetic construct
  REGION 1..501: note = ADAM12 (O43184) ECD
ETLKATKYVELVIVADNREFQRQGKDLEKVKQRLIEIANHVDKFYRPLNIRIVLVGVEVWNDMDKCSVSQDPFTSLHEFLDWRKMKLLPRKSHDNAQLVSGVYFQGTTIGMAPIMSMCTADQSGGIVMDHSDNPLGAAVTLAHELGHNFGMNHDTLDRGCSCQMAVEKGGCIMNASTGYPFPMVFSSCSRKDLETSLEKGMGVCLFNLPEVRESFGGQKCGNRFVEEGEECDCGEPEECMNRCCNATTCTLKPDAVCAHGLCCEDCQLKPAGTACRDSSNSCDLPEFCTGASPHCPANVYLHDGHSCQDVDGYCYNGICQTHEQQCVTLWGPGAKPAPGICFERVNSAGDPYGNCGKVSKSSFAKCEMRDAKCGKIQCQGGASRPVIGTNAVSIETNIPLQQGGRILCRGTHVYLGDDMPDPGLVLAGTKCADGKICLNRQCQNISVFGVHECAMQCHGRGVCNNRKNCHCEAHWAPPFCDKFGFGGSTDSGPIRQADNQG

SEQ ID NO: 948 - protein, 490 aa, synthetic construct
  REGION 1..490: note = ADAM15 (Q13444) ECD
DVVTETKTVELVIVADHSEAQKYRDFQHLLNRTLEVALLLDTFFRPLNVRVALVGLEAWTQRDLVEISPNPAVTLENFLHWRRAHLLPRLPHDSAQLVTGTSFSGPTVGMAIQNSICSPDFSGGVNMDHSTSILGVASSIAHELGHSLGLDHDLPGNSCPCPGPAPAKTCIMEASTDFLPGLNFSNCSRRALEKALLDGMGSCLFERLPSLPPMAAFCGNMFVEPGEQCDCGFLDDCVDPCCDSLTCQLRPGAQCASDGPCCQNCQLRPSGWQCRPTRGDCDLPEFCPGDSSQCPPDVSLGDGEPCAGGQAVCMHGRCASYAQQCQSLWGPGAQPAAPLCLQTANTRGNAFGSCGRNPSGSYVSCTPRDAICGQLQCQTGRTQPLLGSIRDLLWETIDVNGTELNCSWVHLDLGSDVAQPLLTLPGTACGPGLVCIDHRCQRVDLLGAQECRSKCHGHGVCDSNRHCYCEEGWAPPDCTTQLKATSSLTT

SEQ ID NO: 949 - protein, 457 aa, synthetic construct
  REGION 1..457: note = ADAM17 (P78536) ECD
RADPDPMKNTCKLLVVADHRFYRYMGRGEESTTTNYLIELIDRVDDIYRNTSWDNAGFKGYGIQIEQIRILKSPQEVKPGEKHYNMAKSYPNEEKDAWDVKMLLEQFSFDIAEEASKVCLAHLFTYQDFDMGTLGLAYVGSPRANSHGGVCPKAYYSPVGKKNIYLNSGLTSTKNYGKTILTKEADLVTTHELGHNFGAEHDPDGLAECAPNEDQGGKYVMYPIAVSGDHENNKMFSNCSKQSIYKTIESKAQECFQERSNKVCGNSRVDEGEECDPGIMYLNNDTCCNSDCTLKEGVQCSDRNSPCCKNCQFETAQKKCQEAINATCKGVSYCTGNSSECPPPGNAEDDTVCLDLGKCKDGKCIPFCEREQQLESCACNETDNSCKVCCRDLSGRCVPYVDAEQKNLFLRKGKPCTVGFCDMNGKCEKRVQDVIERFWDFIDQLSINTFGKFLADN

SEQ ID NO: 950 - protein, 511 aa, synthetic construct
  REGION 1..511: note = ADAM18 (Q9Y3Q7) ECD
NLSKLLPQYLEIYIIVEKALYDYMGSEMMAVTQKIVQVIGLVNTMFTQFKLTVILSSLELWSNENQISTSGDADDILQRFLAWKRDYLILRPHDIAYLLVYRKHPKYVGATFPGTVCNKSYDAGIAMYPDAIGLEGFSVIIAQLLGLNVGLTYDDITQCFCLRATCIMNHEAVSASGRKIFSNCSMHDYRYFVSKFETKCLQKLSNLQPLHQNQPVCGNGILESNEECDCGNKNECQFKKCCDYNTCKLKGSVKCGSGPCCTSKCELSIAGTPCRKSIDPECDFTEYCNGTSSNCVPDTYALNGRLCKLGTAYCYNGQCQTTDNQCAKIFGKGAQGAPFACFKEVNSLHERSENCGFKNSQPLPCERKDVLCGKLACVQPHKNANKSDAQSTVYSYIQDHVCVSIATGSSMRSDGTDNAYVADGTMCGPEMYCVNKTCRKVHLMGYNCNATTKCKGKGICNNFGNCQCFPGHRPPDCKFQFGSPGGSIDDGNFQKSGDFYTEKGYNTHWNN

SEQ ID NO: 951 - protein, 497 aa, synthetic construct
  REGION 1..497: note = ADAM19 (Q9H013) ECD
REDLNSMKYVELYLVADYLEFQKNRRDQDATKHKLIEIANYVDKFYRSLNIRIALVGLEVWTHGNMCEVSENPYSTLWSFLSWRRKLLAQKYHDNAQLITGMSFHGTTIGLAPLMAMCSVYQSGGVNMDHSENAIGVAATMAHEMGHNFGMTHDSADCCSASAADGGCIMAAATGHPFPKVFNGCNRRELDRYLQSGGGMCLSNMPDTRMLYGGRRCGNGYLEDGEECDCGEEEECNNPCCNASNCTLRPGAECAHGSCCHQCKLLAPGTLCREQARQCDLPEFCTGKSPHCPTNFYQMDGTPCEGGQAYCYNGMCLTYQEQCQQLWGPGARPAPDLCFEKVNVAGDTFGNCGKDMNGEHRKCNMRDAKCGKIQCQSSEARPLESNAVPIDTTIIMNGRQIQCRGTHVYRGPEEEGDMLDPGLVMTGTKCGYNHICFEGQCRNTSFFETEGCGKKCNGHGVCNNNQNCHCLPGWAPPFCNTPGHGGSIDSGPMPPES

SEQ ID NO: 952 - protein, 512 aa, synthetic construct
  REGION 1..512: note = ADAM2 (Q99965) ECD
DFAKYIEMHVIVEKQLYNHMGSDTTVVAQKVFQLIGLTNAIFVSFNITIILSSLELWIDENKIATTGEANELLHTFLRWKTSYLVLRPHDVAFLLVYREKSNYVGATFQGKMCDANYAGGVVLHPRTISLESLAVILAQLLSLSMGITYDDINKCQCSGAVCIMNPEAIHFSGVKIFSNCSFEDFAHFISKQKSQCLHNQPRLDPFFKQQAVCGNAKLEAGEECDCGTEQDCALIGETCCDIATCRFKAGSNCAEGPCCENCLFMSKERMCRPSFEECDLPEYCNGSSASCPENHYVQTGHPCGLNQWICIDGVCMSGDKQCTDTFGKEVEFGPSECYSHLNSKTDVSGNCGISDSGYTQCEADNLQCGKLICKYVGKFLLQIPRATIIYANISGHLCIAVEFASDHADSQKMWIKDGTSCGSNKVCRNQRCVSSSYLGYDCTTDKCNDRGVCNNKKHCHCSASYLPPDCSVQSDLWPGGSIDSGNFPPVAIPARLPERRYIENIYHSKPMR

SEQ ID NO: 953 - protein, 487 aa, synthetic construct
  REGION 1..487: note = ADAM20 (O43506) ECD
RFVELVVVVDNIRYLFSQSNATTVQHEVFNVVNIVDSFYHPLEVDVILTGIDIWTASNPLPTSGDLDNVLEDFSIWKNYNLNNRLQHDVAHLFIKDTQGMKLGVAYVKGICQNPFNTGVDVFEDNRLVVFAITLGHELGHNLGMQHDTQWCVCELQWCIMHAYRKVTTKFSNCSYAQYWDSTISSGLCIQPPPYPGNIFRLKYCGNLVVEEGEECDCGTIRQCAKDPCCLLNCTLHPGAACAFGICCKDCKFLPSGTLCRQQVGECDLPEWCNGTSHQCPDDVYVQDGISCNVNAFCYEKTCNNHDIQCKEIFGQDARSASQSCYQEINTQGNRFGHCGIVGTTYVKCWTPDIMCGRVQCENVGVIPNLIEHSTVQQFHLNDTTCWGTDYHLGMAIPDIGEVKDGTVCGPEKICIRKKCASMVHLSQACQPKTCNMRGICNNKQHCHCNHEWAPPYCKDKGYGGSADSGPPPKNNMEGLNVMGKLRY

SEQ ID NO: 954 - protein, 485 aa, synthetic construct
  REGION 1..485: note = ADAM21 (Q9UKJ8) ECD
PKSAGDWWTHAWFLELVVVVNHDFFIYSQSNISKVQEDVFLVVNIVDSMYKQLGTYIILIGIEIWNQGNVFPMTSIEQVLNDFSQWKQISLSQLQHDAAHMFIKNSLISILGLAYVAGICRPPIDCGVDNFQGDTWSLFANTVAHELGHTLGMQHDEEFCFCGERGCIMNTFRVPAEKFTNCSYADFMKTTLNQGSCLHNPPRLGEIFMLKRCGNGVVEREEQCDCGSVQQCEQDACCLLNCTLRPGAACAFGLCCKDCKFMPSGELCRQEVNECDLPEWCNGTSHQCPEDRYVQDGIPCSDSAYCYQKRCNNHDQHCREIFGKDAKSASQNCYKEINSQGNRFGHCGINGTTYLKCHISDVFCGRVQCENVRDIPLLQDHFTLQHTHINGVTCWGIDYHLRMNISDIGEVKDGTVCGPGKICIHKKCVSLSVLSHVCLPETCNMKGICNNKHHCHCGYGWSPPYCQHRGYGGSIDSGPASAKRG

SEQ ID NO: 955 - protein, 514 aa, synthetic construct
  REGION 1..514: note = ADAM22 (Q9P0K1) ECD
SKRQLRRYPRNVEEETKYIELMIVNDHLMFKKHRLSVVHTNTYAKSVVNMADLIYKDQLKTRIVLVAMETWATDNKFAISENPLITLREFMKYRRDFIKEKSDAVHLFSGSQFESSRSGAAYIGGICSLLKGGGVNEFGKTDLMAVTLAQSLAHNIGIISDKRKLASGECKCEDTWSGCIMGDTGYYLPKKFTQCNIEEYHDFLNSGGGACLFNKPSKLLDPPECGNGFIETGEECDCGTPAECVLEGAECCKKCTLTQDSQCSDGLCCKKCKFQPMGTVCREAVNDCDIRETCSGNSSQCAPNIHKMDGYSCDGVQGICFGGRCKTRDRQCKYIWGQKVTASDKYCYEKLNIEGTEKGNCGKDKDTWIQCNKRDVLCGYLLCTNIGNIPRLGELDGEITSTLVVQQGRTLNCSGGHVKLEEDVDLGYVEDGTPCGPQMMCLEHRCLPVASFNFSTCLSSKEGTICSGNGVCSNELKCVCNRHWIGSDCNTYFPHNDDAKTGITLSGNGVAGTN

SEQ ID NO: 956 - protein, 506 aa, synthetic construct
  REGION 1..506: note = ADAM23 (O75077) ECD
AVNPSRGIFEEMKYLELMIVNDHKTYKKHRSSHAHTNNFAKSVVNLVDSIYKEQLNTRVVLVAVETWTEKDQIDITTNPVQMLHEFSKYRQRIKQHADAVHLISRVTFHYKRSSLSYFGGVCSRTRGVGVNEYGLPMAVAQVLSQSLAQNLGIQWEPSSRKPKCDCTESWGGCIMEETGVSHSRKFSKCSILEYRDFLQRGGGACLFNRPTKLFEPTECGNGYVEAGEECDCGFHVECYGLCCKKCSLSNGAHCSDGPCCNNTSCLFQPRGYECRDAVNECDITEYCTGDSGQCPPNLHKQDGYACNQNQGRCYNGECKTRDNQCQYIWGTKAAGSDKFCYEKLNTEGTEKGNCGKDGDRWIQCSKHDVFCGFLLCTNLTRAPRIGQLQGEIIPTSFYHQGRVIDCSGAHVVLDDDTDVGYVEDGTPCGPSMMCLDRKCLQIQALNMSSCPLDSKGKVCSGHGVCSNEATCICDFTWAGTDCSIRDPVRNLHPPKDEGPKGPSATN

SEQ ID NO: 957 - protein, 467 aa, synthetic construct
  REGION 1..467: note = ADAM28 (Q9UKQ2) ECD
VQEHEKYIEYYLVLDNGEFKRYNENQDEIRKRVFEMANYVNMLYKKLNTHVALVGMEIWTDKDKIKITPNASFTLENFSKWRGSVLSRRKRHDIAQLITATELAGTTVGLAFMSTMCSPYSVGVVQDHSDNLLRVAGTMAHEMGHNFGMFHDDYSCKCPSTICVMDKALSFYIPTDFSSCSRLSYDKFFEDKLSNCLFNAPLPTDIISTPICGNQLVEMGEDCDCGTSEECTNICCDAKTCKIKATFQCALGECCEKCQFKKAGMVCRPAKDECDLPEMCNGKSGNCPDDRFQVNGFPCHHGKGHCLMGTCPTLQEQCTELWGPGTEVADKSCYNRNEGGSKYGYCRRVDDTLIPCKANDTMCGKLFCQGGSDNLPWKGRIVTFLTCKTFDPEDTSQEIGMVANGTKCGDNKVCINAECVDIEKAYKSTNCSSKCKGHAVCDHELQCQCEEGWIPPDCDDSSVVFHF

SEQ ID NO: 958 - protein, 481 aa, synthetic construct
  REGION 1..481: note = ADAM29 (Q9UKF5) ECD
WIHFRIVEIVVVIDNYLYIRYERNDSKLLEDLYVIVNIVDSILDVIGVKVLLFGLEIWTNKNLIVVDDVRKSVHLYCKWKSENITPRMQHDTSHLFTTLGLRGLSGIGAFRGMCTPHRSCAIVTFMNKTLGTFSIAVAHHLGHNLGMNHDEDTCRCSQPRCIMHEGNPPITKFSNCSYGDFWEYTVERTKCLLETVHTKDIFNVKRCGNGVVEEGEECDCGPLKHCAKDPCCLSNCTLTDGSTCAFGLCCKDCKFLPSGKVCRKEVNECDLPEWCNGTSHKCPDDFYVEDGIPCKERGYCYEKSCHDRNEQCRRIFGAGANTASETCYKELNTLGDRVGHCGIKNATYIKCNISDVQCGRIQCENVTEIPNMSDHTTVHWARFNDIMCWSTDYHLGMKGPDIGEVKDGTECGIDHICIHRHCVHITILNSNCSPAFCNKRGICNNKHHCHCNYLWDPPNCLIKGYGGSVDSGPPPKRKKKK

SEQ ID NO: 959 - protein, 489 aa, synthetic construct
  REGION 1..489: note = ADAM30 (Q9UKF2) ECD
YKHPKYLELILLFDQSRYRFVNNNLSQVIHDAILLTGIMDTYFQDVRMRIHLKALEVWTDFNKIRVGYPELAEVLGRFVIYKKSVLNARLSSDWAHLYLQRKYNDALAWSFGKVCSLEYAGSVSTLLDTNILAPATWSAHELGHAVGMSHDEQYCQCRGRLNCIMGSGRTGFSNCSYISFFKHISSGATCLNNIPGLGYVLKRCGNKIVEDNEECDCGSTEECQKDRCCQSNCKLQPGANCSIGLCCHDCRFRPSGYVCRQEGNECDLAEYCDGNSSSCPNDVYKQDGTPCKYEGRCFRKGCRSRYMQCQSIFGPDAMEAPSECYDAVNLIGDQFGNCEITGIRNFKKCESANSICGRLQCINVETIPDLPEHTTIISTHLQAENLMCWGTGYHLSMKPMGIPDLGMINDGTSCGEGRVCFKKNCVNSSVLQFDCLPEKCNTRGVCNNRKNCHCMYGWAPPFCEEVGYGGSIDSGPPGLLRGAIPSSIW

SEQ ID NO: 960 - protein, 508 aa, synthetic construct
  REGION 1..508: note = ADAM32 (Q8TC27) ECD
KSEPAVPDLFPLYLEMHIVVDKTLYDYWGSDSMIVTNKVIEIVGLANSMFTQFKVTIVLSSLELWSDENKISTVGEADELLQKFLEWKQSYLNLRPHDIAYLLIYMDYPRYLGAVFPGTMCITRYSAGVALYPKEITLEAFAVIVTQMLALSLGISYDDPKKCQCSESTCIMNPEVVQSNGVKTFSSCSLRSFQNFISNVGVKCLQNKPQMQKKSPKPVCGNGRLEGNEICDCGTEAQCGPASCCDFRTCVLKDGAKCYKGLCCKDCQILQSGVECRPKAHPECDIAENCNGTSPECGPDITLINGLSCKNNKFICYDGDCHDLDARCESVFGKGSRNAPFACYEEIQSQSDRFGNCGRDRNNKYVFCGWRNLICGRLVCTYPTRKPFHQENGDVIYAFVRDSVCITVDYKLPRTVPDPLAVKNGSQCDIGRVCVNRECVESRIIKASAHVCSQQCSGHGVCDSRNKCHCSPGYKPPNCQIRSKGFSIFPEEDMGSIMERASGKTENT

SEQ ID NO: 961 - protein, 672 aa, synthetic construct
  REGION 1..672: note = ADAM33 (Q9BZ11) ECD
VLQGHIPGQPVTPHWVLDGQPWRTVSLEEPVSKPDMGLVALEAEGQELLLELEKNHRLLAPGYIETHYGPDGQPVVLAPNHTDHCHYQGRVRGFPDSWVVLCTCSGMSGLITLSRNASYYLRPWPPRGSKDFSTHEIFRMEQLLTWKGTCGHRDPGNKAGMTSLPGGPQSRGRREARRTRKYLELYIVADHTLFLTRHRNLNHTKQRLLEVANYVDQLLRTLDIQVALTGLEVWTERDRSRVTQDANATLWAFLQWRRGLWAQRPHDSAQLLTGRAFQGATVGLAPVEGMCRAESSGGVSTDHSELPIGAAATMAHEIGHSLGLSHDPDGCCVEAAAESGGCVMAAATGHPFPRVFSACSRRQLRAFFRKGGGACLSNAPDPGLPVPPALCGNGFVEAGEECDCGPGQECRDLCCFAHNCSLRPGAQCAHGDCCVRCLLKPAGALCRQAMGDCDLPEFCTGTSSHCPPDVYLLDGSPCARGSGYCWDGACPTLEQQCQQLWGPGSHPAPEACFQVVNSAGDAHGNCGQDSEGHFLPCAGRDALCGKLQCQGGKPSLLAPHMVPVDSTVHLDGQEVTCRGALALPSAQLDLLGLGLVEPGTQCGPRMVCQSRRCRKNAFQELQRCLTACHSHGVCNSNHNCHCAPGWAPPFCDKPGFGGSMDSGPVQAENHDT

SEQ ID NO: 962 - protein, 650 aa, synthetic construct
  REGION 1..650: note = ADAM7 (Q9H2U9) ECD
KFILGVEGQQLVRPKKLPLIQKRDTGHTHDDDILKTYEEELLYEIKLNRKTLVLHLLRSREFLGSNYSETFYSMKGEAFTRHPQIMDHCFYQGSIVHEYDSAASISTCNGLRGFFRINDQRYLIEPVKYSDEGEHLVFKYNLRVPYGANYSCTELNFTRKTVPGDNESEEDSKIKGIHDEKYVELFIVADDTVYRRNGHPHNKLRNRIWGMVNFVNMIYKTLNIHVTLVGIEIWTHEDKIELYSNIETTLLRFSFWQEKILKTRKDFDHVVLLSGKWLYSHVQGISYPGGMCLPYYSTSIIKDLLPDTNIIANRMAHQLGHNLGMQHDEFPCTCPSGKCVMDSDGSIPALKFSKCSQNQYHQYLKDYKPTCMLNIPFPYNFHDFQFCGNKKLDEGEECDCGPAQECTNPCCDAHTCVLKPGFTCAEGECCESCQIKKAGSICRPAKDECDFPEMCTGHSPACPKDQFRVNGFPCKNSEGYCFMGKCPTREDQCSELFDDEAIESHDICYKMNTKGNKFGYCKNKENRFLPCEEKDVRCGKIYCTGGELSSLLGEDKTYHLKDPQKNATVKCKTIFLYHDSTDIGLVASGTKCGEGMVCNNGECLNMEKVYISTNCPSQCNENPVDGHGLQCHCEEGQAPVACEETLHVTN

SEQ ID NO: 963 - protein, 639 aa, synthetic construct
  REGION 1..639: note = ADAM8 (P78325) ECD
IAPSRPWALMEQYEVVLPWRLPGPRVRRALPSHLGLHPERVSYVLGATGHNFTLHLRKNRDLLGSGYTETYTAANGSEVTEQPRGQDHCFYQGHVEGYPDSAASLSTCAGLRGFFQVGSDLHLIEPLDEGGEGGRHAVYQAEHLLQTAGTCGVSDDSLGSLLGPRTAAVFRPRPGDSLPSRETRYVELYVVVDNAEFQMLGSEAAVRHRVLEVVNHVDKLYQKLNFRVVLVGLEIWNSQDRFHVSPDPSVTLENLLTWQARQRTRRHLHDNVQLITGVDFTGTTVGFARVSAMCSHSSGAVNQDHSKNPVGVACTMAHEMGHNLGMDHDENVQGCRCQERFEAGRCIMAGSIGSSFPRMFSDCSQAYLESFLERPQSVCLANAPDLSHLVGGPVCGNLFVERGEQCDCGPPEDCRNRCCNSTTCQLAEGAQCAHGTCCQECKVKPAGELCRPKKDMCDLEEFCDGRHPECPEDAFQENGTPCSGGYCYNGACPTLAQQCQAFWGPGGQAAEESCFSYDILPGCKASRYRADMCGVLQCKGGQQPLGRAICIVDVCHALTTEDGTAYEPVPEGTRCGPEKVCWKGRCQDLHVYRSSNCSAQCHNHGVCNHKQECHCHAGWAPPHCAKLLTEVHAASGSLP

SEQ ID NO: 964 - protein, 669 aa, synthetic construct
  REGION 1..669: note = ADAM9 (Q13443) ECD
AARPGFQQTSHLSSYEIITPWRLTRERREAPRPYSKQVSYVIQAEGKEHIIHLERNKDLLPEDFVVYTYNKEGTLITDHPNIQNHCHYRGYVEGVHNSSIALSDCFGLRGLLHLENASYGIEPLQNSSHFEHIIYRMDDVYKEPLKCGVSNKDIEKETAKDEEEEPPSMTQLLRRRRAVLPQTRYVELFIVVDKERYDMMGRNQTAVREEMILLANYLDSMYIMLNIRIVLVGLEIWTNGNLINIVGGAGDVLGNFVQWREKFLITRRRHDSAQLVLKKGFGGTAGMAFVGTVCSRSHAGGINVFGQITVETFASIVAHELGHNLGMNHDDGRDCSCGAKSCIMNSGASGSRNFSSCSAEDFEKLTLNKGGNCLLNIPKPDEAYSAPSCGNKLVDAGEECDCGTPKECELDPCCEGSTCKLKSFAECAYGDCCKDCRFLPGGTLCRGKTSECDVPEYCNGSSQFCQPDVFIQNGYPCQNNKAYCYNGMCQYYDAQCQVIFGSKAKAAPKDCFIEVNSKGDRFGNCGFSGNEYKKCATGNALCGKLQCENVQEIPVFGIVPAIIQTPSRGTKCWGVDFQLGSDVPDPGMVNEGTKCGAGKICRNFQCVDASVLNYDCDVQKKCHGHGVCNSNKNCHCENGWAPPNCETKGYGGSVDSGPTYNEMNTALRD

SEQ ID NO: 965 - protein, 320 aa, synthetic construct
  REGION 1..320: note = AGER (Q15109) ECD
AQNITARIGEPLVLKCKGAPKKPPQRLEWKLNTGRTEAWKVLSPQGGGPWDSVARVLPNGSLFLPAVGIQDEGIFRCQAMNRNGKETKSNYRVRVYQIPGKPEIVDSASELTAGVPNKVGTCVSEGSYPAGTLSWHLDGKPLVPNEKGVSVKEQTRRHPETGLFTLQSELMVTPARGGDPRPTFSCSFSPGLPRHRALRTAPIQPRVWEPVPLEEVQLVVEPEGGAVAPGGTVTLTCEVPAQPSPQIHWMKDGVPLPLPPSPVLILPEIGPQDQGTYSCVATHSSHGPQESRAVSISIIEPGEEGPTAGSVGGSGLGTLA

SEQ ID NO: 966 - protein, 500 aa, synthetic construct
  REGION 1..500: note = ALCAM (Q13740) ECD
WYTVNSAYGDTIIIPCRLDVPQNLMFGKWKYEKPDGSPVFIAFRSSTKKSVQYDDVPEYKDRLNLSENYTLSISNARISDEKRFVCMLVTEDNVFEAPTIVKVFKQPSKPEIVSKALFLETEQLKKLGDCISEDSYPDGNITWYRNGKVLHPLEGAVVIIFKKEMDPVTQLYTMTSTLEYKTTKADIQMPFTCSVTYYGPSGQKTIHSEQAVFDIYYPTEQVTIQVLPPKNAIKEGDNITLKCLGNGNPPPEEFLFYLPGQPEGIRSSNTYTLTDVRRNATGDYKCSLIDKKSMIASTAITVHYLDLSLNPSGEVTRQIGDALPVSCTISASRNATVVWMKDNIRLRSSPSFSSLHYQDAGNYVCETALQEVEGLKKRESLTLIVEGKPQIKMTKKTDPSGLSKTIICHVEGFPKPAIQWTITGSGSVINQTEESPYINGRYYSKIIISPEENVTLTCTAENQLERTVNSLNVSAISIPEHDEADEISDENREKVNDQAK

SEQ ID NO: 967 - protein, 1020 aa, synthetic construct
  REGION 1..1020: note = ALK (Q9UM73) ECD
VGSGMGTGQRAGSPAAGPPLQPREPLSYSRLQRKSLAVDFVVPSLFRVYARDLLLPPSSSELKAGRPEARGSLALDCAPLLRLLGPAPGVSWTAGSPAPAEARTLSRVLKGGSVRKLRRAKQLVLELGEEAILEGCVGPPGEAAVGLLQFNLSELFSWWIRQGEGRLRIRLMPEKKASEVGREGRLSAAIRASQPRLLFQIFGTGHSSLESPTNMPSPSPDYFTWNLTWIMKDSFPFLSHRSRYGLECSFDFPCELEYSPPLHDLRNQSWSWRRIPSEEASQMDLLDGPGAERSKEMPRGSFLLLNTSADSKHTILSPWMRSSSEHCTLAVSVHRHLQPSGRYIAQLLPHNEAAREILLMPTPGKHGWTVLQGRIGRPDNPFRVALEYISSGNRSLSAVDFFALKNCSEGTSPGSKMALQSSFTCWNGTVLQLGQACDFHQDCAQGEDESQMCRKLPVGFYCNFEDGFCGWTQGTLSPHTPQWQVRTLKDARFQDHQDHALLLSTTDVPASESATVTSATFPAPIKSSPCELRMSWLIRGVLRGNVSLVLVENKTGKEQGRMVWHVAAYEGLSLWQWMVLPLLDVSDRFWLQMVAWWGQGSRAIVAFDNISISLDCYLTISGEDKILQNTAPKSRNLFERNPNKELKPGENSPRQTPIFDPTVHWLFTTCGASGPHGPTQAQCNNAYQNSNLSVEVGSEGPLKGIQIWKVPATDTYSISGYGAAGGKGGKNTMMRSHGVSVLGIFNLEKDDMLYILVGQQGEDACPSTNQLIQKVCIGENNVIEEEIRVNRSVHEWAGGGGGGGGATYVFKMKDGVPVPLIIAAGGGGRAYGAKTDTFHPERLENNSSVLGLNGNSGAAGGGGGWNDNTSLLWAGKSLQEGATGGHSCPQAMKKWGWETRGGFGGGGGGCSSGGGGGGYIGGNAASNNDPEMDGEDGVSFISPLGILYTPALKVMEGHGEVNIKHYLNCSHCEVDECHMDPESHKVICFCDHGTVLAEDGVSCIVSPTPEPHLPLSLILS

SEQ ID NO: 968 - protein, 132 aa, synthetic construct [sequence omitted]

SEQ ID NO: 969 - protein, 256 aa, synthetic construct
  REGION 1..256: note = AMICA1 (Q86YT9) ECD
LNDLNVSPPELTVHVGDSALMGCVFQSTEDKCIFKIDWTLSPGEHAKDEYVLYYYSNLSVPIGRFQNRVHLMGDILCNDGSLLLQDVQEADQGTYICEIRLKGESQVFKKAVVLHVLPEEPKELMVHVGGLIQMGCVFQSTEVKHVTKVEWIFSGRRAKEEIVFRYYHKLRMSVEYSQSWGHFQNRVNLVGDIFRNDGSIMLQGVRESDGGNYTCSIHLGNLVFKKTIVLHVSPEEPRTLVTPAALRPLVLGGNQL

SEQ ID NO: 970 - protein, 345 aa, synthetic construct
  REGION 1..345: note = AMIGO1 (Q86WK6) ECD
GRAVVSCPAACLCASNILSCSKQQLPNVPHSLPSYTALLDLSHNNLSRLRAEWTPTRLTQLHSLLLSHNHLNFISSEAFSPVPNLRYLDLSSNQLRTLDEFLFSDLQVLEVLLLYNNHIMAVDRCAFDDMAQLQKLYLSQNQISRFPLELVKEGAKLPKLTLLDLSSNKLKNLPLPDLQKLPAWIKNGLYLHNNPLNCDCELYQLFSHWQYRQLSSVMDFQEDLYCMNSKKLHNVFNLSFLNCGEYKERAWEAHLGDTLIIKCDTKQQGMTKVWVTPSNERVLDEVTNGTVSVSKDGSLLFQQVQVEDGGVYTCYAMGETFNETLSVELKVHNFTLHGHHDTLNT

SEQ ID NO: 971 - protein, 359 aa, synthetic construct
  REGION 1..359: note = AMIGO2 (Q86SJ2) ECD
VCPTACICATDIVSCTNKNLSKVPGNLFRLIKRLDLSYNRIGLLDSEWIPVSFAKLNTLILRHNNITSISTGSFSTTPNLKCLDLSSNKLKTVKNAVFQELKVLEVLLLYNNHISYLDPSAFGGLSQLQKLYLSGNFLTQFPMDLYVGRFKLAELMFLDVSYNRIPSMPMHHINLVPGKQLRGIYLHGNPFVCDCSLYSLLVFWYRRHFSSVMDFKNDYTCRLWSDSRHSRQVLLLQDSFMNCSDSIINGSFRALGFIHEAQVGERLMVHCDSKTGNANTDFIWVGPDNRLLEPDKEMENFYVFHNGSLVIESPRFEDAGVYSCIAMNKQRLLNETVDVTINVSNFTVSRSHAHEAFNT

SEQ ID NO: 972 - protein, 364 aa, synthetic construct
  REGION 1..364: note = AMIGO3 (Q86WK7) ECD
TPDSEGFPPRALHNCPYKCICAADLLSCTGLGLQDVPAELPAATADLDLSHNALQRLRPGWLAPLFQLRALHLDHNELDALGRGVFVNASGLRLLDLSSNTLRALGRHDLDGLGALEKLLLFNNRLVHLDEHAFHGLRALSHLYLGCNELASFSFDHLHGLSATHLLTLDLSSNRLGHISVPELAALPAFLKNGLYLHNNPLPCDCRLYHLLQRWHQRGLSAVRDFAREYVCLAFKVPASRVRFFQHSRVFENCSSAPALGLERPEEHLYALVGRSLRLYCNTSVPAMRIAWVSPQQELLRAPGSRDGSIAVLADGSLAIGNVQEQHAGLFVCLATGPRLHHNQTHEYNVSVHFPRPEPEAFNT

SEQ ID NO: 973 - protein, 338 aa, synthetic construct
  REGION 1..338: note = AMN (Q9BXJ7) ECD
VSKLWVPNTDFDVAANWSQNRTPCAGGAVEFPADKMVSVLVQEGHAVSDMLLPLDGELVLASGAGFGVSDVGSHLDCGAGEPAVFRDSDRFSWHDPHLWRSGDEAPGLFFVDAERVPCRHDDVFFPPSASFRVGLGPGASPVRVRSISALGRTFTRDEDLAVFLASRAGRLRFHGPGALSVGPEDCADPSGCVCGNAEAQPWICAALLQPLGGRCPQAACHSALRPQGQCCDLCGAVVLLTHGPAFDLERYRARILDTFLGLPQYHGLQVAVSKVPRSSRLREADTEIQVVLVENGPETGGAGRLARALLADVAENGEALGVLEATMRESGAHVWGSS

SEQ ID NO: 974 - protein, 289 aa, synthetic construct [sequence omitted]

SEQ ID NO: 975 - protein, 285 aa, synthetic construct
  REGION 1..285: note = ANTXR2 (P58335) ECD
QEQPSCRRAFDLYFVLDKSGSVANNWIEIYNFVQQLAERFVSPEMRLSFIVFSSQATIILPLTGDRGKISKGLEDLKRVSPVGETYIHEGLKLANEQIQKAGGLKTSSIIIALTDGKLDGLVPSYAEKEAKISRSLGASVYCVGVLDFEQAQLERIADSKEQVFPVKGGFQALKGIINSILAQSCTEILELQPSSVCVGEEFQIVLSGRGFMLGSRNGSVLCTYTVNETYTTSVKPVSVQLNSMLCPAPILNKAGETLDVSVSFNGGKSVISGSLIVTATECSNG

SEQ ID NO: 976 - protein, 326 aa, synthetic construct
  REGION 1..326: note = ANTXRL (A6NF34) ECD
GSLRYHGPDWRIFHRLALGSRRAHHHHGPGWRQHWRQGQAGHRCQGSFDLYFILDKSGSVNNNWIDLYMWVEETVARFQSPNIRMCFITYSTDGQTVLPLTSDKNRIKNGLDQLQKIVPDGHTFMQAGFRKAIQQIESFNSGNKVPSMIIAMTDGELVAHAFQDTLREAQKARKLGANVYTLGVADYNLDQITAIADSPGHVFAVENGFKALRSTIDALTSKVCLDVTSVEPSSECVGEPYHVVIHGNGFQNLKKRDEVICRFIFNESTIIDEKPTSIDNNSMNCPGPKLEKPGEEYSIEVSLNKGKTFFKSNVSITSTTCGIFRN

SEQ ID NO: 977 - protein, 466 aa, synthetic construct
  REGION 1..466: note = APCDD1 (Q8J025) ECD
LLHPDSRSHPRSLEKSAWRAFKESQCHHMLKHLHNGARITVQMPPTIEGHWVSTGCEVRSGPEFITRSYRFYHNNTFKAYQFYYGSNRCTNPTYTLIIRGKIRLRQASWIIRGGTEADYQLHNVQVICHTEAVAEKLGQQVNRTCPGFLADGGPWVQDVAYDLWREENGCECTKAVNFAMHELQLIRVEKQYLHHNLDHLVEELFLGDIHTDATQRMFYRPSSYQPPLQNAKNHDHACIACRIIYRSDEHHPPILPPKADLTIGLHGEWVSQRCEVRPEVLFLTRHFIFHDNNNTWEGHYYHYSDPVCKHPTFSIYARGRYSRGVLSSRVMGGTEFVFKVNHMKVTPMDAATASLLNVFNGNECGAEGSWQVGIQQDVTHTNGCVALGIKLPHTEYEIFKMEQDARGRYLLFNGQRPSDGSSPDRPEKRATSYQMPLVQCASSSPRAEDLAEDSGSSLYGRAPGRH

SEQ ID NO: 978 - protein, 542 aa, synthetic construct
  REGION 1..542: note = APLP1 (P51693) ECD
SLAGGSPGAAEAPGSAQVAGLCGRLTLHRDLRTGRWEPDPQRSRRCLRDPQRVLEYCRQMYPELQIARVEQATQAIPMERWCGGSRSGSCAHPHHQVVPFRCLPGEFVSEALLVPEGCRFLHQERMDQCESSTRRHQEAQEACSSQGLILHGSGMLLPCGSDRFRGVEYVCCPPPGTPDPSGTAVGDPSTRSWPPGSRVEGAEDEEEEESFPQPVDDYFVEPPQAEEEEETVPPPSSHTLAVVGKVTPTPRPTDGVDIYFGMPGEISEHEGFLRAKMDLEERRMRQINEVMREWAMADNQSKNLPKADRQALNEHFQSILQTLEEQVSGERQRLVETHATRVIALINDQRRAALEGFLAALQADPPQAERVLLALRRYLRAEQKEQRHTLRHYQHVAAVDPEKAQQMRFQVHTHLQVIEERVNQSLGLLDQNPHLAQELRPQIQELLHSEHLGPSELEAPAPGGSSEDKGGLQPPDSKDDTPMTLPKGSTEQDAASPEKEKMNPLEQYERKVNASVPRGFPFHSSEIQRDELAPAGTGVSRE

SEQ ID NO: 979 - protein, 661 aa, synthetic construct
  REGION 1..661: note = APLP2 (Q06481) ECD
GYIEALAANAGTGFAVAEPQIAMFCGKLNMHVNIQTGKWEPDPTGTKSCFETKEEVLQYCQEMYPELQITNVMEANQRVSIDNWCRRDKKQCKSRFVTPFKCLVGEFVSDVLLVPEKCQFFHKERMEVCENHQHWHTVVKEACLTQGMTLYSYGMLLPCGVDQFHGTEYVCCPQTKIIGSVSKEEEEEDEEEEEEEDEEEDYDVYKSEFPTEADLEDFTEAAVDEDDEDEEEGEEVVEDRDYYYDTFKGDDYNEENPTEPGSDGTMSDKEITHDVKAVCSQEAMTGPCRAVMPRWYFDLSKGKCVRFIYGGCGGNRNNFESEDYCMAVCKAMIPPTPLPTNDVDVYFETSADDNEHARFQKAKEQLEIRHRNRMDRVKKEWEEAELQAKNLPKAERQTLIQHFQAMVKALEKEAASEKQQLVETHLARVEAMLNDRRRMALENYLAALQSDPPRPHRILQALRRYVRAENKDRLHTIRHYQHVLAVDPEKAAQMKSQVMTHLHVIEERRNQSLSLLYKVPYVAQEIQEEIDELLQEQRADMDQFTASISETPVDVRVSSEESEEIPPFHPFHPFPALPENEDTQPELYHPMKKGSGVGEQDGGLIGAEEKVINSKNKVDENMVIDETLDVKEMIFNAERVGGLEEERESVGPLREDFSLSS

SEQ ID NO: 980 - protein, 684 aa, synthetic construct
  REGION 1..684: note = APP (P05067) ECD
LEVPTDGNAGLLAEPQIAMFCGRLNMHMNVQNGKWDSDPSGTKTCIDTKEGILQYCQEVYPELQITNVVEANQPVTIQNWCKRGRKQCKTHPHFVIPYRCLVGEFVSDALLVPDKCKFLHQERMDVCETHLHWHTVAKETCSEKSTNLHDYGMLLPCGIDKFRGVEFVCCPLAEESDNVDSADAEEDDSDVWWGGADTDYADGSEDKVVEVAEEEEVAEVEEEEADDDEDDEDGDEVEEEAEEPYEEATERTTSIATTTTTTTESVEEVVREVCSEQAETGPCRAMISRWYFDVTEGKCAPFFYGGCGGNRNNFDTEEYCMAVCGSAMSQSLLKTTQEPLARDPVKLPTTAASTPDAVDKYLETPGDENEHAHFQKAKERLEAKHRERMSQVMREWEEAERQAKNLPKADKKAVIQHFQEKVESLEQEAANERQQLVETHMARVEAMLNDRRRLALENYITALQAVPPRPRHVFNMLKKYVRAEQKDRQHTLKHFEHVRMVDPKKAAQIRSQVMTHLRVIYERMNQSLSLLYNVPAVAEEIQDEVDELLQKEQNYSDDVLANMISEPRISYGNDALMPSLTETKTTVELLPVNGEFSLDDLQPWHSFGADSVPANTENEVEPVDARPAADRGLTTRPGSGLTNIKTEEISEVKMDAEFRHDSGYEVHHQKLVFFAEDVGSNKGA

SEQ ID NO: 981 - protein, 179 aa, synthetic construct
  REGION 1..179: note = AREG (P15514) ECD
SGHYAAGLDLNDTYSGKREPFSGDHSADGFEVTSRSEMSSGSEISPVSEMPSSSEPSSGADYDYSEEYDNEPQIPGYIVDDSVRVEQVVKPPQNKTESENTSDKPKRKKKGGKNGKNRRNRKKKNPCNAEFQNFCIHGECKYIEHLEAVTCKCQQEYFGERCGEKSMKTHSMIDSSLSK

SEQ ID NO: 982 - protein, 169 aa, synthetic construct
  REGION 1..169: note = ATRAID (Q6UW56) ECD
LPEICTQCPGSVQNLSKVAFYCKTTRELMLHARCCLNQKGTILGLDLQNCSLEDPGPNFHQAHTTVIIDLQANPLKGDLANTFRGFTQLQTLILPQHVNCPGGINAWNTITSYIDNQICQGQKNLCNNTGDPEMCPENGSCVPDGPGLLQCVCADGFHGYKCMRQGSFS

SEQ ID NO: 983 - protein, 1196 aa, synthetic construct
  REGION 1..1196: note = ATRN (O75882) ECD
AAAAAAVSGSAAAEAKECDRPCVNGGRCNPGTGQCVCPAGWVGEQCQHCGGRFRLTGSSGFVTDGPGNYKYKTKCTWLIEGQPNRIMRLRFNHFATECSWDHLYVYDGDSIYAPLVAAFSGLIVPERDGNETVPEVVATSGYALLHFFSDAAYNLTGFNITYSFDMCPNNCSGRGECKISNSSDTVECECSENWKGEACDIPHCTDNCGFPHRGICNSSDVRGCSCFSDWQGPGCSVPVPANQSFWTREEYSNLKLPRASHKAVVNGNIMWVVGGYMFNHSDYNMVLAYDLASREWLPLNRSVNNVVVRYGHSLALYKDKIYMYGGKIDSTGNVTNELRVFHIHNESWVLLTPKAKEQYAVVGHSAHIVTLKNGRVVMLVIFGHCPLYGYISNVQEYDLDKNTWSILHTQGALVQGGYGHSSVYDHRTRALYVHGGYKAFSANKYRLADDLYRYDVDTQMWTILKDSRFFRYLHTAVIVSGTMLVFGGNTHNDTSMSHGAKCFSSDFMAYDIACDRWSVLPRPDLHHDVNRFGHSAVLHNSTMYVFGGFNSLLLSDILVFTSEQCDAHRSEAACLAAGPGIRCVWNTGSSQCISWALATDEQEEKLKSECFSKRTLDHDRCDQHTDCYSCTANTNDCHWCNDHCVPRNHSCSEGQISIFRYENCPKDNPMYYCNKKTSCRSCALDQNCQWEPRNQECIALPENICGIGWHLVGNSCLKITTAKENYDNAKLFCRNHNALLASLTTQKKVEFVLKQLRIMQSSQSMSKLTLTPWVGLRKINVSYWCWEDMSPFTNSLLQWMPSEPSDAGFCGILSEPSTRGLKAATCINPLNGSVCERPANHSAKQCRTPCALRTACGDCTSGSSECMWCSNMKQCVDSNAYVASFPFGQCMEWYTMSTCPPENCSGYCTCSHCLEQPGCGWCTDPSNTGKGKCIEGSYKGPVKMPSQAPTGNFYPQPLLNSSMCLEDSRYNWSFIHCPACQCNGHSKCINQSICEKCENLTTGKHCETCISGFYGDPTNGGKCQPCKCNGHASLCNTNTGKCFCTTKGVKGDECQLCEVENRYQGNPLRGTCYYTLLIDYQFTFSLSQEDDRYYTAINFVATPDEQNRDLDMFINASKNFNLNITWAASFSAGTQAGEEMPVVSKTNIKEYKDSFSNEKFDFRNHPNITFFVYVSNFTWPIKIQIAFSQHSNFMDL

SEQ ID NO: 984 - protein, 1178 aa, synthetic construct
  REGION 1..1178: note = ATRNL1 (Q5VV63) ECD
LYAQVSQSKPCERTGSCFSGRCVNSTCLCDPGWVGDQCQHCQGRFKLTEPSGYLTDGPINYKYKTKCTWLIEGYPNAVLRLRFNHFATECSWDHMYVYDGDSIYAPLIAVLSGLIVPEIRGNETVPEVVTTSGYALLHFFSDAAYNLTGFNIFYSINSCPNNCSGHGKCTTSVSVPSQVYCECDKYWKGEACDIPYCKANCGSPDHGYCDLTGEKLCVCNDSWQGPDCSLNVPSTESYWILPNVKPFSPSVGRASHKAVLHGKFMWVIGGYTFNYSSFQMVLNYNLESSIWNVGTPSRGPLQRYGHSLALYQENIFMYGGRIETNDGNVTDELWVFNIHSQSWSTKTPTVLGHGQQYAVEGHSAHIMELDSRDVVMIIIFGYSAIYGYTSSIQEYHISSNTWLVPETKGAIVQGGYGHTSVYDEITKSIYVHGGYKALPGNKYGLVDDLYKYEVNTKTWTILKESGFARYLHSAVLINGAMLIFGGNTHNDTSLSNGAKCFSADFLAYDIACDEWKILPKPNLHRDVNRFGHSAVVINGSMYIFGGFSSVLLNDILVYKPPNCKAFRDEELCKNAGPGIKCVWNKNHCESWESGNTNNILRAKCPPKTAASDDRCYRYADCASCTANTNGCQWCDDKKCISANSNCSMSVKNYTKCHVRNEQICNKLTSCKSCSLNLNCQWDQRQQECQALPAHLCGEGWSHIGDACLRVNSSRENYDNAKLYCYNLSGNLASLTTSKEVEFVLDEIQKYTQQKVSPWVGLRKINISYWGWEDMSPFTNTTLQWLPGEPNDSGFCAYLERAAVAGLKANPCTSMANGLVCEKPVVSPNQNARPCKKPCSLRTSCSNCTSNGMECMWCSSTKRCVDSNAYIISFPYGQCLEWQTATCSPQNCSGLRTCGQCLEQPGCGWCNDPSNTGRGHCIEGSSRGPMKLIGMHHSEMVLDTNLCPKEKNYEWSFIQCPACQCNGHSTCINNNVCEQCKNLTTGKQCQDCMPGYYGDPTNGGQCTACTCSGHANICHLHTGKCFCTTKGIKGDQCQLCDSENRYVGNPLRGTCYYSLLIDYQFTFSLLQEDDRHHTAINFIANPEQSNKNLDISINASNNFNLNITWSVGSTAGTISGEETSIVSKNNIKEYRDSFSYEKFNFRSNPNITFYVYVSNFSWPIKIQIAFSQHNTIMDL

SEQ ID NO: 985 - protein, 426 aa, synthetic construct
  REGION 1..426: note = AXL (P30530) ECD
APRGTQAEESPFVGNPGNITGARGLTGTLRCQLQVQGEPPEVHWLRDGQILELADSTQTQVPLGEDEQDDWIVVSQLRITSLQLSDTGQYQCLVFLGHQTFVSQPGYVGLEGLPYFLEEPEDRTVAANTPFNLSCQAQGPPEPVDLLWLQDAVPLATAPGHGPQRSLHVPGLNKTSSFSCEAHNAKGVTTSRTATITVLPQQPRNLHLVSRQPTELEVAWTPGLSGIYPLTHCTLQAVLSDDGMGIQAGEPDPPEEPLTSQASVPPHQLRLGSLHPHTPYHIRVACTSSQGPSSWTHWLPVETPEGVPLGPPENISATRNGSQAFVHWQEPRAPLQGTLLGYRLAYQGQDTPEVLMDIGLRQEVTLELQGDGSVSNLTVCVAAYTAAGDGPWSLPVPLEAWRPGQAQPVHQLVKEPSTPAFSWPWW

SEQ ID NO: 986 - protein, 436 aa, synthetic construct
  REGION 1..436: note = BACE1 (P56817) ECD
TQHGIRLPLRSGLGGAPLGLRLPRETDEEPEEPGRRGSFVEMVDNLRGKSGQGYYVEMTVGSPPQTLNILVDTGSSNFAVGAAPHPFLHRYYQRQLSSTYRDLRKGVYVPYTQGKWEGELGTDLVSIPHGPNVTVRANIAAITESDKFFINGSNWEGILGLAYAEIARPDDSLEPFFDSLVKQTHVPNLFSLQLCGAGFPLNQSEVLASVGGSMIIGGIDHSLYTGSLWYTPIRREWYYEVIIVRVEINGQDLKMDCKEYNYDKSIVDSGTTNLRLPKKVFEAAVKSIKAASSTEKFPDGFWLGEQLVCWQAGTTPWNIFPVISLYLMGEVTNQSFRITILPQQYLRPVEDVATSQDDCYKFAISQSSTGTVMGAVIMEGFYVVFDRARKRIGFAVSACHVHDEFRTAAVEGPFVTLDMEDCGYNIPQTDESTLMT

SEQ ID NO: 987 - protein, 453 aa, synthetic construct
  REGION 1..453: note = BACE2 (Q9Y5Z0) ECD
APELAPAPFTLPLRVAAATNRVVAPTPGPGTPAERHADGLALALEPALASPAGAANFLAMVDNLQGDSGRGYYLEMLIGTPPQKLQILVDTGSSNFAVAGTPHSYIDTYFDTERSSTYRSKGFDVTVKYTQGSWTGFVGEDLVTIPKGFNTSFLVNIATIFESENFFLPGIKWNGILGLAYATLAKPSSSLETFFDSLVTQANIPNVFSMQMCGAGLPVAGSGTNGGSLVLGGIEPSLYKGDIWYTPIKEEWYYQIEILKLEIGGQSLNLDCREYNADKAIVDSGTTLLRLPQKVFDAVVEAVARASLIPEFSDGFWTGSQLACWTNSETPWSYFPKISIYLRDENSSRSFRITILPQLYIQPMMGAGLNYECYRFGISPSTNALVIGATVMEGFYVIFDRAQKRVGFAASPCAEIAGAAVSEISGPFSTEDVASNCVPAQSLSEPILWIVSY

SEQ ID NO: 988 - protein, 132 aa, synthetic construct
  REGION 1..132: note = BAMBI (Q13145) ECD
VLLTKGEIRCYCDAAHCVATGYMCKSELSACFSRLLDPQNSNSPLTHGCLDSLASTTDICQAKQARNHSGTTIPTLECCHEDMCNYRGLHDVLSPPRGEASGQGNRYQHDGSRNLITKVQELTSSKELWFRA

SEQ ID NO: 989 - protein, 516 aa, synthetic construct
  REGION 1..516: note = BCAM (P50895) ECD
EVRLSVPPLVEVMRGKSVILDCTPTGTHDHYMLEWFLTDRSGARPRLASAEMQGSELQVTMHDTRGRSPPYQLDSQGRLVLAEAQVGDERDYVCVVRAGAAGTAEATARLNVFAKPEATEVSPNKGTLSVMEDSAQEIATCNSRNGNPAPKITWYRNGQRLEVPVEMNPEGYMTSRTVREASGLLSLTSTLYLRLRKDDRDASFHCAAHYSLPEGRHGRLDSPTFHLTLHYPTEHVQFWVGSPSTPAGWVREGDTVQLLCRGDGSPSPEYTLFRLQDEQEEVLNVNLEGNLTLEGVTRGQSGTYGCRVEDYDAADDVQLSKTLELRVAYLDPLELSEGKVLSLPLNSSAVVNCSVHGLPTPALRWTKDSTPLGDGPMLSLSSITFDSNGTYVCEASLPTVPVLSRTQNFTLLVQGSPELKTAEIEPKADGSWREGDEVTLICSARGHPDPKLSWSQLGGSPAEPIPGRQGWVSSSLTLKVTSALSRDGISCEASNPHGNKRHVFHFGTVSPQTSQA

SEQ ID NO: 990 - protein, 129 aa, synthetic construct
  REGION 1..129: note = BMPR1A (P36894) ECD
QNLDSMLHGTGMKSDSDQKKSENGVTLAPEDTLPFLKCYCSGHCPDDAINNTCITNGHCFAIIEEDDQGETTLASGCMKYEGSDFQCKDSPKAQLRRTIECCRTNLCNQYLQPTLPPVVIGPFFDGSIR

SEQ ID NO: 991 - protein, 124 aa, synthetic construct [sequence omitted]

SEQ ID NO: 992 - protein, 825 aa, synthetic construct
  REGION 1..825: note = BOC (Q9BWV1) ECD
DLNEVPQVTVQPASTVQKPGGTVILGCVVEPPRMNVTWRLNGKELNGSDDALGVLITHGTLVITALNNHTVGRYQCVARMPAGAVASVPATVTLANLQDFKLDVQHVIEVDEGNTAVIACHLPESHPKAQVRYSVKQEWLEASRGNYLIMPSGNLQIVNASQEDEGMYKCAAYNPVTQEVKTSGSSDRLRVRRSTAEAARIIYPPEAQTIIVTKGQSLILECVASGIPPPRVTWAKDGSSVTGYNKTRFLLSNLLIDTTSEEDSGTYRCMADNGVGQPGAAVILYNVQVFEPPEVTMELSQLVIPWGQSAKLTCEVRGNPPPSVLWLRNAVPLISSQRLRLSRRALRVLSMGPEDEGVYQCMAENEVGSAHAVVQLRTSRPSITPRLWQDAELATGTPPVSPSKLGNPEQMLRGQPALPRPPTSVGPASPQCPGEKGQGAPAEAPIILSSPRTSKTDSYELVWRPRHEGSGRAPILYYVVKHRKVTNSSDDWTISGIPANQHRLTLTRLDPGSLYEVEMAAYNCAGEGQTAMVTFRTGRRPKPEIMASKEQQIQRDDPGASPQSSSQPDHGRLSPPEAPDRPTISTASETSVYVTWIPRGNGGFPIQSFRVEYKKLKKVGDWILATSAIPPSRLSVEITGLEKGTSYKFRVRALNMLGESEPSAPSRPYVVSGYSGRVYERPVAGPYITFTDAVNETTIMLKWMYIPASNNNTPIHGFYIYYRPTDSDNDSDYKKDMVEGDKYWHSISHLQPETSYDIKMQCFNEGGESEFSNVMICETKARKSSGQPGRLPPPTLAPPQPPLPETIERPVGTGAMVARSSDLPY

SEQ ID NO: 993 - protein, 186 aa, synthetic construct
  REGION 1..186: note = BSG (P35613) ECD
EPGTVFTTVEDLGSKILLTCSLNDSATEVTGHRWLKGGVVLKEDALPGQKTEFKVDSDDQWGEYSCVFLPEPMGTANIQLHGPPRVKAVKSSEHINEGETAMLVCKSESVPPVTDWAWYKITDSEDKALMNGSESRFFVSSSQGRSELHIENLNMEADPGQYRCNGTSSKGSDQAIITLRVRSHLA

SEQ ID NO: 994 - protein, 87 aa, synthetic construct
  REGION 1..87: note = BTC (P35070) ECD
DGNSTRSPETNGLLCGDPEENCAATTTQSKRKGHFSRCPKQYKHYCIKGRCRFVVAEQTPSCVCDEGYIGARCERVDLFYLRGDRGQ

SEQ ID NO: 995 - protein, 127 aa, synthetic construct
  REGION 1..127: note = BTLA (Q7Z6A9) ECD
KESCDVQLYIKRQSEHSILAGDPFELECPVKYCANRPHVTWCKLNGTTCVKLEDRQTSWKEEKNISFFILHFEPVLPNDNGSYRCSANFQSNLIESHSTTLYVTDVKSASERPSKDEMASRPWLLYR

SEQ ID NO: 996 - protein, 216 aa, synthetic construct
  REGION 1..216: note = BTN1A1 (Q13410) ECD
APFDVIGPPEPILAVVGEDAELPCRLSPNASAEHLELRWFRKKVSPAVLVHRDGREQEAEQMPEYRGRATLVQDGIAKGRVALRIRGVRVSDDGEYTCFFREDGSYEEALVHLKVAALGSDPHISMQVQENGEICLECTSVGWYPEPQVQWRTSKGEKFPSTSESRNPDEEGLFTVAASVIIRDTSAKNVSCYIQNLLLGQEKKVEISIPASSLPR

SEQ ID NO: 997 - protein, 220 aa, synthetic construct
  REGION 1..220: note = BTN2A1 (Q7KYR7) ECD
QFIVVGPTDPILATVGENTTLRCHLSPEKNAEDMEVRWFRSQFSPAVFVYKGGRERTEEQMEEYRGRTTFVSKDISRGSVALVIHNITAQENGTYRCYFQEGRSYDEAILHLVVAGLGSKPLISMRGHEDGGIRLECISRGWYPKPLTVWRDPYGGVAPALKEVSMPDADGLFMVTTAVIIRDKSVRNMSCSINNTLLGQKKESVIFIPESFMPSVSPCA

SEQ ID NO: 998 - protein, 233 aa, synthetic construct
  REGION 1..233: note = BTN2A2 (Q8WVV5) ECD
QFTVVGPANPILAMVGENTTLRCHLSPEKNAEDMEVRWFRSQFSPAVFVYKGGRERTEEQMEEYRGRITFVSKDINRGSVALVIHNVTAQENGIYRCYFQEGRSYDEAILRLVVAGLGSKPLIEIKAQEDGSIWLECISGGWYPEPLTVWRDPYGEVVPALKEVSIADADGLFMVTTAVIIRDKYVRNVSCSVNNTLLGQEKETVIFIPESFMPSASPWMVALAVILTASPWM

SEQ ID NO: 999 - protein, 219 aa, synthetic construct
  REGION 1..219: note = BTN2A3P (Q96KV6) ECD
QVTVVGPTDPILAMVGENTTLRCCLSPEENAEDMEVRWFQSQFSPAVFVYKGGRERTEEQKEEYRGRTTFVSKDSRGSVALIIHNVTAEDNGIYQCYFQEGRSCNEAILHLVVAGLDSEPVIEMRDHEDGGIQLECISGGWYPKPLTVWRDPYGEVVPALKEVSTPDADSLFMVTTAVIIRDKSVRNVSCSINDTLLGQKKESVIFIPESFMPSRSPCV

SEQ ID NO: 1000 - protein, 225 aa, synthetic construct
  REGION 1..225: note = BTN3A1 (O00481) ECD
QFSVLGPSGPILAMVGEDADLPCHLFPTMSAETMELKWVSSSLRQVVNVYADGKEVEDRQSAPYRGRTSILRDGITAGKAALRIHNVTASDSGKYLCYFQDGDFYEKALVELKVAALGSDLHVDVKGYKDGGIHLECRSTGWYPQPQIQWSNNKGENIPTVEAPVVADGVGLYAVAASVIMRGSSGEGVSCTIRSSLLGLEKTASISIADPFFRSAQRWIAALAG

SEQ ID NO: 1001 - protein, 219 aa, synthetic construct
  REGION 1..219: note = BTN3A2 (P78410) ECD
QFSVLGPSGPILAMVGEDADLPCHLFPTMSAETMELKWVSSSLRQVVNVYADGKEVEDRQSAPYRGRTSILRDGITAGKAALRIHNVTASDSGKYLCYFQDGDFYEKALVELKVAALGSNLHVEVKGYEDGGIHLECRSTGWYPQPQIQWSNAKGENIPAVEAPVVADGVGLYEVAASVIMRGGSGEGVSCIIRNSLLGLEKTASISIADPFFRSAQPW

SEQ ID NO: 1002 - protein, 219 aa, synthetic construct
  REGION 1..219: note = BTN3A3 (O00478) ECD
QFSVLGPSGPILAMVGEDADLPCHLFPTMSAETMELRWVSSSLRQVVNVYADGKEVEDRQSAPYRGRTSILRDGITAGKAALRIHNVTASDSGKYLCYFQDGDFYEKALVELKVAALGSDLHIEVKGYEDGGIHLECRSTGWYPQPQIKWSDTKGENIPAVEAPVVADGVGLYAVAASVIMRGSSGGGVSCIIRNSLLGLEKTASISIADPFFRSAQPW

SEQ ID NO: 1003 - protein, 228 aa, synthetic construct
  REGION 1..228: note = BTNL10 (A8MVZ5) ECD
SIWKADFDVTGPHAPILAMAGGHVELQCQLFPNISAEDMELRWYRCQPSLAVHMHERGMDMDGEQKWQYRGRTTFMSDHVARGKAMVRSHRVTTFDNRTYCCRFKDGVKFGEATVQVQVAGLGREPRIQVTDQQDGVRAECTSAGCFPKSWVERRDFRGQARPAVTNLSASATTRLWAVASSLTLWDRAVEGLSCSISSPLLPERRKVAESHLPATFSRSSQFTAWKA

SEQ ID NO: 1004 - protein, 220 aa, synthetic construct
  REGION 1..220: note = BTNL3 (Q6UXE8) ECD
QWQVTGPGKFVQALVGEDAVFSCSLFPETSAEAMEVRFFRNQFHAVVHLYRDGEDWESKQMPQYRGRTEFVKDSIAGGRVSLRLKNITPSDIGLYGCWFSSQIYDEEATWELRVAALGSLPLISIVGYVDGGIQLLCLSSGWFPQPTAKWKGPQGQDLSSDSRANADGYSLYDVEISIIVQENAGSILCSIHLAEQSHEVESKVLIGETFFQPSPWRLAS

SEQ ID NO: 1005 - protein, 222 aa, synthetic construct
  REGION 1..222: note = BTNL9 (Q6UXG8) ECD
SSEVKVLGPEYPILALVGEEVEFPCHLWPQLDAQQMEIRWFRSQTFNVVHLYQEQQELPGRQMPAFRNRTKLVKDDIAYGSVVLQLHSIIPSDKGTYGCRFHSDNFSGEALWELEVAGLGSDPHLSLEGFKEGGIQLRLRSSGWYPKPKVQWRDHQGQCLPPEFEAIVWDAQDLFSLETSVVVRAGALSNVSVSIQNLLLSQKKELVVQIADVFVPGASAWK

SEQ ID NO: 1006 - protein, 162 aa, synthetic construct
  REGION 1..162: note = C10orf54 (Q9H7M9) ECD
FKVATPYSLYVCPEGQNVTLTCRLLGPVDKGHDVTFYKTWYRSSRGEVQTCSERRPIRNLTFQDLHLHHGGHQAANTSHDLAQRHGLESASDHHGNFSITMRNLTLLDSGLYCCLVVEIRHHHSEHRVHGAMELQVQTGKDAPSNCVVYPSSSQDSENITAA

SEQ ID NO: 1007 - protein, 380 aa, synthetic construct
  REGION 1..380: note = C11orf24 (Q96F05) ECD
ASNDPRNFVPNKMWKGLVKRNASVETVDNKTSEDVTMAAASPVTLTKGTSAAHLNSMEVTTEDTSRTDVSEPATSGGAADGVTSIAPTAVASSTTAASITTAASSMTVASSAPTTAASSTTVASIAPTTAASSMTAASSTPMTLALPAPTSTSTGRTPSTTATGHPSLSTALAQVPKSSALPRTATLATLATRAQTVATTANTSSPMSTRPSPSKHMPSDTAASPVPPMRPQAQGPISQVSVDQPVVNTTNKSTPMPSNTTPEPAPTPTVVTTTKAQAREPTASPVPVPHTSPIPEMEAMSPTTQPSPMPYTQRAAGPGTSQAPEQVETEATPGTDSTGPTPRSSGGTKMPATDSCQPSTQGQYMVVTTEPLTQAVVDKT

SEQ ID NO: 1008 - protein, 38 aa, synthetic construct
  REGION 1..38: note = C11orf87 (Q6NUJ2) ECD
SPNASGSGNTGARGPGAVGSGTCITQVGQQLFQSFSST

SEQ ID NO: 1009 - protein, 57 aa, synthetic construct
  REGION 1..57: note = C14orf132 (Q9NPU4) ECD
MDLSFMAAQLPMMGGAFMDSPNEDFSTEYSLFNSSANVHAAANGQGQPEDPPRSSND

SEQ ID NO: 1010 - protein, 687 aa, synthetic construct
  REGION 1..687: note = C14orf37 (Q86TY3) ECD
FPKIERRREIAHVHAEKGQSDKMNTDDLENSSVTSKQTPQLVVSEDPMMMSAVPSATSLNKAFSINKETQPGQAGLMQTERPGVSTPTESGVPSAEEVFGSSQPERISPESGLAKAMLTIAITATPSLTVDEKEELLTSTNFQPIVEEITETTKGFLKYMDNQSFATESQEGVGLGHSPSSYVNTKEMLTTNPKTEKFEADTDHRTTSFPGAESTAGSEPGSLTPDKEKPSQMTADNTQAAATKQPLETSEYTLSVEPETDSLLGAPEVTVSVSTAVPAASALSDEWDDTKLESVSRIRTPKLGDNEETQVRTEMSQTAQVSHEGMEGGQPWTEAAQVALGLPEGETHTGTALLIAHGNERSPAFTDQSSFTPTSLMEDMKVSIVNLLQSTGDFTESTKENDALFFLETTVSVSVYESEADQLLGNTMKDIITQEMTTAVQEPDATLSMVTQEQVATLELIRDSGKTEEEKEDPSPVSDVPGVTQLSRRWEPLATTISTTVVPLSFEVTPTVEEQMDTVTGPNEEFTPVLGSPVTPPGIMVGEPSISPALPALEASSERRTVVPSITRVNTAASYGLDQLESEEGQEDEDEEDEEDEDEEEEDEEEDEEDKDADSLDEGLDGDTELPGFTLPGITSQEPGLEEGNMDLLEGATYQVPDALEWEQQNQGLVRSWMEKLKDKAGYMSGM

SEQ ID NO: 1011 - protein, 71 aa, synthetic construct
  REGION 1..71: note = C19orf18 (Q8NEA5) ECD
LHPTGNITGLPGSKRSQPPRNITKEPKVFFHKTQLPGIQGAASRSTAASPTNPMKFLRNKAIIRHRPALVK

SEQ ID NO: 1012 - protein, 884 aa, synthetic construct
  REGION 1..884: note = C1orf101 (Q5SY80) ECD
LWRYSTNSPNYRIFSTRSTIKLEYEGTLFTEWSVPETCFVLNKSSPTTELRCSSPGVHAIKPIVTGPDEEERYLFVESSHTCFLWYYRVRHFFNNFTQLITVWAYDPESADPDELLGNAEEPSINSIVLSTQMATLGQKPVIHTVLKRKVYSSNEKMRRGTWRIVVPMTKDDALKEIRGNQVTFQDCFIADFLILLTFPLLTIPEIPGYLPISSPRGSQLMASWDACVVASAVLVTDMETFHTTDSFKSWTRIRVPPDILSDDERRSVAHVILSRDGIVFLINGVLYIKSFRGFIRLGGIVNLPDGGITGISSRKWCWVNYLLKAKGRRSTFAVWTENEIYLGSILLKFARLVTTTELKNILSLSVTATLTIDRVEYTGHPLEIAVFLNYCTVCNVTKKIFLVIYNEDTKQWVSQDFTLDAPIDSVTMPHFTFSALPGLLLWNKHSIYYCYHNFTFTGILQTPAGHGNLSMLSNDSIIHEVFIDYYGDILVKMENNVIFYSKINTRDAVKLHLWTNYTTRAFIFLSTSGQTYFLYALDDGTIQIQDYPLHLEAQSIAFTTKDKCPYMAFHNNVAHVFYFLDKGEALTVWTQIVYPENTGLYVIVESYGPKILQESHEISFEAAFGYCTKTLTLTFYQNVDYERISDYFETQDKHTGLVLVQFRPSEYSKACPIAQKVFQIAVGCDDKKFIAIKGFSKKGCHHHDFSYVIEKSYLRHQPSKNLRVRYIWGEYGCPLRLDFTEKFQPVVQLFDDNGYVKDVEANFIVWEIHGRDDYSFNNTMAQSGCLHEAQTWKSMIELNKHLPLEEVWGPENYKHCFSYAIGKPGDLNQPYEIINSSNGNHIFWPMGHSGMYVFRVKILDPNYSFCNLTAMFAIETFGLIPSPS

SEQ ID NO: 1013 - protein, 129 aa, synthetic construct
  REGION 1..129: note = C1orf159 (Q96HA4) ECD
KSMENTVTRNSTAVINTQAEGTLSPPGLSSLPVVREWALTHTAQLPECCVDVVGVNASCPGASLCGPGCYRRWNADGSASCVRCGNGTLPAYNGSECRSFAGPGAPFPMNRSSGTPGRPHPGAPRVAAS

SEQ ID NO: 1014 - protein, 162 aa, synthetic construct
  REGION 1..162: note = C1orf233 (F2Z333) ECD
AAPTPPGWEPTPDAPWCPYKVLPEGPEAGGGRLCFRSPARGFRCQAPGCVLHAPAGRSLRASVLRNRSVLLQWRLAPAAARRVRAFALNCSWRGAYTRFPCERVLLGASCRDYLLPDVHDSVLYRLCLQPLPLRAGPAAAAPETPEPAECVEFTAEPAGMQD

SEQ ID NO: 1015 - protein, 337 aa, synthetic construct
  REGION 1..337: note = C1orf85 (Q8WWB7) ECD
EKTRQVSLEVIPNWLGPLQNLLHIRAVGTNSTLHYVWSSLGPLAVVMVATNTPHSTLSVNWSLLLSPEPDGGLMVLPKDSIQFSSALVFTRLLEFDSTNVSDTAAKPLGRPYPPYSLADFSWNNITDSLDPATLSATFQGHPMNDPTRTFANGSLAFRVQAFSRSSRPAQPPRLLHTADTCQLEVALIGASPRGNRSLFGLEVATLGQGPDCPSMQEQHSIDDEYAPAVFQLDQLLWGSLPSGFAQWRPVAYSQKPGGRESALPCQASPLHPALAYSLPQSPIVRAFFGSQNNFCAFNLTFGASTGPGYWDQHYLSWSMLLGVGFPPVDGLSPLVLG

SEQ ID NO: 1016 - protein, 46 aa, synthetic construct
  REGION 1..46: note = C3orf80 (F5H4A9) ECD
RGGGGCAELACGERERCCDATNATAVRCCKLPLHAFLDNVGWFVRK

SEQ ID NO: 1017 - protein, 277 aa, synthetic construct
  REGION 1..277: note = CA12 (O43570) ECD
APVNGSKWTYFGPDGENSWSKKYPSCGGLLQSPIDLHSDILQYDASLTPLEFQGYNLSANKQFLLTNNGHSVKLNLPSDMHIQGLQSRYSATQLHLHWGNPNDPHGSEHTVSGQHFAAELHIVHYNSDLYPDASTASNKSEGLAVLAVLIEMGSFNPSYDKIFSHLQHVKYKGQEAFVPGFNIEELLPERTAEYYRYRGSLTTPPCNPTVLWTVFRNPVQISQEQLLALETALYCTHMDDPSPREMINNFRQVQKFDERLVYTSFSQVQVCTAAGLS

SEQ ID NO: 1018 - protein, 275 aa, synthetic construct
  REGION 1..275: note = CA14 (Q9ULX7) ECD
ADGGQHWTYEGPHGQDHWPASYPECGNNAQSPIDIQTDSVTFDPDLPALQPHGYDQPGTEPLDLHNNGHTVQLSLPSTLYLGGLPRKYVAAQLHLHWGQKGSPGGSEHQINSEATFAELHIVHYDSDSYDSLSEAAERPQGLAVLGILIEVGETKNIAYEHILSHLHEVRHKDQKTSVPPFNLRELLPKQLGQYFRYNGSLTTPPCYQSVLWTVFYRRSQISMEQLEKLQGTLFSTEEEPSKLLVQNYRALQPLNQRMVFASFIQAGSSYTTGEM

SEQ ID NO: 1019 - protein, 1060 aa, synthetic construct
  REGION 1..1060: note = CACHD1 (Q5VU97) ECD
EADFSILDEAQVLASQMRRLAAEELGVVTMQRIFNSFVYTEKISNGESEVQQLAKKIREKFNRYLDVVNRNKQVVEASYTAHLTSPLTAIQDCCTIPPSMMEFDGNFNTNVSRTISCDRLSTTVNSRAFNPGRDLNSVLADNLKSNPGIKWQYFSSEEGIFTVFPAHKFRCKGSYEHRSRPIYVSTVRPQSKHIVVILDHGASVTDTQLQIAKDAAQVILSAIDEHDKISVLTVADTVRTCSLDQCYKTFLSPATSETKRKMSTFVSSVKSSDSPTQHAVGFQKAFQLIRSTNNNTKFQANTDMVIIYLSAGITSKDSSEEDKKATLQVINEENSFLNNSVMILTYALMNDGVTGLKELAFLRDLAEQNSGKYGVPDRMALPVIKGSMMVLNQLSNLETTVGRFYTNLPNRMIDEAVFSLPFSDEMGDGLIMTVSKPCYFGNLLLGIVGVDVNLAYILEDVTYYQDSLASYTFLIDDKGYTLMHPSLTRPYLLSEPPLHTDIIHYENIPKFELVRQNILSLPLGSQIIAVPVNSSLSWHINKLRETGKEAYNVSYAWKMVQDTSFILCIVVIQPEIPVKQLKNLNTVPSSKLLYHRLDLLGQPSACLHFKQLATLESPTIMLSAGSFSSPYEHLSQPETKRMVEHYTAYLSDNTRLIANPGLKFSVRNEVMATSHVTDEWMTQMEMSSLNTYIVRRYIATPNGVLRIYPGSLMDKAFDPTRRQWYLHAVANPGLISLTGPYLDVGGAGYVVTISHTIHSSSTQLSSGHTVAVMGIDFTLRYFYKVLMDLLPVCNQDGGNKIRCFIMEDRGYLVAHPTLIDPKGHAPVEQQHITHKEPLVANDILNHPNFVKKNLCNSFSDRTVQRFYKFNTSLAGDLTNLVHGSHCSKYRLARIPGTNAFVGIVNETCDSLAFCACSMVDRLCLNCHRMEQNECECPCECPLEVNECTGNLTNAENRNPSCEVHQEPVTYTAIDPGLQDALHQCVNSRCSQRLESGDCFGVLDCEWCMVDSDGKTHLDKPYCAPQKECFGGIVGAKSPYVDDMGAIGDEVITLNMIKSAP

SEQ ID NO: 1020 - protein, 330 aa, synthetic construct
  REGION 1..330: note = CADM1 (Q9BY67) ECD
QNLFTKDVTVIEGEVATISCQVNKSDDSVIQLLNPNRQTIYFRDFRPLKDSRFQLLNFSSSELKVSLTNVSISDEGRYFCQLYTDPPQESYTTITVLVPPRNLMIDIQKDTAVEGEEIEVNCTAMASKPATTIRWFKGNTELKGKSEVEEWSDMYTVTSQLMLKVHKEDDGVPVICQVEHPAVTGNLQTQRYLEVQYKPQVHIQMTYPLQGLTREGDALELTCEAIGKPQPVMVTWVRVDDEMPQHAVLSGPNLFINNLNKTDNGTYRCEASNIVGKAHSDYMLYVYDPPTTIPPPTTTTTTTTTTTTTILTIITDSRAGEEGSIRAVDH

SEQ ID NO: 1021 - protein, 343 aa, synthetic construct
  REGION 1..343: note = CADM2 (Q8N3J6) ECD
QFPLTQNVTVVEGGTAILTCRVDQNDNTSLQWSNPAQQTLYFDDKKALRDNRIELVRASWHELSISVSDVSLSDEGQYTCSLFTMPVKTSKAYLTVLGVPEKPQISGFSSPVMEGDLMQLTCKTSGSKPAADIRWFKNDKEIKDVKYLKEEDANRKTFTVSSTLDFRVDRSDDGVAVICRVDHESLNATPQVAMQVLEIHYTPSVKIIPSTPFPQEGQPLILTCESKGKPLPEPVLWTKDGGELPDPDRMVVSGRELNILFLNKTDNGTYRCEATNTIGQSSAEYVLIVHDVPNTLLPTTIIPSLTTATVTTTVAITTSPTTSATTSSIRDPNALAGQNGPDH

SEQ ID NO: 1022 - protein, 306 aa, synthetic construct
  REGION 1..306: note = CADM3 (Q8N126) ECD
NLSQDDSQPWTSDETVVAGGTVVLKCQVKDHEDSSLQWSNPAQQTLYFGEKRALRDNRIQLVTSTPHELSISISNVALADEGEYTCSIFTMPVRTAKSLVTVLGIPQKPIITGYKSSLREKDTATLNCQSSGSKPAARLTWRKGDQELHGEPTRIQEDPNGKTFTVSSSVTFQVTREDDGASIVCSVNHESLKGADRSTSQRIEVLYTPTAMIRPDPPHPREGQKLLLHCEGRGNPVPQQYLWEKEGSVPPLKMTQESALIFPFLNKSDSGTYGCTATSNMGSYKAYYTLNVNDPSPVPSSSSTYH

SEQ ID NO: 1023 - protein, 304 aa, synthetic construct
  REGION 1..304: note = CADM4 (Q8NFZ8) ECD
PGAGQEVQTENVTVAEGGVAEITCRLHQYDGSIVVIQNPARQTLFFNGTRALKDERFQLEEFSPRRVRIRLSDARLEDEGGYFCQLYTEDTHHQIATLTVLVAPENPVVEVREQAVEGGEVELSCLVPRSRPAATLRWYRDRKELKGVSSSQENGKVWSVASTVRFRVDRKDDGGIIICEAQNQALPSGHSKQTQYVLDVQYSPTARIHASQAVVREGDTLVLTCAVTGNPRPNQIRWNRGNESLPERAEAVGETLTLPGLVSADNGTYTCEASNKHGHARALYVLVVYDPGAVVEAQTSVPYA

SEQ ID NO: 1024 - protein, 698 aa, synthetic construct
  REGION 1..698: note = CATSPERD (Q86XM0) ECD
QLCRSRTVRTGKVFNLIQDVQGDRLYFHPTTTRLIKHPCEKNIALYLGKQVFFTMDNFETSLLPFTIPTSMQVGVPEVTSAHFAGSLLLLVVDQKVYIYDYENNSWSMSLGIKHPVTHVSGDNCCYTGSLFCVHVSNLVFAYFRGDQISQTYIYYSNTGGFSFWKYHYDRQAEIIGSLGGIFHFFSLSQVAMLVVNQGKGMFKYSDHPLNRSFGLSFDYNGTLDILIAPGQRGILLLWFENSLLFSHNAGQLVDTVRVKKGDQTLFSSIFEAKITIHNIAVTENELAVITREDNLYYGNLGIVPSSIIKFADQYIWSEDVALMFRSPGTLEILTPLRDTAFPAFDFQKCLVNIQALLMDPELHVGKCKIEFLTGEFIYRMYTIDMHSQLELTASLIPQPGTSLIPLVMVSNPHSLGFQATFYENGYTSDGNTKYKLDIFLKQQQHWGRTDSNFTSSLKKATMSTLTVDIANKEISCVDIKPLSTLISVGCDLDKKIVIQNKVSACSMGILDPLTLQDNYSFIIEKEFYDPGFQGQQSSEDLHVFYSYQQLGCPLLVYYDTLWKPVVELWRKDSFQEVIDAEYVLLEVNGQFSYSYSLTAQSAMCTSQPQNWTTMIKEFGGPFFWNRENYVSCHDPNNNAPLRWPDVQYQILGGRTANQIIFGHNGFYVFYISIVDPYYSYCQLETIFSIYVYGAFPVQ

SEQ ID NO: 1025 - protein, 1031 aa, synthetic construct
  REGION 1..1031: note = CATSPERG (Q6ZRH7) ECD
WAIKDFQECTWQVVLNEFKRVGESGVSDSFFEQEPVDTVSSLFHMLVDSPIDPSEKYLGFPYYLKINYSCEEKPSEDLVRMGHLTGLKPLVLVTFQSPVNFYRWKIEQLQIQMEAAPFRSKEPCMAEEVCSMSWYTPMPIKKGSVVMRVDISSNGLGTFIPDKRFQMNINGFLKRDRDNNIQFTVGEELFNLMPQYFVGVSSRPLWHTVDQSPVLILGGIPNEKYVLMTDTSFKDFSLVELSIDSCWVGSFYCPHSGFTATIYDTIATESTLFIRQNQLVYYFTGTYTTLYERNRGSGSWIRVLASECIKKLCPVYFHSNGSEYIMALTTGKHEGYVHFGTIRDGQVSFEMLPRQWSVCEQIGVTTCSIIWSEYIAGEYTLLLLVESGYGNASKRFQVVSYNTASDDLELLYHIPEFIPEARGLEFLMILGTESYTSTAMAPKGIFCNPYNNLIFIWGNFLLQSSNKENFIYLADFPKELSIKYMARSFRGAVAIVTETEEIWYLLEGSYRVYQLFPSKGWQVHISLKLMQQSSLYASNETMLTLFYEDSKLYQLVYLMNNQKGQLVKRLVPVEQLLMYQQHTSHYDLERKGGYLMLSFIDFCPFSVMRLRSLPSPQRYTRQERYRARPPRVLERSGFHNENSLAIYQGLVYYLLWLHSVYDKPYADPVHDPTWRWWANNKQDQDYYFFLASNWRSAGGVSIEMDSYEKIYNLESAYELPERIFLDKGTEYSFAIFLSAQGHSFRTQSELGTAFQLHSQVDVGVVLADPGCIEASVKQEVLINRNSVLFSITLKDKKLCYDQGISGHHLMETSMTVNVVGSSGLCFQETHLGPHMQGNLMVPVFIGCPPGKRLAFDITYTLEYSRLKNKHYFDCVNVNPEMPCFLFRDIFYPFFLIQDLVTGDSGSFQGSYVLLVVGGGPTLDSLKDYSEDEIYRFNSPLDKTNSLIWTTRTTRTTKDSAFHIMSHESPGIEWLCLENAPCYDNVPQGIFAPEFFFKVLVSNRGVDTSTYCNYQLTFLLHIHGLPLSPKRA

SEQ ID NO: 1026 - protein, 934 aa, synthetic construct
  REGION 1..934: note = CD101 (Q93033) ECD
QREVTVQKGPLFRAEGYPVSIGCNVTGHQGPSEQHFQWSVYLPTNPTQEVQIISTKDAAFSYAVYTQRVRSGDVYVERVQGNSVLLHISKLQMKDAGEYECHTPNTDEKYYGSYSAKTNLIVIPDTLSATMSSQTLGKEEGEPLALTCEASKATAQHTHLSVTWYLTQDGGGSQATEIISLSKDFILVPGPLYTERFAASDVQLNKLGPTTFRLSIERLQSSDQGQLFCEATEWIQDPDETWMFITKKQTDQTTLRIQPAVKDFQVNITADSLFAEGKPLELVCLVVSSGRDPQLQGIWFFNGTEIAHIDAGGVLGLKNDYKERASQGELQVSKLGPKAFSLKIFSLGPEDEGAYRCVVAEVMKTRTGSWQVLQRKQSPDSHVHLRKPAARSVVMSTKNKQQVVWEGETLAFLCKAGGAESPLSVSWWHIPRDQTQPEFVAGMGQDGIVQLGASYGVPSYHGNTRLEKMDWATFQLEITFTAITDSGTYECRVSEKSRNQARDLSWTQKISVTVKSLESSLQVSLMSRQPQVMLTNTFDLSCVVRAGYSDLKVPLTVTWQFQPASSHIFHQLIRITHNGTIEWGNFLSRFQKKTKVSQSLFRSQLLVHDATEEETGVYQCEVEVYDRNSLYNNRPPRASAISHPLRIAVTLPESKLKVNSRSQVQELSINSNTDIECSILSRSNGNLQLAIIWYFSPVSTNASWLKILEMDQTNVIKTGDEFHTPQRKQKFHTEKVSQDLFQLHILNVEDSDRGKYHCAVEEWLLSTNGTWHKLGEKKSGLTELKLKPTGSKVRVSKVYWTENVTEHREVAIRCSLESVGSSATLYSVMWYWNRENSGSKLLVHLQHDGLLEYGEEGLRRHLHCYRSSSTDFVLKLHQVEMEDAGMYWCRVAEWQLHGHPSKWINQASDESQRMVLTVLPSEPTLPSRICSSAP

SEQ ID NO: 1027 - protein, 1009 aa, synthetic construct
  REGION 1..1009: note = CD163 (Q86VB7) ECD
SSLGGTDKELRLVDGENKCSGRVEVKVQEEWGTVCNNGWSMEAVSVICNQLGCPTAIKAPGWANSSAGSGRIWMDHVSCRGNESALWDCKHDGWGKHSNCTHQQDAGVTCSDGSNLEMRLTRGGNMCSGRIEIKFQGRWGTVCDDNFNIDHASVICRQLECGSAVSFSGSSNFGEGSGPIWFDDLICNGNESALWNCKHQGWGKHNCDHAEDAGVICSKGADLSLRLVDGVTECSGRLEVRFQGEWGTICDDGWDSYDAAVACKQLGCPTAVTAIGRVNASKGFGHIWLDSVSCQGHEPAIWQCKHHEWGKHYCNHNEDAGVTCSDGSDLELRLRGGGSRCAGTVEVEIQRLLGKVCDRGWGLKEADVVCRQLGCGSALKTSYQVYSKIQATNTWLFLSSCNGNETSLWDCKNWQWGGLTCDHYEEAKITCSAHREPRLVGGDIPCSGRVEVKHGDTWGSICDSDFSLEAASVLCRELQCGTVVSILGGAHFGEGNGQIWAEEFQCEGHESHLSLCPVAPRPEGTCSHSRDVGVVCSRYTEIRLVNGKTPCEGRVELKTLGAWGSLCNSHWDIEDAHVLCQQLKCGVALSTPGGARFGKGNGQIWRHMFHCTGTEQHMGDCPVTALGASLCPSEQVASVICSGNQSQTLSSCNSSSLGPTRPTIPEESAVACIESGQLRLVNGGGRCAGRVEIYHEGSWGTICDDSWDLSDAHVVCRQLGCGEAINATGSAHFGEGTGPIWLDEMKCNGKESRIWQCHSHGWGQQNCRHKEDAGVICSEFMSLRLTSEASREACAGRLEVFYNGAWGTVGKSSMSETTVGVVCRQLGCADKGKINPASLDKAMSIPMWVDNVQCPKGPDTLWQCPSSPWEKRLASPSEETWITCDNKIRLQEGPTSCSGRVEIWHGGSWGTVCDDSWDLDDAQVVCQQLGCGPALKAFKEAEFGQGTGPIWLNEVKCKGNESSLWDCPARRWGHSECGHKEDAAVNCTDISVQKTPQKATTGRSSRQSS

SEQ ID NO: 1028 - protein, 1319 aa, synthetic construct
  REGION 1..1319: note = CD163L1 (Q9NR16) ECD
FNGTDLELRLVNGDGPCSGTVEVKFQGQWGTVCDDGWNTTASTVVCKQLGCPFSFAMFRFGQAVTRHGKIWLDDVSCYGNESALWECQHREWGSHNCYHGEDVGVNCYGEANLGLRLVDGNNSCSGRVEVKFQERWGTICDDGWNLNTAAVVCRQLGCPSSFISSGVVNSPAVLRPIWLDDILCQGNELALWNCRHRGWGNHDCSHNEDVTLTCYDSSDLELRLVGGTNRCMGRVELKIQGRWGTVCHHKWNNAAADVVCKQLGCGTALHFAGLPHLQSGSDVVWLDGVSCSGNESFLWDCRHSGTVNFDCLHQNDVSVICSDGADLELRLADGSNNCSGRVEVRIHEQWWTICDQNWKNEQALVVCKQLGCPFSVFGSRRAKPSNEARDIWINSISCTGNESALWDCTYDGKAKRTCFRRSDAGVICSDKADLDLRLVGAHSPCYGRLEVKYQGEWGTVCHDRWSTRNAAVVCKQLGCGKPLHVFGMTYFKEASGPIWLDDVSCIGNESNIWDCEHSGWGKHNCVHREDVIVTCSGDATWGLRLVGGSNRCSGRLEVYFQGRWGTVCDDGWNSKAAAVVCSQLDCPSSIIGMGLGNASTGYGKIWLDDVSCDGDESDLWSCRNSGWGNNDCSHSEDVGVICSDASDMELRLVGGSSRCAGKVEVNVQGAVGILCANGWGMNIAEVVCRQLECGSAIRVSREPHFTERTLHILMSNSGCTGGEASLWDCIRWEWKQTACHLNMEASLICSAHRQPRLVGADMPCSGRVEVKHADTWRSVCDSDFSLHAANVLCRELNCGDAISLSVGDHFGKGNGLTWAEKFQCEGSETHLALCPIVQHPEDTCIHSREVGVVCSRYTDVRLVNGKSQCDGQVEINVLGHWGSLCDTHWDPEDARVLCRQLSCGTALSTTGGKYIGERSVRVWGHRFHCLGNESLLDNCQMTVLGAPPCIHGNTVSVICTGSLTQPLFPCLANVSDPYLSAVPEGSALICLEDKRLRLVDGDSRCAGRVEIYHDGFWGTICDDGWDLSDAHVVCQKLGCGVAFNATVSAHFGEGSGPIWLDDLNCTGMESHLWQCPSRGWGQHDCRHKEDAGVICSEFTALRLYSETETESCAGRLEVFYNGTWGSVGRRNITTAIAGIVCRQLGCGENGVVSLAPLSKTGSGFMWVDDIQCPKTHISIWQCLSAPWERRISSPAEETWITCEDRIRVRGGDTECSGRVEIWHAGSWGTVCDDSWDLAEAEVVCQQLGCGSALAALRDASFGQGTGTIWLDDMRCKGNESFLWDCHAKPWGQSDCGHKEDAGVRCSGQSLKSLNASSGH

SEQ ID NO: 1029 - protein, 139 aa, synthetic construct
  REGION 1..139: note = CD164 (Q04900) ECD
DKNTTQHPNVTTLAPISNVTSAPVTSLPLVTTPAPETCEGRNSCVSCFNVSVVNTTCFWIECKDESYCSHNSTVSDCQVGNTTDFCSVSTATPVPTANSTAKPTVQPSPSTTSKTVTTSGTTNNTVTPTSQPVRKSTFD

SEQ ID NO: 1030 - protein, 112 aa, synthetic construct
  REGION 1..112: note = CD164L2 (Q6UWJ8) ECD
GKGARGFGRGALIRLNIWPAVQGACKQLEVCEHCVEGDGARNLSSCVWEQCRPEEPGHCVAQSEVVKEGCSIYNRSEACPAAHHHPTYEPKTVTTGSPPVPEAHSPGFDGAS

SEQ ID NO: 1031 - protein, 603 aa, synthetic construct [sequence omitted]

SEQ ID NO: 1032 - protein, 272 aa, synthetic construct
  REGION 1..272: note = CD19 (P15391) ECD
PEEPLVVKVEEGDNAVLQCLKGTSDGPTQQLTWSRESPLKPFLKLSLGLPGLGIHMRPLAIWLFIFNVSQQMGGFYLCQPGPPSEKAWQPGWTVNVEGSGELFRWNVSDLGGLGCGLKNRSSEGPSSPSGKLMSPKLYVWAKDRPEIWEGEPPCLPPRDSLNQSLSQDLTMAPGSTLWLSCGVPPDSVSRGPLSWTHVHPKGPKSLLSLELKDDRPARDMWVMETGLLLPRATAQDAGKYYCHRGNLTMSFHLEITARPVLWHWLLRTGGWK

SEQ ID NO: 1033 - protein, 284 aa, synthetic construct
  REGION 1..284: note = CD1A (P06126) ECD
NADGLKEPLSFHVTWIASFYNHSWKQNLVSGWLSDLQTHTWDSNSSTIVFLCPWSRGNFSNEEWKELETLFRIRTIRSFEGIRRYAHELQFEYPFEIQVTGGCELHSGKVSGSFLQLAYQGSDFVSFQNNSWLPYPVAGNMAKHFCKVLNQNQHENDITHNLLSDTCPRFILGLLDAGKAHLQRQVKPEAWLSHGPSPGPGHLQLVCHVSGFYPKPVWVMWMRGEQEQQGTQRGDILPSADGTWYLRATLEVAAGEAADLSCRVKHSSLEGQDIVLYWEHHSSV

SEQ ID NO: 1034 - protein, 286 aa, synthetic construct
  REGION 1..286: note = CD1B (P29016) ECD
SEHAFQGPTSFHVIQTSSFTNSTWAQTQGSGWLDDLQIHGWDSDSGTAIFLKPWSKGNFSDKEVAELEEIFRVYIFGFAREVQDFAGDFQMKYPFEIQGIAGCELHSGGAIVSFLRGALGGLDFLSVKNASCVPSPEGGSRAQKFCALIIQYQGIMETVRILLYETCPRYLLGVLNAGKADLQRQVKPEAWLSSGPSPGPGRLQLVCHVSGFYPKPVWVMWMRGEQEQQGTQLGDILPNANWTWYLRATLDVADGEAAGLSCRVKHSSLEGQDIILYWRNPTSIGS

SEQ ID NO: 1035 - protein, 285 aa, synthetic construct
  REGION 1..285: note = CD1C (P29017) ECD
NADASQEHVSFHVIQIFSFVNQSWARGQGSGWLDELQTHGWDSESGTIIFLHNWSKGNFSNEELSDLELLFRFYLFGLTREIQDHASQDYSKYPFEVQVKAGCELHSGKSPEGFFQVAFNGLDLLSFQNTTWVPSPGCGSLAQSVCHLLNHQYEGVTETVYNLIRSTCPRFLLGLLDAGKMYVHRQVRPEAWLSSRPSLGSGQLLLVCHASGFYPKPVWVTWMRNEQEQLGTKHGDILPNADGTWYLQVILEVASEEPAGLSCRVRHSSLGGQDIILYWGHHFSM

SEQ ID NO: 1036 - protein, 282 aa, synthetic construct
  REGION 1..282: note = CD1D (P15813) ECD
EVPQRLFPLRCLQISSFANSSWTRTDGLAWLGELQTHSWSNDSDTVRSLKPWSQGTFSDQQWETLQHIFRVYRSSFTRDVKEFAKMLRLSYPLELQVSAGCEVHPGNASNNFFHVAFQGKDILSFQGTSWEPTQEAPLWVNLAIQVLNQDKWTRETVQWLLNGTCPQFVSGLLESGKSELKKQVKPKAWLSRGPSPGPGRLLLVCHVSGFYPKPVWVKWMRGEQEQQGTQPGDILPNADETWYLRATLDVVAGEAAGLSCRVKHSSLEGQDIVLYWGGSYTS

SEQ ID NO: 1037 - protein, 285 aa, synthetic construct
  REGION 1..285: note = CD1E (P15812) ECD
APQALQSYHLAAEEQLSFRMLQTSSFANHSWAHSEGSGWLGDLQTHGWDTVLGTIRFLKPWSHGNFSKQELKNLQSLFQLYFHSFIQIVQASAGQFQLEYPFEIQILAGCRMNAPQIFLNMAYQGSDFLSFQGISWEPSPGAGIRAQNICKVLNRYLDIKEILQSLLGHTCPRFLAGLMEAGESELKRKVKPEAWLSCGPSPGPGRLQLVCHVSGFYPKPVWVMWMRGEQEQRGTQRGDVLPNADETWYLRATLDVAAGEAAGLSCRVKHSSLGGHDLIIHWGGY

SEQ ID NO: 1038 - protein, 185 aa, synthetic construct
  REGION 1..185: note = CD2 (P06729) ECD
KEITNALETWGALGQDINLDIPSFQMSDDIDDIKWEKTSDKKKIAQFRKEKETFKEKDTYKLFKNGTLKIKHLKTDDQDIYKVSIYDTKGKNVLEKIFDLKIQERVSKPKISWTCINTTLTCEVMNGTDPELNLYQDGKHLKLSQRVITHKWTTSLSAKFKCTAGNKVSKESSVEPVSCPEKGLD

SEQ ID NO: 1039 - protein, 202 aa, synthetic construct
  REGION 1..202: note = CD200 (P41217) ECD
QVQVVTQDEREQLYTPASLKCSLQNAQEALIVTWQKKKAVSPENMVTFSENHGVVIQPAYKDKINITQLGLQNSTITFWNITLEDEGCYMCLFNTFGFGKISGTACLTVYVQPIVSLHYKFSEDHLNITCSATARPAPMVFWKVPRSGIENSTVTLSHPNGTTSVTSILHIKDPKNQVGKEVICQVLHLGTVTDFKQTVNKG

SEQ ID NO: 1040 - protein, 215 aa, synthetic construct
  REGION 1..215: note = CD200R1 (Q8TD46) ECD
MDEKQITQNYSKVLAEVNTSWPVKMATNAVLCCPPIALRNLIIITWEIILRGQPSCTKAYRKETNETKETNCTDERITWVSRPDQNSDLQIRPVAITHDGYYRCIMVTPDGNFHRGYHLQVLVTPEVTLFQNRNRTAVCKAVAGKPAAQISWIPEGDCATKQEYWSNGTVTVKSTCHWEVHNVSTVTCHVSHLTGNKSLYIELLPVPGAKKSAKL

SEQ ID NO: 1041 - protein, 216 aa, synthetic construct
  REGION 1..216: note = CD200R1L (Q6Q8B3) ECD
GKQMTQNYSTIFAEGNISQPVLMDINAVLCCPPIALRNLIIITWEIILRGQPSCTKAYKKETNETKETNCTVERITWVSRPDQNSDLQIRPVDTTHDGYYRGIVVTPDGNFHRGYHLQVLVTPEVNLFQSRNITAVCKAVTGKPAAQISWIPEGSILATKQEYWGNGTVTVKSTCPWEGHKSTVTCHVSHLTGNKSLSVKLNSGLRTSGSPALSLL

SEQ ID NO: 1042 - protein, 668 aa, synthetic construct
  REGION 1..668: note = CD22 (P20273) ECD
DSSKWVFEHPETLYAWEGACVWIPCTYRALDGDLESFILFHNPEYNKNTSKFDGTRLYESTKDGKVPSEQKRVQFLGDKNKNCTLSIHPVHLNDSGQLGLRMESKTEKWMERIHLNVSERPFPPHIQLPPEIQESQEVTLTCLLNFSCYGYPIQLQWLLEGVPMRQAAVTSTSLTIKSVFTRSELKFSPQWSHHGKIVTCQLQDADGKFLSNDTVQLNVKHTPKLEIKVTPSDAIVREGDSVTMTCEVSSSNPEYTTVSWLKDGTSLKKQNTFTLNLREVTKDQSGKYCCQVSNDVGPGRSEEVFLQVQYAPEPSTVQILHSPAVEGSQVEFLCMSLANPLPTNYTWYHNGKEMQGRTEEKVHIPKILPWHAGTYSCVAENILGTGQRGPGAELDVQYPPKKVTTVIQNPMPIREGDTVTLSCNYNSSNPSVTRYEWKPHGAWEEPSLGVLKIQNVGWDNTTIACAACNSWCSWASPVALNVQYAPRDVRVRKIKPLSEIHSGNSVSLQCDFSSSHPKEVQFFWEKNGRLLGKESQLNFDSISPEDAGSYSCWVNNSIGQTASKAWTLEVLYAPRRLRVSMSPGDQVMEGKSATLTCESDANPPVSHYTWFDWNNQSLPYHSQKLRLEPVKVQHSGAYWCQGTNSVGKGRSPLSTLTVYYSPETIGRR

SEQ ID NO: 1043 - protein, 236 aa, synthetic construct [sequence omitted]

SEQ ID NO: 1044 - protein, 208 aa, synthetic construct
  REGION 1..208: note = CD244 (Q9BZW8) ECD
CQGSADHVVSISGVPLQLQPNSIQTKVDSIAWKKLLPSQNGFHHILKWENGSLPSNTSNDRFSFIVKNLSLLIKAAQQQDSGLYCLEVTSISGKVQTATFQVFVFESLLPDKVEKPRLQGQGKILDRGRCQVALSCLVSRDGNVSYAWYRGSKLIQTAGNLTYLDEEVDINGTHTYTCNVSNPVSWESHTLNLTQDCQNAHQEFRFWP

SEQ ID NO: 1045 - protein, 670 aa, synthetic construct
  REGION 1..670: note = CD248 (Q9HCU0) ECD
QDPWAAEPRAACGPSSCYALFPRRRTFLEAWRACRELGGDLATPRTPEEAQRVDSLVGAGPASRLLWIGLQRQARQCQLQRPLRGFTWTTGDQDTAFTNWAQPASGGPCPAQRCVALEASGEHRWLEGSCTLAVDGYLCQFGFEGACPALQDEAGQAGPAVYTTPFHLVSTEFEWLPFGSVAAVQCQAGRGASLLCVKQPEGGVGWSRAGPLCLGTGCSPDNGGCEHECVEEVDGHVSCRCTEGFRLAADGRSCEDPCAQAPCEQQCEPGGPQGYSCHCRLGFRPAEDDPHRCVDTDECQIAGVCQQMCVNYVGGFECYCSEGHELEADGISCSPAGAMGAQASQDLGDELLDDGEDEEDEDEAWKAFNGGWTEMPGILWMEPTQPPDFALAYRPSFPEDREPQIPYPEPTWPPPLSAPRVPYHSSVLSVTRPVVVSATHPTLPSAHQPPVIPATHPALSRDHQIPVIAANYPDLPSAYQPGILSVSHSAQPPAHQPPMISTKYPELFPAHQSPMFPDTRVAGTQTTTHLPGIPPNHAPLVTTLGAQLPPQAPDALVLRTQATQLPIIPTAQPSLTTTSRSPVSPAHQISVPAATQPAALPTLLPSQSPTNQTSPISPTHPHSKAPQIPREDGPSPKLALWLPSPAPTAAPTALGEAGLAEHSQRDDRWL

SEQ ID NO: 1046 - protein, 172 aa, synthetic construct
  REGION 1..172: note = CD27 (P26842) ECD
ATPAPKSCPERHYWAQGKLCCQMCEPGTFLVKDCDQHRKAAQCDPCIPGVSFSPDHHTRPHCESCRHCNSGLLVRNCTITANAECACRNGWQCRDKECTECDPLPNPSLTARSSQALSPHPQPTHLPYVSEMLEARTAGHMQTLADFRQLPARTLSTHWPPQRSLCSSDFIR

SEQ ID NO: 1047 - protein, 220 aa, synthetic construct
  REGION 1..220: note = CD274 (Q9NZQ7) ECD
FTVTVPKDLYVVEYGSNMTIECKFPVEKQLDLAALIVYWEMEDKNIIQFVHGEEDLKVQHSSYRQRARLLKDQLSLGNAALQITDVKLQDAGVYRCMISYGGADYKRITVKVNAPYNKINQRILVVDPVTSEHELTCQAEGYPKAEVIWTSSDHQVLSGKTTTTNSKREEKLFNVTSTLRINTTTNEIFYCTFRRLDPEENHTAELVIPELPLAHPPNER

SEQ ID NO: 1048 - protein, 438 aa, synthetic construct
  REGION 1..438: note = CD276 (Q5ZPR3) ECD
LEVQVPEDPVVALVGTDATLCCSFSPEPGFSLAQLNLIWQLTDTKQLVHSFAEGQDQGSAYANRTALFPDLLAQGNASLRLQRVRVADEGSFTCFVSIRDFGSAAVSLQVAAPYSKPSMTLEPNKDLRPGDTVTITCSSYQGYPEAEVFWQDGQGVPLTGNVTTSQMANEQGLFDVHSILRVVLGANGTYSCLVRNPVLQQDAHSSVTITPQRSPTGAVEVQVPEDPVVALVGTDATLRCSFSPEPGFSLAQLNLIWQLTDTKQLVHSFTEGRDQGSAYANRTALFPDLLAQGNASLRLQRVRVADEGSFTCFVSIRDFGSAAVSLQVAAPYSKPSMTLEPNKDLRPGDTVTITCSSYRGYPEAEVFWQDGQGVPLTGNVTTSQMANEQGLFDVHSVLRVVLGANGTYSCLVRNPVLQQDAHGSVTITGQPMTFPPEA

SEQ ID NO: 1049 - protein, 134 aa, synthetic construct
  REGION 1..134: note = CD28 (P10747) ECD
NKILVKQSPMLVAYDNAVNLSCKYSYNLFSREFRASLHKGLDSAVEVCVVYGNYSQQLQVYSKTGFNCDGKLGNESVTFYLQNLYVNQTDIYFCKIEVMYPPPYLDNEKSNGTIIHVKGKHLCPSPLFPGPSKP

SEQ ID NO: 1050 - protein, 163 aa, synthetic construct [sequence omitted]

SEQ ID NO: 1051 - protein, 163 aa, synthetic construct
  REGION 1..163: note = CD300C (Q08708) ECD
GYFPLSHPMTVAGPVGGSLSVQCRYEKEHRTLNKFWCRPPQILRCDKIVETKGSAGKRNGRVSIRDSPANLSFTVTLENLTEEDAGTYWCGVDTPWLRDFHDPIVEVEVSVFPAGTTTASSPQSSMGTSGPPTKLPVHTWPSVTRKDSPEPSPHPGSLFSNVR

SEQ ID NO: 1052 - protein, 156 aa, synthetic construct
  REGION 1..156: note = CD300E (Q496F6) ECD
LKGPGSVTGTAGDSLTVWCQYESMYKGYNKYWCRGQYDTSCESIVETKGEEKVERNGRVSIRDHPEALAFTVTMQNLNEDDAGSYWCKIQTVWVLDSWSRDPSDLVRVYVSPAITTPRRTTHPATPPIFLVVNPGRNLSTGEVLTQNSGFRLSSPH

SEQ ID NO: 1053 - protein, 147 aa, synthetic construct
  REGION 1..147: note = CD300LD (Q6UXZ3) ECD
AKITGPTTVNGSEQGSLTVQCAYGSGWETYLKWRCQGADWNYCNILVKTNGSEQEVKKNRVSIRDNQKNHVFTVTMENLKRDDADSYWCGTERPGIDLGVKVQVTINPGTQTAVSEWTTTTASLAFTAAATQKTSSPLTRSPLKSTH

SEQ ID NO: 1054 - protein, 137 aa, synthetic construct
  REGION 1..137: note = CD300LF (Q8TDQ1) ECD
TQITGPTTVNGLERGSLTVQCVYRSGWETYLKWWCRGAIWRDCKILVKTSGSEQEVKRDRVSIKDNQKNRTFTVTMEDLMKTDADTYWCGIEKTGNDLGVTVQVTIDPAPVTQEETSSSPTLTGHHLDNRHKLLKLS

SEQ ID NO: 1055 - protein, 229 aa, synthetic construct
  REGION 1..229: note = CD300LG (Q6UXG3) ECD
LEGPEEISGFEGDTVSLQCTYREELRDHRKYWCRKGGILFSRCSGTIYAEEEGQETMKGRVSIRDSRQELSLIVTLWNLTLQDAGEYWCGVEKRGPDESLLISLFVFPGPCCPPSPSPTFQPLATTRLQPKAKAQQTQPPGLTSPGLYPAATTAKQGKTGAEAPPLPGTSQYGHERTSQYTGTSPHPATSPPAGSSRPPMQLDSTSAEDTSPALSSGSSKPRVSIPMVR

SEQ ID NO: 1056 - protein, 146 aa, synthetic construct
  REGION 1..146: note = CD302 (Q8IX05) ECD
DCPSSTWIQFQDSCYIFLQEAIKVESIEDVRNQCTDHGADMISIHNEEENAFILDTLKKQWKGPDDILLGMFYDTDDASFKWFDNSNMTFDKWTDQDDDEDLVDTCAFLHIKTGEWKKGNCEVSSVEGTLCKTAIPYKRKYLSDNH

SEQ ID NO: 1057 - protein, 194 aa, synthetic construct
  REGION 1..194: note = CD320 (Q9NPF0) ECD
SPLSTPTSAQAAGPSSGSCPPTKFQCRTSGLCVPLTWRCDRDLDCSDGSDEEECRIEPCTQKGQCPPPPGLPCPCTGVSDCSGGTDKKLRNCSRLACLAGELRCTLSDDCIPLTWRCDGHPDCPDSSDELGCGTNEILPEGDATTMGPPVTLESVTSLRNATTMGPPVTLESVPSVGNATSSSAGDQSGSPTAY

SEQ ID NO: 1058 - protein, 242 aa, synthetic construct
  REGION 1..242: note = CD33 (P20138) ECD
DPNFWLQVQESVTVQEGLCVLVPCTFFHPIPYYDKNSPVHGYWFREGAIISRDSPVATNKLDQEVQEETQGRFRLLGDPSRNNCSLSIVDARRRDNGSYFFRMERGSTKYSYKSPQLSVHVTDLTHRPKILIPGTLEPGHSKNLTCSVSWACEQGTPPIFSWLSAAPTSLGPRTTHSSVLIITPRPQDHGTNLTCQVKFAGAGVTTERTIQLNVTYVPQNPTTGIFPGDGSGKQETRAGVVH

SEQ ID NO: 1059 - protein, 259 aa, synthetic construct
  REGION 1..259: note = CD34 (P28906) ECD
SLDNNGTATPELPTQGTFSNVSTNVSYQETTTPSTLGSTSLHPVSQHGNEATTNITETTVKFTSTSVITSVYGNTNSSVQSQTSVISTVFTTPANVSTPETTLKPSLSPGNVSDLSTTSTSLATSPTKPYTSSSPILSDIKAEIKCSGIREVKLTQGICLEQNKTSSCAEFKKDRGEGLARVLCGEEQADADAGAQVCSLLLAQSEVRPQCLLLVLANRTEISSKLQLMKKHQSDLKKLGILDFTEQDVASHQSYSQKT

SEQ ID NO: 1060 - protein, 84 aa, synthetic construct [sequence omitted]

SEQ ID NO: 1061 - protein, 94 aa, synthetic construct
  REGION 1..94: note = CD3G (P09693) ECD
QSIKGNHLVKVYDYQEDGSVLLTCDAEAKNITWFKDGKMIGFLTEDKKKWNLGSNAKDPRGMYQCKGSQNKSKPLQVYYRMCQNCIELNAATIS

SEQ ID NO: 1062 - protein, 371 aa, synthetic construct
  REGION 1..371: note = CD4 (P01730) ECD
KKVVLGKKGDTVELTCTASQKKSIQFHWKNSNQIKILGNQGSFLTKGPSKLNDRADSRRSLWDQGNFPLIIKNLKIEDSDTYICEVEDQKEEVQLLVFGLTANSDTHLLQGQSLTLTLESPPGSSPSVQCRSPRGKNIQGGKTLSVSQLELQDSGTWTCTVLQNQKKVEFKIDIVVLAFQKASSIVYKKEGEQVEFSFPLAFTVEKLTGSGELWWQAERASSSKSWITFDLKNKEVSVKRVTQDPKLQMGKKLPLHLTLPQALPQYAGSGNLTLALEAKTGKLHQEVNLVVMRATQLQKNLTCEVWGPTSPKLMLSLKLENKEAKVSKREKAVWVLNPEAGMWQCLLSDSGQVLLESNIKVLPTWSTPVQP

SEQ ID NO: 1063 - protein, 173 aa, synthetic construct
  REGION 1..173: note = CD40 (P25942) ECD
EPPTACREKQYLINSQCCSLCQPGQKLVSDCTEFTETECLPCGESEFLDTWNRETHCHQHKYCDPNLGLRVQQKGTSETDTICTCEEGWHCTSEACESCVLHRSCSPGFGVKQIATGVSDTICEPCPVGFFSNVSSAFEKCHPWTSCETKDLVVQQAGTNKTDVVCGPQDRLR

SEQ ID NO: 1064 - protein, 629 aa, synthetic construct
  REGION 1..629: note = CD44 (P16070) ECD
QIDLNITCRFAGVFHVEKNGRYSISRTEAADLCKAFNSTLPTMAQMEKALSIGFETCRYGFIEGHVVIPRIHPNSICAANNTGVYILTSNTSQYDTYCFNASAPPEEDCTSVTDLPNAFDGPITITIVNRDGTRYVQKGEYRTNPEDIYPSNPTDDDVSSGSSSERSSTSGGYIFYTFSTVHPIPDEDSPWITDSTDRIPATTLMSTSATATETATKRQETWDWFSWLFLPSESKNHLHTTTQMAGTSSNTISAGWEPNEENEDERDRHLSFSGSGIDDDEDFISSTISTTPRAFDHTKQNQDWTQWNPSHSNPEVLLQTTTRMTDVDRNGTTAYEGNWNPEAHPPLIHHEHHEEEETPHSTSTIQATPSSTTEETATQKEQWFGNRWHEGYRQTPKEDSHSTTGTAAASAHTSHPMQGRTTPSPEDSSWTDFFNPISHPMGRGHQAGRRMDMDSSHSITLQPTANPNTGLVEDLDRTGPLSMTTQQSNSQSFSTSHEGLEEDKDHPTTSTLTSSNRNDVTGGRRDPNHSEGSTTLLEGYTSHYPHTKESRTFIPVTSAKTGSFGVTAVTVGDSNSNVNRSLSGDQDTFHPSGGSHTTHGSESDGHSHGSQEGGANTTSGPIRTPQIPE

SEQ ID NO: 1065 - protein, 309 aa, synthetic construct
  REGION 1..309: note = CD46 (P15529) ECD
CEEPPTFEAMELIGKPKPYYEIGERVDYKCKKGYFYIPPLATHTICDRNHTWLPVSDDACYRETCPYIRDPLNGQAVPANGTYEFGYQMHFICNEGYYLIGEEILYCELKGSVAIWSGKPPICEKVLCTPPPKIKNGKHTFSEVEVFEYLDAVTYSCDPAPGPDPFSLIGESTIYCGDNSVWSRAAPECKVVKCRFPVVENGKQISGFGKKFYYKATVMFECDKGFYLDGSDTIVCDSNSTWDPPVPKCLKVLPPSSTKPPALSHSVSTSSTTKSPASSASGPRPTYKPPVSNYPGYPKPEEGILDSLD

SEQ ID NO: 1066 - protein, 348 aa, synthetic construct
  REGION 1..348: note = CD5 (P06127) ECD
RLSWYDPDFQARLTRSNSKCQGQLEVYLKDGWHMVCSQSWGRSSKQWEDPSQASKVCQRLNCGVPLSLGPFLVTYTPQSSIICYGQLGSFSNCSHSRNDMCHSLGLTCLEPQKTTPPTTRPPPTTTPEPTAPPRLQLVAQSGGQHCAGVVEFYSGSLGGTISYEAQDKTQDLENFLCNNLQCGSFLKHLPETEAGRAQDPGEPREHQPLPIQWKIQNSSCTSLEHCFRKIKPQKSGRVLALLCSGFQPKVQSRLVGGSSICEGTVEVRQGAQWAALCDSSSARSSLRWEEVCREQQCGSVNSYRVLDAGDPTSRGLFCPHQKLSQCHELWERNSYCKKVFVTCQDPNP

SEQ ID NO: 1067 - protein, 187 aa, synthetic construct
  REGION 1..187: note = CD58 (P19256) ECD
FSQQIYGVVYGNVTFHVPSNVPLKEVLWKKQKDKVAELENSEFRAFSSFKNRVYLDTVSGSLTIYNLTSSDEDEYEMESPNITDTMKFFLYVLESLPSPTLTCALTNGSIEVQCMIPEHYNSHRGLIMYSWDCPMEQCKRNSTSIYFKMENDLPQKIQCTLSNPLFNTTSSIILTTCIPSSGHSRHR

SEQ ID NO: 1068 - protein, 385 aa, synthetic construct
  REGION 1..385: note = CD6 (P30203) ECD
HPSPAPPDQLNTSSAESELWEPGERLPVRLTNGSSSCSGTVEVRLEASWEPACGALWDSRAAEAVCRALGCGGAEAASQLAPPTPELPPPPAAGNTSVAANATLAGAPALLCSGAEWRLCEVVEHACRSDGRRARVTCAENRALRLVDGGGACAGRVEMLEHGEWGSVCDDTWDLEDAHVVCRQLGCGWAVQALPGLHFTPGRGPIHRDQVNCSGAEAYLWDCPGLPGQHYCGHKEDAGAVCSEHQSWRLTGGADRCEGQVEVHFRGVWNTVCDSEWYPSEAKVLCQSLGCGTAVERPKGLPHSLSGRMYYSCNGEELTLSNCSWRFNNSNLCSQSLAARVLCSASRSLHNLSTPEVPASVQTVTIESSVTVKIENKESRELMLL

SEQ ID NO: 1069 - protein, 298 aa, synthetic construct
  REGION 1..298: note = CD68 (P34810) ECD
NDCPHKKSATLLPSFTVTPTVTESTGTTSHRTTKSHKTTTHRTTTTGTTSHGPTTATHNPTTTSHGNVTVHPTSNSTATSQGPSTATHSPATTSHGNATVHPTSNSTATSPGFTSSAHPEPPPPSPSPSPTSKETIGDYTWTNGSQPCVHLQAQIQIRVMYTTQGGGEAWGISVLNPNKTKVQGSCEGAHPHLLLSFPYGHLSFGFMQDLQQKVVYLSYMAVEYNVSFPHAAQWTFSAQNASLRDLQAPLGQSFSCSNSSIILSPAVHLDLLSLRLQAAQLPHTGVFGQSFSCPSDRS

SEQ ID NO: 1070 - protein, 155 aa, synthetic construct
  REGION 1..155: note = CD7 (P09564) ECD
AQEVQQSPHCTTVPVGASVNITCSTSGGLRGIYLRQLGPQPQDIIYYEDGVVPTTDRRFRGRIDFSGSQDNLTITMHRLQLSDTGTYTCQAITEVNVYGSGTLVLVTEEQSQGWHRCSDAPPRASALPAPPTGSALPDPQTASALPDPPAASALP

SEQ ID NO: 1071 - protein, 111 aa, synthetic construct
  REGION 1..111: note = CD79A (P11912) ECD
LWMHKVPASLMVSLGEDAHFQCPHNSSNNANVTWWRVLHGNYTWPPEFLGPGEDPNGTLIIQNVNKSHGGIYVCRVQEGNESYQQSCGTYLRVRQPPPRPFLDMGEGTKNR

SEQ ID NO: 1072 - protein, 131 aa, synthetic construct
  REGION 1..131: note = CD79B (P40259) ECD
ARSEDRYRNPKGSACSRIWQSPRFIARKRGFTVKMHCYMNSASGNVSWLWKQEMDENPQQLKLEKGRMEESQNESLATLTIQGIRFEDNGIYFCQQKCNNTSEVYQGCGTELRVMGFSTLAQLKQRNTLKD

SEQ ID NO: 1073 - protein, 208 aa, synthetic construct [sequence omitted]

SEQ ID NO: 1074 - protein, 125 aa, synthetic construct
  REGION 1..125: note = CD83 (Q01151) ECD
TPEVKVACSEDVDLPCTAPWDPQVPYTVSWVKLLEGGEERMETPQEDHLRGQHYHQKGQNGSFDAPNERPYSLKIRNTTSCNSGTYRCTLQDPDGQRNLSGKVILRVTGCPAQRKEETFKKYRAE

SEQ ID NO: 1075 - protein, 204 aa, synthetic construct
  REGION 1..204: note = CD84 (Q9UIB8) ECD
KDSEIFTVNGILGESVTFPVNIQEPRQVKIIAWTSKTSVAYVTPGDSETAPVVTVTHRNYYERIHALGPNYNLVISDLRMEDAGDYKADINTQADPYTTTKRYNLQIYRRLGKPKITQSLMASVNSTCNVTLTCSVEKEEKNVTYNWSPLGEEGNVLQIFQTPEDQELTYTCTAQNPVSNNSDSISARQLCADIAMGFRTHHTG

SEQ ID NO: 1076 - protein, 224 aa, synthetic construct
  REGION 1..224: note = CD86 (P42081) ECD
APLKIQAYFNETADLPCQFANSQNQSLSELVVFWQDQENLVLNEVYLGKEKFDSVHSKYMGRTSFDSDSWTLRLHNLQIKDKGLYQCIIHHKKPTGMIRIHQMNSELSVLANFSQPEIVPISNITENVYINLTCSSIHGYPEPKKMSVLLRTKNSTIEYDGVMQKSQDNVTELYDVSISLSVSFPDVTSNMTIFCILETDKTRLLSSPFSIELEDPQPPPDHIP

SEQ ID NO: 1077 - protein, 161 aa, synthetic construct
  REGION 1..161: note = CD8A (P01732) ECD
SQFRVSPLDRTWNLGETVELKCQVLLSNPTSGCSWLFQPRGAAASPTFLLYLSQNKPKAAEGLDTQRFSGKRLGDTFVLTLSDFRRENEGYYFCSALSNSIMYFSHFVPVFLPAKPTTTPAPRPPTPAPTIASQPLSLRPEACRPAAGGAVHTRGLDFACD

SEQ ID NO: 1078 - protein, 149 aa, synthetic construct
  REGION 1..149: note = CD8B (P10966) ECD
LQQTPAYIKVQTNKMVMLSCEAKISLSNMRIYWLRQRQAPSSDSHHEFLALWDSAKGTIHGEEVEQEKIAVFRDASRFILNLTSVKPEDSGIYFCMIVGSPELTFGKGTQLSVVDFLPTTAQPTKKSTLKKRVCRLPRPETQKGPLCSP

SEQ ID NO: 1079 - protein, 152 aa, synthetic construct
  REGION 1..152: note = CD8BP (A6NJW9) ECD
NSVLQQTPAYIKVQTNKMVMLSCEAKISLSNMCIYWLRQRQAPSSDSHHEFLTLWDSAKGTIHGEEVEQEKIAVFRDASRFILNLTSVKPEDSGIYFCMIVGSPELTFGKGTQLSVVDFLPTTAQPTKKSTLKKRVCRLPRPETQKGPLCSP

SEQ ID NO: 1080 - protein, 557 aa, synthetic construct
  REGION 1..557: note = CD93 (Q9NPY3) ECD
ADTEAVVCVGTACYTAHSGKLSAAEAQNHCNQNGGNLATVKSKEEAQHVQRVLAQLLRREAALTARMSKFWIGLQREKGKCLDPSLPLKGFSWVGGGEDTPYSNWHKELRNSCISKRCVSLLLDLSQPLLPSRLPKWSEGPCGSPGSPGSNIEGFVCKFSFKGMCRPLALGGPGQVTYTTPFQTTSSSLEAVPFASAANVACGEGDKDETQSHYFLCKEKAPDVFDWGSSGPLCVSPKYGCNFNNGGCHQDCFEGGDGSFLCGCRPGFRLLDDLVTCASRNPCSSSPCRGGATCVLGPHGKNYTCRCPQGYQLDSSQLDCVDVDECQDSPCAQECVNTPGGFRCECWVGYEPGGPGEGACQDVDECALGRSPCAQGCTNTDGSFHCSCEEGYVLAGEDGTQCQDVDECVGPGGPLCDSLCFNTQGSFHCGCLPGWVLAPNGVSCTMGPVSLGPPSGPPDEEDKGEKEGSTVPRAATASPTRGPEGTPKATPTTSRPSLSSDAPITSAPLKMLAPSGSPGVWREPSIHHATAASGPQEPAGGDSSVATQNNDGTDGQK

SEQ ID NO: 1081 - protein, 498 aa, synthetic construct
  REGION 1..498: note = CD96 (P40200) ECD
VWEKTVNTEENVYATLGSDVNLTCQTQTVGFFVQMQWSKVTNKIDLIAVYHPQYGFYCAYGRPCESLVTFTETPENGSKWTLHLRNMSCSVSGRYECMLVLYPEGIQTKIYNLLIQTHVTADEWNSNHTIEIEINQTLEIPCFQNSSSKISSEFTYAWSVENSSTDSWVLLSKGIKEDNGTQETLISQNHLISNSTLLKDRVKLGTDYRLHLSPVQIFDDGRKFSCHIRVGPNKILRSSTTVKVFAKPEIPVIVENNSTDVLVERRFTCLLKNVFPKANITWFIDGSFLHDEKEGIYITNEERKGKDGFLELKSVLTRVHSNKPAQSDNLTIWCMALSPVPGNKVWNISSEKITFLLGSEISSTDPPLSVTESTLDTQPSPASSVSPARYPATSSVTLVDVSALRPNTTPQPSNSSMTTRGFNYPWTSSGTDTKKSVSRIPSETYSSSPSGAGSTLHDNVFTSTARAFSEVPTTANGSTKTNHVHITGIVVNKPKDGM

SEQ ID NO: 1082 - protein, 638 aa, synthetic construct
  REGION 1..638: note = CDCP1 (Q9H5V8) ECD
FEIALPRESNITVLIKLGTPTLLAKPCYIVISKRHITMLSIKSGERIVFTFSCQSPENHFVIEIQKNIDCMSGPCPFGEVQLQPSTSLLPTLNRTFIWDVKAHKSIGLELQFSIPRLRQIGPGESCPDGVTHSISGRIDATVVRIGTFCSNGTVSRIKMQEGVKMALHLPWFHPRNVSGFSIANRSSIKRLCIIESVFEGEGSATLMSANYPEGFPEDELMTWQFVVPAHLRASVSFLNFNLSNCERKEERVEYYIPGSTTNPEVFKLEDKQPGNMAGNFNLSLQGCDQDAQSPGILRLQFQVLVQHPQNESNKIYVVDLSNERAMSLTIEPRPVKQSRKFVPGCFVCLESRTCSSNLTLTSGSKHKISFLCDDLTRLWMNVEKTISCTDHRYCQRKSYSLQVPSDILHLPVELHDFSWKLLVPKDRLSLVLVPAQKLQQHTHEKPCNTSFSYLVASAIPSQDLYFGSFCPGGSIKQIQVKQNISVTLRTFAPSFQQEASRQGLTVSFIPYFKEEGVFTVTPDTKSKVYLRTPNWDRGLPSLTSVSWNISVPRDQVACLTFFKERSGVVCQTGRAFMIIQEQRTRAEEIFSLDEDVLPKPSFHHHSFWVNISNCSPTSGKQLDLLFSVTLTPRTVDLT

SEQ ID NO: 1083 - protein, 555 aa, synthetic construct
  REGION 1..555: note = CDH1 (P12830) ECD
DWVIPPISCPENEKGPFPKNLVQIKSNKDKEGKVFYSITGQGADTPPVGVFIIERETGWLKVTEPLDRERIATYTLFSHAVSSNGNAVEDPMEILITVTDQNDNKPEFTQEVFKGSVMEGALPGTSVMEVTATDADDDVNTYNAAIAYTILSQDPELPDKNMFTINRNTGVISVVTTGLDRESFPTYTLVVQAADLQGEGLSTTATAVITVTDTNDNPPIFNPTTYKGQVPENEANVVITTLKVTDADAPNTPAWEAVYTILNDDGGQFVVTTNPVNNDGILKTAKGLDFEAKQQYILHVAVTNVVPFEVSLTTSTATVTVDVLDVNEAPIFVPPEKRVEVSEDFGVGQEITSYTAQEPDTFMEQKITYRIWRDTANWLEINPDTGAISTRAELDREDFEHVKNSTYTALIIATDNGSPVATGTGTLLLILSDVNDNAPIPEPRTIFFCERNPKPQVINIIDADLPPNTSPFTAELTHGASANWTIQYNDPTQESIILKPKMALEVGDYKINLKLMDNQNKDQVTTLEVSVCDCEGAAGVCRKAQPVEAGLQIPA

SEQ ID NO: 1084 - protein, 559 aa, synthetic construct
  REGION 1..559: note = CDH10 (Q9Y6N8) ECD
GWMWNQFFLLEEYTGSDYQYVGKLHSDQDKGDGSLKYILSGDGAGTLFIIDEKTGDIHATRRIDREEKAFYTLRAQAINRRTLRPVEPESEFVIKIHDINDNEPTFPEEIYTASVPEMSVVGTSVVQVTATDADDPSYGNSARVIYSILQGQPYFSVEPETGIIRTALPNMNRENREQYQVVIQAKDMGGQMGGLSGTTTVNITLTDVNDNPPRFPQNTIHLRVLESSPVGTAIGSVKATDADTGKNAEVEYRIIDGDGTDMFDIVTEKDTQEGIITVKKPLDYESRRLYTLKVEAENTHVDPRFYYLGPFKDTTIVKISIEDVDEPPVFSRSSYLFEVHEDIEVGTIIGTVMARDPDSISSPIRFSLDRHTDLDRIFNIHSGNGSLYTSKPLDRELSQWHNLTVIAAEINNPKETTRVAVFVRILDVNDNAPQFAVFYDTFVCENARPGQLIQTISAVDKDDPLGGQKFFFSLAAVNPNFTVQDNEDNTARILTRKNGFNRHEISTYLLPVVISDNDYPIQSSTGTLTIRVCACDSQGNMQSCSAEALLLPAGLSTGA

SEQ ID NO: 1085 - protein, 564 aa, synthetic construct
  REGION 1..564: note = CDH11 (P55287) ECD
GWVWNQFFVIEEYTGPDPVLVGRLHSDIDSGDGNIKYILSGEGAGTIFVIDDKSGNIHATKTLDREERAQYTLMAQAVDRDTNRPLEPPSEFIVKVQDINDNPPEFLHETYHANVPERSNVGTSVIQVTASDADDPTYGNSAKLVYSILEGQPYFSVEAQTGIIRTALPNMDREAKEEYHVVIQAKDMGGHMGGLSGTTKVTITLTDVNDNPPKFPQSVYQMSVSEAAVPGEEVGRVKAKDPDIGENGLVTYNIVDGDGMESFEITTDYETQEGVIKLKKPVDFETKRAYSLKVEAANVHIDPKFISNGPFKDTVTVKISVEDADEPPMFLAPSYIHEVQENAAAGTVVGRVHAKDPDAANSPIRYSIDRHTDLDRFFTINPEDGFIKTTKPLDREETAWLNITVFAAEIHNRHQEAKVPVAIRVLDVNDNAPKFAAPYEGFICESDQTKPLSNQPIVTISADDKDDTANGPRFIFSLPPEIIHNPNFTVRDNRDNTAGVYARRGGFSRQKQDLYLLPIVISDGGIPPMSSTNTLTIKVCGCDVNGALLSCNAEAYILNAGLST

SEQ ID NO: 1086 - protein, 555 aa, synthetic construct
  REGION 1..555: note = CDH12 (P55289) ECD
GWVWNQFFVLEEYVGSEPQYVGKLHSDLDKGEGTVKYTLSGDGAGTVFTIDETTGDIHAIRSLDREEKPFYTLRAQAVDIETRKPLEPESEFIIKVQDINDNEPKFLDGPYVATVPEMSPVGAYVLQVKATDADDPTYGNSARVVYSILQGQPYFSIDPKTGVIRTALPNMDREVKEQYQVLIQAKDMGGQLGGLAGTTIVNITLTDVNDNPPRFPKSIFHLKVPESSPIGSAIGRIRAVDPDFGQNAEIEYNIVPGDGGNLFDIVTDEDTQEGVIKLKKPLDFETKKAYTFKVEASNLHLDHRFHSAGPFKDTATVKISVLDVDEPPVFSKPLYTMEVYEDTPVGTIIGAVTAQDLDVGSSAVRYFIDWKSDGDSYFTIDGNEGTIATNELLDRESTAQYNFSIIASKVSNPLLTSKVNILINVLDVNEFPPEISVPYETAVCENAKPGQIIQIVSAADRDLSPAGQQFSFRLSPEAAIKPNFTVRDFRNNTAGIETRRNGYSRRQQELYFLPVVIEDSSYPVQSSTNTMTIRVCRCDSDGTILSCNVEAIFLP

SEQ ID NO: 1087 - protein, 546 aa, synthetic construct
  REGION 1..546: note = CDH15 (P55291) ECD
LPYPLVQIKSDKQQLGSVIYSIQGPGVDEEPRGVFSIDKFTGKVFLNAMLDREKTDRFRLRAFALDLGGSTLEDPTDLEIVVVDQNDNRPAFLQEAFTGRVLEGAVPGTYVTRAEATDADDPETDNAALRFSILQQGSPELFSIDELTGEIRTVQVGLDREVVAVYNLTLQVADMSGDGLTATASAIITLDDINDNAPEFTRDEFFMEAIEAVSGVDVGRLEVEDRDLPGSPNWVARFTILEGDPDGQFTIRTDPKTNEGVLSIVKALDYESCEHYELKVSVQNEAPLQAAALRAERGQAKVRVHVQDTNEPPVFQENPLRTSLAEGAPPGTLVATFSARDPDTEQLQRLSYSKDYDPEDWLQVDAATGRIQTQHVLSPASPFLKGGWYRAIVLAQDDASQPRTATGTLSIEILEVNDHAPVLAPPPPGSLCSEPHQGPGLLLGATDEDLPPHGAPFHFQLSPRLPELGRNWSLSQVNVSHARLRPRHQVPEGLHRLSLLLRDSGQPPQQREQPLNVTVCRCGKDGVCLPGAAALLAGGTGLSLGA

SEQ ID NO: 1088 - protein, 768 aa, synthetic construct
  REGION 1..768: note = CDH16 (O75309) ECD
KAQPAELSVEVPENYGGNFPLYLTKLPLPREGAEGQIVLSGDSGKATEGPFAMDPDSGFLLVTRALDREEQAEYQLQVTLEMQDGHVLWGPQPVLVHVKDENDQVPHFSQAIYRARLSRGTRPGIPFLFLEASDRDEPGTANSDLRFHILSQAPAQPSPDMFQLEPRLGALALSPKGSTSLDHALERTYQLLVQVKDMGDQASGHQATATVEVSIIESTWVSLEPIHLAENLKVLYPHHMAQVHWSGGDVHYHLESHPPGPFEVNAEGNLYVTRELDREAQAEYLLQVRAQNSHGEDYAAPLELHVLVMDENDNVPICPPRDPTVSIPELSPPGTEVTRLSAEDADAPGSPNSHVVYQLLSPEPEDGVEGRAFQVDPTSGSVTLGVLPLRAGQNILLLVLAMDLAGAEGGFSSTCEVEVAVTDINDHAPEFITSQIGPISLPEDVEPGTLVAMLTAIDADLEPAFRLMDFAIERGDTEGTFGLDWEPDSGHVRLRLCKNLSYEAAPSHEVVVVVQSVAKLVGPGPGPGATATVTVLVERVMPPPKLDQESYEASVPISAPAGSFLLTIQPSDPISRTLRFSLVNDSEGWLCIEKFSGEVHTAQSLQGAQPGDTYTVLVEAQDTDEPRLSASAPLVIHFLKAPPAPALTLAPVPSQYLCTPRQDHGLIVSGPSKDPDLASGHGPYSFTLGPNPTVQRDWRLQTLNGSHAYLTLALHWVEPREHIIPVVVSHNAQMWQLLVRVIVCRCNVEGQCMRKVGRMKGMPTKLSA

SEQ ID NO: 1089 - protein, 765 aa, synthetic construct
  REGION 1..765: note = CDH17 (Q12864) ECD
QEGKFSGPLKPMTFSIYEGQEPSQIIFQFKANPPAVTFELTGETDNIFVIEREGLLYYNRALDRETRSTHNLQVAALDANGIIVEGPVPITIKVKDINDNRPTFLQSKYEGSVRQNSRPGKPFLYVNATDLDDPATPNGQLYYQIVIQLPMINNVMYFQINNKTGAISLTREGSQELNPAKNPSYNLVISVKDMGGQSENSFSDTTSVDIIVTENIWKAPKPVEMVENSTDPHPIKITQVRWNDPGAQYSLVDKEKLPRFPFSIDQEGDIYVTQPLDREEKDAYVFYAVAKDEYGKPLSYPLEIHVKVKDINDNPPTCPSPVTVFEVQENERLGNSIGTLTAHDRDEENTANSFLNYRIVEQTPKLPMDGLFLIQTYAGMLQLAKQSLKKQDTPQYNLTIEVSDKDFKTLCFVQINVIDINDQIPIFEKSDYGNLTLAEDTNIGSTILTIQATDADEPFTGSSKILYHIIKGDSEGRLGVDTDPHTNTGYVIIKKPLDFETAAVSNIVFKAENPEPLVFGVKYNASSFAKFTLIVTDVNEAPQFSQHVFQAKVSEDVAIGTKVGNVTAKDPEGLDISYSLRGDTRGWLKIDHVTGEIFSVAPLDREAGSPYRVQVVATEVGGSSLSSVSEFHLILMDVNDNPPRLAKDYTGLFFCHPLSAPGSLIFEATDDDQHLFRGPHFTFSLGSGSLQNDWEVSKINGTHARLSTRHTEFEEREYVVLIRINDGGRPPLEGIVSLPVTFCSCVEGSCFRPAGHQTGIPTVGM

SEQ ID NO: 1090 - protein, 555 aa, synthetic construct
  REGION 1..555: note = CDH18 (Q13634) ECD
GWVWNQFFVLEEHMGPDPQYVGKLHSNSDKGDGSVKYILTGEGAGTIFIIDDTTGDIHSTKSLDREQKTHYVLHAQAIDRRTNKPLEPESEFIIKVQDINDNAPKFTDGPYIVTVPEMSDMGTSVLQVTATDADDPTYGNSARVVYSILQGQPYFSVDPKTGVIRTALHNMDREAREHYSVVIQAKDMAGQVGGLSGSTTVNITLTDVNDNPPRFPQKHYQLYVPESAQVGSAVGKIKANDADTGSNADMTYSIINGDGMGIFSISTDKETREGILSLKKPLNYEKKKSYTLNIEGANTHLDFRFSHLGPFKDATMLKIIVGDVDEPPLFSMPSYLMEVYENAKIGTVVGTVLAQDPDSTNSLVRYFINYNVEDDRFFNIDANTGTIRTTKVLDREETPWYNITVTASEIDNPDLLSHVTVGIRVLDVNDNPPELAREYDIIVCENSKPGQVIHTISATDKDDFANGPRFNFFLDERLPVNPNFTLKDNEDNTASILTRRRRFSRTVQDVYYLPIMISDGGIPSLSSSSTLTIRVCACERDGRVRTCHAEAFLSS

SEQ ID NO: 1091 - protein, 553 aa, synthetic construct
  REGION 1..553: note = CDH19 (Q9H159) ECD
GWVWNQFFVPEEMNTTSHHIGQLRSDLDNGNNSFQYKLLGAGAGSTFIIDERTGDIYAIQKLDREERSLYILRAQVIDIATGRAVEPESEFVIKVSDINDNEPKFLDEPYEAIVPEMSPEGTLVIQVTASDADDPSSGNNARLLYSLLQGQPYFSVEPTTGVIRISSKMDRELQDEYWVIIQAKDMIGQPGALSGTTSVLIKLSDVNDNKPIFKESLYRLTVSESAPTGTSIGTIMAYDNDIGENAEMDYSIEEDDSQTFDIITNHETQEGIVILKKKVDFEHQNHYGIRAKVKNHHVPEQLMKYHTEASTTFIKIQVEDVDEPPLFLLPYYVFEVFEETPQGSFVGVVSATDPDNRKSPIRYSITRSKVFNINDNGTITTSNSLDREISAWYNLSITATEKYNIEQISSIPLYVQVLNINDHAPEFSQYYETYVCENAGSGQVIQTISAVDRDESIEEHHFYFNLSVEDTNNSSFTIIDNQDNTAVILTNRTGFNLQEEPVFYISILIADNGIPSLTSTNTLTIHVCDCGDSGSTQTCQYQELVLSMGFKTE

SEQ ID NO: 1092 - protein, 565 aa, synthetic construct
  REGION 1..565: note = CDH2 (P19022) ECD
DWVIPPINLPENSRGPFPQELVRIRSDRDKNLSLRYSVTGPGADQPPTGIFIINPISGQLSVTKPLDREQIARFHLRAHAVDINGNQVENPIDIVINVIDMNDNRPEFLHQVWNGTVPEGSKPGTYVMTVTAIDADDPNALNGMLRYRIVSQAPSTPSPNMFTINNETGDIITVAAGLDREKVQQYTLIIQATDMEGNPTYGLSNTATAVITVTDVNDNPPEFTAMTFYGEVPENRVDIIVANLTVTDKDQPHTPAWNAVYRISGGDPTGRFAIQTDPNSNDGLVTVVKPIDFETNRMFVLTVAAENQVPLAKGIQHPPQSTATVSVTVIDVNENPYFAPNPKIIRQEEGLHAGTMLTTFTAQDPDRYMQQNIRYTKLSDPANWLKIDPVNGQITTIAVLDRESPNVKNNIYNATFLASDNGIPPMSGTGTLQIYLLDINDNAPQVLPQEAETCETPDPNSINITALDYDIDPNAGPFAFDLPLSPVTIKRNWTITRLNGDFAQLNLKIKFLEAGIYEVPIIITDSGNPPKSNISILRVKVCQCDSNGDCTDVDRIVGAGLGTGA

SEQ ID NO: 1093 - protein, 560 aa, synthetic construct
  REGION 1..560: note = CDH20 (Q9HBT6) ECD
SWVWNQFFVLEEYTGTDPLYVGKLHSDMDRGDGSIKYILSGEGAGIVFTIDDTTGDIHAIQRLDREERAQYTLRAQALDRRTGRPMEPESEFIIKIQDINDNEPKFLDGPYVATVPEMSPVGTSVIQVTATDADDPTYGNSARVVYSILQGQPYFSVDSKTGVIRTALMNMDREAKEYYEVIIQAKDMGGQLGGLAGTTTVNITLSDVNDNPPRFPQKHYQMSVLESAPISSTVGRVFAKDLDEGINAEMKYTIVDGDGADAFDISTDPNFQVGIITVKKPLSFESKKSYTLKVEGANPHLEMRFLNLGPFQDTTTVHISVEDVDEPPVFEPGFYFVEVPEDVAIGTTIQIISAKDPDVTNNSIRYSIDRSSDPGRFFYVDITTGALMTARPLDREEFSWHNITVLAMEMNNPSQVGSVPVTIKVLDVNDNAPEFPRFYEAFVCENAKAGQLIQTVSAVDQDDPRNGQHFYYSLAPEAANNPNFTIRDNQDNTARILTRRSGFRQQEQSVFHLPILIADSGQPVLSSTGTLTIQVCSCDDDGHVMSCSPEAYMLPVSLSR

SEQ ID NO: 1094 - protein, 589 aa, synthetic construct
  REGION 1..589: note = CDH22 (Q9UJ99) ECD
LWAAGTPSPSAPGARQDGALGAGRVKRGWVWNQFFVVEEYTGTEPLYVGKIHSDSDEGDGAIKYTISGEGAGTIFLIDELTGDIHAMERLDREQKTFYTLRAQARDRATNRLLEPESEFIIKVQDINDSEPRFLHGPYIGSVAELSPTGTSVMQVMASDADDPTYGSSARLVYSVLDGEHHFTVDPKTGVIRTAVPDLDRESQERYEVVIQATDMAGQLGGLSGSTTVTIVVTDVNDNPPRFPQKMYQFSIQESAPIGTAVGRVKAEDSDVGENTDMTYHLKDESSSGGDVFKVTTDSDTQEAIIVVQKRLDFESQPVHTVILEALNKFVDPRFADLGTFRDQAIVRVAVTDVDEPPEFRPPSGLLEVQEDAQVGSLVGVVTARDPDAANRPVRYAIDRESDLDQIFDIDADTGAIVTGKGLDRETAGWHNITVLAMEADNHAQLSRASLRIRILDVNDNPPELATPYEAAVCEDAKPGQLIQTISVVDRDEPQGGHRFYFRLVPEAPSNPHFSLLDIQDNTAAVHTQHVGFNRQEQDVFFLPILVVDSGPPTLSSTGTLTIRICGCDSSGTIQSCNTTAFVMAASLSP

SEQ ID NO: 1095 - protein, 3041 aa, synthetic construct
  REGION 1..3041: note = CDH23 (Q9H251) ECD
QVNRLPFFTNHFFDTYLLISEDTPVGSSVTQLLAQDMDNDPLVFGVSGEEASRFFAVEPDTGVVWLRQPLDRETKSEFTVEFSVSDHQGVITRKVNIQVGDVNDNAPTFHNQPYSVRIPENTPVGTPIFIVNATDPDLGAGGSVLYSFQPPSQFFAIDSARGIVTVIRELDYETTQAYQLTVNATDQDKTRPLSTLANLAIIITDVQDMDPIFINLPYSTNIYEHSPPGTTVRIITAIDQDKGRPRGIGYTIVSGNTNSIFALDYISGVLTLNGLLDRENPLYSHGFILTVKGTELNDDRTPSDATVTTTFNILVIDINDNAPEFNSSEYSVAITELAQVGFALPLFIQVVDKDENLGLNSMFEVYLVGNNSHHFIISPTSVQGKADIRIRVAIPLDYETVDRYDFDLFANESVPDHVGYAKVKITLINENDNRPIFSQPLYNISLYENVTVGTSVLTVLATDNDAGTFGEVSYFFSDDPDRFSLDKDTGLIMLIARLDYELIQRFTLTIIARDGGGEETTGRVRINVLDVNDNVPTFQKDAYVGALRENEPSVTQLVRLRATDEDSPPNNQITYSIVSASAFGSYFDISLYEGYGVISVSRPLDYEQISNGLIYLTVMAMDAGNPPLNSTVPVTIEVFDENDNPPTFSKPAYFVSVVENIMAGATVLFLNATDLDRSREYGQESIIYSLEGSTQFRINARSGEITTTSLLDRETKSEYILIVRAVDGGVGHNQKTGIATVNITLLDINDNHPTWKDAPYYINLVEMTPPDSDVTTVVAVDPDLGENGTLVYSIQPPNKFYSLNSTTGKIRTTHAMLDRENPDPHEAELMRKIVVSVTDCGRPPLKATSSATVFVNLLDLNDNDPTFQNLPFVAEVLEGIPAGVSIYQVVAIDLDEGLNGLVSYRMPVGMPRMDFLINSSSGVVVTTTELDRERIAEYQLRVVASDAGTPTKSSTSTLTIHVLDVNDETPTFFPAVYNVSVSEDVPREFRVVWLNCTDNDVGLNAELSYFITGGNVDGKFSVGYRDAVVRTVVGLDRETTAAYMLILEAIDNGPVGKRHTGTATVFVTVLDVNDNRPIFLQSSYEASVPEDIPEGHSILQLKATDADEGEFGRVWYRILHGNHGNNFRIHVSNGLLMRGPRPLDRERNSSHVLIVEAYNHDLGPMRSSVRVIVYVEDINDEAPVFTQQQYSRLGLRETAGIGTSVIVVQATDRDSGDGGLVNYRILSGAEGKFEIDESTGLIITVNYLDYETKTSYMMNVSATDQAPPFNQGFCSVYITLLNELDEAVQFSNASYEAAILENLALGTEIVRVQAYSIDNLNQITYRFNAYTSTQAKALFKIDAITGVITVQGLVDREKGDFYTLTVVADDGGPKVDSTVKVYITVLDENDNSPRFDFTSDSAVSIPEDCPVGQRVATVKAWDPDAGSNGQVVFSLASGNIAGAFEIVTTNDSIGEVFVARPLDREELDHYILQVVASDRGTPPRKKDHILQVTILDINDNPPVIESPFGYNVSVNENVGGGTAVVQVRATDRDIGINSVLSYYITEGNKDMAFRMDRISGEIATRPAPPDRERQSFYHLVATVEDEGTPTLSATTHVYVTIVDENDNAPMFQQPHYEVLLDEGPDTLNTSLITIQALDLDEGPNGTVTYAIVAGNIVNTFRIDRHMGVITAAKELDYEISHGRYTLIVTATDQCPILSHRLTSTTTVLVNVNDINDNVPTFPRDYEGPFEVTEGQPGPRVWTFLAHDRDSGPNGQVEYSIMDGDPLGEFVISPVEGVLRVRKDVELDRETIAFYNLTICARDRGMPPLSSTMLVGIRVLDINDNDPVLLNLPMNITISENSPVSSFVAHVLASDADSGCNARLTFNITAGNRERAFFINATTGIVTVNRPLDRERIPEYKLTISVKDNPENPRIARRDYDLLLIFLSDENDNHPLFTKSTYQAEVMENSPAGTPLTVLNGPILALDADQDIYAVVTYQLLGAQSGLFDINSSTGVVTVRSGVIIDREAFSPPILELLLLAEDIGLLNSTAHLLITILDDNDNRPTFSPATLTVHLLENCPPGFSVLQVTATDEDSGLNGELVYRIEAGAQDRFLIHLVTGVIRVGNATIDREEQESYRLTVVATDRGTVPLSGTAIVTILIDDINDSRPEFLNPIQTVSVLESAEPGTVIANITAIDHDLNPKLEYHIVGIVAKDDTDRLVPNQEDAFAVNINTGSVMVKSPMNRELVATYEVTLSVIDNASDLPERSVSVPNAKLTVNVLDVNDNTPQFKPFGITYYMERILEGATPGTTLIAVAAVDPDKGLNGLVTYTLLDLVPPGYVQLEDSSAGKVIANRTVDYEEVHWLNFTVRASDNGSPPRAAEIPVYLEIVDINDNNPIFDQPSYQEAVFEDVPVGTIILTVTATDADSGNFALIEYSLGDGESKFAINPTTGDIYVLSSLDREKKDHYILTALAKDNPGDVASNRRENSVQVVIQVLDVNDCRPQFSKPQFSTSVYENEPAGTSVITMMATDQDEGPNGELTYSLEGPGVEAFHVDMDSGLVTTQRPLQSYEKFSLTVVATDGGEPPLWGTTMLLVEVIDVNDNRPVFVRPPNGTILHIREEIPLRSNVYEVYATDKDEGLNGAVRYSFLKTAGNRDWEFFIIDPISGLIQTAQRLDRESQAVYSLILVASDLGQPVPYETMQPLQVALEDIDDNEPLFVRPPKGSPQYQLLTVPEHSPRGTLVGNVTGAVDADEGPNAIVYYFIAAGNEEKNFHLQPDGCLLVLRDLDREREAIFSFIVKASSNRSWTPPRGPSPTLDLVADLTLQEVRVVLEDINDQPPRFTKAEYTAGVATDAKVGSELIQVLALDADIGNNSLVFYSILAIHYFRALANDSEDVGQVFTMGSMDGILRTFDLFMAYSPGYFVVDIVARDLAGHNDTAIIGIYILRDDQRVKIVINEIPDRVRGFEEEFIHLLSNITGAIVNTDNVQFHVDKKGRVNFAQTELLIHVVNRDTNRILDVDRVIQMIDENKEQLRNLFRNYNVLDVQPAISVRLPDDMSA

SEQ ID NO: 1096 - protein, 597 aa, synthetic construct
  REGION 1..597: note = CDH24 (Q86UP0) ECD
SWVWNQFFVIEEYAGPEPVLIGKLHSDVDRGEGRTKYLLTGEGAGTVFVIDEATGNIHVTKSLDREEKAQYVLLAQAVDRASNRPLEPPSEFIIKVQDINDNPPIFPLGPYHATVPEMSNVGTSVIQVTAHDADDPSYGNSAKLVYTVLDGLPFFSVDPQTGVVRTAIPNMDRETQEEFLVVIQAKDMGGHMGGLSGSTTVTVTLSDVNDNPPKFPQSLYQFSVVETAGPGTLVGRLRAQDPDLGDNALMAYSILDGEGSEAFSISTDLQGRDGLLTVRKPLDFESQRSYSFRVEATNTLIDPAYLRRGPFKDVASVRVAVQDAPEPPAFTQAAYHLTVPENKAPGTLVGQISAADLDSPASPIRYSILPHSDPERCFSIQPEEGTIHTAAPLDREARAWHNLTVLATELGWSWGPERGWVPLLVAEWSAPAAPPQRSPVGSAVGIPQDSSAQASRVQVAIQTLDENDNAPQLAEPYDTFVCDSAAPGQLIQVIRALDRDEVGNSSHVSFQGPLGPDANFTVQDNRDGSASLLLPSRPAPPRHAPYLVPIELWDWGQPALSSTATVTVSVCRCQPDGSVASCWPEAHLSAAGLSTGA

SEQ ID NO: 1097 - protein, 587 aa, synthetic construct
  REGION 1..587: note = CDH26 (Q8IXH8) ECD
DSVQQETDDLTKQTKEKIYQPLRRSKRRWVITTLELEEEDPGPFPKLIGELFNNMSYNMSLMYLISGPGVDEYPEIGLFSLEDHENGRIYVHRPVDREMTPSFTVYFDVVERSTGKIVDTSLIFNIRISDVNDHAPQFPEKEFNITVQENQSAGQPIFQMLAVDLDEENTPNSQVLYFLISQTPLLKESGFRVDRLSGEIRLSGCLDYETAPQFTLLIRARDCGEPSLSSTTTVHVDVQEGNNHRPAFTQENYKVQIPEGRASQGVLRLLVQDRDSPFTSAWRAKFNILHGNEEGHFDISTDPETNEGILNVIKPLDYETRPAQSLIIVVENEERLVFCERGKLQPPRKAAASATVSVQVTDANDPPAFHPQSFIVNKEEGARPGTLLGTFNAMDPDSQIRYELVHDPANWVSVDKNSGVVITVEPIDRESPHVNNSFYVIIIHAVDDGFPPQTATGTLMLFLSDINDNVPTLRPRSRYMEVCESAVHEPLHIEAEDPDLEPFSDPFTFELDNTWGNAEDTWKLGRNWGQSVELLTLRSLPRGNYLVPLFIGDKQGLSQKQTVHVRICPCASGLTCVELADAEVGLH

SEQ ID NO: 1098 - protein, 547 aa, synthetic construct
  REGION 1..547: note = CDH3 (P22223) ECD
DWVVAPISVPENGKGPFPQRLNQLKSNKDRDTKIFYSITGPGADSPPEGVFAVEKETGWLLLNKPLDREEIAKYELFGHAVSENGASVEDPMNISIIVTDQNDHKPKFTQDTFRGSVLEGVLPGTSVMQVTATDEDDAIYTYNGVVAYSIHSQEPKDPHDLMFTIHRSTGTISVISSGLDREKVPEYTLTIQATDMDGDGSTTTAVAVVEILDANDNAPMFDPQKYEAHVPENAVGHEVQRLTVTDLDAPNSPAWRATYLIMGGDDGDHFTITTHPESNQGILTTRKGLDFEAKNQHTLYVEVTNEAPFVLKLPTSTATIVVHVEDVNEAPVFVPPSKVVEVQEGIPTGEPVCVYTAEDPDKENQKISYRILRDPAGWLAMDPDSGQVTAVGTLDREDEQFVRNNIYEVMVLAMDNGSPPTTGTGTLLLTLIDVNDHGPVPEPRQITICNQSPVRQVLNITDKDLSPHTSPFQAQLTDDSDIYWTAEVNEEGDTVVLSLKKFLKQDTYDVHLSLSDHGNKEQLTVIRATVCDCHGHVETCPGPWKGG

SEQ ID NO: 1099 - protein, 565 aa, synthetic construct
  REGION 1..565: note = CDH4 (P55283) ECD
DWVIPPINVPENSRGPFPQQLVRIRSDKDNDIPIRYSITGVGADQPPMEVFSIDSMSGRMYVTRPMDREEHASYHLRAHAVDMNGNKVENPIDLYIYVIDMNDNRPEFINQVYNGSVDEGSKPGTYVMTVTANDADDSTTANGMVRYRIVTQTPQSPSQNMFTINSETGDIVTVAAGLDREKVQQYTVIVQATDMEGNLNYGLSNTATAIITVTDVNDNPPEFTASTFAGEVPENRVETVVANLTVMDRDQPHSPNWNAVYRIISGDPSGHFSVRTDPVTNEGMVTVVKAVDYELNRAFMLTVMVSNQAPLASGIQMSFQSTAGVTISIMDINEAPYFPSNHKLIRLEEGVPPGTVLTTFSAVDPDRFMQQAVRYSKLSDPASWLHINATNGQITTAAVLDRESLYTKNNVYEATFLAADNGIPPASGTGTLQIYLIDINDNAPELLPKEAQICEKPNLNAINITAADADVDPNIGPYVFELPFVPAAVRKNWTITRLNGDYAQLSLRILYLEAGMYDVPIIVTDSGNPPLSNTSIIKVKVCPCDDNGDCTTIGAVAAAGLGTGA

SEQ ID NO: 1100 - protein, 552 aa, synthetic construct
  REGION 1..552: note = CDH5 (P33151) ECD
DWIWNQMHIDEEKNTSLPHHVGKIKSSVSRKNAKYLLKGEYVGKVFRVDAETGDVFAIERLDRENISEYHLTAVIVDKDTGENLETPSSFTIKVHDVNDNWPVFTHRLFNASVPESSAVGTSVISVTAVDADDPTVGDHASVMYQILKGKEYFAIDNSGRIITITKSLDREKQARYEIVVEARDAQGLRGDSGTATVLVTLQDINDNFPFFTQTKYTFVVPEDTRVGTSVGSLFVEDPDEPQNRMTKYSILRGDYQDAFTIETNPAHNEGIIKPMKPLDYEYIQQYSFIVEATDPTIDLRYMSPPAGNRAQVIINITDVDEPPIFQQPFYHFQLKENQKKPLIGTVLAMDPDAARHSIGYSIRRTSDKGQFFRVTKKGDIYNEKELDREVYPWYNLTVEAKELDSTGTPTGKESIVQVHIEVLDENDNAPEFAKPYQPKVCENAVHGQLVLQISAIDKDITPRNVKFKFILNTENNFTLTDNHDNTANITVKYGQFDREHTKVHFLPVVISDNGMPSRTGTSTLTVAVCKCNEQGEFTFCEDMAAQVGVSIQ

SEQ ID NO: 1101 - protein, 562 aa, synthetic construct
  REGION 1..562: note = CDH6 (P55285) ECD
SWMWNQFFLLEEYTGSDYQYVGKLHSDQDRGDGSLKYILSGDGAGDLFIINENTGDIQATKRLDREEKPVYILRAQAINRRTGRPVEPESEFIIKIHDINDNEPIFTKEVYTATVPEMSDVGTFVVQVTATDADDPTYGNSAKVVYSILQGQPYFSVESETGIIKTALLNMDRENREQYQVVIQAKDMGGQMGGLSGTTTVNITLTDVNDNPPRFPQSTYQFKTPESSPPGTPIGRIKASDADVGENAEIEYSITDGEGLDMFDVITDQETQEGIITVKKLLDFEKKKVYTLKVEASNPYVEPRFLYLGPFKDSATVRIVVEDVDEPPVFSKLAYILQIREDAQINTTIGSVTAQDPDAARNPVKYSVDRHTDMDRIFNIDSGNGSIFTSKLLDRETLLWHNITVIATEINNPKQSSRVPLYIKVLDVNDNAPEFAEFYETFVCEKAKADQLIQTLHAVDKDDPYSGHQFSFSLAPEAASGSNFTIQDNKDNTAGILTRKNGYNRHEMSTYLLPVVISDNDYPVQSSTGTVTVRVCACDHHGNMQSCHAEALIHPTGLSTGA

SEQ ID NO: 1102 - protein, 580 aa, synthetic construct
  REGION 1..580: note = CDH7 (Q9ULB5) ECD
ELSRSRSKPYFQSGRSRTKRSWVWNQFFVLEEYMGSDPLYVGKLHSDVDKGDGSIKYILSGEGASSIFIIDENTGDIHATKRLDREEQAYYTLRAQALDRLTNKPVEPESEFVIKIQDINDNEPKFLDGPYTAGVPEMSPVGTSVVQVTATDADDPTYGNSARVVYSILQGQPYFSVEPKTGVIKTALPNMDREAKDQYLLVIQAKDMVGQNGGLSGTTSVTVTLTDVNDNPPRFPRRSYQYNVPESLPVASVVARIKAADADIGANAEMEYKIVDGDGLGIFKISVDKETQEGIITIQKELDFEAKTSYTLRIEAANKDADPRFLSLGPFSDTTTVKIIVEDVDEPPVFSSPLYPMEVSEATQVGNIIGTVAAHDPDSSNSPVRYSIDRNTDLERYFNIDANSGVITTAKSLDRETNAIHNITVLAMESQNPSQVGRGYVAITILDINDNAPEFAMDYETTVCENAQPGQVIQKISAVDKDEPSNGHQFYFSLTTDATNNHNFSLKDNKDNTASILTRRNGFRRQEQSVYYLPIFIVDSGSPSLSSTNTLTIRVCDCDADGVAQTCNAEAYVLPAGLST

SEQ ID NO: 1103 - protein, 560 aa, synthetic construct
  REGION 1..560: note = CDH8 (P55286) ECD
GWVWNQMFVLEEFSGPEPILVGRLHTDLDPGSKKIKYILSGDGAGTIFQINDVTGDIHAIKRLDREEKAEYTLTAQAVDWETSKPLEPPSEFIIKVQDINDNAPEFLNGPYHATVPEMSILGTSVTNVTATDADDPVYGNSAKLVYSILEGQPYFSIEPETAIIKTALPNMDREAKEEYLVVIQAKDMGGHSGGLSGTTTLTVTLTDVNDNPPKFAQSLYHFSVPEDVVLGTAIGRVKANDQDIGENAQSSYDIIDGDGTALFEITSDAQAQDGIIRLRKPLDFETKKSYTLKVEAANVHIDPRFSGRGPFKDTATVKIVVEDADEPPVFSSPTYLLEVHENAALNSVIGQVTARDPDITSSPIRFSIDRHTDLERQFNINADDGKITLATPLDRELSVWHNITIIATEIRNHSQISRVPVAIKVLDVNDNAPEFASEYEAFLCENGKPGQVIQTVSAMDKDDPKNGHYFLYSLLPEMVNNPNFTIKKNEDNSLSILAKHNGFNRQKQEVYLLPIIISDSGNPPLSSTSTLTIRVCGCSNDGVVQSCNVEAYVLPIGLSM

SEQ ID NO: 1104 - protein, 562 aa, synthetic construct
  REGION 1..562: note = CDH9 (Q9ULB4) ECD
GWMWNQFFLLEEYTGTDTQYVGKLHTDQDKGDGNLKYILTGDGAGSLFVIDENTGDIHAAKKLDREEKSLYILRAKAIDRKTGRQVEPESEFIIKIHDINDNEPKFTKDLYTASVPEMSGVGTSVIQVTATDADDANYGNSAKVVYSILQGQPYFSVDPESGIIKTALPDMSRENREQYQVVIQAKDMGGQMGGLSGTTTVNITLTDVNNNPPRFPQSTYQFNSPESVPLGTHLGRIKANDPDVGENAEMEYSIAEGDGADMFDVITDKDTQEGIITVKQNLDFENQMLYTLRVDASNTHPDPRFLHLGPFKDTAVVKISVEDIDEPPVFTKVSYLIEVDEDVKEGSIIGQVTAYDPDARNNLIKYSVDRHTDMDRIFGIHSENGSIFTLKALDRESSPWHNITVTATEINNPKQSSHIPVFIRILDINDHAPEFAMYYETFVCENAKPGQLIQTVSVMDKDDPPRGHKFFFEPVPEFTLNPNFTIVDNKDNTAGIMTRKDGYSRNKMSTYLLPILIFDNDYPIQSSTGTLTIRVCACDNQGNMQSCTAEALILSAGLSTGA

SEQ ID NO: 1105 - protein, 681 aa, synthetic construct
  REGION 1..681: note = CDHR1 (Q96JP9) ECD
QANFAPHFFDNGVGSTNGNMALFSLPEDTPVGSHVYTLNGTDPEGDPISYHISFDPSTRSVFSVDPTFGNITLVEELDREREDEIEAIISISDGLNLVAEKVVILVTDANDEAPRFIQEPYVALVPEDIPAGSIIFKVHAVDRDTGSGGSVTYFLQNLHSPFAVDRHSGVLRLQAGATLDYERSRTHYITVVAKDGGGRLHGADVVFSATTTVTVNVEDVQDMAPVFVGTPYYGYVYEDTLPGSEVLKVVAMDGDRGKPNRILYSLVNGNDGAFEINETSGAISITQSPAQLQREVYELHVQVTEMSPAGSPAAQATVPVTIRIVDLNNHPPTFYGESGPQNRFELSMNEHPPQGEILRGLKITVNDSDQGANAKFNLQLVGPRGIFRVVPQTVLNEAQVTIIVENSAAIDFEKSKVLTFKLLAVEVNTPEKFSSTADVVIQLLDTNDNVPKFDSLYYVARIPENAPGGSSVVAVTAVDPDTGPWGEVKYSTYGTGADLFLIHPSTGLIYTQPWASLDAEATARYNFYVKAEDMEGKYSVAEVFITLLDVNDHPPQFGKSVQKKTMVLGTPVKIEAIDEDAEEPNNLVDYSITHAEPANVFDINSHTGEIWLKNSIRSLDALHNITPGRDCLWSLEVQAKDRGSPSFSTTALLKIDITDAETLSRSPMAAFLIQTKDNPMK

SEQ ID NO: 1106 - protein, 1134 aa, synthetic construct
  REGION 1..1134: note = CDHR2 (Q9BYE9) ECD
NVAPKFLANMTSVILPEDLPVGAQAFWLVAEDQDNDPLTYGMSGPNAYFFAVTPKTGEVKLASALDYETLYTFKVTISVSDPYIQVQREMLVIVEDRNDNAPVFQNTAFSTSINETLPVGSVVFSVLAVDKDMGSAGMVVYSIEKVIPSTGDSEHLFRILANGSIVLNGSLSYNNKSAFYQLELKACDLGGMYHNTFTIQCSLPVFLSISVVDQPDLDPQFVREFYSASVAEDAAKGTSVLTVEAVDGDKGINDPVIYSISYSTRPGWFDIGADGVIRVNGSLDREQLLEADEEVQLQVTATETHLNIYGQEAKVSIWVTVRVMDVNDHKPEFYNCSLPACTFTPEEAQVNFTGYVDEHASPRIPIDDLTMVVYDPDKGSNGTFLLSLGGPDAEAFSVSPERAVGSASVQVLVRVSALVDYERQTAMAVQVVATDSVSQNFSVAMVTIHLRDINDHRPTFPQSLYVLTVPEHSATGSVVTDSIHATDPDTGAWGQITYSLLPGNGADLFQVDPVSGTVTVRNGELLDRESQAVYYLTLQATDGGNLSSSTTLQIHLLDINDNAPVVSGSYNIFVQEEEGNVSVTIQAHDNDEPGTNNSRLLFNLLPGPYSHNFSLDPDTGLLRNLGPLDREAIDPALEGRIVLTVLVSDCGEPVLGTKVNVTITVEDINDNLPIFNQSSYNFTVKEEDPGVLVGVVKAWDADQTEANNRISFSLSGSGANYFMIRGLVLGAGWAEGYLRLPPDVSLDYETQPVFNLTVSAENPDPQGGETIVDVCVNVKDVNDNPPTLDVASLRGIRVAENGSQHGQVAVVVASDVDTSAQLEIQLVNILCTKAGVDVGSLCWGWFSVAANGSVYINQSKAIDYEACDLVTLVVRACDLATDPGFQAYSNNGSLLITIEDVNDNAPYFLPENKTFVIIPELVLPNREVASVRARDDDSGNNGVILFSILRVDFISKDGATIPFQGVFSIFTSSEADVFAGSIQPVTSLDSTLQGTYQVTVQARDRPSLGPFLEATTTLNLFTVDQSYRSRLQFSTPKEEVGANRQAINAALTQATRTTVYIVDIQDIDSAARARPHSYLDAYFVFPNGSALTLDELSVMIRNDQDSLTQLLQLGLVVLGSQESQESDLSKQLIS

SEQ ID NO: 1107 - protein, 694 aa, synthetic construct
  REGION 1..694: note = CDHR3 (Q6ZTQ4) ECD
LHLILLPATGNVAENSPPGTSVHKFSVKLSASLSPVIPGFPQIVNSNPLTEAFRVNWLSGTYFEVVTTGMEQLDFETGPNIFDLQIYVKDEVGVTDLQVLTVQVTDVNEPPQFQGNLAEGLHLYIVERANPGFIYQVEAFDPEDTSRNIPLSYFLISPPKSFRMSANGTLFSTTELDFEAGHRSFHLIVEVRDSGGLKASTELQVNIVNLNDEVPRFTSPTRVYTVLEELSPGTIVANITAEDPDDEGFPSHLLYSITTVSKYFMINQLTGTIQVAQRIDRDAGELRQNPTISLEVLVKDRPYGGQENRIQITFIVEDVNDNPATCQKFTFSIMVPERTAKGTLLLDLNKFCFDDDSEAPNNRFNFTMPSGVGSGSRFLQDPAGSGKIVLIGDLDYENPSNLAAGNKYTVIIQVQDVAPPYYKNNVYVYILTSPENEFPLIFDRPSYVFDVSERRPARTRVGQVRATDKDLPQSSLLYSISTGGASLQYPNVFWINPKTGELQLVTKVDCETTPIYILRIQATNNEDTSSVTVTVNILEENDEKPICTPNSYFLALPVDLKVGTNIQNFKLTCTDLDSSPRSFRYSIGPGNVNNHFTFSPNAGSNVTRLLLTSRFDYAGGFDKIWDYKLLVYVTDDNLMSDRKKAEALVETGTVTLSIKVIPHPTTIITTTPRPRVTYQVLRKNVYSPSAWYVP

SEQ ID NO: 1108 - protein, 670 aa, synthetic construct
  REGION 1..670: note = CDHR4 (A6H8M9) ECD
DLCSLPCFINVSESQGPGTVLQFLSFNCSSYTPTPTLELLNVQPPTTFFNPPSLARWQGTYVGKLTLSSSAQLDALMVNHYKVQLKFTCGNHVMEGSLSVDVQRDLSHIQCAGQFASPAGEMIQVPETVTPGARLYTLLLPGLELHGAQMSIISAQDLPHFPGPFSINEQGWLQAPSQGLLGQAQKVFQLQISVSFGQRQSCQGMVIVKVLPVPSSQVSFLEQAQNITIPENLAPGSEVVQVQARGVDLRYEILSPVPSPLFSIGRADGVVRTTTPLELARTSGTAVSRLQVKAFEQGQLWASAKLNLTMNVQLVNLWPPRCLPALLVSQIPETAPVGTVLNTLTCEDPDSVGATLDYKLWFRSSSNPASLCLYDRVLEVNATLDCDTPGACFQHAASILVLDGGQPQMTTEVPVLVMVTPINEFSPACAPRTFRVQEDAAPHTLLGSVVGTDMDYPHDNIEYYTSGGPTTFAVDRLSGEVHLLGPLDYEQQRLYRLTVLVIDHGQDQNPNHHLSGSCTITIEVEDVNDHAPECEPPFQELTIYAPLGRSVEVTKMSCQIPQEPQRLIYSYSIVGGNSQNRFILQGAILVHSDLVLGPFWPEQPRTYELLICVADAGPSTPHLSTTATIIVHLVPRRASTVATSTHRTTVPSTMTPMLVTDTEAFWQPQP

SEQ ID NO: 1109 - protein, 644 aa, synthetic construct
  REGION 1..644: note = CDHR5 (Q9HBB8) ECD
QAQYCSVNKDIFEVEENTNVTEPLVDIHVPEGQEVTLGALSTPFAFRIQGNQLFLNVTPDYEEKSLLEAQLLCQSGGTLVTQLRVFVSVLDVNDNAPEFPFKTKEIRVEEDTKVNSTVIPETQLQAEDRDKDDILFYTLQEMTAGASDYFSLVSVNRPALRLDRPLDFYERPNMTFWLLVRDTPGENVEPSHTATATLVLNVVPADLRPPWFLPCTFSDGYVCIQAQYHGAVPTGHILPSPLVLRPGPIYAEDGDRGINQPIIYSIFRGNVNGTFIIHPDSGNLTVARSVPSPMTFLLLVKGQQADLARYSVTQVTVEAVAAAGSPPRFPQRLYRGTVARGAGAGVVVKDAAAPSQPLRIQAQDPEFSDLNSAITYRITNHSHFRMEGEVVLTTTTLAQAGAFYAEVEAHNTVTSGTATTVIEIQVSEQEPPSTDVPPSPEAGGTTGPWTSTTSEVPRPPEPSQGPSTTSSGGGTGPHPPSGTTLRPPTSSTPGGPPGAENSTSHQPATPGGDTAQTPKPGTSQPMPPGVGTSTSHQPATPSGGTAQTPEPGTSQPMPPSMGTSTSHQPATPGGGTAQTPEAGTSQPMPPGMGTSTSHQPTTPGGGTAQTPEPGTSQPMPLSKSTPSSGGGPSEDKRFSVVDMA

SEQ ID NO: 1110 - protein, 938 aa, synthetic construct
  REGION 1..938: note = CDON (Q4KMG0) ECD
DLAPYFTSEPLSAVQKLGGPVVLHCSAQPVTTRISWLHNGKTLDGNLEHVKIHQGTLTILSLNSSLLGYYQCLANNSIGAIVSGPATVSVAVLGDFGSSTKHVITAEEKSAGFIGCRVPESNPKAEVRYKIRGKWLEHSTENYLILPSGNLQILNVSLEDKGSYKCAAYNPVTHQLKVEPIGRKLLVSRPSSDDVHILHPTHSQALAVLSRSPVTLECVVSGVPAPQVYWLKDGQDIAPGSNWRRLYSHLATDSVDPADSGNYSCMAGNKSGDVKYVTYMVNVLEHASISKGLQDQIVSLGATVHFTCDVHGNPAPNCTWFHNAQPIHPSARHLTAGNGLKISGVTVEDVGMYQCVADNGIGFMHSTGRLEIENDGGFKPVIITAPVSAKVADGDFVTLSCNASGLPVPVIRWYDSHGLITSHPSQVLRSKSRKSQLSRPEGLNLEPVYFVLSQAGASSLHIQAVTQEHAGKYICEAANEHGTTQAEASLMVVPFETNTKAETVTLPDAAQNDDRSKRDGSETGLLSSFPVKVHPSAVESAPEKNASGISVPDAPIILSPPQTHTPDTYNLVWRAGKDGGLPINAYFVKYRKLDDGVGMLGSWHTVRVPGSENELHLAELEPSSLYEVLMVARSAAGEGQPAMLTFRTSKEKTASSKNTQASSPPVGIPKYPVVSEAANNNFGVVLTDSSRHSGVPEAPDRPTISTASETSVYVTWIPRANGGSPITAFKVEYKRMRTSNWLVAAEDIPPSKLSVEVRSLEPGSTYKFRVIAINHYGESFRSSASRPYQVVGFPNRFSSRPITGPHIAYTEAVSDTQIMLKWTYIPSSNNNTPIQGFYIYYRPTDSDNDSDYKRDVVEGSKQWHMIGHLQPETSYDIKMQCFNEGGESEFSNVMICETKVKRVPGASEYPVKDLSTPPNSLGSGGNVGPATSPARSSD

SEQ ID NO: 1111 - protein, 394 aa, synthetic construct
  REGION 1..394: note = CEACAM1 (P13688) ECD
QLTTESMPFNVAEGKEVLLLVHNLPQQLFGYSWYKGERVDGNRQIVGYAIGTQQATPGPANSGRETIYPNASLLIQNVTQNDTGFYTLQVIKSDLVNEEATGQFHVYPELPKPSISSNNSNPVEDKDAVAFTCEPETQDTTYLWWINNQSLPVSPRLQLSNGNRTLTLLSVTRNDTGPYECEIQNPVSANRSDPVTLNVTYGPDTPTISPSDTYYRPGANLSLSCYAASNPPAQYSWLINGTFQQSTQELFIPNITVNNSGSYTCHANNSVTGCNRTTVKTIIVTELSPVVAKPQIKASKTTVTGDKDSVNLTCSTNDTGISIRWFFKNQSLPSSERMKLSQGNTTLSINPVKREDAGTYWCEVFNPISKNQSDPIMLNVNYNALPQENGLSPG

SEQ ID NO: 1112 - protein, 125 aa, synthetic construct
  REGION 1..125: note = CEACAM19 (Q7Z692) ECD
ALYIQKIPEQPQKNQDLLLSVQGVPDTFQDFNWYLGEETYGGTRLFTYIPGIQRPQRDGSAMGQRDIVGFPNGSMLLRRAQPTDSGTYQVAITINSEWTMKAKTEVQVAEKNKELPSTHLPTNAG

SEQ ID NO: 1113 - protein, 420 aa, synthetic construct
  REGION 1..420: note = CEACAM20 (Q6UY09) ECD
QLTLNANPLDATQSEDVVLPVFGTPRTPQIHGRSRELAKPSIAVSPGTAIEQKDMVTFYCTTKDVNITIHWVSNNLSIVFHERMQLSKDGKILTILIVQREDSGTYQCEARDALLSQRSDPIFLDVKYGPDPVEIKLESGVASGEVVEVMEGSSMTFLAETKSHPPCAYTWFLLDSILSHTTRTFTIHAVSREHEGLYRCLVSNSATHLSSLGTLKVRVLETLTMPQVVPSSLNLVENARSVDLTCQTVNQSVNVQWFLSGQPLLPSEHLQLSADNRTLIIHGLQRNDTGPYACEVWNWGSRARSEPLELTINYGPDQVHITRESASEMISTIEAELNSSLTLQCWAESKPGAEYRWTLEHSTGEHLGEQLIIRALTWEHDGIYNCTASNSLTGLARSTSVLVKVVGPQSSSLSSGAIAG

SEQ ID NO: 1114 - protein, 206 aa, synthetic construct
  REGION 1..206: note = CEACAM21 (Q3KPI0) ECD
WLFIASAPFEVAEGENVHLSVVYLPENLYSYGWYKGKTVEPNQLIAAYVIDTHVRTPGPAYSGRETISPSGDLHFQNVTLEDTGYYTLQVTYRNSQIEQASHHLRVYESVAQPSIQASSTTVTEKGSVVLTCHTNNTGTSFQWIFNNQRLQVTKRMKLSWFNHMLTIDPIRQEDAGEYQCEVSNPVSSNRSDPLKLTVKSDDNTLG

SEQ ID NO: 1115 - protein, 121 aa, synthetic construct
  REGION 1..121: note = CEACAM3 (P40198) ECD
KLTIESMPLSVAEGKEVLLLVHNLPQHLFGYSWYKGERVDGNSLIVGYVIGTQQATPGAAYSGRETIYTNASLLIQNVTQNDIGFYTLQVIKSDLVNEEATGQFHVYQENAPGLPVGAVAG

SEQ ID NO: 1116 - protein, 120 aa, synthetic construct
  REGION 1..120: note = CEACAM4 (O75871) ECD
FTIEALPSSAAEGKDVLLLACNISETIQAYYWHKGKTAEGSPLIAGYITDIQANIPGAAYSGRETVYPNGSLLFQNITLEDAGSYTLRTINASYDSDQATGQLHVHQNNVPGLPVGAVAG

SEQ ID NO: 1117 - protein, 1058 aa, synthetic construct
  REGION 1..1058: note = CHL1 (O00533) ECD
IEIPSSVQQVPTIIKQSKVQVAFPFDEYFQIECEAKGNPEPTFSWTKDGNPFYFTDHRIIPSNNSGTFRIPNEGHISHFQGKYRCFASNKLGIAMSEEIEFIVPSVPKFPKEKIDPLEVEEGDPIVLPCNPPKGLPPLHIYWMNIELEHIEQDERVYMSQKGDLYFANVEEKDSRNDYCCFAAFPRLRTIVQKMPMKLTVNSSNSIKQRKPKLLLPPTESGSESSITILKGEILLLECFAEGLPTPQVDWNKIGGDLPKGRETKENYGKTLKIENVSYQDKGNYRCTASNFLGTATHDFHVIVEEPPRWTKKPQSAVYSTGSNGILLCEAEGEPQPTIKWRVNGSPVDNHPFAGDVVFPREISFTNLQPNHTAVYQCEASNVHGTILANANIDVVDVRPLIQTKDGENYATVVGYSAFLHCEFFASPEAVVSWQKVEEVKPLEGRRYHIYENGTLQINRTTEEDAGSYSCWVENAIGKTAVTANLDIRNATKLRVSPKNPRIPKLHMLELHCESKCDSHLKHSLKLSWSKDGEAFEINGTEDGRIIIDGANLTISNVTLEDQGIYCCSAHTALDSAADITQVTVLDVPDPPENLHLSERQNRSVRLTWEAGADHNSNISEYIVEFEGNKEEPGRWEELTRVQGKKTTVILPLAPFVRYQFRVIAVNEVGRSQPSQPSDHHETPPAAPDRNPQNIRVQASQPKEMIIKWEPLKSMEQNGPGLEYRVTWKPQGAPVEWEEETVTNHTLRVMTPAVYAPYDVKVQAINQLGSGPDPQSVTLYSGEDYPDTAPVIHGVDVINSTLVKVTWSTVPKDRVHGRLKGYQINWWKTKSLLDGRTHPKEVNILRFSGQRNSGMVPSLDAFSEFHLTVLAYNSKGAGPESEPYIFQTPEGVPEQPTFLKVIKVDKDTATLSWGLPKKLNGNLTGYLLQYQIINDTYEIGELNDINITTPSKPSWHLSNLNATTKYKFYLRACTSQGCGKPITEESSTLGEGSKGIGKISGVNLTQKTHPIEVFEPGAEHIVRLMTKNWGDNDSIFQDVIETRGREYAGLYDDISTQGW

SEQ ID NO: 1118 - protein, 195 aa, synthetic construct
  REGION 1..195: note = CHODL (Q9H9P2) ECD
RRVVSGQKVCFADFKHPCYKMAYFHELSSRVSFQEARLACESEGGVLLSLENEAEQKLIESMLQNLTKPGTGISDGDFWIGLWRNGDGQTSGACPDLYQWSDGSNSQYRNWYTDEPSCGSEKCVVMYHQPTANPGLGGPYLYQWNDDRCNMKHNYICKYEPEINPTAPVEKPYLTNQPGDTHQNVVVTEAGIIPN

SEQ ID NO: 1119 - protein, 870 aa, synthetic construct
  REGION 1..870: note = CLCA2 (Q9UQC9) ECD
GVQLQDNGYNGLLIAINPQVPENQNLISNIKEMITEASFYLFNATKRRVFFRNIKILIPATWKANNNSKIKQESYEKANVIVTDWYGAHGDDPYTLQYRGCGKEGKYIHFTPNFLLNDNLTAGYGSRGRVFVHEWAHLRWGVFDEYNNDKPFYINGQNQIKVTRCSSDITGIFVCEKGPCPQENCIISKLFKEGCTFIYNSTQNATASIMFMQSLSSVVEFCNASTHNQEAPNLQNQMCSLRSAWDVITDSADFHHSFPMNGTELPPPPTFSLVQAGDKVVCLVLDVSSKMAEADRLLQLQQAAEFYLMQIVEIHTFVGIASFDSKGEIRAQLHQINSNDDRKLLVSYLPTTVSAKTDISICSGLKKGFEVVEKLNGKAYGSVMILVTSGDDKLLGNCLPTVLSSGSTIHSIALGSSAAPNLEELSRLTGGLKFFVPDISNSNSMIDAFSRISSGTGDIFQQHIQLESTGENVKPHHQLKNTVTVDNTVGNDTMFLVTWQASGPPEIILFDPDGRKYYTNNFITNLTFRTASLWIPGTAKPGHWTYTLNNTHHSLQALKVTVTSRASNSAVPPATVEAFVERDSLHFPHPVMIYANVKQGFYPILNATVTATVEPETGDPVTLRLLDDGAGADVIKNDGIYSRYFFSFAANGRYSLKVHVNHSPSISTPAHSIPGSHAMYVPGYTANGNIQMNAPRKSVGRNEEERKWGFSRVSSGGSFSVLGVPAGPHPDVFPPCKIIDLEAVKVEEELTLSWTAPGEDFDQGQATSYEIRMSKSLQNIQDDFNNAILVNTSKRNPQQAGIREIFTFSPQISTNGPEHQPNGETHESHRIYVAIRAMDRNSLQSAVSNIAQAPLFIPPNSDPVPARDYL

SEQ ID NO: 1120 - protein, 873 aa, synthetic construct
  REGION 1..873: note = CLCA4 (Q14CN2) ECD
SFIKLNNNGFEDIVIVIDPSVPEDEKIIEQIEDMVTTASTYLFEATEKRFFFKNVSILIPENWKENPQYKRPKHENHKHADVIVAPPTLPGRDEPYTKQFTECGEKGEYIHFTPDLLLGKKQNEYGPPGKLFVHEWAHLRWGVFDEYNEDQPFYRAKSKKIEATRCSAGISGRNRVYKCQGGSCLSRACRIDSTTKLYGKDCQFFPDKVQTEKASIMFMQSIDSVVEFCNEKTHNQEAPSLQNIKCNFRSTWEVISNSEDFKNTIPMVTPPPPPVFSLLKISQRIVCLVLDKSGSMGGKDRLNRMNQAAKHFLLQTVENGSWVGMVHFDSTATIVNKLIQIKSSDERNTLMAGLPTYPLGGTSICSGIKYAFQVIGELHSQLDGSEVLLLTDGEDNTASSCIDEVKQSGAIVHFIALGRAADEAVIEMSKITGGSHFYVSDEAQNNGLIDAFGALTSGNTDLSQKSLQLESKGLTLNSNAWMNDTVIIDSTVGKDTFFLITWNSLPPSISLWDPSGTIMENFTVDATSKMAYLSIPGTAKVGTWAYNLQAKANPETLTITVTSRAANSSVPPITVNAKMNKDVNSFPSPMIVYAEILQGYVPVLGANVTAFIESQNGHTEVLELLDNGAGADSFKNDGVYSRYFTAYTENGRYSLKVRAHGGANTARLKLRPPLNRAAYIPGWVVNGEIEANPPRPEIDEDTQTTLEDFSRTASGGAFVVSQVPSLPLPDQYPPSQITDLDATVHEDKIILTWTAPGDNFDVGKVQRYIIRISASILDLRDSFDDALQVNTTDLSPKEANSKESFAFKPENISEENATHIFIAIKSIDKSNLTSKVSNIAQVTLFIPQANPDDIDPTPTPTPTPTPDKSHNSG

SEQ ID NO: 1121 - protein, 376 aa, synthetic construct
  REGION 1..376: note = CLEC14A (Q86T13) ECD
EHPTADRAGCSASGACYSLHHATMKRQAAEEACILRGGALSTVRAGAELRAVLALLRAGPGPGGGSKDLLFWVALERRRSHCTLENEPLRGFSWLSSDPGGLESDTLQWVEEPQRSCTARRCAVLQATGGVEPAGWKEMRCHLRANGYLCKYQFEVLCPAPRPGAASNLSYRAPFQLHSAALDFSPPGTEVSALCRGQLPISVTCIADEIGARWDKLSGDVLCPCPGRYLRAGKCAELPNCLDDLGGFACECATGFELGKDGRSCVTSGEGQPTLGGTGVPTRRPPATATSPVPQRTWPIRVDEKLGETPLVPEQDNSVTSIPEIPRWGSQSTMSTLQMSLQAESKATITPSGSVISKFNSTTSSATPQAFDSSSA

SEQ ID NO: 1122 - protein, 217 aa, synthetic construct
  REGION 1..217: note = CLMP (Q9H6B4) ECD
THTEIKRVAEEKVTLPCHHQLGLPEKDTLDIEWLLTDNEGNQKVVITYSSRHVYNNLTEEQKGRVAFASNFLAGDASLQIEPLKPSDEGRYTCKVKNSGRYVWSHVILKVLVRPSKPKCELEGELTEGSDLTLQCESSSGTEPIVYYWQRIREKEGEDERLPPKSRIDYNHPGRVLLQNLTMSYSGLYQCTAGNEAGKESCVVRVTVQYVQSIGMVA

SEQ ID NO: 1123 - protein, 831 aa, synthetic construct
  REGION 1..831: note = CLSTN1 (O94985) ECD
ARVNKHKPWLEPTYHGIVTENDNTVLLDPPLIALDKDAPLRFAESFEVTVTKEGEICGFKIHGQNVPFDAVVVDKSTGEGVIRSKEKLDCELQKDYSFTIQAYDCGKGPDGTNVKKSHKATVHIQVNDVNEYAPVFKEKSYKATVIEGKQYDSILRVEAVDADCSPQFSQICSYEIITPDVPFTVDKDGYIKNTEKLNYGKEHQYKLTVTAYDCGKKRATEDVLVKISIKPTCTPGWQGWNNRIEYEPGTGALAVFPNIHLETCDEPVASVQATVELETSHIGKGCDRDTYSEKSLHRLCGAAAGTAELLPSPSGSLNWTMGLPTDNGHDSDQVFEFNGTQAVRIPDGVVSVSPKEPFTISVWMRHGPFGRKKETILCSSDKTDMNRHHYSLYVHGCRLIFLFRQDPSEEKKYRPAEFHWKLNQVCDEEWHHYVLNVEFPSVTLYVDGTSHEPFSVTEDYPLHPSKIETQLVVGACWQEFSGVENDNETEPVTVASAGGDLHMTQFFRGNLAGLTLRSGKLADKKVIDCLYTCKEGLDLQVLEDSGRGVQIQAHPSQLVLTLEGEDLGELDKAMQHISYLNSRQFPTPGIRRLKITSTIKCFNEATCISVPPVDGYVMVLQPEEPKISLSGVHHFARAASEFESSEGVFLFPELRIISTITREVEPEGDGAEDPTVQESLVSEEIVHDLDTCEVTVEGEELNHEQESLEVDMARLQQKGIEVSSSELGMTFTGVDTMASYEEVLHLLRYRNWHARSLLDRKFKLICSELNGRYISNEFKVEVNVIHTANPMEHANHMAAQPQFVHPEHRSFVDLSGHNLANPHPFAVVPST

SEQ ID NO: 1124 - protein, 811 aa, synthetic construct
  REGION 1..811: note = CLSTN2 (Q9H4D0) ECD
SGGGGDSRQRRLLAAKVNKHKPWIETSYHGVITENNDTVILDPPLVALDKDAPVPFAGEICAFKIHGQELPFEAVVLNKTSGEGRLRAKSPIDCELQKEYTFIIQAYDCGAGPHETAWKKSHKAVVHIQVKDVNEFAPTFKEPAYKAVVTEGKIYDSILQVEAIDEDCSPQYSQICNYEIVTTDVPFAIDRNGNIRNTEKLSYDKQHQYEILVTAYDCGQKPAAQDTLVQVDVKPVCKPGWQDWTKRIEYQPGSGSMPLFPSIHLETCDGAVSSLQIVTELQTNYIGKGCDRETYSEKSLQKLCGASSGIIDLLPSPSAATNWTAGLLVDSSEMIFKFDGRQGAKVPDGIVPKNLTDQFTITMWMKHGPSPGVRAEKETILCNSDKTEMNRHHYALYVHNCRLVFLLRKDFDQADTFRPAEFHWKLDQICDKEWHYYVINVEFPVVTLYMDGATYEPYLVTNDWPIHPSHIAMQLTVGACWQGGEVTKPQFAQFFHGSLASLTIRPGKMESQKVISCLQACKEGLDINSLESLGQGIKYHFNPSQSILVMEGDDIGNINRALQKVSYINSRQFPTAGVRRLKVSSKVQCFGEDVCISIPEVDAYVMVLQAIEPRITLRGTDHFWRPAAQFESARGVTLFPDIKIVSTFAKTEAPGDVKTTDPKSEVLEEMLHNLDFCDILVIGGDLDPRQECLELNHSELHQRHLDATNSTAGYSIYGVGSMSRYEQVLHHIRYRNWRPASLEARRFRIKCSELNGRYTSNEFNLEVSILHEDQVSDKEHVNHLIVQPPFLQSVHHPESRSSIQHSSVVPS

SEQ ID NO: 1125 - protein, 828 aa, synthetic construct
  REGION 1..828: note = CLSTN3 (Q9BQT9) ECD
NKANKHKPWIEAEYQGIVMENDNTVLLNPPLFALDKDAPLRYAGEICGFRLHGSGVPFEAVILDKATGEGLIRAKEPVDCEAQKEHTFTIQAYDCGEGPDGANTKKSHKATVHVRVNDVNEFAPVFVERLYRAAVTEGKLYDRILRVEAIDGDCSPQYSQICYYEILTPNTPFLIDNDGNIENTEKLQYSGERLYKFTVTAYDCGKKRAADDAEVEIQVKPTCKPSWQGWNKRIEYAPGAGSLALFPGIRLETCDEPLWNIQATIELQTSHVAKGCDRDNYSERALRKLCGAATGEVDLLPMPGPNANWTAGLSVHYSQDSSLIYWFNGTQAVQVPLGGPSGLGSGPQDSLSDHFTLSFWMKHGVTPNKGKKEEETIVCNTVQNEDGFSHYSLTVHGCRIAFLYWPLLESARPVKFLWKLEQVCDDEWHHYALNLEFPTVTLYTDGISFDPALIHDNGLIHPPRREPALMIGACWTEEKNKEKEKGDNSTDTTQGDPLSIHHYFHGYLAGFSVRSGRLESREVIECLYACREGLDYRDFESLGKGMKVHVNPSQSLLTLEGDDVETFNHALQHVAYMNTLRFATPGVRPLRLTTAVKCFSEESCVSIPEVEGYVVVLQPDAPQILLSGTAHFARPAVDFEGTNGVPLFPDLQITCSISHQVEAKKDESWQGTVTDTRMSDEIVHNLDGCEISLVGDDLDPERESLLLDTTSLQQRGLELTNTSAYLTIAGVESITVYEEILRQARYRLRHGAALYTRKFRLSCSEMNGRYSSNEFIVEVNVLHSMNRVAHPSHVLSSQQFLHRGHQPPPEMAGHSLASSHRNSMIPSA

SEQ ID NO: 1126 - protein, 1264 aa, synthetic construct
  REGION 1..1264: note = CNTNAP1 (P78357) ECD
WGYYGCDEELVGPLYARSLGASSYYSLLTAPRFARLHGISGWSPRIGDPNPWLQIDLMKKHRIRAVATQGSFNSWDWVTRYMLLYGDRVDSWTPFYQRGHNSTFFGNVNESAVVRHDLHFHFTARYIRIVPLAWNPRGKIGLRLGLYGCPYKADILYFDGDDAISYRFPRGVSRSLWDVFAFSFKTEEKDGLLLHAEGAQGDYVTLELEGAHLLLHMSLGSSPIQPRPGHTTVSAGGVLNDQHWHYVRVDRFGRDVNFTLDGYVQRFILNGDFERLNLDTEMFIGGLVGAARKNLAYRHNFRGCIENVIFNRVNIADLAVRRHSRITFEGKVAFRCLDPVPHPINFGGPHNFVQVPGFPRRGRLAVSFRFRTWDLTGLLLFSRLGDGLGHVELTLSEGQVNVSIAQSGRKKLQFAAGYRLNDGFWHEVNFVAQENHAVISIDDVEGAEVRVSYPLLIRTGTSYFFGGCPKPASRWDCHSNQTAFHGCMELLKVDGQLVNLTLVEGRRLGFYAEVLFDTCGITDRCSPNMCEHDGRCYQSWDDFICYCELTGYKGETCHTPLYKESCEAYRLSGKTSGNFTIDPDGSGPLKPFVVYCDIRENRAWTVVRHDRLWTTRVTGSSMERPFLGAIQYWNASWEEVSALANASQHCEQWIEFSCYNSRLLNTAGGYPYSFWIGRNEEQHFYWGGSQPGIQRCACGLDRSCVDPALYCNCDADQPQWRTDKGLLTFVDHLPVTQVVIGDTNRSTSEAQFFLRPLRCYGDRNSWNTISFHTGAALRFPPIRANHSLDVSFYFRTSAPSGVFLENMGGPYCQWRRPYVRVELNTSRDVVFAFDVGNGDENLTVHSDDFEFNDDEWHLVRAEINVKQARLRVDHRPWVLRPMPLQTYIWMEYDQPLYVGSAELKRRPFVGCLRAMRLNGVTLNLEGRANASEGTSPNCTGHCAHPRLPCFHGGRCVERYSYYTCDCDLTAFDGPYCNHDIGGFFEPGTWMRYNLQSALRSAAREFSHMLSRPVPGYEPGYIPGYDTPGYVPGYHGPGYRLPDYPRPGRPVPGYRGPVYNVTGEEVSFSFSTSSAPAVLLYVSSFVRDYMAVLIKDDGTLQLRYQLGTSPYVYQLTTRPVTDGQPHSINITRVYRNLFIQVDYFPLTEQKFSLLVDSQLDSPKALYLGRVMETGVIDPEIQRYNTPGFSGCLSGVRFNNVAPLKTHFRTPRPMTAELAEALRVQGELSESNCGAMPRLVSEVPPELDPWYLPPDFPYYHDEGWVA

SEQ ID NO: 1127 - protein, 1235 aa, synthetic construct
  REGION 1..1235: note = CNTNAP2 (Q9UHC6) ECD
APSTSQKCDEPLVSGLPHVAFSSSSSISGSYSPGYAKINKRGGAGGWSPSDSDHYQWLQVDFGNRKQISAIATQGRYSSSDWVTQYRMLYSDTGRNWKPYHQDGNIWAFPGNINSDGVVRHELQHPIIARYVRIVPLDWNGEGRIGLRIEVYGCSYWADVINFDGHVVLPYRFRNKKMKTLKDVIALNFKTSESEGVILHGEGQQGDYITLELKKAKLVLSLNLGSNQLGPIYGHTSVMTGSLLDDHHWHSVVIERQGRSINLTLDRSMQHFRTNGEFDYLDLDYEITFGGIPFSGKPSSSSRKNFKGCMESINYNGVNITDLARRKKLEPSNVGNLSFSCVEPYTVPVFFNATSYLEVPGRLNQDLFSVSFQFRTWNPNGLLVFSHFADNLGNVEIDLTESKVGVHINITQTKMSQIDISSGSGLNDGQWHEVRFLAKENFAILTIDGDEASAVRTNSPLQVKTGEKYFFGGFLNQMNNSSHSVLQPSFQGCMQLIQVDDQLVNLYEVAQRKPGSFANVSIDMCAIIDRCVPNHCEHGGKCSQTWDSFKCTCDETGYSGATCHNSIYEPSCEAYKHLGQTSNYYWIDPDGSGPLGPLKVYCNMTEDKVWTIVSHDLQMQTPVVGYNPEKYSVTQLVYSASMDQISAITDSAEYCEQYVSYFCKMSRLLNTPDGSPYTWWVGKANEKHYYWGGSGPGIQKCACGIERNCTDPKYYCNCDADYKQWRKDAGFLSYKDHLPVSQVVVGDTDRQGSEAKLSVGPLRCQGDRNYWNAASFPNPSSYLHFSTFQGETSADISFYFKTLTPWGVFLENMGKEDFIKLELKSATEVSFSFDVGNGPVEIVVRSPTPLNDDQWHRVTAERNVKQASLQVDRLPQQIRKAPTEGHTRLELYSQLFVGGAGGQQGFLGCIRSLRMNGVTLDLEERAKVTSGFISGCSGHCTSYGTNCENGGKCLERYHGYSCDCSNTAYDGTFCNKDVGAFFEEGMWLRYNFQAPATNARDSSSRVDNAPDQQNSHPDLAQEEIRFSFSTTKAPCILLYISSFTTDFLAVLVKPTGSLQIRYNLGGTREPYNIDVDHRNMANGQPHSVNITRHEKTIFLKLDHYPSVSYHLPSSSDTLFNSPKSLFLGKVIETGKIDQEIHKYNTPGFTGCLSRVQFNQIAPLKAALRQTNASAHVHIQGELVESNCGASPLTLSPMSSATDPWHLDHLDSASADFPYNPGQGQAIRNGVNRNSA

SEQ ID NO: 1128 - protein, 1220 aa, synthetic construct
  REGION 1..1220: note = CNTNAP3 (Q9BZ76) ECD
GNPPDCDAPLASALPRSSFSSSSELSSSHGPGFSRLNRRDGAGGWTPLVSNKYQWLQIDLGERMEVTAVATQGGYGSSDWVTSYLLMFSDGGRNWKQYRREESIWGFPGNTNADSVVHYRLQPPFEARFLRFLPLAWNPRGRIGMRIEVYGCAYKSEVVYFDGQSALLYRLDKKPLKPIRDVISLKFKAMQSNGILLHREGQHGNHITLELIKGKLVFFLNSGNAKLPSTIAPVTLTLGSLLDDQHWHSVLIELLDTQVNFTVDKHTHHFQAKGDSSYLDLNFEISFGGIPTPGRSRAFRRKSFHGCLENLYYNGVDVTELAKKHKPQILMMGNVSFSCPQPQTVPVTFLSSRSYLALPGNSGEDKVSVTFQFRTWNRAGHLLFGELRRGSGSFVLFLKDGKLKLSLFQPGQSPRNVTAGAGLNDGQWHSVSFSAKWSHMNVVVDDDTAVQPLVAVLIDSGDTYYFGGCLDNSSGSGCKSPLGGFQGCLRLITIGDKAVDPILVQQGALGSFRDLQIDSCGITDRCLPSYCEHGGECSQSWDTFSCDCLGTGYTGETCHSSLYEQSCEAHKHRGNPSGLYYIDADGSGPLGPFLVYCNMTADAAWTVVQHGGPDAVTLRGAPSGHPRSAVSFAYAAGAGQLRSAVNLAERCEQRLALRCGTARRPDSRDGTPLSWWVGRTNETHTSWGGSLPDAQKCTCGLEGNCIDSQYYCNCDAGRNEWTSDTIVLSQKEHLPVTQIVMTDAGRPHSEAAYTLGPLLCRGDQSFWNSASFNTETSYLHFPAFHGELTADVCFFFKTTVSSGVFMENLGITDFIRIELRAPTEVTFSFDVGNGPCEVTVQSPTPFNDNQWHHVRAERNVKGASLQVDQLPQKMQPAPADGHVRLQLNSQLFIGGTATRQRGFLGCIRSLQLNGVALDLEERATVTPGVEPGCAGHCSTYGHLCRNGGRCREKRRGVTCDCAFSAYDGPFCSNEISAYFATGSSMTYHFQEHYTLSENSSSLVSSLHRDVTLTREMITLSFRTTRTPSLLLYVSSFYEEYLSVILANNGSLQIRYKLDRHQNPDAFTFDFKNMADGQLHQVKINREEAVVMVEVNQSTKKQVILSSGTEFNAVKSLILGKVLEAAGADPDTRRAATSGFTGCLSAVRFGRAAPLKAALRPSGPSRVTVRGHVAPMARCAAGAASGSPARELAPRLAGGAGRSGPADEGEPLVNADRRDSA

SEQ ID NO: 1129 - protein, 1220 aa, synthetic construct
  REGION 1..1220: note = CNTNAP3B (Q96NU0) ECD
GNPPDCDSPLASALPRSSFSSSSELSSSHGPGFSRLNRRDGAGGWTPLVSNKYQWLQIDLGERMEVTAVATQGGYGSSDWVTSYLLMFSDGGRNWKQYRREESIWGFPGNTNADSVVHYRLQPPFEARFLRFLPLAWNPRGRIGMRIEVYGCAYKSEVVYFDGQSALLYTLDKKPLKPIRDVISLKFKAMQSNGILLHREGQHGNHITLELIKGKLVFFLNSGNAKLPSTIAPVTLTLGSLLDDQHWHSVLIELLDTQVNFTVDKHTHHFQAKGDSSNLDLNFEISFGGILSPGRSRAFTRKSFHGCLENLYYNGVDVTELAKKHKPQILMMGNVSFSCPQPQTVPVTFLSSRSYLALPGNSGEDKVSVTFQFRTWNRAGHLLFGELQRGSGSFVLFLKDGKLKLSLFQAGQSPRNVTAGAGLNDGQWHSVSFSAKWSHMNVVVDDDTAVQPLVAVLIDSGDTYYFGGCLGNSSGSGCKSPLGGFQGCLRLITIGDKAVDPILVQQGALGSFRDLQIDSCGITDRCLPSYCEHGGECSQSWDTFSCDCLGTGYTGETCHSSLYEQSCEAHKHRGNPSGLYYIDADGSGPLGPFLVYCNMTADSAWTVVRHGGPDAVTLRGAPSGHPLSAVSFAYAAGAGQLRAAVNLAERCEQRLALRCGTARRPDSRDGTPLSWWVGRTNETHTSWGGSLPDAQKCTCGLEGNCIDSQYYCNCDAGQNEWTSDTIVLSQKEHLPVTQIVMTDTGQPHSEADYTLGPLLCRGDKSFWNSASFNTETSYLHFPAFHGELTADVCFFFKTTVSSGVFMENLGITDFIRIELRAPTEVTFSFDVGNGPCEVTVQSPTPFNDNQWHHVRAERNVKGASLQVDQLPQKMQPAPADGHVRLQLNSQLFIGGTATRQRGFLGCIRSLQLNGVALDLEERATVTPGVEPGCAGHCSTYGHLCRNGGRCREKRRGVTCDCAFSAYDGPFCSNEISAYFATGSSMTYHFQEHYTLSENSSSLVSSLHRDVTLTREMITLSFRTTRTPSLLLYVSSFYEEYLSVILANNGSLQIRYKLDRHQNPDAFTFDFKNMADGQLHQVKINREEAVVMVEVNQSAKKQVILSSGTEFNAVKSLILGKVLEAAGADPDTRRAATSGFTGCLSAVRFGCAAPLKAALRPSGPSRVTVRGHVAPMARCAAGAASGSPARELAPRLAGGAGRSGPVDEGEPLVNADRRDSA

SEQ ID NO: 1130 - protein, 1216 aa, synthetic construct
  REGION 1..1216: note = CNTNAP4 (Q9C0A0) ECD
GNSYDCDDPLVSALPQASFSSSSELSSSHGPGFARLNRRDGAGGWSPLVSNKYQWLQIDLGERMEVTAVATQGGYGSSNWVTSYLLMFSDSGWNWKQYRQEDSIWGFSGNANADSVVYYRLQPSIKARFLRFIPLEWNPKGRIGMRIEVFGCAYRSEVVDLDGKSSLLYRFDQKSLSPIKDIISLKFKTMQSDGILLHREGPNGDHITLQLRRARLFLLINSGEAKLPSTSTLVNLTLGSLLDDQHWHSVLIQRLGKQVNFTVDEHRHHFHARGEFNLMNLDYEISFGGIPAPGKSVSFPHRNFHGCLENLYYNGVDIIDLAKQQKPQIIAMGNVSFSCSQPQSMPVTFLSSRSYLALPDFSGEEEVSATFQFRTWNKAGLLLFSELQLISGGILLFLSDGKLKSNLYQPGKLPSDITAGVELNDGQWHSVSLSAKKNHLSVAVDGQMASAAPLLGPEQIYSGGTYYFGGCPDKSFGSKCKSPLGGFQGCMRLISISGKVVDLISVQQGSLGNFSDLQIDSCGISDRCLPNYCEHGGECSQSWSTFHCNCTNTGYRGATCHNSIYEQSCEAYKHRGNTSGFYYIDSDGSGPLEPFLLYCNMTETAWTIIQHNGSDLTRVRNTNPENPYAGFFEYVASMEQLQATINRAEHCEQEFTYYCKKSRLVNKQDGTPLSWWVGRTNETQTYWGGSSPDLQKCTCGLEGNCIDSQYYCNCDADRNEWTNDTGLLAYKEHLPVTKIVITDTGRLHSEAAYKLGPLLCQGDRSFWNSASFDTEASYLHFPTFHGELSADVSFFFKTTASSGVFLENLGIADFIRIELRSPTVVTFSFDVGNGPFEISVQSPTHFNDNQWHHVRVERNMKEASLQVDQLTPKTQPAPADGHVLLQLNSQLFVGGTATRQRGFLGCIRSLQLNGMTLDLEERAQVTPEVQPGCRGHCSSYGKLCRNGGKCRERPIGFFCDCTFSAYTGPFCSNEISAYFGSGSSVIYNFQENYLLSKNSSSHAASFHGDMKLSREMIKFSFRTTRTPSLLLFVSSFYKEYLSVIIAKNGSLQIRYKLNKYQEPDVVNFDFKNMADGQLHHIMINREEGVVFIEIDDNRRRQVHLSSGTEFSAVKSLVLGRILEHSDVDQDTALAGAQGFTGCLSAVQLSHVAPLKAALHPSHPDPVTVTGHVTESSCMAQPGTDATSRERTHSFADHSGTIDDREPLANAIKSDSA

SEQ ID NO: 1131 - protein, 1213 aa, synthetic construct
  REGION 1..1213: note = CNTNAP5 (Q8WYK1) ECD
ATNYNCDDPLASLLSPMAFSSSSDLTGTHSPAQLNWRVGTGGWSPADSNAQQWLQMDLGNRVEITAVATQGRYGSSDWVTSYSLMFSDTGRNWKQYKQEDSIWTFAGNMNADSVVHHKLLHSVRARFVRFVPLEWNPSGKIGMRVEVYGCSYKSDVADFDGRSSLLYRFNQKLMSTLKDVISLKFKSMQGDGVLFHGEGQRGDHITLELQKGRLALHLNLGDSKARLSSSLPSATLGSLLDDQHWHSVLIERVGKQVNFTVDKHTQHFRTKGETDALDIDYELSFGGIPVPGKPGTFLKKNFHGCIENLYYNGVNIIDLAKRRKHQIYTGNVTFSCSEPQIVPITFVNSSGSYLLLPGTPQIDGLSVSFQFRTWNKDGLLLSTELSEGSGTLLLSLEGGILRLVIQKMTERVAEILTGSNLNDGLWHSVSINARRNRITLTLDDEAAPPAPDSTWVQIYSGNSYYFGGCPDNLTDSQCLNPIKAFQGCMRLIFIDNQPKDLISVQQGSLGNFSDLHIDLCSIKDRCLPNYCEHGGSCSQSWTTFYCNCSDTSYTGATCHNSIYEQSCEVYRHQGNTAGFFYIDSDGSGPLGPLQVYCNITEDKIWTSVQHNNTELTRVRGANPEKPYAMALDYGGSMEQLEAVIDGSEHCEQEVAYHCRRSRLLNTPDGTPFTWWIGRSNERHPYWGGSPPGVQQCECGLDESCLDIQHFCNCDADKDEWTNDTGFLSFKDHLPVTQIVITDTDRSNSEAAWRIGPLRCYGDRRFWNAVSFYTEASYLHFPTFHAEFSADISFFFKTTALSGVFLENLGIKDFIRLEISSPSEITFAIDVGNGPVELVVQSPSLLNDNQWHYVRAERNLKETSLQVDNLPRSTRETSEEGHFRLQLNSQLFVGGTSSRQKGFLGCIRSLHLNGQKMDLEERAKVTSGVRPGCPGHCSSYGSICHNGGKCVEKHNGYLCDCTNSPYEGPFCKKEVSAVFEAGTSVTYMFQEPYPVTKNISLSSSAIYTDSAPSKENIALSFVTTQAPSLLLFINSSSQDFVVVLLCKNGSLQVRYHLNKEETHVFTIDADNFANRRMHHLKINREGRELTIQMDQQLRLSYNFSPEVEFRVIRSLTLGKVTENLGLDSEVAKANAMGFAGCMSSVQYNHIAPLKAALRHATVAPVTVHGTLTESSCGFMVDSDVNAVTTVHSSSDPFGKTDEREPLTNAVRSDS

SEQ ID NO: 1132 - protein, 1268 aa, synthetic construct
  REGION 1..1268: note = CPD (O75976) ECD
AHIKKAEATTTTTSAGAEAAEGQFDRYYHEEELESALREAAAAGLPGLARLFSIGRSVEGRPLWVLRLTAGLGSLIPEGDAGPDAAGPDAAGPLLPGRPQVKLVGNMHGDETVSRQVLIYLARELAAGYRRGDPRLVRLLNTTDVYLLPSLNPDGFERAREGDCGFGDGGPSGASGRDNSRGRDLNRSFPDQFSTGEPPALDEVPEVRALIEWIRRNKFVLSGNLHGGSVVASYPFDDSPEHKATGIYSKTSDDEVFKYLAKAYASNHPIMKTGEPHCPGDEDETFKDGITNGAHWYDVEGGMQDYNYVWANCFEITLELSCCKYPPASQLRQEWENNRESLITLIEKVHIGVKGFVKDSITGSGLENATISVAGINHNITTGRFGDFYRLLVPGTYNLTVVLTGYMPLTVTNVVVKEGPATEVDFSLRPTVTSVIPDTTEAVSTASTVAIPNILSGTSSSYQPIQPKDFHHHHFPDMEIFLRRFANEYPNITRLYSLGKSVESRELYVMEISDNPGVHEPGEPEFKYIGNMHGNEVVGRELLLNLIEYLCKNFGTDPEVTDLVHNTRIHLMPSMNPDGYEKSQEGDSISVIGRNNSNNFDLNRNFPDQFVQITDPTQPETIAVMSWMKSYPFVLSANLHGGSLVVNYPFDDDEQGLATYSKSPDDAVFQQIALSYSKENSQMFQGRPCKNMYPNEYFPHGITNGASWYNVPGGMQDWNYLQTNCFEVTIELGCVKYPLEKELPNFWEQNRRSLIQFMKQVHQGVRGFVLDATDGRGILNATISVAEINHPVTTYKTGDYWRLLVPGTYKITASARGYNPVTKNVTVKSEGAIQVNFTLVRSSTDSNNESKKGKGASSSTNDASDPTTKEFETLIKDLSAENGLESLMLRSSSNLALALYRYHSYKDLSEFLRGLVMNYPHITNLTNLGQSTEYRHIWSLEISNKPNVSEPEEPKIRFVAGIHGNAPVGTELLLALAEFLCLNYKKNPAVTQLVDRTRIVIVPSLNPDGRERAQEKDCTSKIGQTNARGKDLDTDFTNNASQPETKAIIENLIQKQDFSLSVALDGGSMLVTYPYDKPVQTVENKETLKHLASLYANNHPSMHMGQPSCPNKSDENIPGGVMRGAEWHSHLGSMKDYSVTYGHCPEITVYTSCCYFPSAARLPSLWADNKRSLLSMLVEVHKGVHGFVKDKTGKPISKAVIVLNEGIKVQTKEGGYFHVLLAPGVHNIIAIADGYQQQHSQVFVHHDAASSVVIVFDTDNRIFGLPRE

SEQ ID NO: 1133 - protein, 1930 aa, synthetic construct
  REGION 1..1930: note = CR1 (P17927) ECD
QCNAPEWLPFARPTNLTDEFEFPIGTYLNYECRPGYSGRPFSIICLKNSVWTGAKDRCRRKSCRNPPDPVNGMVHVIKGIQFGSQIKYSCTKGYRLIGSSSATCIISGDTVIWDNETPICDRIPCGLPPTITNGDFISTNRENFHYGSVVTYRCNPGSGGRKVFELVGEPSIYCTSNDDQVGIWSGPAPQCIIPNKCTPPNVENGILVSDNRSLFSLNEVVEFRCQPGFVMKGPRRVKCQALNKWEPELPSCSRVCQPPPDVLHAERTQRDKDNFSPGQEVFYSCEPGYDLRGAASMRCTPQGDWSPAAPTCEVKSCDDFMGQLLNGRVLFPVNLQLGAKVDFVCDEGFQLKGSSASYCVLAGMESLWNSSVPVCEQIFCPSPPVIPNGRHTGKPLEVFPFGKTVNYTCDPHPDRGTSFDLIGESTIRCTSDPQGNGVWSSPAPRCGILGHCQAPDHFLFAKLKTQTNASDFPIGTSLKYECRPEYYGRPFSITCLDNLVWSSPKDVCKRKSCKTPPDPVNGMVHVITDIQVGSRINYSCTTGHRLIGHSSAECILSGNAAHWSTKPPICQRIPCGLPPTIANGDFISTNRENFHYGSVVTYRCNPGSGGRKVFELVGEPSIYCTSNDDQVGIWSGPAPQCIIPNKCTPPNVENGILVSDNRSLFSLNEVVEFRCQPGFVMKGPRRVKCQALNKWEPELPSCSRVCQPPPDVLHAERTQRDKDNFSPGQEVFYSCEPGYDLRGAASMRCTPQGDWSPAAPTCEVKSCDDFMGQLLNGRVLFPVNLQLGAKVDFVCDEGFQLKGSSASYCVLAGMESLWNSSVPVCEQIFCPSPPVIPNGRHTGKPLEVFPFGKAVNYTCDPHPDRGTSFDLIGESTIRCTSDPQGNGVWSSPAPRCGILGHCQAPDHFLFAKLKTQTNASDFPIGTSLKYECRPEYYGRPFSITCLDNLVWSSPKDVCKRKSCKTPPDPVNGMVHVITDIQVGSRINYSCTTGHRLIGHSSAECILSGNTAHWSTKPPICQRIPCGLPPTIANGDFISTNRENFHYGSVVTYRCNLGSRGRKVFELVGEPSIYCTSNDDQVGIWSGPAPQCIIPNKCTPPNVENGILVSDNRSLFSLNEVVEFRCQPGFVMKGPRRVKCQALNKWEPELPSCSRVCQPPPEILHGEHTPSHQDNFSPGQEVFYSCEPGYDLRGAASLHCTPQGDWSPEAPRCAVKSCDDFLGQLPHGRVLFPLNLQLGAKVSFVCDEGFRLKGSSVSHCVLVGMRSLWNNSVPVCEHIFCPNPPAILNGRHTGTPSGDIPYGKEISYTCDPHPDRGMTFNLIGESTIRCTSDPHGNGVWSSPAPRCELSVRAGHCKTPEQFPFASPTIPINDFEFPVGTSLNYECRPGYFGKMFSISCLENLVWSSVEDNCRRKSCGPPPEPFNGMVHINTDTQFGSTVNYSCNEGFRLIGSPSTTCLVSGNNVTWDKKAPICEIISCEPPPTISNGDFYSNNRTSFHNGTVVTYQCHTGPDGEQLFELVGERSIYCTSKDDQVGVWSSPPPRCISTNKCTAPEVENAIRVPGNRSFFSLTEIIRFRCQPGFVMVGSHTVQCQTNGRWGPKLPHCSRVCQPPPEILHGEHTLSHQDNFSPGQEVFYSCEPSYDLRGAASLHCTPQGDWSPEAPRCTVKSCDDFLGQLPHGRVLLPLNLQLGAKVSFVCDEGFRLKGRSASHCVLAGMKALWNSSVPVCEQIFCPNPPAILNGRHTGTPFGDIPYGKEISYACDTHPDRGMTFNLIGESSIRCTSDPQGNGVWSSPAPRCELSVPAACPHPPKIQNGHYIGGHVSLYLPGMTISYICDPGYLLVGKGFIFCTDQGIWSQLDHYCKEVNCSFPLFMNGISKELEMKKVYHYGDYVTLKCEDGYTLEGSPWSQCQADDRWDPPLAKCTSRTHD

SEQ ID NO: 1134 - protein, 951 aa, synthetic construct
  REGION 1..951: note = CR2 (P20023) ECD
ISCGSPPPILNGRISYYSTPIAVGTVIRYSCSGTFRLIGEKSLLCITKDKVDGTWDKPAPKCEYFNKYSSCPEPIVPGGYKIRGSTPYRHGDSVTFACKTNFSMNGNKSVWCQANNMWGPTRLPTCVSVFPLECPALPMIHNGHHTSENVGSIAPGLSVTYSCESGYLLVGEKIINCLSSGKWSAVPPTCEEARCKSLGRFPNGKVKEPPILRVGVTANFFCDEGYRLQGPPSSRCVIAGQGVAWTKMPVCEEIFCPSPPPILNGRHIGNSLANVSYGSIVTYTCDPDPEEGVNFILIGESTLRCTVDSQKTGTWSGPAPRCELSTSAVQCPHPQILRGRMVSGQKDRYTYNDTVIFACMFGFTLKGSKQIRCNAQGTWEPSAPVCEKECQAPPNILNGQKEDRHMVRFDPGTSIKYSCNPGYVLVGEESIQCTSEGVWTPPVPQCKVAACEATGRQLLTKPQHQFVRPDVNSSCGEGYKLSGSVYQECQGTIPWFMEIRLCKEITCPPPPVIYNGAHTGSSLEDFPYGTTVTYTCNPGPERGVEFSLIGESTIRCTSNDQERGTWSGPAPLCKLSLLAVQCSHVHIANGYKISGKEAPYFYNDTVTFKCYSGFTLKGSSQIRCKADNTWDPEIPVCEKETCQHVRQSLQELPAGSRVELVNTSCQDGYQLTGHAYQMCQDAENGIWFKKIPLCKVIHCHPPPVIVNGKHTGMMAENFLYGNEVSYECDQGFYLLGEKKLQCRSDSKGHGSWSGPSPQCLRSPPVTRCPNPEVKHGYKLNKTHSAYSHNDIVYVDCNPGFIMNGSRVIRCHTDNTWVPGVPTCIKKAFIGCPPPPKTPNGNHTGGNIARFSPGMSILYSCDQGYLLVGEALLLCTHEGTWSQPAPHCKEVNCSSPADMDGIQKGLEPRKMYQYGAVVTLECEDGYMLEGSPQSQCQSDHQWNPPLAVCRSR

SEQ ID NO: 1135 - protein, 1322 aa, synthetic construct
  REGION 1..1322: note = CRB1 (P82279) ECD
FCNKNNTRCLSNSCQNNSTCKDFSKDNDCSCSDTANNLDKDCDNMKDPCFSNPCQGSATCVNTPGERSFLCKCPPGYSGTICETTIGSCGKNSCQHGGICHQDPIYPVCICPAGYAGRFCEIDHDECASSPCQNGAVCQDGIDGYSCFCVPGYQGRHCDLEVDECASDPCKNEATCLNEIGRYTCICPHNYSGVNCELEIDECWSQPCLNGATCQDALGAYFCDCAPGFLGDHCELNTDECASQPCLHGGLCVDGENRYSCNCTGSGFTGTHCETLMPLCWSKPCHNNATCEDSVDNYTCHCWPGYTGAQCEIDLNECNSNPCQSNGECVELSSEKQYGRITGLPSSFSYHEASGYVCICQPGFTGIHCEEDVNECSSNPCQNGGTCENLPGNYTCHCPFDNLSRTFYGGRDCSDILLGCTHQQCLNNGTCIPHFQDGQHGFSCLCPSGYTGSLCEIATTLSFEGDGFLWVKSGSVTTKGSVCNIALRFQTVQPMALLLFRSNRDVFVKLELLSGYIHLSIQVNNQSKVLLFISHNTSDGEWHFVEVIFAEAVTLTLIDDSCKEKCIAKAPTPLESDQSICAFQNSFLGGLPVGMTSNGVALLNFYNMPSTPSFVGCLQDIKIDWNHITLENISSGSSLNVKAGCVRKDWCESQPCQSRGRCINLWLSYQCDCHRPYEGPNCLREYVAGRFGQDDSTGYVIFTLDESYGDTISLSMFVRTLQPSGLLLALENSTYQYIRVWLERGRLAMLTPNSPKLVVKFVLNDGNVHLISLKIKPYKIELYQSSQNLGFISASTWKIEKGDVIYIGGLPDKQETELNGGFFKGCIQDVRLNNQNLEFFPNPTNNASLNPVLVNVTQGCAGDNSCKSNPCHNGGVCHSRWDDFSCSCPALTSGKACEEVQWCGFSPCPHGAQCQPVLQGFECIANAVFNGQSGQILFRSNGNITRELTNITFGFRTRDANVIILHAEKEPEFLNISIQDSRLFFQLQSGNSFYMLSLTSLQSVNDGTWHEVTLSMTDPLSQTSRWQMEVDNETPFVTSTIATGSLNFLKDNTDIYVGDRAIDNIKGLQGCLSTIEIGGIYLSYFENVHGFINKPQEEQFLKISTNSVVTGCLQLNVCNSNPCLHGGNCEDIYSSYHCSCPLGWSGKHCELNIDECFSNPCIHGNCSDRVAAYHCTCEPGYTGVNCEVDIDNCQSHQCANGATCISHTNGYSCLCFGNFTGKFCRQSRLPSTVCGNEKTNLTCYNGGNCTEFQTELKCMCRPGFTGEWCEKDIDECASDPCVNGGLCQDLLNKFQCLCDVAFAGERCEVDLADDLISDIFTT

SEQ ID NO: 1136 - protein, 1196 aa, synthetic construct
  REGION 1..1196: note = CRB2 (Q5IJ48) ECD
LLAGTVPSEPPSACASDPCAPGTECQATESGGYTCGPMEPRGCATQPCHHGALCVPQGPDPTGFRCYCVPGFQGPRCELDIDECASRPCHHGATCRNLADRYECHCPLGYAGVTCEMEVDECASAPCLHGGSCLDGVGSFRCVCAPGYGGTRCQLDLDECQSQPCAHGGTCHDLVNGFRCDCAGTGYEGTHCEREVLECASAPCEHNASCLEGLGSFRCLCWPGYSGELCEVDEDECASSPCQHGGRCLQRSDPALYGGVQAAFPGAFSFRHAAGFLCHCPPGFEGADCGVEVDECASRPCLNGGHCQDLPNGFQCHCPDGYAGPTCEEDVDECLSDPCLHGGTCSDTVAGYICRCPETWGGRDCSVQLTGCQGHTCPLAATCIPIFESGVHSYVCHCPPGTHGPFCGQNTTFSVMAGSPIQASVPAGGPLGLALRFRTTLPAGTLATRNDTKESLELALVAATLQATLWSYSTTVLVLRLPDLALNDGHWHQVEVVLHLATLELRLWHEGCPARLCVASGPVALASTASATPLPAGISSAQLGDATFAGCLQDVRVDGHLLLPEDLGENVLLGCERREQCRPLPCVHGGSCVDLWTHFRCDCARPHRGPTCADEIPAATFGLGGAPSSASFLLQELPGPNLTVSFLLRTRESAGLLLQFANDSAAGLTVFLSEGRIRAEVPGSPAVVLPGRWDDGLRHLVMLSFGPDQLQDLGQHVHVGGRLLAADSQPWGGPFRGCLQDLRLDGCHLPFFPLPLDNSSQPSELGGRQSWNLTAGCVSEDMCSPDPCFNGGTCLVTWNDFHCTCPANFTGPTCAQQLWCPGQPCLPPATCEEVPDGFVCVAEATFREGPPAAFSGHNASSGRLLGGLSLAFRTRDSEAWLLRAAAGALEGVWLAVRNGSLAGGVRGGHGLPGAVLPIPGPRVADGAWHRVRLAMERPAATTSRWLLWLDGAATPVALRGLASDLGFLQGPGAVRILLAENFTGCLGRVALGGLPLPLARPRPGAAPGAREHFASWPGTPAPILGCRGAPVCAPSPCLHDGACRDLFDAFACACGPGWEGPRCEAHVDPCHSAPCARGRCHTHPDGRFECRCPPGFGGPRCRLPVPSKECSLNVTCLDGSPCEGGSPAANCSCLEGLAGQRCQVPTLPCEANPCLNGGTCRAAGGVSECICNARFSGQFCEVAKGLPLPLPFPLLE

SEQ ID NO: 1137 - protein, 33 aa, synthetic construct
  REGION 1..33: note = CRB3 (Q9BUF7) ECD
QIQTTSANENSTVLPSSTSSSSDGNLRPEAITA

SEQ ID NO: 1138 - protein, 905 aa, synthetic construct
  REGION 1..905: note = CRIM1 (Q9NZV1) ECD
LVCLPCDESKCEEPRNCPGSIVQGVCGCCYTCASQRNESCGGTFGIYGTCDRGLRCVIRPPLNGDSLTEYEAGVCEDENWTDDQLLGFKPCNENLIAGCNIINGKCECNTIRTCSNPFEFPSQDMCLSALKRIEEEKPDCSKARCEVQFSPRCPEDSVLIEGYAPPGECCPLPSRCVCNPAGCLRKVCQPGNLNILVSKASGKPGECCDLYECKPVFGVDCRTVECPPVQQTACPPDSYETQVRLTADGCCTLPTRCECLSGLCGFPVCEVGSTPRIVSRGDGTPGKCCDVFECVNDTKPACVFNNVEYYDGDMFRMDNCRFCRCQGGVAICFTAQCGEINCERYYVPEGECCPVCEDPVYPFNNPAGCYANGLILAHGDRWREDDCTFCQCVNGERHCVATVCGQTCTNPVKVPGECCPVCEEPTIITVDPPACGELSNCTLTGKDCINGFKRDHNGCRTCQCINTEELCSERKQGCTLNCPFGFLTDAQNCEICECRPRPKKCRPIICDKYCPLGLLKNKHGCDICRCKKCPELSCSKICPLGFQQDSHGCLICKCREASASAGPPILSGTCLTVDGHHHKNEESWHDGCRECYCLNGREMCALITCPVPACGNPTIHPGQCCPSCADDFVVQKPELSTPSICHAPGGEYFVEGETWNIDSCTQCTCHSGRVLCETEVCPPLLCQNPSRTQDSCCPQCTDQPFRPSLSRNNSVPNYCKNDEGDIFLAAESWKPDVCTSCICIDSVISCFSESCPSVSCERPVLRKGQCCPYCIEDTIPKKVVCHFSGKAYADEERWDLDSCTHCYCLQGQTLCSTVSCPPLPCVEPINVEGSCCPMCPEMYVPEPTNIPIEKTNHRGEVDLEVPLWPTPSENDIVHLPRDMGHLQVDYRDNRLHPSEDSSLDS

SEQ ID NO: 1139 - protein, 209 aa, synthetic construct
  REGION 1..209: note = CRLF2 (Q9HC73) ECD
QGGAAEGVQIQIIYFNLETVQVTWNASKYSRTNLTFHYRFNGDEAYDQCTNYLLQEGHTSGCLLDAEQRDDILYFSIRNGTHPVFTASRWMVYYLKPSSPKHVRFSWHQDAVTVTCSDLSYGDLLYEVQYRSPFDTEWQSKQENTCNVTIEGLDAEKCYSFWVRVKAMEDVYGPDTYPSDWSEVTCWQRGEIRDACAETPTPPKPKLSK

SEQ ID NO: 1140 - protein, 270 aa, synthetic construct
  REGION 1..270: note = CRTAM (O95727) ECD
SLTNHTETITVEEGQTLTLKCVTSLRKNSSLQWLTPSGFTIFLNEYPALKNSKYQLLHHSANQLSITVPNVTLQDEGVYKCLHYSDSVSTKEVKVIVLATPFKPILEASVIRKQNGEEHVVLMCSTMRSKPPPQITWLLGNSMEVSGGTLHEFETDGKKCNTTSTLIIHTYGKNSTVDCIIRHRGLQGRKLVAPFRFEDLVTDEETASDALERNSLSSQDPQQPTSTVSVTEDSSTSEIDKEEKEQTTQDPDLTTEANPQYLGLARKKSG

SEQ ID NO: 1141 - protein, 464 aa, synthetic construct
  REGION 1..464: note = CSF1 (P09603) ECD
EEVSEYCSHMIGSGHLQSLQRLIDSQMETSCQITFEFVDQEQLKDPVCYLKKAFLLVQDIMEDTMRFRDNTPNAIAIVQLQELSLRLKSCFTKDYEEHDKACVRTFYETPLQLLEKVKNVFNETKNLLDKDWNIFSKNCNNSFAECSSQDVVTKPDCNCLYPKAIPSSDPASVSPHQPLAPSMAPVAGLTWEDSEGTEGSSLLPGEQPLHTVDPGSAKQRPPRSTCQSFEPPETPVVKDSTIGGSPQPRPSVGAFNPGMEDILDSAMGTNWVPEEASGEASEIPVPQGTELSPSRPGGGSMQTEPARPSNFLSASSPLPASAKGQQPADVTGTALPRVGPVRPTGQDWNHTPQKTDHPSALLRDPPEPGSPRISSLRPQGLSNPSTLSAQPQLSRSHSSGSVLPLGELEGRRSTRDRRSPAEPEGGPASEGAARPLPRFNSVPLTDTGHERQSEGSFSPQLQES

SEQ ID NO: 1142 - protein, 498 aa, synthetic construct
  REGION 1..498: note = CSF1R (P07333) ECD
IPVIEPSVPELVVKPGATVTLRCVGNGSVEWDGPPSPHWTLYSDGSSSILSTNNATFQNTGTYRCTEPGDPLGGSAAIHLYVKDPARPWNVLAQEVVVFEDQDALLPCLLTDPVLEAGVSLVRVRGRPLMRHTNYSFSPWHGFTIHRAKFIQSQDYQCSALMGGRKVMSISIRLKVQKVIPGPPALTLVPAELVRIRGEAAQIVCSASSVDVNFDVFLQHNNTKLAIPQQSDFHNNRYQKVLTLNLDQVDFQHAGNYSCVASNVQGKHSTSMFFRVVESAYLNLSSEQNLIQEVTVGEGLNLKVMVEAYPGLQGFNWTYLGPFSDHQPEPKLANATTKDTYRHTFTLSLPRLKPSEAGRYSFLARNPGGWRALTFELTLRYPPEVSVIWTFINGSGTLLCAASGYPQPNVTWLQCSGHTDRCDEAQVLQVWDDPYPEVLSQEPFHKVTVQSLLTVETLEHNQTYECRAHNSVGSGSWAFIPISAGAHTHPPDEFLFTP

SEQ ID NO: 1143 - protein, 298 aa, synthetic construct
  REGION 1..298: note = CSF2RA (P15509) ECD
EKSDLRTVAPASSLNVRFDSRTMNLSWDCQENTTFSKCFLTDKKNRVVEPRLSNNECSCTFREICLHEGVTFEVHVNTSQRGFQQKLLYPNSGREGTAAQNFSCFIYNADLMNCTWARGPTAPRDVQYFLYIRNSKRRREIRCPYYIQDSGTHVGCHLDNLSGLTSRNYFLVNGTSREIGIQFFDSLLDTKKIERFNPPSNVTVRCNTTHCLVRWKQPRTYQKLSYLDFQYQLDVHRKNTQPGTENLLINVSGDLENRYNFPSSEPRAKHSVKIRAADVRILNWSSWSEAIEFGSDDG

SEQ ID NO: 1144 - protein, 427 aa, synthetic construct
  REGION 1..427: note = CSF2RB (P32927) ECD
WERSLAGAEETIPLQTLRCYNDYTSHITCRWADTQDAQRLVNVTLIRRVNEDLLEPVSCDLSDDMPWSACPHPRCVPRRCVIPCQSFVVTDVDYFSFQPDRPLGTRLTVTLTQHVQPPEPRDLQISTDQDHFLLTWSVALGSPQSHWLSPGDLEFEVVYKRLQDSWEDAAILLSNTSQATLGPEHLMPSSTYVARVRTRLAPGSRLSGRPSKWSPEVCWDSQPGDEAQPQNLECFFDGAAVLSCSWEVRKEVASSVSFGLFYKPSPDAGEEECSPVLREGLGSLHTRHHCQIPVPDPATHGQYIVSVQPRRAEKHIKSSVNIQMAPPSLNVTKDGDSYSLRWETMKMRYEHIDHTFEIQYRKDTATWKDSKTETLQNAHSMALPALEPSTRYWARVRVRTSRTGYNGIWSEWSEARSWDTESVLPMW

SEQ ID NO: 1145 - protein, 603 aa, synthetic construct
  REGION 1..603: note = CSF3R (Q99062) ECD
ECGHISVSAPIVHLGDPITASCIIKQNCSHLDPEPQILWRLGAELQPGGRQQRLSDGTQESIITLPHLNHTQAFLSCCLNWGNSLQILDQVELRAGYPPAIPHNLSCLMNLTTSSLICQWEPGPETHLPTSFTLKSFKSRGNCQTQGDSILDCVPKDGQSHCCIPRKHLLLYQNMGIWVQAENALGTSMSPQLCLDPMDVVKLEPPMLRTMDPSPEAAPPQAGCLQLCWEPWQPGLHINQKCELRHKPQRGEASWALVGPLPLEALQYELCGLLPATAYTLQIRCIRWPLPGHWSDWSPSLELRTTERAPTVRLDTWWRQRQLDPRTVQLFWKPVPLEEDSGRIQGYVVSWRPSGQAGAILPLCNTTELSCTFHLPSEAQEVALVAYNSAGTSRPTPVVFSESRGPALTRLHAMARDPHSLWVGWEPPNPWPQGYVIEWGLGPPSASNSNKTWRMEQNGRATGFLLKENIRPFQLYEIIVTPLYQDTMGPSQHVYAYSQEMAPSHAPELHLKHIGKTWAQLEWVPEPPELGKSPLTHYTIFWTNAQNQSFSAILNASSRGFVLHGLEPASLYHIHLMAASQAGATNSTVLTLMTLTPEGSELH

SEQ ID NO: 1146 - protein, 3461 aa, synthetic construct
  REGION 1..3461: note = CSMD1 (Q96PZ7) ECD
AKGQNCGGLVQGPNGTIESPGFPHGYPNYANCTWIIITGERNRIQLSFHTFALEEDFDILSVYDGQPQQGNLKVRLSGFQLPSSIVSTGSILTLWFTTDFAVSAQGFKALYEVLPSHTCGNPGEILKGVLHGTRFNIGDKIRYSCLPGYILEGHAILTCIVSPGNGASWDFPAPFCRAEGACGGTLRGTSSSISSPHFPSEYENNADCTWTILAEPGDTIALVFTDFQLEEGYDFLEISGTEAPSIWLTGMNLPSPVISSKNWLRLHFTSDSNHRRKGFNAQFQVKKAIELKSRGVKMLPSKDGSHKNSVLSQGGVALVSDMCPDPGIPENGRRAGSDFRVGANVQFSCEDNYVLQGSKSITCQRVTETLAAWSDHRPICRARTCGSNLRGPSGVITSPNYPVQYEDNAHCVWVITTTDPDKVIKLAFEEFELERGYDTLTVGDAGKVGDTRSVLYVLTGSSVPDLIVSMSNQMWLHLQSDDSIGSPGFKAVYQEIEKGGCGDPGIPAYGKRTGSSFLHGDTLTFECPAAFELVGERVITCQQNNQWSGNKPSCVFSCFFNFTASSGIILSPNYPEEYGNNMNCVWLIISEPGSRIHLIFNDFDVEPQFDFLAVKDDGISDITVLGTFSGNEVPSQLASSGHIVRLEFQSDHSTTGRGFNITYTTFGQNECHDPGIPINGRRFGDRFLLGSSVSFHCDDGFVKTQGSESITCILQDGNVVWSSTVPRCEAPCGGHLTASSGVILPPGWPGYYKDSLHCEWIIEAKPGHSIKITFDRFQTEVNYDTLEVRDGPASSSPLIGEYHGTQAPQFLISTGNFMYLLFTTDNSRSSIGFLIHYESVTLESDSCLDPGIPVNGHRHGGDFGIRSTVTFSCDPGYTLSDDEPLVCERNHQWNHALPSCDALCGGYIQGKSGTVLSPGFPDFYPNSLNCTWTIEVSHGKGVQMIFHTFHLESSHDYLLITEDGSFSEPVARLTGSVLPHTIKAGLFGNFTAQLRFISDFSISYEGFNITFSEYDLEPCDDPGVPAFSRRIGFHFGVGDSLTFSCFLGYRLEGATKLTCLGGGRRVWSAPLPRCVAECGASVKGNEGTLLSPNFPSNYDNNHECIYKIETEAGKGIHLRTRSFQLFEGDTLKVYDGKDSSSRPLGTFTKNELLGLILNSTSNHLWLEFNTNGSDTDQGFQLTYTSFDLVKCEDPGIPNYGYRIRDEGHFTDTVVLYSCNPGYAMHGSNTLTCLSGDRRVWDKPLPSCIAECGGQIHAATSGRILSPGYPAPYDNNLHCTWIIEADPGKTISLHFIVFDTEMAHDILKVWDGPVDSDILLKEWSGSALPEDIHSTFNSLTLQFDSDFFISKSGFSIQFSTSIAATCNDPGMPQNGTRYGDSREAGDTVTFQCDPGYQLQGQAKITCVQLNNRFFWQPDPPTCIAACGGNLTGPAGVILSPNYPQPYPPGKECDWRVKVNPDFVIALIFKSFNMEPSYDFLHIYEGEDSNSPLIGSYQGSQAPERIESSGNSLFLAFRSDASVGLSGFAIEFKEKPREACFDPGNIMNGTRVGTDFKLGSTITYQCDSGYKILDPSSITCVIGADGKPSWDQVLPSCNAPCGGQYTGSEGVVLSPNYPHNYTAGQICLYSITVPKEFVVFGQFAYFQTALNDLAELFDGTHAQARLLSSLSGSHSGETLPLATSNQILLRFSAKSGASARGFHFVYQAVPRTSDTQCSSVPEPRYGRRIGSEFSAGSIVRFECNPGYLLQGSTALHCQSVPNALAQWNDTIPSCVVPCSGNFTQRRGTILSPGYPEPYGNNLNCIWKIIVTEGSGIQIQVISFATEQNWDSLEIHDGGDVTAPRLGSFSGTTVPALLNSTSNQLYLHFQSDISVAAAGFHLEYKTVGLAACQEPALPSNSIKIGDRYMVNDVLSFQCEPGYTLQGRSHISCMPGTVRRWNYPSPLCIATCGGTLSTLGGVILSPGFPGSYPNNLDCTWRISLPIGYGAHIQFLNFSTEANHDFLEIQNGPYHTSPMIGQFSGTDLPAALLSTTHETLIHFYSDHSQNRQGFKLAYQAYELQNCPDPPPFQNGYMINSDYSVGQSVSFECYPGYILIGHPVLTCQHGINRNWNYPFPRCDAPCGYNVTSQNGTIYSPGFPDEYPILKDCIWLITVPPGHGVYINFTLLQTEAVNDYIAVWDGPDQNSPQLGVFSGNTALETAYSSTNQVLLKFHSDFSNGGFFVLNFHAFQLKKCQPPPAVPQAEMLTEDDDFEIGDFVKYQCHPGYTLVGTDILTCKLSSQLQFEGSLPTCEAQCPANEVRTGSSGVILSPGYPGNYFNSQTCSWSIKVEPNYNITIFVDTFQSEKQFDALEVFDGSSGQSPLLVVLSGNHTEQSNFTSRSNQLYLRWSTDHATSKKGFKIRYAAPYCSLTHPLKNGGILNRTAGAVGSKVHYFCKPGYRMVGHSNATCRRNPLGMYQWDSLTPLCQAVSCGIPESPGNGSFTGNEFTLDSKVVYECHEGFKLESSQQATAVCQEDGLWSNKGKPPTCKPVACPSIEAQLSEHVIWRLVSGSLNEYGAQVLLSCSPGYYLEGWRLLRCQANGTWNIGDERPSCRVISCGSLSFPPNGNKIGTLTVYGATAIFTCNTGYTLVGSHVRECLANGLWSGSETRCLAGHCGSPDPIVNGHISGDGFSYRDTVVYQCNPGFRLVGTSVRICLQDHKWSGQTPVCVPITCGHPGNPAHGFTNGSEFNLNDVVNFTCNTGYLLQGVSRAQCRSNGQWSSPLPTCRVVNCSDPGFVENAIRHGQQNFPESFEYGMSILYHCKKGFYLLGSSALTCMANGLWDRSLPKCLAISCGHPGVPANAVLTGELFTYGAVVHYSCRGSESLIGNDTRVCQEDSHWSGALPHCTGNNPGFCGDPGTPAHGSRLGDDFKTKSLLRFSCEMGHQLRGSPERTCLLNGSWSGLQPVCEAVSCGNPGTPTNGMIVSSDGILFSSSVIYACWEGYKTSGLMTRHCTANGTWTGTAPDCTIISCGDPGTLANGIQFGTDFTFNKTVSYQCNPGYVMEAVTSATIRCTKDGRWNPSKPVCKAVLCPQPPPVQNGTVEGSDFRWGSSISYSCMDGYQLSHSAILSCEGRGVWKGEIPQCLPVFCGDPGIPAEGRLSGKSFTYKSEVFFQCKSPFILVGSSRRVCQADGTWSGIQPTCIDPAHNTCPDPGTPHFGIQNSSRGYEVGSTVFFRCRKGYHIQGSTTRTCLANLTWSGIQTECIPHACRQPETPAHADVRAIDLPTFGYTLVYTCHPGFFLAGGSEHRTCKADMKWTGKSPVCKSKGVREVNETVTKTPVPSDVFFVNSLWKGYYEYLGKRQPATLTVDWFNATSSKVNATFSEASPVELKLTGIYKKEEAHLLLKAFQIKGQADIFVSKFENDNWGLDGYVSSGLERGGFTFQGDIHGKDFGKFKLERQDPLNPDQDSSSHYHGTSSGS

SEQ ID NO: 1147 - protein, 2195 aa, synthetic construct
  REGION 1..2195: note = CSPG4 (Q6UVK1) ECD
ASFFGENHLEVPVATALTDIDLQLQFSTSQPEALLLLAAGPADHLLLQLYSGRLQVRLVLGQEELRLQTPAETLLSDSIPHTVVLTVVEGWATLSVDGFLNASSAVPGAPLEVPYGLFVGGTGTLGLPYLRGTSRPLRGCLHAATLNGRSLLRPLTPDVHEGCAEEFSASDDVALGFSGPHSLAAFPAWGTQDEGTLEFTLTTQSRQAPLAFQAGGRRGDFIYVDIFEGHLRAVVEKGQGTVLLHNSVPVADGQPHEVSVHINAHRLEISVDQYPTHTSNRGVLSYLEPRGSLLLGGLDAEASRHLQEHRLGLTPEATNASLLGCMEDLSVNGQRRGLREALLTRNMAAGCRLEEEEYEDDAYGHYEAFSTLAPEAWPAMELPEPCVPEPGLPPVFANFTQLLTISPLVVAEGGTAWLEWRHVQPTLDLMEAELRKSQVLFSVTRGARHGELELDIPGAQARKMFTLLDVVNRKARFIHDGSEDTSDQLVLEVSVTARVPMPSCLRRGQTYLLPIQVNPVNDPPHIIFPHGSLMVILEHTQKPLGPEVFQAYDPDSACEGLTFQVLGTSSGLPVERRDQPGEPATEFSCRELEAGSLVYVHRGGPAQDLTFRVSDGLQASPPATLKVVAIRPAIQIHRSTGLRLAQGSAMPILPANLSVETNAVGQDVSVLFRVTGALQFGELQKQGAGGVEGAEWWATQAFHQRDVEQGRVRYLSTDPQHHAYDTVENLALEVQVGQEILSNLSFPVTIQRATVWMLRLEPLHTQNTQQETLTTAHLEATLEEAGPSPPTFHYEVVQAPRKGNLQLQGTRLSDGQGFTQDDIQAGRVTYGATARASEAVEDTFRFRVTAPPYFSPLYTFPIHIGGDPDAPVLTNVLLVVPEGGEGVLSADHLFVKSLNSASYLYEVMERPRHGRLAWRGTQDKTTMVTSFTNEDLLRGRLVYQHDDSETTEDDIPFVATRQGESSGDMAWEEVRGVFRVAIQPVNDHAPVQTISRIFHVARGGRRLLTTDDVAFSDADSGFADAQLVLTRKDLLFGSIVAVDEPTRPIYRFTQEDLRKRRVLFVHSGADRGWIQLQVSDGQHQATALLEVQASEPYLRVANGSSLVVPQGGQGTIDTAVLHLDTNLDIRSGDEVHYHVTAGPRWGQLVRAGQPATAFSQQDLLDGAVLYSHNGSLSPRDTMAFSVEAGPVHTDATLQVTIALEGPLAPLKLVRHKKIYVFQGEAAEIRRDQLEAAQEAVPPADIVFSVKSPPSAGYLVMVSRGALADEPPSLDPVQSFSQEAVDTGRVLYLHSRPEAWSDAFSLDVASGLGAPLEGVLVELEVLPAAIPLEAQNFSVPEGGSLTLAPPLLRVSGPYFPTLLGLSLQVLEPPQHGALQKEDGPQARTLSAFSWRMVEEQLIRYVHDGSETLTDSFVLMANASEMDRQSHPVAFTVTVLPVNDQPPILTTNTGLQMWEGATAPIPAEALRSTDGDSGSEDLVYTIEQPSNGRVVLRGAPGTEVRSFTQAQLDGGLVLFSHRGTLDGGFRFRLSDGEHTSPGHFFRVTAQKQVLLSLKGSQTLTVCPGSVQPLSSQTLRASSSAGTDPQLLLYRVVRGPQLGRLFHAQQDSTGEALVNFTQAEVYAGNILYEHEMPPEPFWEAHDTLELQLSSPPARDVAATLAVAVSFEAACPQRPSHLWKNKGLWVPEGQRARITVAALDASNLLASVPSPQRSEHDVLFQVTQFPSRGQLLVSEEPLHAGQPHFLQSQLAAGQLVYAHGGGGTQQDGFHFRAHLQGPAGASVAGPQTSEAFAITVRDVNERPPQPQASVPLRLTRGSRAPISRAQLSVVDPDSAPGEIEYEVQRAPHNGFLSLVGGGLGPVTRFTQADVDSGRLAFVANGSSVAGIFQLSMSDGASPPLPMSLAVDILPSAIEVQLRAPLEVPQALGRSSLSQQQLRVVSDREEPEAAYRLIQGPQYGHLLVGGRPTSAFSQFQIDQGEVVFAFTNFSSSHDHFRVLALARGVNASAVVNVTVRALLHVWAGGPWPQGATLRLDPTVLDAGELANRTGSVPRFRLLEGPRHGRVVRVPRARTEPGGSQLVEQFTQQDLEDGRLGLEVGRPEGRAPGPAGDSLTLELWAQGVPPAVASLDFATEPYNAARPYSVALLSVPEAARTEAGKPESSTPTGEPGPMASSPEPAVAKGGFLSFLEANMFS

SEQ ID NO: 1148 - protein, 393 aa, synthetic construct
  REGION 1..393: note = CSPG5 (O95196) ECD
VPAREAGSAVEAEELVKGSPAWEPPANDTREEAGPPAAGEDEASWTAPGGELAGPEEVLQESAAVTGTAWLEADSPGLGGVTAEAGSGDAQALPATLQAPHEVLGQSIMPPAIPEATEASGPPSPTPGDKLSPASELPKESPLEVWLNLGGSTPDPQGPELTYPFQGTLEPQPASDIIDIDYFEGLDGEGRGADLGSFPGSPGTSENHPDTEGETPSWSLLDLYDDFTPFDESDFYPTTSFYDDLDEEEEEEEDDKDAVGGGDLEDENELLVPTGKPGLGPGTGQPTSRWHAVPPQHTLGSVPGSSIALRPRPGEPGRDLASSENGTECRSGFVRHNGSCRSVCDLFPSYCHNGGQCYLVENIGAFCRCNTQDYIWHKGMRCESIITDFQVMC

SEQ ID NO: 1149 - protein, 126 aa, synthetic construct [sequence omitted]

SEQ ID NO: 1150 - protein, 544 aa, synthetic construct
  REGION 1..544: note = CUZD1 (Q86UP6) ECD
EAEGNASCTVSLGGANMAETHKAMILQLNPSENCTWTIERPENKSIRIIFSYVQLDPDGSCESENIKVFDGTSSNGPLLGQVCSKNDYVPVFESSSSTLTFQIVTDSARIQRTVFVFYYFFSPNISIPNCGGYLDTLEGSFTSPNYPKPHPELAYCVWHIQVEKDYKIKLNFKEIFLEIDKQCKFDFLAIYDGPSTNSGLIGQVCGRVTPTFESSSNSLTVVLSTDYANSYRGFSASYTSIYAENINTTSLTCSSDRMRVIISKSYLEAFNSNGNNLQLKDPTCRPKLSNVVEFSVPLNGCGTIRKVEDQSITYTNIITFSASSTSEVITRQKQLQIIVKCEMGHNSTVEIIYITEDDVIQSQNALGKYNTSMALFESNSFEKTILESPYYVDLNQTLFVQVSLHTSDPNLVVFLDTCRASPTSDFASPTYDLIKSGCSRDETCKVYPLFGHYGRFQFNAFKFLRSMSSVYLQCKVLICDSSDHQSRCNQGCVSRSKRDISSYKWKTDSIIGPIRLKRDRSASGNSGFQHETHAEETPNQPFNS

SEQ ID NO: 1151 - protein, 317 aa, synthetic construct
  REGION 1..317: note = CX3CL1 (P78423) ECD
QHHGVTKCNITCSKMTSKIPVALLIHYQQNQASCGKRAIILETRQHRLFCADPKEQWVKDAMQHLDRQAAALTRNGGTFEKQIGEVKPRTTPAAGGMDESVVLEPEATGESSSLEPTPSSQEAQRALGTSPELPTGVTGSSGTRLPPTPKAQDGGPVGTELFRVPPVSTAATWQSSAPHQPGPSLWAEAKTSEAPSTQDPSTQASTASSPAPEENAPSEGQRVWGQGQSPRPENSLEREEMGPVPAHTDAFQDWGPGSMAHVSVVPVSSEGTPSREPVASGSWTPKAEEPIHATMDPQRLGVLITPVPDAQAATRRQ

SEQ ID NO: 1152 - protein, 218 aa, synthetic construct [sequence omitted]

SEQ ID NO: 1153 - protein, 176 aa, synthetic construct
  REGION 1..176: note = CXCL16 (Q9H2A7) ECD
NEGSVTGSCYCGKRISSDSPPSVQFMNRLRKHLRAYHRCLYYTRFQLLSWSVCGGNKDPWVQELMSCLDLKECGHAYSGIVAHQKHLLPTSPPISQASEGASSDIHTPAQMLLSTLQSTQRPTLPVGSLSSDKELTRPNETTIHTAGHSLAAGPEAGENQKQPEKNAGPTARTSAT

SEQ ID NO: 1154 - protein, 96 aa, synthetic construct
  REGION 1..96: note = DAG1 (Q14118) ECD
SIVVEWTNNTLPLEPCPKEQIAGLSRRIAEDDGKPRPAFSNALEPDFKATSITVTGSGSCRHLQFIPVVPPRRVPSEAPPTEVPDRDPEKSSEDDV

SEQ ID NO: 1155 - protein, 425 aa, synthetic construct
  REGION 1..425: note = DCBLD1 (Q8N8Z6) ECD
EELGDGCGHLVTYQDSGTMTSKNYPGTYPNHTVCEKTITVPKGKRLILRLGDLDIESQTCASDYLLFTSSSDQYGPYCGSMTVPKELLLNTSEVTVRFESGSHISGRGFLLTYASSDHPDLITCLERASHYLKTEYSKFCPAGCRDVAGDISGNMVDGYRDTSLLCKAAIHAGIIADELGGQISVLQRKGISRYEGILANGVLSRDGSLSDKRFLFTSNGCSRSLSFEPDGQIRASSSWQSVNESGDQVHWSPGQARLQDQGPSWASGDSSNNHKPREWLEIDLGEKKKITGIRTTGSTQSNFNFYVKSFVMNFKNNNSKWKTYKGIVNNEEKVFQGNSNFRDPVQNNFIPPIVARYVRVVPQTWHQRIALKVELIGCQITQGNDSLVWRKTSQSTSVSTKKEDETITRPIPSEETSTGINITTV

SEQ ID NO: 1156 - protein, 462 aa, synthetic construct
  REGION 1..462: note = DCBLD2 (Q96PD2) ECD
QQGDGCGHTVLGPESGTLTSINYPQTYPNSTVCEWEIRVKMGERVRIKFGDFDIEDSDSCHFNYLRIYNGIGVSRTEIGKYCGLGLQMNHSIESKGNEITLLFMSGIHVSGRGFLASYSVIDKQDLITCLDTASNFLEPEFSKYCPAGCLLPFAEISGTIPHGYRDSSPLCMAGVHAGVVSNTLGGQISVVISKGIPYYESSLANNVTSVVGHLSTSLFTFKTSGCYGTLGMESGVIADPQITASSVLEWTDHTGQENSWKPKKARLKKPGPPWAAFATDEYQWLQIDLNKEKKITGIITTGSTMVEHNYYVSAYRILYSDDGQKWTVYREPGVEQDKIFQGNKDYHQDVRNNFLPPIIARFIRVNPTQWQQKIAMKMELLGCQFIPKGRPPKLTQPPPPRNSNDLKNTTAPPKIAKGRAPKFTQPLQPRSSNEFPAQTEQTTASPDIRNTTVTPNVTKDVA

SEQ ID NO: 1157 - protein, 1072 aa, synthetic construct
  REGION 1..1072: note = DCC (P43146) ECD
HLQVTGFQIKAFTALRFLSEPSDAVTMRGGNVLLDCSAESDRGVPVIKWKKDGIHLALGMDERKQQLSNGSLLIQNILHSRHHKPDEGLYQCEASLGDSGSIISRTAKVAVAGPLRFLSQTESVTAFMGDTVLLKCEVIGEPMPTIHWQKNQQDLTPIPGDSRVVVLPSGALQISRLQPGDIGIYRCSARNPASSRTGNEAEVRILSDPGLHRQLYFLQRPSNVVAIEGKDAVLECCVSGYPPPSFTWLRGEEVIQLRSKKYSLLGGSNLLISNVTDDDSGMYTCVVTYKNENISASAELTVLVPPWFLNHPSNLYAYESMDIEFECTVSGKPVPTVNWMKNGDVVIPSDYFQIVGGSNLRILGVVKSDEGFYQCVAENEAGNAQTSAQLIVPKPAIPSSSVLPSAPRDVVPVLVSSRFVRLSWRPPAEAKGNIQTFTVFFSREGDNRERALNTTQPGSLQLTVGNLKPEAMYTFRVVAYNEWGPGESSQPIKVATQPELQVPGPVENLQAVSTSPTSILITWEPPAYANGPVQGYRLFCTEVSTGKEQNIEVDGLSYKLEGLKKFTEYSLRFLAYNRYGPGVSTDDITVVTLSDVPSAPPQNVSLEVVNSRSIKVSWLPPPSGTQNGFITGYKIRHRKTTRRGEMETLEPNNLWYLFTGLEKGSQYSFQVSAMTVNGTGPPSNWYTAETPENDLDESQVPDQPSSLHVRPQTNCIIMSWTPPLNPNIVVRGYIIGYGVGSPYAETVRVDSKQRYYSIERLESSSHYVISLKAFNNAGEGVPLYESATTRSITDPTDPVDYYPLLDDFPTSVPDLSTPMLPPVGVQAVALTHDAVRVSWADNSVPKNQKTSEVRLYTVRWRTSFSASAKYKSEDTTSLSYTATGLKPNTMYEFSVMVTKNRRSSTWSMTAHATTYEAAPTSAPKDLTVITREGKPRAVIVSWQPPLEANGKITAYILFYTLDKNIPIDDWIMETISGDRLTHQIMDLNLDTMYYFRIQARNSKGVGPLSDPILFRTLKVEHPDKMANDQGRHGDGGYWPVDTNLIDRSTLNEPPIGQMHPPHGSVTPQKNSN

SEQ ID NO: 1158 - protein, 2898 aa, synthetic construct
  REGION 1..2898: note = DCHS1 (Q96JQ0) ECD
QAGSLDLQIDEEQPAGTLIGDISAGLPAGTAAPLMYFISAQEGSGVGTDLAIDEHSGVVRTARVLDREQRDRYRFTAVTPDGATVEVTVRVADINDHAPAFPQARAALQVPEHTAFGTRYPLEPARDADAGRLGTQGYALSGDGAGETFRLETRPGPDGTPVPELVVTGELDRENRSHYMLQLEAYDGGSPPRRAQALLDVTLLDINDHAPAFNQSRYHAVVSESLAPGSPVLQVFASDADAGVNGAVTYEINRRQSEGDGPFSIDAHTGLLQLERPLDFEQRRVHELVVQARDGGAHPELGSAFVTVHVRDANDNQPSMTVIFLSADGSPQVSEAAPPGQLVARISVSDPDDGDFAHVNVSLEGGEGHFALSTQDSVIYLVCVARRLDREERDAYNLRVTATDSGSPPLRAEAAFVLHVTDVNDNAPAFDRQLYRPEPLPEVALPGSFVVRVTARDPDQGTNGQVTYSLAPGAHTHWFSIDPTSGIITTAASLDYELEPQPQLIVVATDGGLPPLASSATVSVALQDVNDNEPQFQRTFYNASLPEGTQPGTCFLQVTATDADSGPFGLLSYSLGAGLGSSGSPPFRIDAHSGDVCTTRTLDRDQGPSSFDFTVTAVDGGGLKSMVYVKVFLSDENDNPPQFYPREYAASISAQSPPGTAVLRLRAHDPDQGSHGRLSYHILAGNSPPLFTLDEQSGLLTVAWPLARRANSVVQLEIGAEDGGGLQAEPSARVDISIVPGTPTPPIFEQLQYVFSVPEDVAPGTSVGIVQAHNPPGRLAPVTLSLSGGDPRGLFSLDAVSGLLQTLRPLDRELLGPVLELEVRAGSGVPPAFAVARVRVLLDDVNDNSPAFPAPEDTVLLPPNTAPGTPIYTLRALDPDSGVNSRVTFTLLAGGGGAFTVDPTTGHVRLMRPLGPSGGPAHELELEARDGGSPPRTSHFRLRVVVQDVGTRGLAPRFNSPTYRVDLPSGTTAGTQVLQVQAQAPDGGPITYHLAAEGASSPFGLEPQSGWLWVRAALDREAQELYILKVMAVSGSKAELGQQTGTATVRVSILNQNEHSPRLSEDPTFLAVAENQPPGTSVGRVFATDRDSGPNGRLTYSLQQLSEDSKAFRIHPQTGEVTTLQTLDREQQSSYQLLVQVQDGGSPPRSTTGTVHVAVLDLNDNSPTFLQASGAAGGGLPIQVPDRVPPGTLVTTLQAKDPDEGENGTILYTLTGPGSELFSLHPHSGELLTAAPLIRAERPHYVLTLSAHDQGSPPRSASLQLLVQVLPSARLAEPPPDLAERDPAAPVPVVLTVTAAEGLRPGSLLGSVAAPEPAGVGALTYTLVGGADPEGTFALDAASGRLYLARPLDFEAGPPWRALTVRAEGPGGAGARLLRVQVQVQDENEHAPAFARDPLALALPENPEPGAALYTFRASDADGPGPNSDVRYRLLRQEPPVPALRLDARTGALSAPRGLDRETTPALLLLVEATDRPANASRRRAARVSARVFVTDENDNAPVFASPSRVRLPEDQPPGPAALHVVARDPDLGEAARVSYRLASGGDGHFRLHSSTGALSVVRPLDREQRAEHVLTVVASDHGSPPRSATQVLTVSVADVNDEAPTFQQQEYSVLLRENNPPGTSLLTLRATDPDVGANGQVTYGGVSSESFSLDPDTGVLTTLRALDREEQEEINLTVYAQDRGSPPQLTHVTVRVAVEDENDHAPTFGSAHLSLEVPEGQDPQTLTMLRASDPDVGANGQLQYRILDGDPSGAFVLDLASGEFGTMRPLDREVEPAFQLRIEARDGGQPALSATLLLTVTVLDANDHAPAFPVPAYSVEVPEDVPAGTLLLQLQAHDPDAGANGHVTYYLGAGTAGAFLLEPSSGELRTAAALDREQCPSYTFSVSAVDGAAAGPLSTTVSVTITVRDVNDHAPTFPTSPLRLRLPRPGPSFSTPTLALATLRAEDRDAGANASILYRLAGTPPPGTTVDSYTGEIRVARSPVALGPRDRVLFIVATDLGRPARSATGVIIVGLQGEAERGPRFPRASSEATIRENAPPGTPIVSPRAVHAGGTNGPITYSILSGNEKGTFSIQPSTGAITVRSAEGLDFEVSPRLRLVLQAESGGAFAFTVLTLTLQDANDNAPRFLRPHYVAFLPESRPLEGPLLQVEADDLDQGSGGQISYSLAASQPARGLFHVDPTTGTITTTAILDREIWAETRLVLMATDRGSPALVGSATLTVMVIDTNDNRPTIPQPWELRVSEDALLGSEIAQVTGNDVDSGPVLWYVLSPSGPQDPFSVGRYGGRVSLTGPLDFEQCDRYQLQLLAHDGPHEGRANLTVLVEDVNDNAPAFSQSLYQVMLLEHTPPGSAILSVSATDRDSGANGHISYHLASPADGFSVDPNNGTLFTIVGTVALGHDGSGAVDVVLEARDHGAPGRAARATVHVQLQDQNDHAPSFTLSHYRVAVTEDLPPGSTLLTLEATDADGSRSHAAVDYSIISGNWGRVFQLEPRLAEAGESAGPGPRALGCLVLLEPLDFESLTQYNLTVAAADRGQPPQSSVVPVTVTVLDVNDNPPVFTRASYRVTVPEDTPVGAELLHVEASDADPGPHGLVRFTVSSGDPSGLFELDESSGTLRLAHALDCETQARHQLVVQAADPAGAHFALAPVTIEVQDVNDHGPAFPLNLLSTSVAENQPPGTLVTTLHAIDGDAGAFGRLRYSLLEAGPGPEGREAFALNSSTGELRARVPFDYEHTESFRLLVGAADAGNLSASVTVSVLVTGEDEYDPVFLAPAFHFQVPEGARRGHSLGHVQATDEDGGADGLVLYSLATSSPYFGINQTTGALYLRVDSRAPGSGTATSGGGGRTRREAPRELRLEVIARGPLPGSRSATVPVTVDITHTALGLAPDLNLLLVGA

SEQ ID NO: 1159 - protein, 449 aa, synthetic construct
  REGION 1..449: note = DCT (P40126) ECD
QFPRVCMTVDSLVNKECCPRLGAESANVCGSQQGRGQCTEVRADTRPWSGPYILRNQDDRELWPRKFFHRTCKCTGNFAGYNCGDCKFGWTGPNCERKKPPVIRQNIHSLSPQEREQFLGALDLAKKRVHPDYVITTQHWLGLLGPNGTQPQFANCSVYDFFVWLHYYSVRDTLLGPGRPYRAIDFSHQGPAFVTWHRYHLLCLERDLQRLIGNESFALPYWNFATGRNECDVCTDQLFGAARPDDPTLISRNSRFSSWETVCDSLDDYNHLVTLCNGTYEGLLRRNQMGRNSMKLPTLKDIRDCLSLQKFDNPPFFQNSTFSFRNALEGFDKADGTLDSQVMSLHNLVHSFLNGTNALPHSAANDPIFVVLHSFTDAIFDEWMKRFNPPADAWPQELAPIGHNRMYNMVPFFPPVTNEELFLTSDQLGYSYAIDLPVSVEETPGWPTT

SEQ ID NO: 1160 - protein, 397 aa, synthetic construct
  REGION 1..397: note = DDR1 (Q08345) ECD
DMKGHFDPAKCRYALGMQDRTIPDSDISASSSWSDSTAARHSRLESSDGDGAWCPAGSVFPKEEEYLQVDLQRLHLVALVGTQGRHAGGLGKEFSRSYRLRYSRDGRRWMGWKDRWGQEVISGNEDPEGVVLKDLGPPMVARLVRFYPRADRVMSVCLRVELYGCLWRDGLLSYTAPVGQTMYLSEAVYLNDSTYDGHTVGGLQYGGLGQLADGVVGLDDFRKSQELRVWPGYDYVGWSNHSFSSGYVEMEFEFDRLRAFQAMQVHCNNMHTLGARLPGGVECRFRRGPAMAWEGEPMRHNLGGNLGDPRARAVSVPLGGRVARFLQCRFLFAGPWLLFSEISFISDVVNNSSPALGGTFPPAPWWPPGPPPTNFSSLELEPRGQQPVAKAEGSPTA

SEQ ID NO: 1161 - protein, 378 aa, synthetic construct
  REGION 1..378: note = DDR2 (Q16832) ECD
KAQVNPAICRYPLGMSGGQIPDEDITASSQWSESTAAKYGRLDSEEGDGAWCPEIPVEPDDLKEFLQIDLHTLHFITLVGTQGRHAGGHGIEFAPMYKINYSRDGTRWISWRNRHGKQVLDGNSNPYDIFLKDLEPPIVARFVRFIPVTDHSMNVCMRVELYGCVWLDGLVSYNAPAGQQFVLPGGSIIYLNDSVYDGAVGYSMTEGLGQLTDGVSGLDDFTQTHEYHVWPGYDYVGWRNESATNGYIEIMFEFDRIRNFTTMKVHCNNMFAKGVKIFKEVQCYFRSEASEWEPNAISFPLVLDDVNPSARFVTVPLHHRMASAIKCQYHFADTWMMFSEITFQSDAAMYNNSEALPTSPMAPTTYDPMLKVDDSNTR

SEQ ID NO: 1162 - protein, 329 aa, synthetic construct
  REGION 1..329: note = DGCR2 (P98153) ECD
TEPLRPELRCNPGQFACRSGTIQCIPLPWQCDGWATCEDESDEANCPEVTGEVRPHHGKEAVDPRQGRARGGDPSHFHAVNVAQPVRFSSFLGKCPTGWHHYEGTASCYRVYLSGENYWDAAQTCQRLNGSLATFSTDQELRFVLAQEWDQPERSFGWKDQRKLWVGYQYVITGRNRSLEGRWEVAFKGSSEVFLPPDPIFASAMSENDNVFCAQLQCFHFPTLRHHDLHSWHAESCYEKSSFLCKRSQTCVDIKDNVVDEGFYFTPKGDDPCLSCTCHGGEPEMCVAALCERPQGCQQYRKDPKECCKFMCLDPDGNSLFDSMASGMR

SEQ ID NO: 1163 - protein, 280 aa, synthetic construct
  REGION 1..280: note = DLK1 (P80370) ECD
AECFPACNPQNGFCEDDNVCRCQPGWQGPLCDQCVTSPGCLHGLCGEPGQCICTDGWDGELCDRDVRACSSAPCANNRTCVSLDDGLYECSCAPGYSGKDCQKKDGPCVINGSPCQHGGTCVDDEGRASHASCLCPPGFSGNFCEIVANSCTPNPCENDGVCTDIGGDFRCRCPAGFIDKTCSRPVTNCASSPCQNGGTCLQHTQVSYECLCKPEFTGLTCVKKRALSPQQVTRLPSGYGLAYRLTPGVHELPVQQPEHRILKVSMKELNKKTPLLTEGQ

SEQ ID NO: 1164 - protein, 280 aa, synthetic construct
  REGION 1..280: note = DLK2 (Q6UY11) ECD
DDCSSHCDLAHGCCAPDGSCRCDPGWEGLHCERCVRMPGCQHGTCHQPWQCICHSGWAGKFCDKDEHICTTQSPCQNGGQCMYDGGGEYHCVCLPGFHGRDCERKAGPCEQAGSPCRNGGQCQDDQGFALNFTCRCLVGFVGARCEVNVDDCLMRPCANGATCLDGINRFSCLCPEGFAGRFCTINLDDCASRPCQRGARCRDRVHDFDCLCPSGYGGKTCELVLPVPDPPTTVDTPLGPTSAVVVPATGPAPHSAGAGLLRISVKEVVRRQEAGLGEPS

SEQ ID NO: 1165 - protein, 528 aa, synthetic construct
  REGION 1..528: note = DLL1 (O00548) ECD
QVWSSGVFELKLQEFVNKKGLLGNRNCCRGGAGPPPCACRTFFRVCLKHYQASVSPEPPCTYGSAVTPVLGVDSFSLPDGGGADSAFSNPIRFPFGFTWPGTFSLIIEALHTDSPDDLATENPERLISRLATQRHLTVGEEWSQDLHSSGRTDLKYSYRFVCDEHYYGEGCSVFCRPRDDAFGHFTCGERGEKVCNPGWKGPYCTEPICLPGCDEQHGFCDKPGECKCRVGWQGRYCDECIRYPGCLHGTCQQPWQCNCQEGWGGLFCNQDLNYCTHHKPCKNGATCTNTGQGSYTCSCRPGYTGATCELGIDECDPSPCKNGGSCTDLENSYSCTCPPGFYGKICELSAMTCADGPCFNGGRCSDSPDGGYSCRCPVGYSGFNCEKKIDYCSSSPCSNGAKCVDLGDAYLCRCQAGFSGRHCDDNVDDCASSPCANGGTCRDGVNDFSCTCPPGYTGRNCSAPVSRCEHAPCHNGATCHERGHRYVCECARGYGGPNCQFLLPELPPGPAVVDLTEKLEGQGGPFPW

SEQ ID NO: 1166 - protein, 466 aa, synthetic construct
  REGION 1..466: note = DLL3 (Q9NYJ7) ECD
AGVFELQIHSFGPGPGPGAPRSPCSARLPCRLFFRVCLKPGLSEEAAESPCALGAALSARGPVYTEQPGAPAPDLPLPDGLLQVPFRDAWPGTFSFIIETWREELGDQIGGPAWSLLARVAGRRRLAAGGPWARDIQRAGAWELRFSYRARCEPPAVGTACTRLCRPRSAPSRCGPGLRPCAPLEDECEAPLVCRAGCSPEHGFCEQPGECRCLEGWTGPLCTVPVSTSSCLSPRGPSSATTGCLVPGPGPCDGNPCANGGSCSETPRSFECTCPRGFYGLRCEVSGVTCADGPCFNGGLCVGGADPDSAYICHCPPGFQGSNCEKRVDRCSLQPCRNGGLCLDLGHALRCRCRAGFAGPRCEHDLDDCAGRACANGGTCVEGGGAHRCSCALGFGGRDCRERADPCAARPCAHGGRCYAHFSGLVCACAPGYMGARCEFPVHPDGASALPAAPPGLRPGDPQRYL

SEQ ID NO: 1167 - protein, 503 aa, synthetic construct
  REGION 1..503: note = DLL4 (Q9NR61) ECD
SGVFQLQLQEFINERGVLASGRPCEPGCRTFFRVCLKHFQAVVSPGPCTFGTVSTPVLGTNSFAVRDDSSGGGRNPLQLPFNFTWPGTFSLIIEAWHAPGDDLRPEALPPDALISKIAIQGSLAVGQNWLLDEQTSTLTRLRYSYRVICSDNYYGDNCSRLCKKRNDHFGHYVCQPDGNLSCLPGWTGEYCQQPICLSGCHEQNGYCSKPAECLCRPGWQGRLCNECIPHNGCRHGTCSTPWQCTCDEGWGGLFCDQDLNYCTHHSPCKNGATCSNSGQRSYTCTCRPGYTGVDCELELSECDSNPCRNGGSCKDQEDGYHCLCPPGYYGLHCEHSTLSCADSPCFNGGSCRERNQGANYACECPPNFTGSNCEKKVDRCTSNPCANGGQCLNRGPSRMCRCRPGFTGTYCELHVSDCARNPCAHGGTCHDLENGLMCTCPAGFSGRRCEVRTSIDACASSPCFNRATCYTDLSTDTFVCNCPYGFVGSRCEFPVGLPPSFPW

SEQ ID NO: 1168 - protein, 606 aa, synthetic construct
  REGION 1..606: note = DNER (Q8NFT8) ECD
NPVPAAPLSAPGPCAAQPCRNGGVCTSRPEPDPQHPAPAGEPGYSCTCPAGISGANCQLVADPCASNPCHHGNCSSSSSSSSDGYLCICNEGYEGPNCEQALPSLPATGWTESMAPRQLQPVPATQEPDKILPRSQATVTLPTWQPKTGQKVVEMKWDQVEVIPDIACGNASSNSSAGGRLVSFEVPQNTSVKIRQDATASLILLWKVTATGFQQCSLIDGRSVTPLQASGGLVLLEEMLALGNNHFIGFVNDSVTKSIVALRLTLVVKVSTCVPGESHANDLECSGKGKCTTKPSEATFSCTCEEQYVGTFCEEYDACQRKPCQNNASCIDANEKQDGSNFTCVCLPGYTGELCQSKIDYCILDPCRNGATCISSLSGFTCQCPEGYFGSACEEKVDPCASSPCQNNGTCYVDGVHFTCNCSPGFTGPTCAQLIDFCALSPCAHGTCRSVGTSYKCLCDPGYHGLYCEEEYNECLSAPCLNAATCRDLVNGYECVCLAEYKGTHCELYKDPCANVSCLNGATCDSDGLNGTCICAPGFTGEECDIDINECDSNPCHHGGSCLDQPNGYNCHCPHGWVGANCEIHLQWKSGHMAESLTNMPRHSLY

SEQ ID NO: 1169 - protein, 419 aa, synthetic construct
  REGION 1..419: note = DPCR1 (Q3MIW9) ECD
TTFQEYQKTGELSTSDHIFPLTPGLVYSIPFDHIVLHSGQRPPELPKSTEIHEQKRHCNTTRHSKPTDKPTGNSKTIDHKSSTDNHEAPPTSEENSSNQGKDPMIRNQRSVDPADSTTTHKESAGKKHITPAPKSKINCRKSTTGKSTVTRKSDKTGRPLEKSMSTLDKTSTSSHKTTTSFHNSGNSQTKQKSTSFPEKITAASKTTYKTTGTPEESEKTEDSRTTVASDKLLTKTTKNIQETISANELTQSLAEPTEHGGRTANENNTPSPAEPTENRERTANENKKTICTKGKNTPVPEKPTENLGNTTLTTETIKAPVKSTENPEKTAAVTKTIKPSVKVTGDKSLTTTSSHLNKTEVTHQVPTGSFTLITSRTKLSSITSEATGNESHPYLNKDGSQKGIHAGQMGENDSFPAWA

SEQ ID NO: 1170 - protein, 557 aa, synthetic construct
  REGION 1..557: note = DSC1 (Q08554) ECD
RWAPIPASLMENSLGPFPQHVQQIQSDAAQNYTIFYSISGPGVDKEPFNLFYIEKDTGDIFCTRSIDREKYEQFALYGYATTADGYAPEYPLPLIIKIEDDNDNAPYFEHRVTIFTVPENCRSGTSVGKVTATDLDEPDTLHTRLKYKILQQIPDHPKHFSIHPDTGVITTTTPFLDREKCDTYQLIMEVRDMGGQPFGLFNTGTITISLEDENDNPPSFTETSYVTEVEENRIDVEILRMKVQDQDLPNTPHSKAVYKILQGNENGNFIISTDPNTNEGVLCVVKPLNYEVNRQVILQVGVINEAQFSKAASSQTPTMCTTTVTVKIIDSDEGPECHPPVKVIQSQDGFPAGQELLGYKALDPEISSGEGLRYQKLGDEDNWFEINQHTGDLRTLKVLDRESKFVKNNQYNISVVAVDAVGRSCTGTLVVHLDDYNDHAPQIDKEVTICQNNEDFAVLKPVDPDGPENGPPFQFFLDNSASKNWNIEEKDGKTAILRQRQNLDYNYYSVPIQIKDRHGLVATHMLTVRVCDCSTPSECRMKDKSTRDVRPNVILGR

SEQ ID NO: 1171 - protein, 559 aa, synthetic construct
  REGION 1..559: note = DSC2 (Q02487) ECD
RWAPIPCSMLENSLGPFPLFLQQVQSDTAQNYTIYYSIRGPGVDQEPRNLFYVERDTGNLYCTRPVDREQYESFEIIAFATTPDGYTPELPLPLIIKIEDENDNYPIFTEETYTFTIFENCRVGTTVGQVCATDKDEPDTMHTRLKYSIIGQVPPSPTLFSMHPTTGVITTTSSQLDRELIDKYQLKIKVQDMDGQYFGLQTTSTCIINIDDVNDHLPTFTRTSYVTSVEENTVDVEILRVTVEDKDLVNTANWRANYTILKGNENGNFKIVTDAKTNEGVLCVVKPLNYEEKQQMILQIGVVNEAPFSREASPRSAMSTATVTVNVEDQDEGPECNPPIQTVRMKENAEVGTTSNGYKAYDPETRSSSGIRYKKLTDPTGWVTIDENTGSIKVFRSLDREAETIKNGIYNITVLASDQGGRTCTGTLGIILQDVNDNSPFIPKKTVIICKPTMSSAEIVAVDPDEPIHGPPFDFSLESSTSEVQRMWRLKAINDTAARLSYQNDPPFGSYVVPITVRDRLGMSSVTSLDVTLCDCITENDCTHRVDPRIGGGGVQLGK

SEQ ID NO: 1172 - protein, 555 aa, synthetic construct
  REGION 1..555: note = DSC3 (Q14574) ECD
RWAPIPCSMQENSLGPFPLFLQQVESDAAQNYTVFYSISGRGVDKEPLNLFYIERDTGNLFCTRPVDREEYDVFDLIAYASTADGYSADLPLPLPIRVEDENDNHPVFTEAIYNFEVLESSRPGTTVGVVCATDRDEPDTMHTRLKYSILQQTPRSPGLFSVHPSTGVITTVSHYLDREVVDKYSLIMKVQDMDGQFFGLIGTSTCIITVTDSNDNAPTFRQNAYEAFVEENAFNVEILRIPIEDKDLINTANWRVNFTILKGNENGHFKISTDKETNEGVLSVVKPLNYEENRQVNLEIGVNNEAPFARDIPRVTALNRALVTVHVRDLDEGPECTPAAQYVRIKENLAVGSKINGYKAYDPENRNGNGLRYKKLHDPKGWITIDEISGSIITSKILDREVETPKNELYNITVLAIDKDDRSCTGTLAVNIEDVNDNPPEILQEYVVICKPKMGYTDILAVDPDEPVHGAPFYFSLPNTSPEISRLWSLTKVNDTAARLSYQKNAGFQEYTIPITVKDRAGQAATKLLRVNLCECTHPTQCRATSRSTGVILGK

SEQ ID NO: 1173 - protein, 1578 aa, synthetic construct
  REGION 1..1578: note = DSCAM (O60469) ECD
EDLHSSLYFVNASLQEVVFASTTGTLVPCPAAGIPPVTLRWYLATGEEIYDVPGIRHVHPNGTLQIFPFPPSSFSTLIHDNTYYCTAENPSGKIRSQDVHIKAVLREPYTVRVEDQKTMRGNVAVFKCIIPSSVEAYITVVSWEKDTVSLVSGSRFLITSTGALYIKDVQNEDGLYNYRCITRHRYTGETRQSNSARLFVSDPANSAPSILDGFDHRKAMAGQRVELPCKALGHPEPDYRWLKDNMPLELSGRFQKTVTGLLIENIRPSDSGSYVCEVSNRYGTAKVIGRLYVKQPLKATISPRKVKSSVGSQVSLSCSVTGTEDQELSWYRNGEILNPGKNVRITGINHENLIMDHMVKSDGGAYQCFVRKDKLSAQDYVQVVLEDGTPKIISAFSEKVVSPAEPVSLMCNVKGTPLPTITWTLDDDPILKGGSHRISQMITSEGNVVSYLNISSSQVRDGGVYRCTANNSAGVVLYQARINVRGPASIRPMKNITAIAGRDTYIHCRVIGYPYYSIKWYKNSNLLPFNHRQVAFENNGTLKLSDVQKEVDEGEYTCNVLVQPQLSTSQSVHVTVKVPPFIQPFEFPRFSIGQRVFIPCVVVSGDLPITITWQKDGRPIPGSLGVTIDNIDFTSSLRISNLSLMHNGNYTCIARNEAAAVEHQSQLIVRVPPKFVVQPRDQDGIYGKAVILNCSAEGYPVPTIVWKFSKGAGVPQFQPIALNGRIQVLSNGSLLIKHVVEEDSGYYLCKVSNDVGADVSKSMYLTVKIPAMITSYPNTTLATQGQKKEMSCTAHGEKPIIVRWEKEDRIINPEMARYLVSTKEVGEEVISTLQILPTVREDSGFFSCHAINSYGEDRGIIQLTVQEPPDPPEIEIKDVKARTITLRWTMGFDGNSPITGYDIECKNKSDSWDSAQRTKDVSPQLNSATIIDIHPSSTYSIRMYAKNRIGKSEPSNELTITADEAAPDGPPQEVHLEPISSQSIRVTWKAPKKHLQNGIIRGYQIGYREYSTGGNFQFNIISVDTSGDSEVYTLDNLNKFTQYGLVVQACNRAGTGPSSQEIITTTLEDVPSYPPENVQAIATSPESISISWSTLSKEALNGILQGFRVIYWANLMDGELGEIKNITTTQPSLELDGLEKYTNYSIQVLAFTRAGDGVRSEQIFTRTKEDVPGPPAGVKAAAASASMVFVSWLPPLKLNGIIRKYTVFCSHPYPTVISEFEASPDSFSYRIPNLSRNRQYSVWVVAVTSAGRGNSSEIITVEPLAKAPARILTFSGTVTTPWMKDIVLPCKAVGDPSPAVKWMKDSNGTPSLVTIDGRRSIFSNGSFIIRTVKAEDSGYYSCIANNNWGSDEIILNLQVQVPPDQPRLTVSKTTSSSITLSWLPGDNGGSSIRGYILQYSEDNSEQWGSFPISPSERSYRLENLKCGTWYKFTLTAQNGVGPGRISEIIEAKTLGKEPQFSKEQELFASINTTRVRLNLIGWNDGGCPITSFTLEYRPFGTTVWTTAQRTSLSKSYILYDLQEATWYELQMRVCNSAGCAEKQANFATLNYDGSTIPPLIKSVVQNEEGLTTNEGLKM

SEQ ID NO: 1174 - protein, 1573 aa, synthetic construct
  REGION 1..1573: note = DSCAML1 (Q8TD84) ECD
EDVGTSLYFVNDSLQQVTFSSSVGVVVPCPAAGSPSAALRWYLATGDDIYDVPHIRHVHANGTLQLYPFSPSAFNSFIHDNDYFCTAENAAGKIRSPNIRVKAVFREPYTVRVEDQRSMRGNVAVFKCLIPSSVQEYVSVVSWEKDTVSIIPEHRFFITYHGGLYISDVQKEDALSTYRCITKHKYSGETRQSNGARLSVTDPAESIPTILDGFHSQEVWAGHTVELPCTASGYPIPAIRWLKDGRPLPADSRWTKRITGLTISDLRTEDSGTYICEVTNTFGSAEATGILMVIDPLHVTLTPKKLKTGIGSTVILSCALTGSPEFTIRWYRNTELVLPDEAISIRGLSNETLLITSAQKSHSGAYQCFATRKAQTAQDFAIIALEDGTPRIVSSFSEKVVNPGEQFSLMCAAKGAPPPTVTWALDDEPIVRDGSHRTNQYTMSDGTTISHMNVTGPQIRDGGVYRCTARNLVGSAEYQARINVRGPPSIRAMRNITAVAGRDTLINCRVIGYPYYSIKWYKDALLLPDNHRQVVFENGTLKLTDVQKGMDEGEYLCSVLIQPQLSISQSVHVAVKVPPLIQPFEFPPASIGQLLYIPCVVSSGDMPIRITWRKDGQVIISGSGVTIESKEFMSSLQISSVSLKHNGNYTCIASNAAATVSRERQLIVRVPPRFVVQPNNQDGIYGKAGVLNCSVDGYPPPKVMWKHAKGSGNPQQYHPVPLTGRIQILPNSSLLIRHVLEEDIGYYLCQASNGVGTDISKSMFLTVKIPAMITSHPNTTIAIKGHAKELNCTARGERPIIIRWEKGDTVIDPDRVMRYAIATKDNGDEVVSTLKLKPADRGDSVFFSCHAINSYGEDRGLIQLTVQEPPDPPELEIREVKARSMNLRWTQRFDGNSIITGFDIEYKNKSDSWDFKQSTRNISPTINQANIVDLHPASVYSIRMYSFNKIGRSEPSKELTISTEEAAPDGPPMDVTLQPVTSQSIQVTWKAPKKELQNGVIRGYQIGYRENSPGSNGQYSIVEMKATGDSEVYTLDNLKKFAQYGVVVQAFNRAGTGPSSSEINATTLEDVPSQPPENVRALSITSDVAVISWSEPPRSTLNGVLKGYRVIFWSLYVDGEWGEMQNITTTRERVELRGMEKFTNYSVQVLAYTQAGDGVRSSVLYIQTKEDVPGPPAGIKAVPSSASSVVVSWLPPTKPNGVIRKYTIFCSSPGSGQPAPSEYETSPEQLFYRIAHLNRGQQYLLWVAAVTSAGRGNSSEKVTIEPAGKAPAKIISFGGTVTTPWMKDVRLPCNSVGDPAPAVKWTKDSEDSAIPVSMDGHRLIHTNGTLLLRAVKAEDSGYYTCTATNTGGFDTIIVNLLVQVPPDQPRLTVSKTSASSITLTWIPGDNGGSSIRGFVLQYSVDNSEEWKDVFISSSERSFKLDSLKCGTWYKVKLAAKNSVGSGRISEIIEAKTHGREPSFSKDQHLFTHINSTHARLNLQGWNNGGCPITAIVLEYRPKGTWAWQGLRANSSGEVFLTELREATWYELRMRACNSAGCGNETAQFATLDYDGSTIPPIKSAQGEGDDVKK

SEQ ID NO: 1175 - protein, 499 aa, synthetic construct
  REGION 1..499: note = DSG1 (Q02413) ECD
EWIKFAAACREGEDNSKRNPIAKIHSDCAANQQVTYRISGVGIDQPPYGIFVINQKTGEINITSIVDREVTPFFIIYCRALNSMGQDLERPLELRVRVLDINDNPPVFSMATFAGQIEENSNANTLVMILNATDADEPNNLNSKIAFKIIRQEPSDSPMFIINRNTGEIRTMNNFLDREQYGQYALAVRGSDRDGGADGMSAECECNIKILDVNDNIPYMEQSSYTIEIQENTLNSNLLEIRVIDLDEEFSANWMAVIFFISGNEGNWFEIEMNERTNVGILKVVKPLDYEAMQSLQLSIGVRNKAEFHHSIMSQYKLKASAISVTVLNVIEGPVFRPGSKTYVVTGNMGSNDKVGDFVATDLDTGRPSTTVRYVMGNNPADLLAVDSRTGKLTLKNKVTKEQYNMLGGKYQGTILSIDDNLQRTCTGTININIQSFGNDDRTNTEPNTKITTNTGRQESTSSTNYDTSTTSTDSSQVYSSEPGNGAKDLLSDNVHFGP

SEQ ID NO: 1176 - protein, 560 aa, synthetic construct
  REGION 1..560: note = DSG2 (Q14126) ECD
AWITAPVALREGEDLSKKNPIAKIHSDLAEERGLKITYKYTGKGITEPPFGIFVFNKDTGELNVTSILDREETPFFLLTGYALDARGNNVEKPLELRIKVLDINDNEPVFTQDVFVGSVEELSAAHTLVMKINATDADEPNTLNSKISYRIVSLEPAYPPVFYLNKDTGEIYTTSVTLDREEHSSYTLTVEARDGNGEVTDKPVKQAQVQIRILDVNDNIPVVENKVLEGMVEENQVNVEVTRIKVFDADEIGSDNWLANFTFASGNEGGYFHIETDAQTNEGIVTLIKEVDYEEMKNLDFSVIVANKAAFHKSIRSKYKPTPIPIKVKVKNVKEGIHFKSSVISIYVSESMDRSSKGQIIGNFQAFDEDTGLPAHARYVKLEDRDNWISVDSVTSEIKLAKLPDFESRYVQNGTYTVKIVAISEDYPRKTITGTVLINVEDINDNCPTLIEPVQTICHDAEYVNVTAEDLDGHPNSGPFSFSVIDKPPGMAEKWKIARQESTSVLLQQSEKKLGRSEIQFLISDNQGFSCPEKQVLTLTVCECLHGSGCREAQHDSYVG

SEQ ID NO: 1177 - protein, 566 aa, synthetic construct
  REGION 1..566: note = DSG3 (P32926) ECD
EWVKFAKPCREGEDNSKRNPIAKITSDYQATQKITYRISGVGIDQPPFGIFVVDKNTGDINITAIVDREETPSFLITCRALNAQGLDVEKPLILTVKILDINDNPPVFSQQIFMGEIEENSASNSLVMILNATDADEPNHLNSKIAFKIVSQEPAGTPMFLLSRNTGEVRTLTNSLDREQASSYRLVVSGADKDGEGLSTQCECNIKVKDVNDNFPMFRDSQYSARIEENILSSELLRFQVTDLDEEYTDNWLAVYFFTSGNEGNWFEIQTDPRTNEGILKVVKALDYEQLQSVKLSIAVKNKAEFHQSVISRYRVQSTPVTIQVINVREGIAFRPASKTFTVQKGISSKKLVDYILGTYQAIDEDTNKAASNVKYVMGRNDGGYLMIDSKTAEIKFVKNMNRDSTFIVNKTITAEVLAIDEYTGKTSTGTVYVRVPDFNDNCPTAVLEKDAVCSSSPSVVVSARTLNNRYTGPYTFALEDQPVKLPAVWSITTLNATSALLRAQEQIPPGVYHISLVLTDSQNNRCEMPRSLTLEVCQCDNRGICGTSYPTTSPGTRYGRPHSGR

SEQ ID NO: 1178 - protein, 582 aa, synthetic construct
  REGION 1..582: note = DSG4 (Q86SJ6) ECD
EWIKFAAACREGEDNSKRNPIAKIRSDCESNQKITYRISGVGIDRPPYGVFTINPRTGEINITSVVDREITPLFLIYCRALNSRGEDLERPLELRVKVMDINDNAPVFSQSVYTASIEENSDANTLVVKLCATDADEENHLNSKIAYKIVSQEPSGAPMFILNRYTGEVCTMSSFLDREQHSMYNLVVRGSDRDGAADGLSSECDCRIKVLDVNDNFPTLEKTSYSASIEENCLSSELIRLQAIDLDEEGTDNWLAQYLILSGNDGNWFDIQTDPQTNEGILKVVKMLDYEQAPNIQLSIGVKNQADFHYSVASQFQMHPTPVRIQVVDVREGPAFHPSTMAFSVREGIKGSSLLNYVLGTYTAIDLDTGNPATDVRYIIGHDAGSWLKIDSRTGEIQFSREFDKKSKYIINGIYTAEILAIDDGSGKTATGTICIEVPDINDYCPNIFPERRTICIDSPSVLISVNEHSYGSPFTFCVVDEPPGIADMWDVRSTNATSAILTAKQVLSPGFYEIPILVKDSYNRACELAQMVQLYACDCDDNHMCLDSGAAGIYTEDITGDTYGPVTEDQAGVSNVGLGPA

SEQ ID NO: 1179 - protein, 100 aa, synthetic construct
  REGION 1..100: note = ECSCR (Q19T08) ECD
QPTMTQTSSSQGGLGGLSLTTEPVSSNPGYIPSSEANRPSHLSSTGTPGAGVPSSGRDGGTSRDTFQTVPPNSTTMSLSMREDATILPSPTSETVLTVAA

SEQ ID NO: 1180 - protein, 161 aa, synthetic construct
  REGION 1..161: note = EDAR (Q9UNE0) ECD
EYSNCGENEYYNQTTGLCQECPPCGPGEEPYLSCGYGTKDEDYGCVPCPAEKFSKGGYQICRRHKDCEGFFRATVLTPGDMENDAECGPCLPGYYMLENRPRNIYGMVCYSCLLAPPNTKECVGATSGASANFPGTSGSSTLSPFQHAHKELSGQGHLATA

SEQ ID NO: 1181 - protein, 210 aa, synthetic construct
  REGION 1..210: note = EFNB1 (P98172) ECD
LAKNLEPVSWSSLNPKFLSGKGLVIYPKIGDKLDIICPRAEAGRPYEYYKLYLVRPEQAAACSTVLDPNVLVTCNRPEQEIRFTIKFQEFSPNYMGLEFKKHHDYYITSTSNGSLEGLENREGGVCRTRTMKIIMKVGQDPNAVTPEQLTTSRPSKEADNTVKMATQAPGSRGSLGDSDGKHETVNQEEKSGPGASGGSSGDPDGFFNSK

SEQ ID NO: 1182 - protein, 202 aa, synthetic construct
  REGION 1..202: note = EFNB2 (P52799) ECD
IVLEPIYWNSSNSKFLPGQGLVLYPQIGDKLDIICPKVDSKTVGQYEYYKVYMVDKDQADRCTIKKENTPLLNCAKPDQDIKFTIKFQEFSPNLWGLEFQKNKDYYIISTSNGSLEGLDNQEGGVCQTRAMKILMKVGQDASSAGSTRNKDPTRRPELEAGTNGRSSTTSPFVKPNPGSSTDGNSAGHSGNNILGSEVALFA

SEQ ID NO: 1183 - protein, 199 aa, synthetic construct
  REGION 1..199: note = EFNB3 (Q15768) ECD
LSLEPVYWNSANKRFQAEGGYVLYPQIGDRLDLLCPRARPPGPHSSPNYEFYKLYLVGGAQGRRCEAPPAPNLLLTCDRPDLDLRFTIKFQEYSPNLWGHEFRSHHDYYIIATSDGTREGLESLQGGVCLTRGMKVLLRVGQSPRGGAVPRKPVSEMPMERDRGAAHSLEPGKENLPGDPTSNATSRGAEGPLPPPSMP

SEQ ID NO: 1184 - protein, 1010 aa, synthetic construct
  REGION 1..1010: note = EGF (P01133) ECD
PQHWSCPEGTLAGNGNSTCVGPAPFLIFSHGNSIFRIDTEGTNYEQLVVDAGVSVIMDFHYNEKRIYWVDLERQLLQRVFLNGSRQERVCNIEKNVSGMAINWINEEVIWSNQQEGIITVTDMKGNNSHILLSALKYPANVAVDPVERFIFWSSEVAGSLYRADLDGVGVKALLETSEKITAVSLDVLDKRLFWIQYNREGSNSLICSCDYDGGSVHISKHPTQHNLFAMSLFGDRIFYSTWKMKTIWIANKHTGKDMVRINLHSSFVPLGELKVVHPLAQPKAEDDTWEPEQKLCKLRKGNCSSTVCGQDLQSHLCMCAEGYALSRDRKYCEDVNECAFWNHGCTLGCKNTPGSYYCTCPVGFVLLPDGKRCHQLVSCPRNVSECSHDCVLTSEGPLCFCPEGSVLERDGKTCSGCSSPDNGGCSQLCVPLSPVSWECDCFPGYDLQLDEKSCAASGPQPFLLFANSQDIRHMHFDGTDYGTLLSQQMGMVYALDHDPVENKIYFAHTALKWIERANMDGSQRERLIEEGVDVPEGLAVDWIGRRFYWTDRGKSLIGRSDLNGKRSKIITKENISQPRGIAVHPMAKRLFWTDTGINPRIESSSLQGLGRLVIASSDLIWPSGITIDFLTDKLYWCDAKQSVIEMANLDGSKRRRLTQNDVGHPFAVAVFEDYVWFSDWAMPSVMRVNKRTGKDRVRLQGSMLKPSSLVVVHPLAKPGADPCLYQNGGCEHICKKRLGTAWCSCREGFMKASDGKTCLALDGHQLLAGGEVDLKNQVTPLDILSKTRVSEDNITESQHMLVAEIMVSDQDDCAPVGCSMYARCISEGEDATCQCLKGFAGDGKLCSDIDECEMGVPVCPPASSKCINTEGGYVCRCSEGYQGDGIHCLDIDECQLGEHSCGENASCTNTEGGYTCMCAGRLSEPGLICPDSTPPPHLREDDHHYSVRNSDSECPLSHDGYCLHDGVCMYIEALDKYACNCVVGYIGERCQYRDLKWWELRHAGHGQQQK

SEQ ID NO: 1185 - protein, 621 aa, synthetic construct [sequence omitted]

SEQ ID NO: 1186 - protein, 391 aa, synthetic construct
  REGION 1..391: note = ELFN1 (P0C7U0) ECD
DCWLIEGDKGFVWLAICSQNQPPYEAIPQQINSTIVDLRLNENRIRSVQYASLSRFGNLTYLNLTKNEIGYIEDGAFSGQFNLQVLQLGYNRLRNLTEGMLRGLGKLEYLYLQANLIEVVMASSFWECPNIVNIDLSMNRIQQLNSGTFAGLAKLSVCELYSNPFYCSCELLGFLRWLAAFTNATQTYDRMQCESPPVYSGYYLLGQGRRGHRSILSKLQSVCTEDSYAAEVVGPPRPASGRSQPGRSPPPPPPPEPSDMPCADDECFSGDGTTPLVALPTLATQAEARPLIKVKQLTQNSATITVQLPSPFHRMYTLEHFNNSKASTVSRLTKAQEEIRLTNLFTLTNYTYCVVSTSAGLRHNHTCLTICLPRLPSPPGPVPSPSTATHY

SEQ ID NO: 1187 - protein, 375 aa, synthetic construct
  REGION 1..375: note = ELFN2 (Q5R3F8) ECD
DCWLIEGDKGYVWLAICSQNQPPYETIPQHINSTVHDLRLNENKLKAVLYSSLNRFGNLTDLNLTKNEISYIEDGAFLGQSSLQVLQLGYNKLSNLTEGMLRGMSRLQFLFVQHNLIEVVTPTAFSECPSLISIDLSSNRLSRLDGATFASLASLMVCELAGNPFNCECDLFGFLAWLVVFNNVTKNYDRLQCESPREFAGYPLLVPRPYHSLNAITVLQAKCRNGSLPARPVSHPTPYSTDAQREPDENSGFNPDEILSVEPPASSTTDASAGPAIKLHHVTFTSATLVVIIPHPYSKMYILVQYNNSYFSDVMTLKNKKEIVTLDKLRAHTEYTFCVTSLRNSRRFNHTCLTFTTRDPVPGDLAPSTSTTTHY

SEQ ID NO: 1188 - protein, 228 aa, synthetic construct
  REGION 1..228: note = EMB (Q6PCB8) ECD
DGSAPDSPFTSPPLREEIMANNFSLESHNISLTEHSSMPVEKNITLERPSNVNLTCQFTTSGDLNAVNVTWKKDGEQLENNYLVSATGSTLYTQYRFTIINSKQMGSYSCFFREEKEQRGTFNFKVPELHGKNKPLISYVGDSTVLTCKCQNCFPLNWTWYSSNGSVKVPVGVQMNKYVINGTYANETKLKITQLLEEDGESYWCRALFQLGESEEHIELVVLSYLVP

SEQ ID NO: 1189 - protein, 172 aa, synthetic construct
  REGION 1..172: note = EMCN (Q9ULC0) ECD
NSTGVLEAANNSLVVTTTKPSITTPNTESLQKNVVTPTTGTTPKGTITNELLKMSLMSTATFLTSKDEGLKATTTDVRKNDSIISNVTVTSVTLPNAVSTLQSSKPKTETQSSIKTTEIPGSVLQPDASPSKTGTLTSIPVTIPENTSQSQVIGTEGGKNASTSATSRSYSS

SEQ ID NO: 1190 - protein, 561 aa, synthetic construct
  REGION 1..561: note = ENG (P17813) ECD
ETVHCDLQPVGPERGEVTYTTSQVSKGCVAQAPNAILEVHVLFLEFPTGPSQLELTLQASKQNGTWPREVLLVLSVNSSVFLHLQALGIPLHLAYNSSLVTFQEPPGVNTTELPSFPKTQILEWAAERGPITSAAELNDPQSILLRLGQAQGSLSFCMLEASQDMGRTLEWRPRTPALVRGCHLEGVAGHKEAHILRVLPGHSAGPRTVTVKVELSCAPGDLDAVLILQGPPYVSWLIDANHNMQIWTTGEYSFKIFPEKNIRGFKLPDTPQGLLGEARMLNASIVASFVELPLASIVSLHASSCGGRLQTSPAPIQTTPPKDTCSPELLMSLIQTKCADDAMTLVLKKELVAHLKCTITGLTFWDPSCEAEDRGDKFVLRSAYSSCGMQVSASMISNEAVVNILSSSSPQRKKVHCLNMDSLSFQLGLYLSPHFLQASNTIEPGQQSFVQVRVSPSVSEFLLQLDSCHLDLGPEGGTVELIQGRAAKGNCVSLLSPSPEGDPRFSFLLHFYTVPIPKTGTLSCTVALRPKTGSQDQEVHRTVFMRLNIISPDLSGCTSKG

SEQ ID NO: 1191 - protein, 392 aa, synthetic construct
  REGION 1..392: note = ENPP4 (Q9Y6X5) ECD
FRSDSSSSLPPKLLLVSFDGFRADYLKNYEFPHLQNFIKEGVLVEHVKNVFITKTFPNHYSIVTGLYEESHGIVANSMYDAVTKKHFSDSNDKDPFWWNEAVPIWVTNQLQENRSSAAAMWPGTDVPIHDTISSYFMNYNSSVSFEERLNNITMWLNNSNPPVTFATLYWEEPDASGHKYGPEDKENMSRVLKKIDDLIGDLVQRLKMLGLWENLNVIITSDHGMTQCSQDRLINLDSCIDHSYYTLIDLSPVAAILPKINRTEVYNKLKNCSPHMNVYLKEDIPNRFYYQHNDRIQPIILVADEGWTIVLNESSQKLGDHGYDNSLPSMHPFLAAHGPAFHKGYKHSTINIVDIYPMMCHILGLKPHPNNGTFGHTKCLLVDQWCINLPEA

SEQ ID NO: 1192 - protein, 407 aa, synthetic construct
  REGION 1..407: note = ENPP5 (Q9UJA9) ECD
PDQQKVLLVSFDGFRWDYLYKVPTPHFHYIMKYGVHVKQVTNVFITKTYPNHYTLVTGLFAENHGIVANDMFDPIRNKSFSLDHMNIYDSKFWEEATPIWITNQRAGHTSGAAMWPGTDVKIHKRFPTHYMPYNESVSFEDRVAKIIEWFTSKEPINLGLLYWEDPDDMGHHLGPDSPLMGPVISDIDKKLGYLIQMLKKAKLWNTLNLIITSDHGMTQCSEERLIELDQYLDKDHYTLIDQSPVAAILPKEGKFDEVYEALTHAHPNLTVYKKEDVPERWHYKYNSRIQPIIAVADEGWHILQNKSDDFLLGNHGYDNALADMHPIFLAHGPAFRKNFSKEAMNSTDLYPLLCHLLNITAMPHNGSFWNVQDLLNSAMPRVVPYTQSTILLPGSVKPAEYDQEGSY

SEQ ID NO: 1193 - protein, 242 aa, synthetic construct
  REGION 1..242: note = EPCAM (P16422) ECD
QEECVCENYKLAVNCFVNNNRQCQCTSVGAQNTVICSKLAAKCLVMKAEMNGSKLGRRAKPEGALQNNDGLYDPDCDESGLFKAKQCNGTSMCWCVNTAGVRRTDKDTEITCSERVRTYWIIIELKHKAREKPYDSKSLRTALQKEITTRYQLDPKFITSILYENNVITIDLVQNSSQKTQNDVDIADVAYYFEKDVKGESLFHSKKMDLTVNGEQLDLDPGQTLIYYVDEKAPEFSMQGLK

SEQ ID NO: 1194 - protein, 88 aa, synthetic construct
  REGION 1..88: note = EPGN (Q6UW88) ECD
AAVTVTPPITAQQGNWTVNKTEADNIEGPIALKFSHLCLEDHNSYCINGACAFHHELEKAICRCFTGYTGERCEHLTLTSYAVDSYEK

SEQ ID NO: 1195 - protein, 522 aa, synthetic construct
  REGION 1..522: note = EPHA1 (P21709) ECD
KEVTLMDTSKAQGELGWLLDPPKDGWSEQQQILNGTPLYMYQDCPMQGRRDTDHWLRSNWIYRGEEASRVHVELQFTVRDCKSFPGGAGPLGCKETFNLLYMESDQDVGIQLRRPLFQKVTTVAADQSFTIRDLVSGSVKLNVERCSLGRLTRRGLYLAFHNPGACVALVSVRVFYQRCPETLNGLAQFPDTLPGPAGLVEVAGTCLPHARASPRPSGAPRMHCSPDGEWLVPVGRCHCEPGYEEGGSGEACVACPSGSYRMDMDTPHCLTCPQQSTAESEGATICTCESGHYRAPGEGPQVACTGPPSAPRNLSFSASGTQLSLRWEPPADTGGRQDVRYSVRCSQCQGTAQDGGPCQPCGVGVHFSPGARGLTTPAVHVNGLEPYANYTFNVEAQNGVSGLGSSGHASTSVSISMGHAESLSGLSLRLVKKEPRQLELTWAGSRPRSPGANLTYELHVLNQDEERYQMVLEPRVLLTELQPDTTYIVRVRMLTPLGPGPFSPDHEFRTSPPVSRGLTGGE

SEQ ID NO: 1196 - protein, 532 aa, synthetic construct
  REGION 1..532: note = EPHA10 (Q5JZY3) ECD
EEVILLDSKASQAELGWTALPSNGWEEISGVDEHDRPIRTYQVCNVLEPNQDNWLQTGWISRGRGQRIFVELQFTLRDCSSIPGAAGTCKETFNVYYLETEADLGRGRPRLGGSRPRKIDTIAADESFTQGDLGERKMKLNTEVREIGPLSRRGFHLAFQDVGACVALVSVRVYYKQCRATVRGLATFPATAAESAFSTLVEVAGTCVAHSEGEPGSPPRMHCGADGEWLVPVGRCSCSAGFQERGDFCEACPPGFYKVSPRRPLCSPCPEHSRALENASTFCVCQDSYARSPTDPPSASCTRPPSAPRDLQYSLSRSPLVLRLRWLPPADSGGRSDVTYSLLCLRCGREGPAGACEPCGPRVAFLPRQAGLRERAATLLHLRPGARYTVRVAALNGVSGPAAAAGTTYAQVTVSTGPGAPWEEDEIRRDRVEPQSVSLSWREPIPAGAPGANDTEYEIRYYEKGQSEQTYSMVKTGAPTVTVTNLKPATRYVFQIRAASPGPSWEAQSFNPSIEVQTLGEAASGSRDQSPA

SEQ ID NO: 1197 - protein, 514 aa, synthetic construct
  REGION 1..514: note = EPHA2 (P29317) ECD
AQGKEVVLLDFAAAGGELGWLTHPYGKGWDLMQNIMNDMPIYMYSVCNVMSGDQDNWLRTNWVYRGEAERIFIELKFTVRDCNSFPGGASSCKETFNLYYAESDLDYGTNFQKRLFTKIDTIAPDEITVSSDFEARHVKLNVEERSVGPLTRKGFYLAFQDIGACVALLSVRVYYKKCPELLQGLAHFPETIAGSDAPSLATVAGTCVDHAVVPPGGEEPRMHCAVDGEWLVPIGQCLCQAGYEKVEDACQACSPGFFKFEASESPCLECPEHTLPSPEGATSCECEEGFFRAPQDPASMPCTRPPSAPHYLTAVGMGAKVELRWTPPQDSGGREDIVYSVTCEQCWPESGECGPCEASVRYSEPPHGLTRTSVTVSDLEPHMNYTFTVEARNGVSGLVTSRSFRTASVSINQTEPPKVRLEGRSTTSLSVSWSIPPPQQSRVWKYEVTYRKKGDSNSYNVRRTEGFSVTLDDLAPDTTYLVQVQALTQEGQGAGSKVHEFQTLSPEGSGNLAV

SEQ ID NO: 1198 - protein, 521 aa, synthetic construct
  REGION 1..521: note = EPHA3 (P29320) ECD
ELIPQPSNEVNLLDSKTIQGELGWISYPSHGWEEISGVDEHYTPIRTYQVCNVMDHSQNNWLRTNWVPRNSAQKIYVELKFTLRDCNSIPLVLGTCKETFNLYYMESDDDHGVKFREHQFTKIDTIAADESFTQMDLGDRILKLNTEIREVGPVNKKGFYLAFQDVGACVALVSVRVYFKKCPFTVKNLAMFPDTVPMDSQSLVEVRGSCVNNSKEEDPPRMYCSTEGEWLVPIGKCSCNAGYEERGFMCQACRPGFYKALDGNMKCAKCPPHSSTQEDGSMNCRCENNYFRADKDPPSMACTRPPSSPRNVISNINETSVILDWSWPLDTGGRKDVTFNIICKKCGWNIKQCEPCSPNVRFLPRQFGLTNTTVTVTDLLAHTNYTFEIDAVNGVSELSSPPRQFAAVSITTNQAAPSPVLTIKKDRTSRNSISLSWQEPEHPNGIILDYEVKYYEKQEQETSYTILRARGTNVTISSLKPDTIYVFQIRARTAAGYGTNSRKFEFETSPDSFSISGESSQ

SEQ ID NO: 1199 - protein, 528 aa, synthetic construct
  REGION 1..528: note = EPHA4 (P54764) ECD
VTGSRVYPANEVTLLDSRSVQGELGWIASPLEGGWEEVSIMDEKNTPIRTYQVCNVMEPSQNNWLRTDWITREGAQRVYIEIKFTLRDCNSLPGVMGTCKETFNLYYYESDNDKERFIRENQFVKIDTIAADESFTQVDIGDRIMKLNTEIRDVGPLSKKGFYLAFQDVGACIALVSVRVFYKKCPLTVRNLAQFPDTITGADTSSLVEVRGSCVNNSEEKDVPKMYCGADGEWLVPIGNCLCNAGHEERSGECQACKIGYYKALSTDATCAKCPPHSYSVWEGATSCTCDRGFFRADNDAASMPCTRPPSAPLNLISNVNETSVNLEWSSPQNTGGRQDISYNVVCKKCGAGDPSKCRPCGSGVHYTPQQNGLKTTKVSITDLLAHTNYTFEIWAVNGVSKYNPNPDQSVSVTVTTNQAAPSSIALVQAKEVTRYSVALAWLEPDRPNGVILEYEVKYYEKDQNERSYRIVRTAARNTDIKGLNPLTSYVFHVRARTAAGYGDFSEPLEVTTNTVPSRIIGDGANST

SEQ ID NO: 1200 - protein, 549 aa, synthetic construct
  REGION 1..549: note = EPHA5 (P54756) ECD
PASLAGCYSAPRRAPLWTCLLLCAALRTLLASPSNEVNLLDSRTVMGDLGWIAFPKNGWEEIGEVDENYAPIHTYQVCKVMEQNQNNWLLTSWISNEGASRIFIELKFTLRDCNSLPGGLGTCKETFNMYYFESDDQNGRNIKENQYIKIDTIAADESFTELDLGDRVMKLNTEVRDVGPLSKKGFYLAFQDVGACIALVSVRVYYKKCPSVVRHLAVFPDTITGADSSQLLEVSGSCVNHSVTDEPPKMHCSAEGEWLVPIGKCMCKAGYEEKNGTCQVCRPGFFKASPHIQSCGKCPPHSYTHEEASTSCVCEKDYFRRESDPPTMACTRPPSAPRNAISNVNETSVFLEWIPPADTGGRKDVSYYIACKKCNSHAGVCEECGGHVRYLPRQSGLKNTSVMMVDLLAHTNYTFEIEAVNGVSDLSPGARQYVSVNVTTNQAAPSPVTNVKKGKIAKNSISLSWQEPDRPNGIILEYEIKYFEKDQETSYTIIKSKETTITAEGLKPASVYVFQIRARTAAGYGVFSRRFEFETTPVFAASSDQSQIP

SEQ ID NO: 1201 - protein, 528 aa, synthetic construct
  REGION 1..528: note = EPHA6 (Q9UF33) ECD
WPGDCSHVSNNQVVLLDTTTVLGELGWKTYPLNGWDAITEMDEHNRPIHTYQVCNVMEPNQNNWLRTNWISRDAAQKIYVEMKFTLRDCNSIPWVLGTCKETFNLFYMESDESHGIKFKPNQYTKIDTIAADESFTQMDLGDRILKLNTEIREVGPIERKGFYLAFQDIGACIALVSVRVFYKKCPFTVRNLAMFPDTIPRVDSSSLVEVRGSCVKSAEERDTPKLYCGADGDWLVPLGRCICSTGYEEIEGSCHACRPGFYKAFAGNTKCSKCPPHSLTYMEATSVCQCEKGYFRAEKDPPSMACTRPPSAPRNVVFNINETALILEWSPPSDTGGRKDLTYSVICKKCGLDTSQCEDCGGGLRFIPRHTGLINNSVIVLDFVSHVNYTFEIEAMNGVSELSFSPKPFTAITVTTDQDAPSLIGVVRKDWASQNSIALSWQAPAFSNGAILDYEIKYYEKEHEQLTYSSTRSKAPSVIITGLKPATKYVFHIRVRTATGYSGYSQKFEFETGDETSDMAAEQGQILV

SEQ ID NO: 1202 - protein, 528 aa, synthetic construct
  REGION 1..528: note = EPHA7 (Q15375) ECD
QAAKEVLLLDSKAQQTELEWISSPPNGWEEISGLDENYTPIRTYQVCQVMEPNQNNWLRTNWISKGNAQRIFVELKFTLRDCNSLPGVLGTCKETFNLYYYETDYDTGRNIRENLYVKIDTIAADESFTQGDLGERKMKLNTEVREIGPLSKKGFYLAFQDVGACIALVSVKVYYKKCWSIIENLAIFPDTVTGSEFSSLVEVRGTCVSSAEEEAENAPRMHCSAEGEWLVPIGKCICKAGYQQKGDTCEPCGRGFYKSSSQDLQCSRCPTHSFSDKEGSSRCECEDGYYRAPSDPPYVACTRPPSAPQNLIFNINQTTVSLEWSPPADNGGRNDVTYRILCKRCSWEQGECVPCGSNIGYMPQQTGLEDNYVTVMDLLAHANYTFEVEAVNGVSDLSRSQRLFAAVSITTGQAAPSQVSGVMKERVLQRSVELSWQEPEHPNGVITEYEIKYYEKDQRERTYSTVKTKSTSASINNLKPGTVYVFQIRAFTAAGYGNYSPRLDVATLEEATGKMFEATAVSSEQNPV

SEQ ID NO: 1203 - protein, 515 aa, synthetic construct
  REGION 1..515: note = EPHA8 (P29322) ECD
ARGEVNLLDTSTIHGDWGWLTYPAHGWDSINEVDESFQPIHTYQVCNVMSPNQNNWLRTSWVPRDGARRVYAEIKFTLRDCNSMPGVLGTCKETFNLYYLESDRDLGASTQESQFLKIDTIAADESFTGADLGVRRLKLNTEVRSVGPLSKRGFYLAFQDIGACLAILSLRIYYKKCPAMVRNLAAFSEAVTGADSSSLVEVRGQCVRHSEERDTPKMYCSAEGEWLVPIGKCVCSAGYEERRDACVACELGFYKSAPGDQLCARCPPHSHSAAPAAQACHCDLSYYRAALDPPSSACTRPPSAPVNLISSVNGTSVTLEWAPPLDPGGRSDITYNAVCRRCPWALSRCEACGSGTRFVPQQTSLVQASLLVANLLAHMNYSFWIEAVNGVSDLSPEPRRAAVVNITTNQAAPSQVVVIRQERAGQTSVSLLWQEPEQPNGIILEYEIKYYEKDKEMQSYSTLKAVTTRATVSGLKPGTRYVFQVRARTSAGCGRFSQAMEVETGKPRPRYDTRT

SEQ ID NO: 1204 - protein, 523 aa, synthetic construct
  REGION 1..523: note = EPHB1 (P54762) ECD
MEETLMDTRTATAELGWTANPASGWEEVSGYDENLNTIRTYQVCNVFEPNQNNWLLTTFINRRGAHRIYTEMRFTVRDCSSLPNVPGSCKETFNLYYYETDSVIATKKSAFWSEAPYLKVDTIAADESFSQVDFGGRLMKVNTEVRSFGPLTRNGFYLAFQDYGACMSLLSVRVFFKKCPSIVQNFAVFPETMTGAESTSLVIARGTCIPNAEEVDVPIKLYCNGDGEWMVPIGRCTCKPGYEPENSVACKACPAGTFKASQEAEGCSHCPSNSRSPAEASPICTCRTGYYRADFDPPEVACTSVPSGPRNVISIVNETSIILEWHPPRETGGRDDVTYNIICKKCRADRRSCSRCDDNVEFVPRQLGLTECRVSISSLWAHTPYTFDIQAINGVSSKSPFPPQHVSVNITTNQAAPSTVPIMHQVSATMRSITLSWPQPEQPNGIILDYEIRYYEKEHNEFNSSMARSQTNTARIDGLRPGMVYVVQVRARTVAGYGKFSGKMCFQTLTDDDYKSELREQLP

SEQ ID NO: 1205 - protein, 525 aa, synthetic construct
  REGION 1..525: note = EPHB2 (P29323) ECD
VEETLMDSTTATAELGWMVHPPSGWEEVSGYDENMNTIRTYQVCNVFESSQNNWLRTKFIRRRGAHRIHVEMKFSVRDCSSIPSVPGSCKETFNLYYYEADFDSATKTFPNWMENPWVKVDTIAADESFSQVDLGGRVMKINTEVRSFGPVSRSGFYLAFQDYGGCMSLIAVRVFYRKCPRIIQNGAIFQETLSGAESTSLVAARGSCIANAEEVDVPIKLYCNGDGEWLVPIGRCMCKAGFEAVENGTVCRGCPSGTFKANQGDEACTHCPINSRTTSEGATNCVCRNGYYRADLDPLDMPCTTIPSAPQAVISSVNETSLMLEWTPPRDSGGREDLVYNIICKSCGSGRGACTRCGDNVQYAPRQLGLTEPRIYISDLLAHTQYTFEIQAVNGVTDQSPFSPQFASVNITTNQAAPSAVSIMHQVSRTVDSITLSWSQPDQPNGVILDYELQYYEKELSEYNATAIKSPTNTVTVQGLKAGAIYVFQVRARTVAGYGRYSGKMYFQTMTEAEYQTSIQEKLPL

SEQ ID NO: 1206 - protein, 526 aa, synthetic construct
  REGION 1..526: note = EPHB3 (P54753) ECD
GCRALEETLMDTKWVTSELAWTSHPESGWEEVSGYDEAMNPIRTYQVCNVRESSQNNWLRTGFIWRRDVQRVYVELKFTVRDCNSIPNIPGSCKETFNLFYYEADSDVASASSPFWMENPYVKVDTIAPDESFSRLDAGRVNTKVRSFGPLSKAGFYLAFQDQGACMSLISVRAFYKKCASTTAGFALFPETLTGAEPTSLVIAPGTCIPNAVEVSVPLKLYCNGDGEWMVPVGACTCATGHEPAAKESQCRPCPPGSYKAKQGEGPCLPCPPNSRTTSPAASICTCHNNFYRADSDSADSACTTVPSPPRGVISNVNETSLILEWSEPRDLGGRDDLLYNVICKKCHGAGGASACSRCDDNVEFVPRQLGLTERRVHISHLLAHTRYTFEVQAVNGVSGKSPLPPRYAAVNITTNQAAPSEVPTLRLHSSSGSSLTLSWAPPERPNGVILDYEMKYFEKSEGIASTVTSQMNSVQLDGLRPDARYVVQVRARTVAGYGQYSRPAEFETTSERGSGAQQLQEQLPL

SEQ ID NO: 1207 - protein, 524 aa, synthetic construct
  REGION 1..524: note = EPHB4 (P54760) ECD
LEETLLNTKLETADLKWVTFPQVDGQWEELSGLDEEQHSVRTYEVCDVQRAPGQAHWLRTGWVPRRGAVHVYATLRFTMLECLSLPRAGRSCKETFTVFYYESDADTATALTPAWMENPYIKVDTVAAEHLTRKRPGAEATGKVNVKTLRLGPLSKAGFYLAFQDQGACMALLSLHLFYKKCAQLTVNLTRFPETVPRELVVPVAGSCVVDAVPAPGPSPSLYCREDGQWAEQPVTGCSCAPGFEAAEGNTKCRACAQGTFKPLSGEGSCQPCPANSHSNTIGSAVCQCRVGYFRARTDPRGAPCTTPPSAPRSVVSRLNGSSLHLEWSAPLESGGREDLTYALRCRECRPGGSCAPCGGDLTFDPGPRDLVEPWVVVRGLRPDFTYTFEVTALNGVSSLATGPVPFEPVNVTTDREVPPAVSDIRVTRSSPSSLSLAWAVPRAPSGAVLDYEVKYHEKGAEGPSSVRFLKTSENRAELRGLKRGASYLVQVRARSEAGYGPFGQEHHSQTQLDESEGWREQLA

SEQ ID NO: 1208 - protein, 563 aa, synthetic construct
  REGION 1..563: note = EPHB6 (O15197) ECD
LEEVLLDTTGETSEIGWLTYPPGGWDEVSVLDDQRRLTRTFEACHVAGAPPGTGQDNWLQTHFVERRGAQRAHIRLHFSVRACSSLGVSGGTCRETFTLYYRQAEEPDSPDSVSSWHLKRWTKVDTIAADESFPSSSSSSSSSSSAAWAVGPHGAGQRAGLQLNVKERSFGPLTQRGFYVAFQDTGACLALVAVRLFSYTCPAVLRSFASFPETQASGAGGASLVAAVGTCVAHAEPEEDGVGGQAGGSPPRLHCNGEGKWMVAVGGCRCQPGYQPARGDKACQACPRGLYKSSAGNAPCSPCPARSHAPNPAAPVCPCLEGFYRASSDPPEAPCTGPPSAPQELWFEVQGSALMLHWRLPRELGGRGDLLFNVVCKECEGRQEPASGGGGTCHRCRDEVHFDPRQRGLTESRVLVGGLRAHVPYILEVQAVNGVSELSPDPPQAAAINVSTSHEVPSAVPVVHQVSRASNSITVSWPQPDQTNGNILDYQLRYYDQAEDESHSFTLTSETNTATVTQLSPGHIYGFQVRARTAAGHGPYGGKVYFQTLPQGELSSQLPERLS

SEQ ID NO: 1209 - protein, 226 aa, synthetic construct
  REGION 1..226: note = EPOR (P19235) ECD
APPPNLPDPKFESKAALLAARGPEELLCFTERLEDLVCFWEEAASAGVGPGNYSFSYQLEDEPWKLCRLHQAPTARGAVRFWCSLPTADTSSFVPLELRVTAASGAPRYHRVIHINEVVLLDAPVGLVARLADESGHVVLRWLPPPETPMTSHIRYEVDVSAGNGAGSVQRVEILEGRTECVLSNLRGRTRYTFAVRARMAEPSFGGFWSAWSEPVSLLTPSDLDP

SEQ ID NO: 1210 - protein, 167 aa, synthetic construct
  REGION 1..167: note = EQTN (Q9NQ60) ECD
LKSSTLKPTIEALPNVLPLNEDVNKQEEKNEDHTPNYAPANEKNGNYYKDIKQYVFTTQNPNGTESEISVRATTDLNFALKNDKTVNATTYEKSTIEEETTTSEPSHKNIQRSTPNVPAFWTMLAKAINGTAVVMDDKDQLFHPIPESDVNATQGENQPDLEDLKIK

SEQ ID NO: 1211 - protein, 630 aa, synthetic construct
  REGION 1..630: note = ERBB2 (P04626) ECD
TQVCTGTDMKLRLPASPETHLDMLRHLYQGCQVVQGNLELTYLPTNASLSFLQDIQEVQGYVLIAHNQVRQVPLQRLRIVRGTQLFEDNYALAVLDNGDPLNNTTPVTGASPGGLRELQLRSLTEILKGGVLIQRNPQLCYQDTILWKDIFHKNNQLALTLIDTNRSRACHPCSPMCKGSRCWGESSEDCQSLTRTVCAGGCARCKGPLPTDCCHEQCAAGCTGPKHSDCLACLHFNHSGICELHCPALVTYNTDTFESMPNPEGRYTFGASCVTACPYNYLSTDVGSCTLVCPLHNQEVTAEDGTQRCEKCSKPCARVCYGLGMEHLREVRAVTSANIQEFAGCKKIFGSLAFLPESFDGDPASNTAPLQPEQLQVFETLEEITGYLYISAWPDSLPDLSVFQNLQVIRGRILHNGAYSLTLQGLGISWLGLRSLRELGSGLALIHHNTHLCFVHTVPWDQLFRNPHQALLHTANRPEDECVGEGLACHQLCARGHCWGPGPTQCVNCSQFLRGQECVEECRVLQGLPREYVNARHCLPCHPECQPQNGSVTCFGPEADQCVACAHYKDPPFCVARCPSGVKPDLSYMPIWKFPDEEGACQPCPINCTHSCVDLDDKGCPAEQRASPLT

SEQ ID NO: 1212 - protein, 624 aa, synthetic construct
  REGION 1..624: note = ERBB3 (P21860) ECD
SEVGNSQAVCPGTLNGLSVTGDAENQYQTLYKLYERCEVVMGNLEIVLTGHNADLSFLQWIREVTGYVLVAMNEFSTLPLPNLRVVRGTQVYDGKFAIFVMLNYNTNSSHALRQLRLTQLTEILSGGVYIEKNDKLCHMDTIDWRDIVRDRDAEIVVKDNGRSCPPCHEVCKGRCWGPGSEDCQTLTKTICAPQCNGHCFGPNPNQCCHDECAGGCSGPQDTDCFACRHFNDSGACVPRCPQPLVYNKLTFQLEPNPHTKYQYGGVCVASCPHNFVVDQTSCVRACPPDKMEVDKNGLKMCEPCGGLCPKACEGTGSGSRFQTVDSSNIDGFVNCTKILGNLDFLITGLNGDPWHKIPALDPEKLNVFRTVREITGYLNIQSWPPHMHNFSVFSNLTTIGGRSLYNRGFSLLIMKNLNVTSLGFRSLKEISAGRIYISANRQLCYHHSLNWTKVLRGPTEERLDIKHNRPRRDCVAEGKVCDPLCSSGGCWGPGPGQCLSCRNYSRGGVCVTHCNFLNGEPREFAHEAECFSCHPECQPMEGTATCNGSGSDTCAQCAHFRDGPHCVSSCPHGVLGAKGPIYKYPDVQNECRPCHENCTQGCKGPELQDCLGQTLVLIGKTHLT

SEQ ID NO: 1213 - protein, 626 aa, synthetic construct
  REGION 1..626: note = ERBB4 (Q15303) ECD
QSVCAGTENKLSSLSDLEQQYRALRKYYENCEVVMGNLEITSIEHNRDLSFLRSVREVTGYVLVALNQFRYLPLENLRIIRGTKLYEDRYALAIFLNYRKDGNFGLQELGLKNLTEILNGGVYVDQNKFLCYADTIHWQDIVRNPWPSNLTLVSTNGSSGCGRCHKSCTGRCWGPTENHCQTLTRTVCAEQCDGRCYGPYVSDCCHRECAGGCSGPKDTDCFACMNFNDSGACVTQCPQTFVYNPTTFQLEHNFNAKYTYGAFCVKKCPHNFVVDSSSCVRACPSSKMEVEENGIKMCKPCTDICPKACDGIGTGSLMSAQTVDSSNIDKFINCTKINGNLIFLVTGIHGDPYNAIEAIDPEKLNVFRTVREITGFLNIQSWPPNMTDFSVFSNLVTIGGRVLYSGLSLLILKQQGITSLQFQSLKEISAGNIYITDNSNLCYYHTINWTTLFSTINQRIVIRDNRKAENCTAEGMVCNHLCSSDGCWGPGPDQCLSCRRFSRGRICIESCNLYDGEFREFENGSICVECDPQCEKMEDGLLTCHGPGPDNCTKCSHFKDGPNCVEKCPDGLQGANSFIFKYADPDRECHPCHPNCTQGCNGPTSHDCIYYPWTGHSTLPQHARTP

SEQ ID NO: 1214 - protein, 60 aa, synthetic construct
  REGION 1..60: note = EREG (O14944) ECD
VAQVSITKCSSDMNGYCLHGQCIYLVDMSQNYCRCEVGYTGVRCEHFFLTVHQPLSKEYV

SEQ ID NO: 1215 - protein, 126 aa, synthetic construct
  REGION 1..126: note = ERMAP (Q96PL5) ECD
HAGDAGKFHVALLGGTAELLCPLSLWPGTVPKEVRWLRSPFPQRSQAVHIFRDGKDQDEDLMPEYKGRTVLVRDAQEGSVTLQILDVRLEDQGSYRCLIQVGNLSKEDTVILQVAAPSVGSLSPSA

SEQ ID NO: 1216 - protein, 496 aa, synthetic construct
  REGION 1..496: note = ERVFC1 (P60507) ECD
NSLLTEPPFRWRFYLHETWTQGNRLSTVTLATVDCQPHGCQAQVTFNFTSFKSVLRGWSNPTICFVYDQTHSNCRDYWVDTNGGCPYAYCRMHVTQLHTAKKLQHTYRLTSDGRTTYFLTIPDPWDSRWVSGVTGRLYRWPTDSYPVGKLRIFLTYIRVIPQVLSNLKDQADNIKHQEEVINTLVQSHPKADMVTYDDKAEAGPFSWITLVRHGARLVNMAGLVNLSHCFLCTALSQPPLVAVPLPQAFNTSGNHTAHPSGVFSEQVPLFRDPLQPQFPFCYTTPNSSWCNQTYSGSLSNLSAPAGGYFWCNFTLTKHLNISSNNTLSRNLCLPISLVPRLTLYSEAELSSLVNPPMRQKRAVFPPLVIGVSLTSSLVASGLGTGAIVHFISSSQDLSIKLQMAIEASAESLASLQRQITSVAKVAMQNRRALDLLTADKGGTCMFLGEECCYYINESGLVETSLLTLDKIRDGLHRPSSTPNYGGGWWQSPLTTW

SEQ ID NO: 1217 - protein, 496 aa, synthetic construct; identical to SEQ ID NO: 1216
  REGION 1..496: note = ERVFRD-1 (P60508) ECD

SEQ ID NO: 1218 - protein, 543 aa, synthetic construct
  REGION 1..543: note = ERVK-19 (O71037) ECD
LPMPAGAAAANYTYWAYVPFPPLIRAVTWMDNPIEVYVNDSVWVPGPTDDHCPAKPEEEGMMINISIGYRYPPICLGRAPGCLMPAVQNWLVEVPTVSPISRFTYHMVSGMSLRPRVNYLQDFSYQRSFKFRPKGKPCPKEIPKESKNTEVLVWEECVANSAVILQNNEFGTIIDWAPRGQFYHNCSGQTQSCPSAQVSPAVDSDLTESLDKHKHKKLQSFYPWEWGEKGISTPRPKIISPVSGPEHPELWRLTVASHHIRIWSGNQTLETRDRKPFYTVDLNSSVTVPLQSCIKPPYMLVVGNIVIKPDSQTITCENCRLLTCIDSTFNWQHRILLVRAREGVWIPVSMDRPWETSPSIHTLTEVLKGVLNRSKRFIFTLIAVIMGLIAVTATAAVAGVALHSSVQSVNFVNDWQKNSTRLWNSQSSIDQKLANQINDLRQTVIWMGDRLMSLEHRFQLQCDWNTSDFSITPQIYNESEHHWDMVRRHLQGREDNLTLDISKLKEQIFEASKAHLNLVPGTEAIAGVADGLANLNPVTWVKT

SEQ ID NO: 1219 - protein, 543 aa, synthetic construct
  REGION 1..543: note = ERVK-21 (P61565) ECD
LPMPAGAAAANYTNWAYVPFPPLIRAVTWMDNPIEVYVNDSVWVHGPIDDRCPAKPEEEGMMINISIGYHYPPICLGRAPGCLMPAVQNWLVEVPTVSPISRFTYNMVSGMSLRPRVNYLQDFSYQRSLKFRPKGKPCPKEIPKESKNTEVLVWEECVANSVVILQNNEFGTIIDWAPRGQFYHNCSGQTQSCPSAQVSPAVDSDLTESLDKHKHKKLQSFYPWEWGEKGISTPRPKIISPVSGPEHPELWRLTVASHHIRIWSGNQTLETRDRKPFYTVDLNSSLTVPLQSCVKPPYMLVVGNIVIKPDSQTITCENCRLLTCIDSTFNWQHRILLVRAREGVWIPVSMDRPWEASPSIHILTEVLKGVLNRSKRFIFTLIAVIMGLIAVTAMAAVAGVALHSFVQSVNFVNDWQKNSTRLWNSQSSIDQKLANQINDLRQTVIWMGDRLMSLEHRFQLQCDWNTSDFCITPQIYNESEHHWDMVRRHLQGREDNLTLDISKLKEQIFEASKAHLNLVPGTEAIAGVADGLANLNPVTWVKT

SEQ ID NO: 1220 - protein, 543 aa, synthetic construct
  REGION 1..543: note = ERVK-6 (Q69384) ECD
LPMPAGAAAANYTYWAYVPFPPLIRAVTWMDNPTEVYVNDSVWVPGPIDDRCPAKPEEEGMMINISIGYHYPPICLGRAPGCLMPAVQNWLVEVPTVSPICRFTYHMVSGMSLRPRVNYLQDFSYQRSLKFRPKGKPCPKEIPKESKNTEVLVWEECVANSAVILQNNEFGTIIDWAPRGQFYHNCSGQTQSCPSAQVSPAVDSDLTESLDKHKHKKLQSFYPWEWGEKGISTPRPKIVSPVSGPEHPELWRLTVASHHIRIWSGNQTLETRDRKPFYTIDLNSSLTVPLQSCVKPPYMLVVGNIVIKPDSQTITCENCRLLTCIDSTFNWQHRILLVRAREGVWIPVSMDRPWEASPSVHILTEVLKGVLNRSKRFIFTLIAVIMGLIAVTATAAVAGVALHSSVQSVNFVNDWQKNSTRLWNSQSSIDQKLANQINDLRQTVIWMGDRLMSLEHRFQLQCDWNTSDFCITPQIYNESEHHWDMVRRHLQGREDNLTLDISKLKEQIFEASKAHLNLVPGTEAIAGVADGLANLNPVTWVKT

SEQ ID NO: 1221 - protein, 543 aa, synthetic construct
  REGION 1..543: note = ERVK-8 (Q902F8) ECD
LPMPAGAAVANYTNWAYVPFPPLIRAVTWMDNPIEVYVNDSVWVPGPIDDRCPAKPEEEGMMINISIGYRYPPICLGRAPGCLMPAVQNWLVEVPTVSPISRFTYHMVSGMSLRPRVNYLQDFSYQRSLKFRPKGKPCPKEIPKESKNTEVLVWEECVANSAVILQNNEFGTIIDWAPRGQFYHNCSGQTQSCPSAQVSPAVDSDLTESLDKHKHKKLQSFYPWEWGEKRISTPRPKIVSPVSGPEHPELWRLTVASHHIRIWSGNQTLETRDRKPFYTVDLNSSLTLPLQSCVKPPYMLVVGNIVIKPDSQTITCENCRLLTCIDSTFNWQHRILLVRAREGVWIPVSMDRPWEASPSVHILTEVLKGVLNRSKRFIFTLIAVIMGLIAVTATAAVAGVALHSSVQSVNFVNDGQKNSTRLWNSQSSIDQKLANQINDLRQTVIWMGDRLMSLEHRFQLQCDWNTSDFCITPQIYNDSEHHWDMVRRHLQGREDNLTLDISKLKEQIFEASKAHLNLVPGTEAIAGVADGLANLNPVTWVKT

SEQ ID NO: 1222 - protein, 542 aa, synthetic construct
  REGION 1..542: note = ERVK-9 (Q9UKH3) ECD
LPMPAGAAAANYTNWAYVPFPPLIRAVTWMDNPIEVYVNDSVWVPGPIDDRCPAKPEEEGMMINISIGYRYPICLGRAPGCLMPAVQNWLVEVPIVSPICRFTYHMVSGMSLRPRVNYLQDFSYQRSLKFRPKGKPCPKEIPKESKNTEVLVWEECVANSAVILQNNEFGTIIDWTPQGQFYHNCSGQTQSCPSAQVSPAVDSDLTESLDKHKHKKLQSFYPWEWGEKGISTPRPKIISPVSGPEHPELWRLTVASHHIRIWSGNQTLETRDRKPFYTVDLNSSLTLPLQSCVKPPYMLVVGNIVIKPDSQTITCENCRLLTCIDSTFNWQHRILLVRAREGVWIPVSMDRPWEASPSIHILTEVLKGVLNRSKRFIFTLIAVIMGLIAVTATAAVAGVALHSSVQSVNFVNDGQKNSTRLWNSQSSIDQKLANQINDLRQTVIWMGDRLMSLEHRFQLQCDWNTSDFCITPQIYNESEHHWDMVRRHLQGREDNLTLDISKLKEQIFEASKAHLNLVPGTEAIAGVADGLANLNPVTWVKT

SEQ ID NO: 1223 - protein, 462 aa, synthetic construct
  REGION 1..462: note = ERVMER34-1 (Q9H9K5) ECD
LLAPVFRTLSILTNQSNCWLCEHLDNAEQPELVFVPASASTWWTYSGQWMYERVWYPQAEVQNHSTSSYRKVTWHWEASMEAQGLSFAQVRLLEGNFSLCVENKNGSGPFLGNIPKQYCNQILWFDSTDGTFMPSIDVTNESRNDDDDTSVCLGTRQCSWFAGCTNRTWNSSAVPLIGLPNTQDYKWVDRNSGLTWSGNDTCLYSCQNQTKGLLYQLFRNLFCSYGLTEAHGKWRCADASITNDKGHDGHRTPTWWLTGSNLTLSVNNSGLFFLCGNGVYKGFPPKWSGRCGLGYLVPSLTRYLTLNASQITNLRSFIHKVTPHRCTQGDTDNPPLYCNPKDNSTIRALFPSLGTYDLEKAILNISKAMEQEFSATKQTLEAHQSKVSSLASASRKDHVLDIPTTQRQTACGTVGKQCCLYINYSEEIKSNIQRLHEASENLKNVPLLDWQGIFAKVGDWFR

SEQ ID NO: 1224 - protein, 451 aa, synthetic construct
  REGION 1..451: note = ERVPABLB-1 (P60509) ECD
MDPLHTIEKVPARRNIHDRGHQGHRMGDGTPGRPKISVQQMTRFSLIIFFLSAPFVVNASTSNVFLQWAHSYADGLQQGDPCWVCGSLPVTNTMELPWWVSPLQGKDWVFFQSFIGDLKQWTGAQMTGVTRKNISEWPINKTLNEPGHDKPFSVNETRDKVIAFAIPLLDTKVFVQTSRPQNTQYRNGFLQIWDGFIWLTATKGHLSQIAPLCWEQRNHSLDNWPNTTRVMGWIPPGQCRHTILLQQRDLFATDWSQQPGLNWYAPNGTQWLCSPNLWPWLPSGWLGCCTLGIPWAQGRWVKTMEVYPYLPHVVNQGTRAIVHRNDHLPTIFMPSVGLGTVIQHIEALANFTQRALNDSLQSISLMNAEVYYMHEDILQNRMALDILTAAEGGTCALIKTECCVYIPNNSRNISLALEDTCRQIQVISSSALSLHDWIASQFSGRPSWWQK

SEQ ID NO: 1225 - protein, 537 aa, synthetic construct
  REGION 1..537: note = ERVS71-1 (P61550) ECD
EPSYSFLLTSFTTGRVFANTTWRAGTSKEVSFAVDLCVLFPEPARTHEEQHNLPVIGAGSVDLAAGFGHSGSQTGCGSSKGAEKGLQNVDFYLCPGNHPDASCRDTYQFFCPDWTCVTLATYSGGSTRSSTLSISRVPHPKLCTRKNCNPLTITVHDPNAAQWYYGMSWGLRLYIPGFDVGTMFTIQKKILVSWSSPKPIGPLTDLGDPIFQKHPDKVDLTVPLPFLVPRPQLQQQHLQPSLMSILGGVHHLLNLTQPKLAQDCWLCLKAKPPYYVGLGVEATLKRGPLSCHTRPRALTIGDVSGNASCLISTGYNLSASPFQATCNQSLLTSISTSVSYQAPNNTWLACTSGLTRCINGTEPGPLLCVLVHVLPQVYVYSGPEGRQLIAPPELHPRLHQAVPLLVPLLAGLSIAGSAAIGTAALVQGETGLISLSQQVDADFSNLQSAIDILHSQVESLAEVVLQNCRCLDLLFLSQGGLCAALGESCCFYANQSGVIKGTVKKVRENLDRHQQERENNIPWYQSMFNWNPWLTTL

SEQ ID NO: 1226 - protein, 300 aa, synthetic construct
  REGION 1..300: note = ERVV-1 (B6SEH8) ECD
QWNENSLVSFSKIIASGNHLSNCWICHNFITRSSSYQYILVRNFSLNLTFGSGIPEGQHKSVPLQVSLANSAHQVPCLDLTPPFNQSSKTSFYFYNCSSLNQTCCPCPEGHCDRKNTSEEGFPSPTIHPMSFSPAGCHPNLTHWCPAKQMNDYRDKSPQNRCAAWEGKELITWRVLYLLPKAHTVPTWPKSTVPLGGPLSPACNQTIPAGWKSQLHKWFDSHIPRWACTPPGYVFLCGPQKNKLPFDGSPKITYSTPPVANLYTCINNIQHTGECAVGLLGPRGIGVTIYNTTQPRQKRA

SEQ ID NO: 1227 - protein, 423 aa, synthetic construct
  REGION 1..423: note = ERVW-1 (Q9UQF0) ECD
APPPCRCMTSSSPYQEFLWRMQRPGNIDAPSYRSLSKGTPTFTAHTHMPRNCYHSATLCMHANTHYWTGKMINPSCPGGLGVTVCWTYFTQTGMSDGGGVQDQAREKHVKEVISQLTRVHGTSSPYKGLDLSKLHETLRTHTRLVSLFNTTLTGLHEVSAQNPTNCWICLPLNFRPYVSIPVPEQWNNFSTEINTTSVLVGPLVSNLEITHTSNLTCVKFSNTTYTTNSQCIRWVTPPTQIVCLPSGIFFVCGTSAYRCLNGSSESMCFLSFLVPPMTIYTEQDLYSYVISKPRNKRVPILPFVIGAGVLGALGTGIGGITTSTQFYYKLSQELNGDMERVADSLVTLQDQLNSLAAVVLQNRRALDLLTAERGGTCLFLGEECCYYVNQSGIVTEKVKEIRDRIQRRAEELRNTGPWGLLSQ

SEQ ID NO: 1228 - protein, 219 aa, synthetic construct
  REGION 1..219: note = ESAM (Q96AP7) ECD
QLQLHLPANRLQAVEGGEVVLPAWYTLHGEVSSSQPWEVPFVMWFFKQKEKEDQVLSYINGVTTSKPGVSLVYSMPSRNLSLRLEGLQEKDSGPYSCSVNVQDKQGKSRGHSIKTLELNVLVPPAPPSCRLQGVPHVGANVTLSCQSPRSKPAVQYQWDRQLPSFQTFFAPALDVIRGSLSLTNLSSSMAGVYVCKAHNEVGTAQCNVTLEVSTGPGAA

SEQ ID NO: 1229 - protein, 274 aa, synthetic construct
  REGION 1..274: note = EVA1C (P58658) ECD
LTDFSGYLTKLLQNHTTYACDGDYLNLQCPRHSTISVQSAFYGQDYQMCSSQKPASQREDSLTCVAATTFQKVLDECQNQRACHLLVNSRVFGPDLCPGSSKYLLVSFKCQPNELKNKTVCEDQELKLHCHESKFLNIYSATYGRRTQERDICSSKAERLPPFDCLSYSALQVLSRRCYGKQRCKIIVNNHHFGSPCLPGVKKYLTVTYACVPKNILTAIDPAIANLKPSLKQKDGEYGINFDPSGSKVLRKDGILVSNSLAAFAYIRAHPERA

SEQ ID NO: 1230 - protein, 274 aa, synthetic construct
  REGION 1..274: note = EVC2 (Q86UK5) ECD
GRGCLGASSRPRWRPLGAQPPRDPQVAPRSGPGLRIPPGRSGAGPESSTQDLPCMIWPKVECCHFKTAVEAPLGMKLDKKMEVFIPLSTSAASSGPWAHSLFAFIPSWPKKNLFKRESPITHRLYGDISREVQGTSENGVIFQKCALVSGSSEAQTARIWLLVNNTKTTSSANLSELLLLDSIAGLTIWDSVGNRTSEGFQAFSKKFLQVGDAFAVSYAATLQAGDLGNGESLKLPAQLTFQSSSRNRTQLKVLFSITAEENVTVLPHHGLHAA

SEQ ID NO: 1231 - protein, 103 aa, synthetic construct
  REGION 1..103: note = EVI2A (P22794) ECD
NYTRLWANSTSSWDSVIQNKTGRNQNENINTNPITPEVDYKGNSTNMPETSHIVALTSKSEQELYIPSVVSNSPSTVQSIENTSKSHGEIFKKDVCAENNNNM

SEQ ID NO: 1232 - protein, 181 aa, synthetic construct
  REGION 1..181: note = EVI2B (P34910) ECD
KTETITTEKQSQPTLFTSSMSQVLANSQNTTGNPLGQPTQFSDTFSGQSISPAKVTAGQPTPAVYTSSEKPEAHTSAGQPLAYNTKQPTPIANTSSQQAVFTSARQLPSARTSTTQPPKSFVYTFTQQSSSVQIPSRKQITVHNPSTQPTSTVKNSPRSTPGFILDTTSNKQTPQKNNYNS

SEQ ID NO: 1233 - protein, 211 aa, synthetic construct
  REGION 1..211: note = F11R (Q9Y624) ECD
SVTVHSSEPEVRIPENNPVKLSCAYSGFSSPRVEWKFDQGDTTRLVCYNNKITASYEDRVTFLPTGITFKSVTREDTGTYTCMVSEEGGNSYGEVKVKLIVLVPPSKPTVNIPSSATIGNRAVLTCSEQDGSPPSEYTWFKDGIVMPTNPKSTRAFSNSSYVLNPTTGELVFDPLSASDTGEYSCEARNGYGTPMTSNAVRMEAVERNVGV

SEQ ID NO: 1234 - protein, 219 aa, synthetic construct
  REGION 1..219: note = F3 (P13726) ECD
SGTTNTVAAYNLTWKSTNFKTILEWEPKPVNQVYTVQISTKSGDWKSKCFYTTDTECDLTDEIVKDVKQTYLARVFSYPAGNVESTGSAGEPLYENSPEFTPYLETNLGQPTIQSFEQVGTKVNVTVEDERTLVRRNNTFLSLRDVFGKDLIYTLYYWKSSSSGKKTAKTNTNEFLIDVDKGENYCFSVQAVIPSRTVNRKSTDSPVECMGQEKGEFRE

SEQ ID NO: 1235 - protein, 282 aa, synthetic construct
  REGION 1..282: note = FAM171A1 (Q5VUB5) ECD
KTLREPGAGAQEVTLKVHISDASTHQPVADALIEIFTNQASIASGTSGTDGVAFIKFQYKLGSQLIVTASKHAYVPNSAPWKPIRLPVFSSLSLGLLPERSATLMVYEDVVQIVSGFQGARPQPRVHFQRRALRLPENTSYSDLTAFLTAASSPSEVDSFPYLRGLDGNGTGNSTRHDLTPVTAVSVHLLSSNGTPVLVDGPIYVTVPLATQSSLRHNAYVAAWRFDQKLGTWLKSGLGLVHQEGSQLTWTYIAPQLGYWVAAMSPPIPGPVVTQDITTYHT

SEQ ID NO: 1236 - protein, 286 aa, synthetic construct
  REGION 1..286: note = FAM171A2 (A8MVW0) ECD
KSPPEPPSPQEILIKVQVYVSGELVPLARASVDVFGNRTLLAAGTTDSEGVATLPLSYRLGTWVLVTAARPGFLTNSVPWRVDKLPLYASVSLYLLPERPATLILYEDLVHILLGSPGARSQPLVQFQRRAARLPVSSTYSQLWASLTPASTQQEMRAFPAFLGTEASSSGNGSWLELMPLTAVSVHLLTGNGTEVPLSGPIHLSLPVPSETRALTVGTSIPAWRFDPKSGLWVRNGTGVIRKEGRQLYWTFVSPQLGYWVAAMASPTAGLVTITSGIQDIGTYHT

SEQ ID NO: 1237 - protein, 321 aa, synthetic construct
  REGION 1..321: note = FAM171B (Q6P995) ECD
ELSRSDLSLIQQQQQQQQQQQQQQKQLEEAEEERTEVPGATSTLTVPVSVFMLKVQVNDIISRQYLSQAVVEVFVNYTKTNSTVTKSNGAVLIKVPYKLGLSLTIIAYKDGYVLTPLPWKTRRMPIYSSVTLSLFPQSQANIWLFEDTVLITGKLADAKSQPSVQFSKALIKLPDNHHISNVTGYLTVLQQFLKVDNFLHTTGITLNKPGFENIELTPLAAICVKIYSGGKELKVNGSIQVSLPLLRLNDISAGDRIPAWTFDMNTGAWVNHGRGMVKEHNNHLIWTYDAPHLGYWIAAPLPGTRGSGINEDSKDITAYHT

SEQ ID NO: 1238 - protein, 94 aa, synthetic construct
  REGION 1..94: note = FAM174A (Q8TBP5) ECD
LAVLLQAAEAAPGLGPPDPRPRTLPPLPPGPTPAQQPGRGLAEAAGPRGSEGGNGSNPVAGLETDDHGGKAGEGSVGGGLAVSPNPGDKPMTQR

SEQ ID NO: 1239 - protein, 64 aa, synthetic construct
  REGION 1..64: note = FAM174B (Q3ZCQ3) ECD
SRAESVSAPWPEPERESRPPPGPGPGNTTRFGSGAAGGSGSSSSNSSGDALVTRISILLRDLPT

SEQ ID NO: 1240 - protein, 318 aa, synthetic construct
  REGION 1..318: note = FAM187B (Q17R55) ECD
FYFSISCPSGKQCQQALLSGNDILLYCNSSGAHWYYLFTQGKKGRLTSLTNISNMEIMPEGSLLIKDPLPSQTGLYHCWNKNGRQVVQYEIDFQDVTTLHITHKDLGQRPLQNETLHLGSKQLIFTWWEPWQDCNRCEEPGECKRLGYRYIEEPLEEAMPCWLYLGEVLVWSSRLRPELQVEACHVQCTNNTQLRVDYVIFDNFRLDEKTEFVWLDCPLGSMYRPVNWRANDTPLTWESQLSGQDFTTFLDPSTGGRQLQVFQPAVYKCFVQQELVAQFKPAASLETLEAQWRENDAQWREARKALRGRADSVLKGLK

SEQ ID NO: 1241 - protein, 148 aa, synthetic construct
  REGION 1..148: note = FAS (P25445) ECD
QVTDINSKGLELRKTVTTVETQNLEGLHHDGQFCHKPCPPGERKARDCTVNGDEPDCVPCQEGKEYTDKAHFSSKCRRCRLCDEGHGLEVEINCTRTQNTKCRCKPNFFCNSTVCEHCDPCTKCEHGIIKECTLTSNTKCKEEGSRSN

SEQ ID NO: 1242 - protein, 4160 aa, synthetic construct
  REGION 1..4160: note = FAT1 (Q14517) ECD
DGSQRLEQTPLQFTHLEYNVTVQENSAAKTYVGHPVKMGVYITHPAWEVRYKIVSGDSENLFKAEEYILGDFCFLRIRTKGGNTAILNREVKDHYTLIVKALEKNTNVEARTKVRVQVLDTNDLRPLFSPTSYSVSLPENTAIRTSIARVSATDADIGTNGEFYYSFKDRTDMFAIHPTSGVIVLTGRLDYLETKLYEMEILAADRGMKLYGSSGISSMAKLTVHIEQANECAPVITAVTLSPSELDRDPAYAIVTVDDCDQGANGDIASLSIVAGDLLQQFRTVRSFPGSKEYKVKAIGGIDWDSHPFGYNLTLQAKDKGTPPQFSSVKVIHVTSPQFKAGPVKFEKDVYRAEISEFAPPNTPVVMVKAIPAYSHLRYVFKSTPGKAKFSLNYNTGLISILEPVKRQQAAHFELEVTTSDRKASTKVLVKVLGANSNPPEFTQTAYKAAFDENVPIGTTVMSLSAVDPDEGENGYVTYSIANLNHVPFAIDHFTGAVSTSENLDYELMPRVYTLRIRASDWGLPYRREVEVLATITLNNLNDNTPLFEKINCEGTIPRDLGVGEQITTVSAIDADELQLVQYQIEAGNELDFFSLNPNSGVLSLKRSLMDGLGAKVSFHSLRITATDGENFATPLYINITVAASHKLVNLQCEETGVAKMLAEKLLQANKLHNQGEVEDIFFDSHSVNAHIPQFRSTLPTGIQVKENQPVGSSVIFMNSTDLDTGFNGKLVYAVSGGNEDSCFMIDMETGMLKILSPLDRETTDKYTLNITVYDLGIPQKAAWRLLHVVVVDANDNPPEFLQESYFVEVSEDKEVHSEIIQVEATDKDLGPNGHVTYSIVTDTDTFSIDSVTGVVNIARPLDRELQHEHSLKIEARDQAREEPQLFSTVVVKVSLEDVNDNPPTFIPPNYRVKVREDLPEGTVIMWLEAHDPDLGQSGQVRYSLLDHGEGNFDVDKLSGAVRIVQQLDFEKKQVYNLTVRAKDKGKPVSLSSTCYVEVEVVDVNENLHPPVFSSFVEKGTVKEDAPVGSLVMTVSAHDEDARRDGEIRYSIRDGSGVGVFKIGEETGVIETSDRLDRESTSHYWLTVFATDQGVVPLSSFIEIYIEVEDVNDNAPQTSEPVYYPEIMENSPKDVSVVQIEAFDPDSSSNDKLMYKITSGNPQGFFSIHPKTGLITTTSRKLDREQQDEHILEVTVTDNGSPPKSTIARVIVKILDENDNKPQFLQKFYKIRLPEREKPDRERNARREPLYHVIATDKDEGPNAEISYSIEDGNEHGKFFIEPKTGVVSSKRFSAAGEYDILSIKAVDNGRPQKSSTTRLHIEWISKPKPSLEPISFEESFFTFTVMESDPVAHMIGVISVEPPGIPLWFDITGGNYDSHFDVDKGTGTIIVAKPLDAEQKSNYNLTVEATDGTTTILTQVFIKVIDTNDHRPQFSTSKYEVVIPEDTAPETEILQISAVDQDEKNKLIYTLQSSRDPLSLKKFRLDPATGSLYTSEKLDHEAVHQHTLTVMVRDQDVPVKRNFARIVVNVSDTNDHAPWFTASSYKGRVYESAAVGSVVLQVTALDKDKGKNAEVLYSIESGNIGNSFMIDPVLGSIKTAKELDRSNQAEYDLMVKATDKGSPPMSEITSVRIFVTIADNASPKFTSKEYSVELSETVSIGSFVGMVTAHSQSSVVYEIKDGNTGDAFDINPHSGTIITQKALDFETLPIYTLIIQGTNMAGLSTNTTVLVHLQDENDNAPVFMQAEYTGLISESASINSVVLTDRNVPLVIRAADADKDSNALLVYHIVEPSVHTYFAIDSSTGAIHTVLSLDYEETSIFHFTVQVHDMGTPRLFAEYAANVTVHVIDINDCPPVFAKPLYEASLLLPTYKGVKVITVNATDADSSAFSQLIYSITEGNIGEKFSMDYKTGALTVQNTTQLRSRYELTVRASDGRFAGLTSVKINVKESKESHLKFTQDVYSAVVKENSTEAETLAVITAIGNPINEPLFYHILNPDRRFKISRTSGVLSTTGTPFDREQQEAFDVVVEVTEEHKPSAVAHVVVKVIVEDQNDNAPVFVNLPYYAVVKVDTEVGHVIRYVTAVDRDSGRNGEVHYYLKEHHEHFQIGPLGEISLKKQFELDTLNKEYLVTVVAKDGGNPAFSAEVIVPITVMNKAMPVFEKPFYSAEIAESIQVHSPVVHVQANSPEGLKVFYSITDGDPFSQFTINFNTGVINVIAPLDFEAHPAYKLSIRATDSLTGAHAEVFVDIIVDDINDNPPVFAQQSYAVTLSEASVIGTSVVQVRATDSDSEPNRGISYQMFGNHSKSHDHFHVDSSTGLISLLRTLDYEQSRQHTIFVRAVDGGMPTLSSDVIVTVDVTDLNDNPPLFEQQIYEARISEHAPHGHFVTCVKAYDADSSDIDKLQYSILSGNDHKHFVIDSATGIITLSNLHRHALKPFYSLNLSVSDGVFRSSTQVHVTVIGGNLHSPAFLQNEYEVELAENAPLHTLVMEVKTTDGDSGIYGHVTYHIVNDFAKDRFYINERGQIFTLEKLDRETPAEKVISVRLMAKDAGGKVAFCTVNVILTDDNDNAPQFRATKYEVNIGSSAAKGTSVVKVLASDADEGSNADITYAIEADSESVKENLEINKLSGVITTKESLIGLENEFFTFFVRAVDNGSPSKESVVLVYVKILPPEMQLPKFSEPFYTFTVSEDVPIGTEIDLIRAEHSGTVLYSLVKGNTPESNRDESFVIDRQSGRLKLEKSLDHETTKWYQFSILARCTQDDHEMVASVDVSIQVKDANDNSPVFESSPYEAFIVENLPGGSRVIQIRASDADSGTNGQVMYSLDQSQSVEVIESFAINMETGWITTLKELDHEKRDNYQIKVVASDHGEKIQLSSTAIVDVTVTDVNDSPPRFTAEIYKGTVSEDDPQGGVIAILSTTDADSEEINRQVTYFITGGDPLGQFAVETIQNEWKVYVKKPLDREKRDNYLLTITATDGTFSSKAIVEVKVLDANDNSPVCEKTLYSDTIPEDVLPGKLIMQISATDADIRSNAEITYTLLGSGAEKFKLNPDTGELKTSTPLDREEQAVYHLLVRATDGGGRFCQASIVLTLEDVNDNAPEFSADPYAITVFENTEPGTLLTRVQATDADAGLNRKILYSLIDSADGQFSINELSGIIQLEKPLDRELQAVYTLSLKAVDQGLPRRLTATGTVIVSVLDINDNPPVFEYREYGATVSEDILVGTEVLQVYAASRDIEANAEITYSIISGNEHGKFSIDSKTGAVFIIENLDYESSHEYYLTVEATDGGTPSLSDVATVNVNVTDINDNTPVFSQDTYTTVISEDAVLEQSVITVMADDADGPSNSHIHYSIIDGNQGSSFTIDPVRGEVKVTKLLDRETISGYTLTVQASDNGSPPRVNTTTVNIDVSDVNDNAPVFSRGNYSVIIQENKPVGFSVLQLVVTDEDSSHNGPPFFFTIVTGNDEKAFEVNPQGVLLTSSAIKRKEKDHYLLQVKVADNGKPQLSSLTYIDIRVIEESIYPPAILPLEIFITSSGEEYSGGVIGKIHATDQDVYDTLTYSLDPQMDNLFSVSSTGGKLIAHKKLDIGQYLLNVSVTDGKFTTVADITVHIRQVTQEMLNHTIAIRFANLTPEEFVGDYWRNFQRALRNILGVRRNDIQIVSLQSSEPHPHLDVLLFVEKPGSAQISTKQLLHKINSSVTDIEEIIGVRILNVFQKLCAGLDCPWKFCDEKVSVDESVMSTHSTARLSFVTPRHHRAAVCLCKEGRCPPVHHGCEDDPCPEGSECVSDPWEEKHTCVCPSGRFGQCPGSSSMTLTGNSYVKYRLTENENKLEMKLTMRLRTYSTHAVVMYARGTDYSILEIHHGRLQYKFDCGSGPGIVSVQSIQVNDGQWHAVALEVNGNYARLVLDQVHTASGTAPGTLKTLNLDNYVFFGGHIRQQGTRHGRSPQVGNGFRGCMDSIYLNGQELPLNSKPRSYAHIEESVDVSPGCFLTATEDCASNPCQNGGVCNPSPAGGYYCKCSALYIGTHCEISVNPCSSKPCLYGGTCVVDNGGFVCQCRGLYTGQRCQLSPYCKDEPCKNGGTCFDSLDGAVCQCDSGFRGERCQSDIDECSGNPCLHGALCENTHGSYHCNCSHEYRGRHCEDAAPNQYVSTPWNIGLAE

SEQ ID NO: 1243 - protein, 4030 aa, synthetic construct
  REGION 1..4030: note = FAT2 (Q9NYQ8) ECD
EKPLEGILSSSAWHFTHSHYNATIYENSSPKTYVESFEKMGIYLAEPQWAVRYRIISGDVANVFKTEEYVVGNFCFLRIRTKSSNTALLNREVRDSYTLIIQATEKTLELEALTRVVVHILDQNDLKPLFSPPSYRVTISEDMPLKSPICKVTATDADLGQNAEFYYAFNTRSEMFAIHPTSGVVTVAGKLNVTWRGKHELQVLAVDRMRKISEGNGFGSLAALVVHVEPALRKPPAIASVVVTPPDSNDGTTYATVLVDANSSGAEVESVEVVGGDPGKHFKAIKSYARSNEFSLVSVKDINWMEYLHGFNLSLQARSGSGPYFYSQIRGFHLPPSKLSSLKFEKAVYRVQLSEFSPPGSRVVMVRVTPAFPNLQYVLKPSSENVGFKLNARTGLITTTKLMDFHDRAHYQLHIRTSPGQASTVVVIDIVDCNNHAPLFNRSSYDGTLDENIPPGTSVLAVTATDRDHGENGYVTYSIAGPKALPFSIDPYLGIISTSKPMDYELMKRIYTFRVRASDWGSPFRREKEVSIFLQLRNLNDNQPMFEEVNCTGSIRQDWPVGKSIMTMSAIDVDELQNLKYEIVSGNELEYFDLNHFSGVISLKRPFINLTAGQPTSYSLKITASDGKNYASPTTLNITVVKDPHFEVPVTCDKTGVLTQFTKTILHFIGLQNQESSDEEFTSLSTYQINHYTPQFEDHFPQSIDVLESVPINTPLARLAATDPDAGFNGKLVYVIADGNEEGCFDIELETGLLTVAAPLDYEATNFYILNVTVYDLGTPQKSSWKLLTVNVKDWNDNAPRFPPGGYQLTISEDTEVGTTIAELTTKDADSEDNGRVRYTLLSPTEKFSLHPLTGELVVTGHLDRESEPRYILKVEARDQPSKGHQLFSVTDLIITLEDVNDNSPQCITEHNRLKVPEDLPPGTVLTFLDASDPDLGPAGEVRYVLMDGAHGTFRVDLMTGALILERELDFERRAGYNLSLWASDGGRPLARRTLCHVEVIVLDVNENLHPPHFASFVHQGQVQENSPSGTQVIVVAAQDDDSGLDGELQYFLRAGTGLAAFSINQDTGMIQTLAPLDREFASYYWLTVLAVDRGSVPLSSVTEVYIEVTDANDNPPQMSQAVFYPSIQEDAPVGTSVLQLDAWDPDSSSKGKLTFNITSGNYMGFFMIHPVTGLLSTAQQLDRENKDEHILEVTVLDNGEPSLKSTSRVVVGILDVNDNPPIFSHKLFNVRLPERLSPVSPGPVYRLVASDLDEGLNGRVTYSIEDSDEEAFSIDLVTGVVSSSSTFTAGEYNILTIKATDSGQPPLSASVRLHIEWIPWPRPSSIPLAFDETYYSFTVMETDPVNHMVGVISVEGRPGLFWFNISGGDKDMDFDIEKTTGSIVIARPLDTRRRSNYNLTVEVTDGSRTIATQVHIFMIANINHHRPQFLETRYEVRVPQDTVPGVELLRVQAIDQDKGKSLIYTIHGSQDPGSASLFQLDPSSGVLVTVGKLDLGSGPSQHTLTVMVRDQEIPIKRNFVWVTIHVEDGNLHPPRFTQLHYEASVPDTIAPGTELLQVRAMDADRGVNAEVHYSLLKGNSEGFFNINALLGIITLAQKLDQANHAPHTLTVKAEDQGSPQWHDLATVIIHVYPSDRSAPIFSKSEYFVEIPESIPVGSPILLVSAMSPSEVTYELREGNKDGVFSMNSYSGLISTQKKLDHEKISSYQLKIRGSNMAGAFTDVMVVVDIIDENDNAPMFLKSTFVGQISEAAPLYSMIMDKNNNPFVIHASDSDKEANSLLVYKILEPEALKFFKIDPSMGTLTIVSEMDYESMPSFQFCVYVHDQGSPVLFAPRPAQVIIHVRDVNDSPPRFSEQIYEVAIVGPIHPGMELLMVRASDEDSEVNYSIKTGNADEAVTIHPVTGSISVLNPAFLGLSRKLTIRASDGLYQDTALVKISLTQVLDKSLQFDQDVYWAAVKENLQDRKALVILGAQGNHLNDTLSYFLLNGTDMFHMVQSAGVLQTRGVAFDREQQDTHELAVEVRDNRTPQRVAQGLVRVSIEDVNDNPPKFKHLPYYTIIQDGTEPGDVLFQVSATDEDLGTNGAVTYEFAEDYTYFRIDPYLGDISLKKPFDYQALNKYHLKVIARDGGTPSLQSEEEVLVTVRNKSNPLFQSPYYKVRVPENITLYTPILHTQARSPEGLRLIYNIVEEEPLMLFTTDFKTGVLTVTGPLDYESKTKHVFTVRATDTALGSFSEATVEVLVEDVNDNPPTFSQLVYTTSISEGLPAQTPVIQLLASDQDSGRNRDVSYQIVEDGSDVSKFFQINGSTGEMSTVQELDYEAQQHFHVKVRAMDKGDPPLTGETLVVVNVSDINDNPPEFRQPQYEANVSELATCGHLVLKVQAIDPDSRDTSRLEYLILSGNQDRHFFINSSSGIISMFNLCKKHLDSSYNLRVGASDGVFRATVPVYINTTNANKYSPEFQQHLYEAELAENAMVGTKVIDLLAIDKDSGPYGTIDYTIINKLASEKFSINPNGQIATLQKLDRENSTERVIAIKVMARDGGGRVAFCTVKIILTDENDNPPQFKASEYTVSIQSNVSKDSPVIQVLAYDADEGQNADVTYSVNPEDLVKDVIEINPVTGVVKVKDSLVGLENQTLDFFIKAQDGGPPHWNSLVPVRLQVVPKKVSLPKFSEPLYTFSAPEDLPEGSEIGIVKAVAAQDPVIYSLVRGTTPESNKDGVFSLDPDTGVIKVRKPMDHESTKLYQIDVMAHCLQNTDVVSLVSVNIQVGDVNDNRPVFEADPYKAVLTENMPVGTSVIQVTAIDKDTGRDGQVSYRLSADPGSNVHELFAIDSESGWITTLQELDCETCQTYHFHVVAYDHGQTIQLSSQALVQVSITDENDNAPRFASEEYRGSVVENSEPGELVATLKTLDADISEQNRQVTCYITEGDPLGQFGISQVGDEWRISSRKTLDREHTAKYLLRVTASDGKFQASVTVEIFVLDVNDNSPQCSQLLYTGKVHEDVFPGHFILKVSATDLDTDTNAQITYSLHGPGAHEFKLDPHTGELTTLTALDRERKDVFNLVAKATDGGGRSCQADITLHVEDVNDNAPRFFPSHCAVAVFDNTTVKTPVAVVFARDPDQGANAQVVYSLPDSAEGHFSIDATTGVIRLEKPLQVRPQAPLELTVRASDLGTPIPLSTLGTVTVSVVGLEDYLPVFLNTEHSVQVPEDAPPGTEVLQLATLTRPGAEKTGYRVVSGNEQGRFRLDARTGILYVNASLDFETSPKYFLSIECSRKSSSSLSDVTTVMVNITDVNEHRPQFPQDPYSTRVLENALVGDVILTVSATDEDGPLNSDITYSLIGGNQLGHFTIHPKKGELQVAKALDREQASSYSLKLRATDSGQPPLHEDTDIAIQVADVNDNPPRFFQLNYSTTVQENSPIGSKVLQLILSDPDSPENGPPYSFRITKGNNGSAFRVTPDGWLVTAEGLSRRAQEWYQLQIQASDSGIPPLSSLTSVRVHVTEQSHYAPSALPLEIFITVGEDEFQGGMVGKIHATDRDPQDTLTYSLAEEETLGRHFSVGAPDGKIIAAQGLPRGHYSFNVTVSDGTFTTTAGVHVYVWHVGQEALQQAMWMGFYQLTPEELVSDHWRNLQRFLSHKLDIKRANIHLASLQPAEAVAGVDVLLVFEGHSGTFYEFQELASIITHSAKEMEHSVGVQMRSAMPMVPCQGPTCQGQICHNTVHLDPKVGPTYSTARLSILTPRHHLQRSCSCNGTATRFSGQSYVRYRAPAARNWHIHFYLKTLQPQAILLFTNETASVSLKLASGVPQLEYHCLGGFYGNLSSQRHVNDHEWHSILVEEMDASIRLMVDSMGNTSLVVPENCRGLRPERHLLLGGLILLHSSSNVSQGFEGCLDAVVVNEEALDLLAPGKTVAGLLETQALTQCCLHSDYCSQNTCLNGGKCSWTHGAGYVCKCPPQFSGKHCEQGRENCTFAPCLEGGTCILSPKGASCNCPHPYTGDRCEMEARGCSEGHCLVTPEIQRGDWGQQE

SEQ ID NO: 1244 - protein, 4122 aa, synthetic construct
  REGION 1..4122: note = FAT3 (Q8TDW7) ECD
LPGTGPLGFHFTHSIYNATVYENSAARTYVNSQSRMGITLIDLSWDIKYRIVSGDEEGFFKAEEVIIADFCFLRIRTKGGNSAILNREIQDNYLLIVKGSVRGEDLEAWTKVNIQVLDMNDLRPLFSPTTYSVTIAESTPLRTSVAQVTATDADIGSNGEFYYYFKNKVDLFSVHPTSGVISLSGRLNYDEKNRYDLEILAVDRGMKLYGNNGVSSTAKLYVHIERINEHAPTIHVVTHVPFSLEKEPTYAVVTVDDLDDGANGEIESVSIVAGDPLDQFFLAKEGKWLNEYKIKERKQIDWESFPYGYNLTLQAKDKGSPQKCSALKAVYIGNPTRDTVPIRFEKEVYDVSISEFSPPGVVVAIVKLSPEPIDVEYKLSPGEDAVYFKINPRSGLIVTARPLNTVKKEVYKLEVTNKEGDLKAQVTISIEDANDHTPEFQQPLYDAYVNESVPVGTSVLTVSASDKDKGENGYITYSIASLNLLPFVINQFTGVISTTEELDFESSPEIYRFIVRASDWGSPYRHESEVNVTIRIGNVNDNSPLFEKVACQGVISYDFPVGGHITAVSAIDIDELELVKYKIISGNELGFFYLNPDSGVLQLKKSLTNSGIKNGNFALRITATDGENLADPMSINISVLHGKVSSKSFSCRETRVAQKLAEKLLIKAKANGKLNLEDGFLDFYSINRQGPYFDKSFPSDVAVKEDLPVGANILKIKAYDADSGFNGKVLFTISDGNTDSCFNIDMETGQLKVLMPMDREHTDLYLLNITIYDLGNPQKSSWRLLTINVEDANDNSPVFIQDSYSVNILESSGIGTEIIQVEARDKDLGSNGEVTYSVLTDTQQFAINSSTGIVYVADQLDRESKANYSLKIEARDKAESGQQLFSVVTLKVFLDDVNDCSPAFIPSSYSVKVLEDLPVGTVIAWLETHDPDLGLGGQVRYSLVNDYNGRFEIDKASGAIRLSKELDYEKQQFYNLTVRAKDKGRPVSLSSVSFVEVEVVDVNENLHTPYFPDFAVVGSVKENSRIGTSVLQVTARDEDSGRDGEIQYSIRDGSGLGRFSIDDESGVITAADILDRETMGSYWLTVYATDRGVVPLYSTIEVYIEVEDVNDNAPLTSEPIYYPVVMENSPKDVSVIQIQAEDPDSSSNEKLTYRITSGNPQNFFAINIKTGLITTTSRKLDREQQAEHFLEVTVTDGGPSPKQSTIWVVVQVLDENDNKPQFPEKVYQIKLPERDRKKRGEPIYRAFAFDRDEGPNAEISYSIVDGNDDGKFFIDPKTGMVSSRKQFTAGSYDILTIKAVDNGRPQKSSTARLHIEWIKKPPPSPIPLTFDEPFYNFTVMESDRVTEIVGVVSVQPANTPLWFDIVGGNFDSAFDAEKGVGTIVIAKPLDAEQRSIYNMSVEVTDGTNVAVTQVFIKVLDNNDNGPEFSQPNYDVTISEDVLPDTEILQIEATDRDEKHKLSYTVHSSIDSISMRKFRIDPSTGVLYTAERLDHEAQDKHILNIMVRDQEFPYRRNLARVIVNVEDANDHSPYFTNPLYEASVFESAALGSAVLQVTALDKDKGENAELIYTIEAGNTGNMFKIEPVLGIITICKEPDMTTMGQFVLSIKVTDQGSPPMSATAIVRISVTMSDNSHPKFIHKDYQAEVNENVDIGTSVILISAISQSTLIYEVKDGDINGIFTINPYSGVITTQKALDYERTSSYQLIIQATNMAGMASNATVNIQIVDENDNAPVFLFSQYSGSLSEAAPINSIVRSLDNSPLVIRATDADSNRNALLVYQIVESTAKKFFTVDSSTGAIRTIANLDHETIAHFHFHVHVRDSGSPQLTAESPVEVNIEVTDVNDNPPVFTQAVFETILLLPTYVGVEVLKVSATDPDSEVPPELTYSLMEGSLDHFLIDSNSGVLTIKNNNLSKDHYMLIVKVSDGKFYSTSMVTIMVKEAMDSGLHFTQSFYSTSISENNTNITKVAIVNAVGNRLNEPLKYSILNPGNKFKIKSTSGVIQTTGVPFDREEQELYELVVEASRELDHLRVARVVVRVNIEDINDNSPVFVGLPYYAAVQVDAEPGTLIYQVTAIDKDKGPNGEVTYVLQDDYGHFEINPNSGNVILKEAFNSDLSNIEYGVTILAKDGGKPSLSTSVELPITIVNKAMPVFDKPFYTASVNEDIRMNTPILSINATSPEGQGIIYIIIDGDPFKQFNIDFDTGVLKVVSPLDYEVTSAYKLTIRASDALTGARAEVTVDLLVNDVNDNPPIFDQPTYNTTLSEASLIGTPVLQVVSIDADSENNKMVHYQIVQDTYNSTDYFHIDSSSGLILTARMLDHELVQHCTLKVRSIDSGFPSLSSEVLVHIYISDVNDNPPVFNQLIYESYVSELAPRGHFVTCVQASDADSSDFDRLEYSILSGNDRTSFLMDSKSGVITLSNHRKQRMEPLYSLNVSVSDGLFTSTAQVHIRVLGANLYSPAFSQSTYVAEVRENVAAGTKVIHVRATDGDPGTYGQISYAIINDFAKDRFLIDSNGQVITTERLDRENPLEGDVSIFVRALDGGGRTTFCTVRVIVVDENDNAPQFMTVEYRASVRADVGRGHLVTQVQAIDPDDGANSRITYSLYSEASVSVADLLEIDPDNGWMVTKGNFNQLKNTVLSFFVKAVDGGIPVKHSLIPVYIHVLPPETFLPSFTQSQYSFTIAEDTAIGSTVDTLRILPSQNVWFSTVNGERPENNKGGIFVIEQETGTIKLDKRLDRETSPAFHFKVAATIPLDKVDIVFTVDVDIKVLDLNDNKPVFETSSYDTIIMEGMPVGTKLTQVRAIDMDWGANGQVTYSLHSDSQPEKVMEAFNIDSNTGWISTLKDLDHETDPTFTFSVVASDLGEAFSLSSTALVSVRVTDINDNAPVFAQEVYRGNVKESDPPGEVVAVLSTWDRDTSDVNRQVSYHITGGNPRGRFALGLVQSEWKVYVKRPLDREEQDIYFLNITATDGLFVTQAMVEVSVSDVNDNSPVCDQVAYTALLPEDIPSNKIILKVSAKDADIGSNGYIRYSLYGSGNSEFFLDPESGELKTLALLDRERIPVYSLMAKATDGGGRFCQSNIHLILEDVNDNPPVFSSDHYNTCVYENTATKALLTRVQAVDPDIGINRKVVYSLADSAGGVFSIDSSSGIIILEQPLDREQQSSYNISVRATDQSPGQSLSSLTTVTITVLDINDNPPVFERRDYLVTVPEDTSPGTQVLAVFATSKDIGTNAEITYLIRSGNEQGKFKINPKTGGISVSEVLDYELCKRFYLVVEAKDGGTPALSAVATVNINLTDVNDNPPKFSQDVYSAVISEDALVGDSVILLIAEDVDSQPNGQIHFSIVNGDRDNEFTVDPVLGLVKVKKKLDRERVSGYSLLVQAVDSGIPAMSSTATVNIDISDVNDNSPVFTPANYTAVIQENKPVGTSILQLVVTDRDSFHNGPPFSFSILSGNEEEEFVLDPHGILRSAVVFQHTESLEYVLCVQAKDSGKPQQVSHTYIRVRVIEESTHKPTAIPLEIFIVTMEDDFPGGVIGKIHATDQDMYDVLTFALKSEQKSLFKVNSHDGKIIALGGLDSGKYVLNVSVSDGRFQVPIDVVVHVEQLVHEMLQNTVTIRFENVSPEDFVGLHMHGFRRTLRNAVLTQKQDSLRIISIQPVAGTNQLDMLFAVEMHSSEFYKPAYLIQKLSNARRHLENIMRISAILEKNCSGLDCQEQHCEQGLSLDSHALMTYSTARISFVCPRFYRNVRCTCNGGLCPGSNDPCVEKPCPGDMQCVSYEASRRPFLCQCPPGKLGECSGHTSLSFAGNSYIKYRLSENSKEEDFKLALRLRTLQSNGIIMYTRANPCIILKIVDGKLWFQLDCGSGPGILGISGRAVNDGSWHSVFLELNRNFTSLSLDDSYVERRRAPLYFQTLSTESSIYFGALVQADNIRSLTDTRVTQVLSGFQGCLDSVILNNNELPLQNKRSSFAEVVGLTELKLGCVLYPDACKRSPCQHGGSCTGLPSGGYQCTCLSQFTGRNCESEITACFPNPCRNGGSCDPIGNTFICNCKAGLTGVTCEEDINECEREECENGGSCVNVFGSFLCNCTPGYVGQYCGLRPVVVPNIQAGHSYVGKEE

SEQ ID NO: 1245 - protein, 4466 aa, synthetic construct
  REGION 1..4466: note = FAT4 (Q6V0I7) ECD
WVHGAEPRQVFQVLEEQPPGTLVGTIQTRPGFTYRLSESHALFAINSSTGALYTTSTIDRESLPSDVINLVVLSSAPTYPTEVRVLVRDLNDNAPVFPDPSIVVTFKEDSSSGRQVILDTATDSDIGSNGVDHRSYRIIRGNEAGRFRLDITLNPSGEGAFLHLVSKGGLDREVTPQYQLLVEVEDKGEPKRRGYLQVNVTVQDINDNPPVFGSSHYQAGVPEDAVVGSSVLQVAAADADEGTNADIRYRLQDEGTPFQMDPETGLITVREPLDFEARRQYSLTVQAMDRGVPSLTGRAEALIQLLDVNDNDPVVKFRYFPATSRYASVDENAQVGTVVALLTVTDADSPAANGNISVQILGGNEQRHFEVQSSKVPNLSLIKVASALDRERIPSYNLTVSVSDNYGAPPGAAVQARSSVASLVIFVNDINDHPPVFSQQVYRVNLSEEAPPGSYVSGISATDGDSGLNANLRYSIVSGNGLGWFHISEHSGLVTTGSSGGLDRELASQIVLNISARDQGVHPKVSYAQLVVTLLDVNDEKPVFSQPEGYDVSVVENAPTGTELLMLRATDGDLGDNGTVRFSLQEAETDRRSFRLDPVSGRLSTISSLDREEQAFYSLLVLATDLGSPPQSSMARINVSLLDINDNSPVFYPVQYFAHIKENEPGGSYITTVSATDPDLGTNGTVKYSISAGDRSRFQVNAQSGVISTRMALDREEKTAYQLQIVATDGGNLQSPNQAIVTITVLDTQDNPPVFSQVAYSFVVFENVALGYHVGSVSASTMDLNSNISYLITTGDQKGMFAINQVTGQLTTANVIDREEQSFYQLKVVASGGTVTGDTMVNITVKDLNDNSPHFLQAIESVNVVENWQAGHSIFQAKAVDPDEGVNGMVLYSLKQNPKNLFAINEKNGTISLLGPLDVHAGSYQIEILASDMGVPQLSSSVILTVYVHDVNDNSPVFDQLSYEVTLSESEPVNSRFFKVQASDKDSGANGEIAYTIAEGNTGDAFGIFPDGQLYIKSELDRELQDRYVLMVVASDRAVEPLSATVNVTVILEDVNDNRPLFNSTNYTFYFEEEQRAGSFVGKVSAVDKDFGPNGEVRYSFEMVQPDFELHAISGEITNTHQFDRESLMRRRGTAVFSFTVIATDQGIPQPLKDQATVHVYMKDINDNAPKFLKDFYQATISESAANLTQVLRVSASDVDEGNNGLIHYSIIKGNEERQFAIDSTSGQVTLIGKLDYEATPAYSLVIQAVDSGTIPLNSTCTLNIDILDENDNTPSFPKSTLFVDVLENMRIGELVSSVTATDSDSGDNADLYYSITGTNNHGTFSISPNTGSIFLAKKLDFETQSLYKLNITAKDQGRPPRSSTMSVVIHVRDFNDNPPSFPPGDIFKSIVENIPIGTSVISVTAHDPDADINGQLSYTIIQQMPRGNHFTIDEVKGTIYTNAEIDREFANLFELTVKANDQAVPIETRRYALKNVTILVTDLNDNVPMFISQNALAADPSAVIGSVLTTIMAADPDEGANGEIEYEIINGDTDTFIVDRYSGDLRVASALVPSQLIYNLIVSATDLGPERRKSTTELTIILQGLDGPVFTQPKYITILKEGEPIGTNVISIEAASPRGSEAPVEYYIVSVRCEEKTVGRLFTIGRHTGIIQTAAILDREQGACLYLVDVYAIEKSTAFPRTQRAEVEITLQDINDNPPVFPTDMLDLTVEENIGDGSKIMQLTAMDADEGANALVTYTIISGADDSFRIDPESGDLIATRRLDRERRSKYSLLVRADDGLQSSDMRINITVSDVNDHTPKFSRPVYSFDIPEDTIPGSLVAAILATDDDSGVNGEITYIVNEDDEDGIFFLNPITGVFNLTRLLDYEVQQYYILTVRAEDGGGQFTTIRVYFNILDVNDNPPIFSLNSYSTSLMENLPVGSTVLVFNVTDADDGINSQLTYSIASGDSLGQFTVDKNGVLKVLKALDRESQSFYNLVVQVHDLPQIPASRFTSTAQVSIILLDVNDNPPTFLSPKLTYIPENTPIDTVVFKAQATDPDSGPNSYIEYTLLNPLGNKFSIGTIDGEVRLTGELDREEVSNYTLTVVATDKGQPSLSSSTEVVVMVLDINDNNPIFAQALYKVEINENTLTGTDIIQVFAADGDEGTNGQVRYGIVNGNTNQEFRIDSVTGAITVAKPLDREKTPTYHLTVQATDRGSTPRTDTSTVSIVLLDINDFVPVFELSPYSVNVPENLGTLPRTILQVVARDDDRGSNSKLSYVLFGGNEDNAFTLSASGELGVTQSLDRETKERFVLMITATDSGSPALTGTGTINVIVDDVNDNVPTFASKAYFTTIPEDAPTGTDVLLVNASDADASKNAVIRIIGGNSQFTINPSTGQIITSALLDRETKDNYTLVVVCSDAGSPEPLSSSTSVLVTVTDVNDNPPRFQHHPYVTHIPSPTLPGSFVFAVTVTDADIGPNSELHYSLSGRNSEKFHIDPLRGAIMAAGPLNGASEVTFSVHVKDGGSFPKTDSTTVTVRFVNKADFPKVRAKEQTFMFPENQPVSSLVTTITGSSLRGEPMSYYIASGNLGNTFQIDQLTGQVSISQPLDFEKIQKYVVWIEARDGGFPPFSSYEKLDITVLDVNDNAPIFKEDPFISEILENLSPRKILTVSAMDKDSGPNGQLDYEIVNGNMENSFSINHATGEIRSVRPLDREKVSHYVLTIKSSDKGSPSQSTSVKVMINILDENDNAPRFSQIFSAHVPENSPLGYTVTRVTTSDEDIGINAISRYSIMDASLPFTINPSTGDIVISRPLNREDTDRYRIRVSAHDSGWTVSTDVTIFVTDINDNAPRFSRTSYYLDCPELTEIGSKVTQVFATDPDEGSNGQVFYFIKSQSEYFRINATTGEIFNKQILKYQNVTGFSNVNINRHSFIVTSSDRGKPSLISETTVTINIVDSNDNAPQFLKSKYFTPVTKNVKVGTKLIRVTAIDDKDFGLNSEVEYFISNDNHLGKFKLDNDTGWISVASSLISDLNQNFFITVTAKDKGNPPLSSQATVHITVTEENYHTPEFSQSHMSATIPESHSIGSIVRTVSARDRDAAMNGLIKYSISSGNEEGIFAINSSTGILTLAKALDYELCQKHEMTISAIDGGWVARTGYCSVTVNVIDVNDNSPVFLSDDYFPTVLENAPSGTTVIHLNATDADSGTNAVIAYTVQSSDSDLFVIDPNTGVITTQGFLDFETKQSYHLTVKAFNVPDEERCSFATVNIQLKGTNEYVPRFVSKLYYFEISEAAPKGTIVGEVFASDRDLGTDGEVHYLIFGNSRKKGFQINKKTGQIYVSGILDREKEERVSLKVLAKNFGSIRGADIDEVTVNVTVLDANDPPIFTLNIYSVQISEGVPIGTHVTFVSAFDSDSIPSWSRFSYFIGSGNENGAFSINPQTGQITVTAELDRETLPIYNLSVLAVDSGTPSATGSASLLVTLEDINDNGPMLTVSEGEVMENKRPGTLVMTLQSTDPDLPPNQGPFTYYLLSTGPATSYFSLSTAGVLSTTREIDREQIADFYLSVVTKDSGVPQMSSTGTVHITVIDQNDNPSQSRTVEIFVNYYGNLFPGGILGSVKPQDPDVLDSFHCSLTSGVTSLFSIPGGTCDLNSQPRSTDGTFDLTVLSNDGVHSTVTSNIRVFFAGFSNATVDNSILLRLGVPTVKDFLTNHYLHFLRIASSQLTGLGTAVQLYSAYEENNRTFLLAAVKRNHNQYVNPSGVATFFESIKEILLRQSGVKVESVDHDSCVHGPCQNGGSCLRRLAVSSVLKSRESLPVIIVANEPLQPFLCKCLPGYAGSWCEIDIDECLPSPCHSGGTCHNLVGGFSCSCPDGFTGRACERDINECLQSPCKNGAICQNFPGSFNCVCKTGYTGKMCESSVNYCECNPCFNGGSCQSGVDSYYCHCPFGVFGKHCELNSYGFEELSYMEFPSLDPNNNYIYVKFATIKSHALLLYNYDNQTGDRAEFLALEIAEERLRFSYNLGSGTYKLTTMKKVSDGHFHTVIARRAGMAASLTVDSCSENQEPGYCTVSNVAVSDDWTLDVQPNRVTVGGIRSLEPILQRRGHVESHDFVGCIMEFAVNGRPLEPSQALAAQGILDQCPRLEGACTRSPCQHGGTCMDYWSWQQCHCKEGLTGKYCEKSVTPDTALSLEGKGRLDYHMSQNEKREYLLRQSLRGAMLEPFGVNSLEVKFRTRSENGVLIHIQESSNYTTVKIKNGKVYFTSDAGIAGKVERNIPEVYVADGHWHTFLIGKNGTATVLSVDRIYNRDIIHPTQDFGGLDVLTISLGGIPPNQAHRDAQTAGFDGCIASMWYGGESLPFSGKHSLASISKTDPSVKIGCRGPNICASNPCWGDLLCINQWYAYRCVPPGDCASHPCQNGGSCEPGLHSGFTCSCPDSHTGRTCEMVVACLGVLCPQGKVCKAGSPAGHVCVLSQGPEEISLPLWA

SEQ ID NO: 1246 - protein, 434 aa, synthetic construct
  REGION 1..434: note = FCAMR (Q8WWV6) ECD
LPQKRPHPRWLWEGSLPSRTHLRAMGTLRPSSPLCWREESSFAAPNSLKGSRLVSGEPGGAVTIQCHYAPSSVNRHQRKYWCRLGPPRWICQTIVSTNQYTHHRYRDRVALTDFPQRGLFVVRLSQLSPDDIGCYLCGIGSENNMLFLSMNLTISAGPASTLPTATPAAGELTMRSYGTASPVANRWTPGTTQTLGQGTAWDTVASTPGTSKTTASAEGRRTPGATRPAAPGTGSWAEGSVKAPAPIPESPPSKSRSMSNTTEGVWEGTRSSVTNRARASKDRREMTTTKADRPREDIEGVRIALDAAKKVLGTIGPPALVSETLAWEILPQATPVSKQQSQGSIGETTPAAGMWTLGTPAADVWILGTPAADVWTSMEAASGEGSAAGDLDAATGDRGPQATLSQTPAVGPWGPPGKESSVKRTFPEDESSSR

SEQ ID NO: 1247 - protein, 206 aa, synthetic construct
  REGION 1..206: note = FCAR (P24071) ECD
QEGDFPMPFISAKSSPVIPLDGSVKIQCQAIREAYLTQLMIIKNSTYREIGRRLKFWNETDPEFVIDHMDANKAGRYQCQYRIGHYRFRYSDTLELVVTGLYGKPFLSADRGLVLMPGENISLTCSSAHIPFDRFSLAKEGELSLPQHQSGEHPANFSLGPVDLNVSGIYRCYGWYNRSPYLWSFPSNALELVVTDSIHQDYTTQN

SEQ ID NO: 1248 - protein, 180 aa, synthetic construct
  REGION 1..180: note = FCER1A (P12319) ECD
VPQKPKVSLNPPWNRIFKGENVTLTCNGNNFFEVSSTKWFHNGSLSEETNSSLNIVNAKFEDSGEYKCQHQQVNESEPVYLEVFSDWLLLQASAEVVMEGQPLFLRCHGWRNWDVYKVIYYKDGEALKYWYENHNISITNATVEDSGTYYCTGKVWQLDYESEPLNITVIKAPREKYWLQ

SEQ ID NO: 1249 - protein, 277 aa, synthetic construct [sequence omitted]

SEQ ID NO: 1250 - protein, 183 aa, synthetic construct
  REGION 1..183: note = FCGR1B (Q92637) ECD
QVDTTKAVITLQPPWVSVFQEETVTLHCEVLHLPGSSSTQWFLNGTATQTSTPSYRITSASVNDSGEYRCQRGLSGRSDPIQLEIHRGWLLLQVSSRVFMEGEPLALRCHAWKDKLVYNVLYYRNGKAFKFFHWNSNLTILKTNISHNGTYHCSGMGKHRYTSAGISQYTVKGLQLPTPVWFH

SEQ ID NO: 1251 - protein, 184 aa, synthetic construct
  REGION 1..184: note = FCGR2A (P12318) ECD
QAAAPPKAVLKLEPPWINVLQEDSVTLTCQGARSPESDSIQWFHNGNLIPTHTQPSYRFKANNNDSGEYTCQTGQTSLSDPVHLTVLSEWLVLQTPHLEFQEGETIMLRCHSWKDKPLVKVTFFQNGKSQKFSHLDPTFSIPQANHSHSGDYHCTGNIGYTLFSSKPVTITVQVPSMGSSSPMG

SEQ ID NO: 1252 - protein, 175 aa, synthetic construct
  REGION 1..175: note = FCGR2B (P31994) ECD
TPAAPPKAVLKLEPQWINVLQEDSVTLTCRGTHSPESDSIQWFHNGNLIPTHTQPSYRFKANNNDSGEYTCQTGQTSLSDPVHLTVLSEWLVLQTPHLEFQEGETIVLRCHSWKDKPLVKVTFFQNGKSKKFSRSDPNFSIPQANHSHSGDYHCTGNIGYTLYSSKPVTITVQAP

SEQ ID NO: 1253 - protein, 181 aa, synthetic construct
  REGION 1..181: note = FCGR2C (P31995) ECD
TPAAPPKAVLKLEPQWINVLQEDSVTLTCRGTHSPESDSIQWFHNGNLIPTHTQPSYRFKANNNDSGEYTCQTGQTSLSDPVHLTVLSEWLVLQTPHLEFQEGETIVLRCHSWKDKPLVKVTFFQNGKSKKFSRSDPNFSIPQANHSHSGDYHCTGNIGYTLYSSKPVTITVQAPSSSPMG

SEQ ID NO: 1254 - protein, 192 aa, synthetic construct
  REGION 1..192: note = FCGR3A (P08637) ECD
GMRTEDLPKAVVFLEPQWYRVLEKDSVTLKCQGAYSPEDNSTQWFHNESLISSQASSYFIDAATVDDSGEYRCQTNLSTLSDPVQLEVHIGWLLLQAPRWVFKEEDPIHLRCHSWKNTALHKVTYLQNGKGRKYFHHNSDFYIPKATLKDSGSYFCRGLFGSKNVSSETVNITITQGLAVSTISSFFPPGYQ

SEQ ID NO: 1255 - protein, 274 aa, synthetic construct
  REGION 1..274: note = FCGRT (P55899) ECD
AESHLSLLYHLTAVSSPAPGTPAFWVSGWLGPQQYLSYNSLRGEAEPCGAWVWENQVSWYWEKETTDLRIKEKLFLEAFKALGGKGPYTLQGLLGCELGPDNTSVPTAKFALNGEEFMNFDLKQGTWGGDWPEALAISQRWQQQDKAANKELTFLLFSCPHRLREHLERGRGNLEWKEPPSMRLKARPSSPGFSVLTCSAFSFYPPELQLRFLRNGLAAGTGQGDFGPNSDGSFHASSSLTVKSGDEHHYCCIVQHAGLAQPLRVELESPAKSS

SEQ ID NO: 1256 - protein, 291 aa, synthetic construct
  REGION 1..291: note = FCRL1 (Q96LA6) ECD
AELFLIASPSHPTEGSPVTLTCKMPFLQSSDAQFQFCFFRDTRALGPGWSSSPKLQIAAMWKEDTGSYWCEAQTMASKVLRSRRSQINVHRVPVADVSLETQPPGGQVMEGDRLVLICSVAMGTGDITFLWYKGAVGLNLQSKTQRSLTAEYEIPSVRESDAEQYYCVAENGYGPSPSGLVSITVRIPVSRPILMLRAPRAQAAVEDVLELHCEALRGSPPILYWFYHEDITLGSRSAPSGGGASFNLSLTEEHSGNYSCEANNGLGAQRSEAVTLNFTVPTGARSNHLTS

SEQ ID NO: 1257 - protein, 382 aa, synthetic construct
  REGION 1..382: note = FCRL2 (Q96LA5) ECD
LTLVAPSSVFEGDSIVLKCQGEQNWKIQKMAYHKDNKELSVFKKFSDFLIQSAVLSDSGNYFCSTKGQLFLWDKTSNIVKIKVQELFQRPVLTASSFQPIEGGPVSLKCETRLSPQRLDVQLQFCFFRENQVLGSGWSSSPELQISAVWSEDTGSYWCKAETVTHRIRKQSLQSQIHVQRIPISNVSLEIRAPGGQVTEGQKLILLCSVAGGTGNVTFSWYREATGTSMGKKTQRSLSAELEIPAVKESDAGKYYCRADNGHVPIQSKVVNIPVRIPVSRPVLTLRSPGAQAAVGDLLELHCEALRGSPPILYQFYHEDVTLGNSSAPSGGGASFNLSLTAEHSGNYSCEANNGLGAQCSEAVPVSISGPDGYRRDLMTAGV

SEQ ID NO: 1258 - protein, 556 aa, synthetic construct
  REGION 1..556: note = FCRL3 (Q96P31) ECD
GVAPKAVLLLNPPWSTAFKGEKVALICSSISHSLAQGDTYWYHDEKLLKIKHDKIQITEPGNYQCKTRGSSLSDAVHVEFSPDWLILQALHPVFEGDNVILRCQGKDNKNTHQKVYYKDGKQLPNSYNLEKITVNSVSRDNSKYHCTAYRKFYILDIEVTSKPLNIQVQELFLHPVLRASSSTPIEGSPMTLTCETQLSPQRPDVQLQFSLFRDSQTLGLGWSRSPRLQIPAMWTEDSGSYWCEVETVTHSIKKRSLRSQIRVQRVPVSNVNLEIRPTGGQLIEGENMVLICSVAQGSGTVTFSWHKEGRVRSLGRKTQRSLLAELHVLTVKESDAGRYYCAADNVHSPILSTWIRVTVRIPVSHPVLTFRAPRAHTVVGDLLELHCESLRGSPPILYRFYHEDVTLGNSSAPSGGGASFNLSLTAEHSGNYSCDADNGLGAQHSHGVSLRVTVPVSRPVLTLRAPGAQAVVGDLLELHCESLRGSFPILYWFYHEDDTLGNISAHSGGGASFNLSLTTEHSGNYSCEADNGLGAQHSKVVTLNVTGTSRNRTGLT

SEQ ID NO: 1259 - protein, 368 aa, synthetic construct
  REGION 1..368: note = FCRL4 (Q96PJ5) ECD
AHKPVISVHPPWTTFFKGERVTLTCNGFQFYATEKTTWYHRHYWGEKLTLTPGNTLEVRESGLYRCQARGSPRSNPVRLLFSSDSLILQAPYSVFEGDTLVLRCHRRRKEKLTAVKYTWNGNILSISNKSWDLLIPQASSNNNGNYRCIGYGDENDVFRSNFKIIKIQELFPHPELKATDSQPTEGNSVNLSCETQLPPERSDTPLHFNFFRDGEVILSDWSTYPELQLPTVWRENSGSYWCGAETVRGNIHKHSPSLQIHVQRIPVSGVLLETQPSGGQAVEGEMLVLVCSVAEGTGDTTFSWHREDMQESLGRKTQRSLRAELELPAIRQSHAGGYYCTADNSYGPVQSMVLNVTVRETPGNRDGL

SEQ ID NO: 1260 - protein, 836 aa, synthetic construct [sequence omitted]

SEQ ID NO: 1261 - protein, 288 aa, synthetic construct
  REGION 1..288: note = FCRL6 (Q6DN72) ECD
LYLQAWPNPVFEGDALTLRCQGWKNTPLSQVKFYRDGKFLHFSKENQTLSMGAATVQSRGQYSCSGQVMYIPQTFTQTSETAMVQVQELFPPPVLSAIPSPEPREGSLVTLRCQTKLHPLRSALRLLFSFHKDGHTLQDRGPHPELCIPGAKEGDSGLYWCEVAPEGGQVQKQSPQLEVRVQAPVSRPVLTLHHGPADPAVGDMVQLLCEAQRGSPPILYSFYLDEKIVGNHSAPCGGTTSLLFPVKSEQDAGNYSCEAENSVSRERSEPKKLSLKGSQVLFTPASNW

SEQ ID NO: 1262 - protein, 355 aa, synthetic construct
  REGION 1..355: note = FGFR1 (P11362) ECD
RPSPTLPEQAQPWGAPVEVESFLVHPGDLLQLRCRLRDDVQSINWLRDGVQLAESNRTRITGEEVEVQDSVPADSGLYACVTSSPSGSDTTYFSVNVSDALPSSEDDDDDDDSSSEEKETDNTKPNRMPVAPYWTSPEKMEKKLHAVPAAKTVKFKCPSSGTPNPTLRWLKNGKEFKPDHRIGGYKVRYATWSIIMDSVVPSDKGNYTCIVENEYGSINHTYQLDVVERSPHRPILQAGLPANKTVALGSNVEFMCKVYSDPQPHIQWLKHIEVNGSKIGPDNLPYVQILKTAGVNTTDKEMEVLHLRNVSFEDAGEYTCLAGNSIGLSHHSAWLTVLEALEERPAVMTSPLYLE

SEQ ID NO: 1263 - protein, 356 aa, synthetic construct
  REGION 1..356: note = FGFR2 (P21802) ECD
RPSFSLVEDTTLEPEEPPTKYQISQPEVYVAAPGESLEVRCLLKDAAVISWTKDGVHLGPNNRTVLIGEYLQIKGATPRDSGLYACTASRTVDSETWYFMVNVTDAISSGDDEDDTDGAEDFVSENSNNKRAPYWTNTEKMEKRLHAVPAANTVKFRCPAGGNPMPTMRWLKNGKEFKQEHRIGGYKVRNQHWSLIMESVVPSDKGNYTCVVENEYGSINHTYHLDVVERSPHRPILQAGLPANASTVVGGDVEFVCKVYSDAQPHIQWIKHVEKNGSKYGPDGLPYLKVLKAAGVNTTDKEIEVLYIRNVTFEDAGEYTCLAGNSIGISFHSAWLTVLPAPGREKEITASPDYLE

SEQ ID NO: 1264 - protein, 353 aa, synthetic construct
  REGION 1..353: note = FGFR3 (P22607) ECD
ESLGTEQRVVGRAAEVPGPEPGQQEQLVFGSGDAVELSCPPPGGGPMGPTVWVKDGTGLVPSERVLVGPQRLQVLNASHEDSGAYSCRQRLTQRVLCHFSVRVTDAPSSGDDEDGEDEAEDTGVDTGAPYWTRPERMDKKLLAVPAANTVRFRCPAAGNPTPSISWLKNGREFRGEHRIGGIKLRHQQWSLVMESVVPSDRGNYTCVVENKFGSIRQTYTLDVLERSPHRPILQAGLPANQTAVLGSDVEFHCKVYSDAQPHIQWLKHVEVNGSKVGPDGTPYVTVLKTAGANTTDKELEVLSLHNVTFEDAGEYTCLAGNSIGFSHHSAWLVVLPAEEELVEADEAGSVYAG

SEQ ID NO: 1265 - protein, 348 aa, synthetic construct
  REGION 1..348: note = FGFR4 (P22455) ECD
LEASEEVELEPCLAPSLEQQEQELTVALGQPVRLCCGRAERGGHWYKEGSRLAPAGRVRGWRGRLEIASFLPEDAGRYLCLARGSMIVLQNLTLITGDSLTSSNDDEDPKSHRDPSNRHSYPQQAPYWTHPQRMEKKLHAVPAGNTVKFRCPAAGNPTPTIRWLKDGQAFHGENRIGGIRLRHQHWSLVMESVVPSDRGTYTCLVENAVGSIRYNYLLDVLERSPHRPILQAGLPANTTAVVGSDVELLCKVYSDAQPHIQWLKHIVINGSSFGADGFPYVQVLKTADINSSEVEVLYLRNVSAEDAGEYTCLAGNSIGLSYQSAWLTVLPEEDPTWTAAAPEARYTD

SEQ ID NO: 1266 - protein, 354 aa, synthetic construct
  REGION 1..354: note = FGFRL1 (Q8N441) ECD
ARGPPKMADKVVPRQVARLGRTVRLQCPVEGDPPPLTMWTKDGRTIHSGWSRFRVLPQGLKVKQVEREDAGVYVCKATNGFGSLSVNYTLVVLDDISPGKESLGPDSSSGGQEDPASQQWARPRFTQPSKMRRRVIARPVGSSVRLKCVASGHPRPDITWMKDDQALTRPEAAEPRKKKWTLSLKNLRPEDSGKYTCRVSNRAGAINATYKVDVIQRTRSKPVLTGTHPVNTTVDFGGTTSFQCKVRSDVKPVIQWLKRVEYGAEGRHNSTIDVGGQKFVVLPTGDVWSRPDGSYLNKLLITRARQDDAGMYICLGANTMGYSFRSAFLTVLPDPKPPGPPVASSSSATSLPWP

SEQ ID NO: 1267 - protein, 504 aa, synthetic construct
  REGION 1..504: note = FLRT1 (Q9NZU1) ECD
IDSTTCPSVCRCDNGFIYCNDRGLTSIPADIPDDATTLYLQNNQINNAGIPQDLKTKVNVQVIYLYENDLDEFPINLPRSLRELHLQDNNVRTIARDSLARIPLLEKLHLDDNSVSTVSIEEDAFADSKQLKLLFLSRNHLSSIPSGLPHTLEELRLDDNRISTIPLHAFKGLNSLRRLVLDGNLLANQRIADDTFSRLQNLTELSLVRNSLAAPPLNLPSAHLQKLYLQDNAISHIPYNTLAKMRELERLDLSNNNLTTLPRGLFDDLGNLAQLLLRNNPWFCGCNLMWLRDWVKARAAVVNVRGLMCQGPEKVRGMAIKDITSEMDECFETGPQGGVANAAAKTTASNHASATTPQGSLFTLKAKRPGLRLPDSNIDYPMATGDGAKTLAIHVKALTADSIRITWKATLPASSFRLSWLRLGHSPAVGSITETLVQGDKTEYLLTALEPKSTYIICMVTMETSNAYVADETPVCAKAETADSYGPTTTLNQEQNAGPMASLP

SEQ ID NO: 1268 - protein, 506 aa, synthetic construct
  REGION 1..506: note = FLRT2 (O43155) ECD
CPSVCRCDRNFVYCNERSLTSVPLGIPEGVTVLYLHNNQINNAGFPAELHNVQSVHTVYLYGNQLDEFPMNLPKNVRVLHLQENNIQTISRAALAQLLKLEELHLDDNSISTVGVEDGAFREAISLKLLFLSKNHLSSVPVGLPVDLQELRVDENRIAVISDMAFQNLTSLERLIVDGNLLTNKGIAEGTFSHLTKLKEFSIVRNSLSHPPPDLPGTHLIRLYLQDNQINHIPLTAFSNLRKLERLDISNNQLRMLTQGVFDNLSNLKQLTARNNPWFCDCSIKWVTEWLKYIPSSLNVRGFMCQGPEQVRGMAVRELNMNLLSCPTTTPGLPLFTPAPSTASPTTQPPTLSIPNPSRSYTPPTPTTSKLPTIPDWDGRERVTPPISERIQLSIHFVNDTSIQVSWLSLFTVMAYKLTWVKMGHSLVGGIVQERIVSGEKQHLSLVNLEPRSTYRICLVPLDAFNYRAVEDTICSEATTHASYLNNGSNTASSHEQTTSHSMGSPF

SEQ ID NO: 1269 - protein, 500 aa, synthetic construct
  REGION 1..500: note = FLRT3 (Q9NZU0) ECD
KSCPSVCRCDAGFIYCNDRFLTSIPTGIPEDATTLYLQNNQINNAGIPSDLKNLLKVERIYLYHNSLDEFPTNLPKYVKELHLQENNIRTITYDSLSKIPYLEELHLDDNSVSAVSIEEGAFRDSNYLRLLFLSRNHLSTIPWGLPRTIEELRLDDNRISTISSPSLQGLTSLKRLVLDGNLLNNHGLGDKVFFNLVNLTELSLVRNSLTAAPVNLPGTNLRKLYLQDNHINRVPPNAFSYLRQLYRLDMSNNNLSNLPQGIFDDLDNITQLILRNNPWYCGCKMKWVRDWLQSLPVKVNVRGLMCQAPEKVRGMAIKDLNAELFDCKDSGIVSTIQITTAIPNTVYPAQGQWPAPVTKQPDIKNPKLTKDHQTTGSPSRKTITITVKSVTSDTIHISWKLALPMTALRLSWLKLGHSPAFGSITETIVTGERSEYLVTALEPDSPYKVCMVPMETSNLYLFDETPVCIETETAPLRMYNPTTTLNREQEKEPYKNPNLP

SEQ ID NO: 1270 - protein, 732 aa, synthetic construct
  REGION 1..732: note = FLT1 (P17948) ECD
SKLKDPELSLKGTQHIMQAGQTLHLQCRGEAAHKWSLPEMVSKESERLSITKSACGRNGKQFCSTLTLNTAQANHTGFYSCKYLAVPTSKKKETESAIYIFISDTGRPFVEMYSEIPEIIHMTEGRELVIPCRVTSPNITVTLKKFPLDTLIPDGKRIIWDSRKGFIISNATYKEIGLLTCEATVNGHLYKTNYLTHRQTNTIIDVQISTPRPVKLLRGHTLVLNCTATTPLNTRVQMTWSYPDEKNKRASVRRRIDQSNSHANIFYSVLTIDKMQNKDKGLYTCRVRSGPSFKSVNTSVHIYDKAFITVKHRKQQVLETVAGKRSYRLSMKVKAFPSPEVVWLKDGLPATEKSARYLTRGYSLIIKDVTEEDAGNYTILLSIKQSNVFKNLTATLIVNVKPQIYEKAVSSFPDPALYPLGSRQILTCTAYGIPQPTIKWFWHPCNHNHSEARCDFCSNNEESFILDADSNMGNRIESITQRMAIIEGKNKMASTLVVADSRISGIYICIASNKVGTVGRNISFYITDVPNGFHVNLEKMPTEGEDLKLSCTVNKFLYRDVTWILLRTVNNRTMHYSISKQKMAITKEHSITLNLTIMNVSLQDSGTYACRARNVYTGEEILQKKEITIRDQEAPYLLRNLSDHTVAISSSTTLDCHANGVPEPQITWFKNNHKIQQEPGIILGPGSSTLFIERVTEEDEGVYHCKATNQKGSVESSAYLTVQGTSDKSNLE

SEQ ID NO: 1271 - protein, 517 aa, synthetic construct
  REGION 1..517: note = FLT3 (P36888) ECD
NQDLPVIKCVLINHKNNDSSVGKSSSYPMVSESPEDLGCALRPQSSGTVYEAAAVEVDVSASITLQVLVDAPGNISCLWVFKHSSLNCQPHFDLQNRGVVSMVILKMTETQAGEYLLFIQSEATNYTILFTVSIRNTLLYTLRRPYFRKMENQDALVCISESVPEPIVEWVLCDSQGESCKEESPAVVKKEEKVLHELFGTDIRCCARNELGRECTRLFTIDLNQTPQTTLPQLFLKVGEPLWIRCKAVHVNHGFGLTWELENKALEEGNYFEMSTYSTNRTMIRILFAFVSSVARNDTGYYTCSSSKHPSQSALVTIVEKGFINATNSSEDYEIDQYEEFCFSVRFKAYPQIRCTWTFSRKSFPCEQKGLDNGYSISKFCNHKHQPGEYIFHAENDDAQFTKMFTLNIRRKPQVLAEASASQASCFSDGYPLPSWTWKKCSDKSPNCTEEITEGVWNRKANRKVFGQWVSSSTLNMSEAIKGFLVKCCAYNSLGTSCETILLNSPGPFPFIQDNIS

SEQ ID NO: 1272 - protein, 158 aa, synthetic construct
  REGION 1..158: note = FLT3LG (P49771) ECD
TQDCSFQHSPISSDFAVKIRELSDYLLQDYPVTVASNLQDEELCGGLWRLVLAQRWMERLKTVAGSKMQGLLERVNTEIHFVTKCAFQPPPSCLRFVQTNISRLLQETSEQLVALKPWITRQNFSRCLELQCQPDSSTLPPPWSPRPLEATAPTAPQP

SEQ ID NO: 1273 - protein, 751 aa, synthetic construct
  REGION 1..751: note = FLT4 (P35916) ECD
YSMTPPTLNITEESHVIDTGDSLSISCRGQHPLEWAWPGAQEAPATGDKDSEDTGVVRDCEGTDARPYCKVLLLHEVHANDTGSYVCYYKYIKARIEGTTAASSYVFVRDFEQPFINKPDTLLVNRKDAMWVPCLVSIPGLNVTLRSQSSVLWPDGQEVVWDDRRGMLVSTPLLHDALYLQCETTWGDQDFLSNPFLVHITGNELYDIQLLPRKSLELLVGEKLVLNCTVWAEFNSGVTFDWDYPGKQAERGKWVPERRSQQTHTELSSILTIHNVSQHDLGSYVCKANNGIQRFRESTEVIVHENPFISVEWLKGPILEATAGDELVKLPVKLAAYPPPEFQWYKDGKALSGRHSPHALVLKEVTEASTGTYTLALWNSAAGLRRNISLELVVNVPPQIHEKEASSPSIYSRHSRQALTCTAYGVPLPLSIQWHWRPWTPCKMFAQRSLRRRQQQDLMPQCRDWRAVTTQDAVNPIESLDTWTEFVEGKNKTVSKLVIQNANVSAMYKCVVSNKVGQDERLIYFYVTTIPDGFTIESKPSEELLEGQPVLLSCQADSYKYEHLRWYRLNLSTLHDAHGNPLLLDCKNVHLFATPLAASLEEVAPGARHATLSLSIPRVAPEHEGHYVCEVQDRRSHDKHCHKKYLSVQALEAPRLTQNLTDLLVNVSDSLEMQCLVAGAHAPSIVWYKDERLLEEKSGVDLADSNQKLSIQRVREEDAGRYLCSVCNAKGCVNSSASVAVEGSEDKGSME

SEQ ID NO: 1274 - protein, 123 aa, synthetic construct
  REGION 1..123: note = FNDC4 (Q9H6D8) ECD
DRPPSPVNVTVTHLRANSATVSWDVPEGNIVIGYSISQQRQNGPGQRVIREVNTTTRACALWGLAEDSDYTVQVRSIGLRGESPPGPRVHFRTLKGSDRLPSNSSSPGDITVEGLDGERPLQT

SEQ ID NO: 1275 - protein, 121 aa, synthetic construct
  REGION 1..121: note = FNDC5 (Q8NAU1) ECD
DSPSAPVNVTVRHLKANSAVVSWDVLEDEVVIGFAISQQKKDVRMLRFIQEVNTTTRSCALWDLEEDTEYIVHVQAISIQGQSPASEPVLFKTPREAEKMASKNKDEVTMKEMGRNQQLRT

SEQ ID NO: 1276 - protein, 3875 aa, synthetic construct
  REGION 1..3875: note = FRAS1 (Q86XX4) ECD
ACVYQDSLLADATIWKPDSCQSCRCHGDIVICKPAVCRNPQCAFEKGEVLQIAANQCCPECVLRTPGSCHHEKKIHEHGTEWASSPCSVCSCNHGEVRCTPQPCPPLSCGHQELAFIPEGSCCPVCVGLGKPCSYEGHVFQDGEDWRLSRCAKCLCRNGVAQCFTAQCQPLFCNQDETVVRVPGKCCPQCSARSCSAAGQVYEHGEQWSENACTTCICDRGEVRCHKQACLPLRCGKGQSRARRHGQCCEECVSPAGSCSYDGVVRYQDEMWKGSACEFCMCDHGQVTCQTGECAKVECARDEELIHLDGKCCPECISRNGYCVYEETGEFMSSNASEVKRIPEGEKWEDGPCKVCECRGAQVTCYEPSCPPCPVGTLALEVKGQCCPDCTSVHCHPDCLTCSQSPDHCDLCQDPTKLLQNGWCVHSCGLGFYQAGSLCLACQPQCSTCTSGLECSSCQPPLLMRHGQCVPTCGDGFYQDRHSCAVCHESCAGCWGPTEKHCLACRDPLHVLRDGGCESSCGKGFYNRQGTCSACDQSCDSCGPSSPRCLTCTEKTVLHDGKCMSECPGGYYADATGRCKVCHNSCASCSGPTPSHCTACSPPKALRQGHCLPRCGEGFYSDHGVCKACHSSCLACMGPAPSHCTGCKKPEEGLQVEQLSDVGIPSGECLAQCRAHFYLESTGICEACHQSCFRCAGKSPHNCTDCGPSHVLLDGQCLSQCPDGYFHQEGSCTECHPTCRQCHGPLESDCISCYPHISLTNGNCRTSCREEQFLNLVGYCADCHHLCQHCAADLHNTGSICLRCQNAHYLLLGDHCVPDCPSGYYAERGACKKCHSSCRTCQGRGPFSCSSCDTNLVLSHTGTCSTTCFPGHYLDDNHVCQPCNTHCGSCDSQASCTSCRDPNKVLLFGECQYESCAPQYYLDFSTNTCKECDWSCSACSGPLKTDCLQCMDGYVLQDGACVEQCLSSFYQDSGLCKNCDSYCLQCQGPHECTRCKGPFLLLEAQCVQECGKGYFADHAKHKCTACPQGCLQCSHRDRCHLCDHGFFLKSGLCVYNCVPGFSVHTSNETCSGKIHTPSLHVNGSLILPIGSIKPLDFSLLNVQDQEGRVEDLLFHVVSTPTNGQLVLSRNGKEVQLDKAGRFSWKDVNEKKVRFVHSKEKLRKGYLFLKISDQQFFSEPQLINIQAFSTQAPYVLRNEVLHISRGERATITTQMLDIRDDDNPQDVVIEIIDPPLHGQLLQTLQSPATPIYQFQLDELSRGLLHYAHDGSDSTSDVAVLQANDGHSFHNILFQVKTVPQNDRGLQLVANSMVWVPEGGMLQITNRILQAEAPGASAEEIIYKITQDYPQFGEVVLLVNMPADSPADEGQHLPDGRTATPTSTFTQQDINEGIVWYRHSGAPAQSDSFRFEVSSASNAQTRLESHMFNIAILPQTPEAPKVSLEASLHMTAREDGLTVIQPHSLSFINSEKPSGKIVYNITLPLHPNQGIIEHRDHPHSPIRYFTQEDINQGKVMYRPPPAAPHLQELMAFSFAGLPESVKFHFTVSDGEHTSPEMVLTIHLLPSDQQLPVFQVTAPRLAVSPGGSTSVGLQVVVRDAETAPKELFFELRRPPQHGVLLKHTAEFRRPMATGDTFTYEDVEKNALQYIHDGSSTREDSMEISVTDGLTVTMLEVRVEVSLSEDRGPRLAAGSSLSITVASKSTAIITRSHLAYVDDSSPDPEIWIQLNYLPSYGTLLRISGSEVEELSEVSNFTMEDINNKKIRYSAVFETDGHLVTDSFYFSVSDMDHNHLDNQIFTIMITPAENPPPVIAFADLITVDEGGRAPLSFHHFFATDDDDNLQRDAIIKLSALPKYGCIENTGTGDRFGPETASDLEASFPIQDVLENYIYYFQSVHESIEPTHDIFSFYVSDGTSRSEIHSINITIERKNDEPPRMTLQPLRVQLSSGVVISNSSLSLQDLDTPDNELIFVLTKKPDHGHVLWRQTASEPLENGRVLVQGSTFTYQDILAGLVGYVPSVPGMVVDEFQFSLTDGLHVDTGRMKIYTELPASDTPHLAINQGLQLSAGSVARITEQHLKVTDIDSDDHQVMYIMKEDPGAGRLQMMKHGNLEQISIKGPIRSFTQADISQGQPEYSHGTGEPGGSFAFKFDVVDGEGNRLIDKSFSISISEDKSPPVITTNKGLVLDENSVKKITTLQLSATDQDSGPTELIYRITRQPQLGHLEHAASPGIQISSFTQADLTSRNVQYVHSSEAEKHSDAFSFTLSDGVSEVTQTFHITLHPVDDSLPVVQNLGMRVQEGMRKTITEFELKAVDADTEAESVTFTIVQPPRHGTIERTSNGQHFHLTSTFTMKDIYQNRVSYSHDGSNSLKDRFTFTVSDGTNPFFIIEEGGKEIMTAAPQPFRVDILPVDDGTPRIVTNLGLQWLEYMDGKATNLITKKELLTMDPDTEDAQLVYEITTGPKHGFVENKLQPGRAAATFTQEDVNLGLIRYVLHKEKIREMMDSFQFLVKDSKPNVVSDNVFHIQWSLISFKYTSYNVSEKAGSVSVTVQRTGNLNQYAIVLCRTEQGTASSSSQPGQQDYVEYAGQVQFDEREDTKSCTIVINDDDVFENVESFTVELSMPAYALLGEFTQAKVIINDTEDEPTLEFDKKIYWVNESAGFLFAPIERKGDASSIVSAICYTVPKSAMGSLFYALESGSDFKSRGMSAASRVIFGPGVTMSTCDVMLIDDSEYEEEEEFEIALADASDNARIGRVATAKVLISGPNDASTVSLGNTAFTVSEDAGTVKIPVIRHGTDLSTFASVWCATRPSDPASATPGVDYVPSSRKVEFGPGVIEQYCTLTILDDTQYPVIEGLETFVVFLSSAQGAELTKPFQAVIAINDTFQDVPSMQFAKDLLLVKEKEGVLHVPITRSGDLSYESSVRCYTQSHSAQVMEDFEERQNADSSRITFLKGDKVKNCTVYIHDDSMFEPEEQFRVYLGLPLGNHWSGARIGKNNMATITISNDEDAPTIEFEEAAYQVREPAGPDAIAILNIKVIRRGDQNRTSKVRCSTRDGSAQSGVDYYPKSRVLKFSPGVDHIFFKVEILSNEDREWHESFSLVLGPDDPVEAVLGDVTTATVTILDQEAAGSLILPAPPIVVTLADYDHVEEVTKEGVKKSPSPGYPLVCVTPCDPHFPRYAVMKERCSEAGINQTSVQFSWEVAAPTDGNGARSPFETITDNTPFTSVNHMVLDSIYFSRRFHVRCVAKAVDKVGHVGTPLRSNIVTIGTDSAICHTPVVAGTSRGFQAQSFIATLKYLDVKHKEHPNRIHISVQIPHQDGMLPLISTMPLHNLHFLLSESIYRHQHVCSNLVTTYDLRGLAEAGFLDDVVYDSTALGPGYDRPFQFDPSVREPKTIQLYKHLNLKSCVWTFDAYYDMTELIDVCGGSVTADFQVRDSAQSFLTVHVPLYVSYIYVTAPRGWASLEHHTEMEFSFFYDTVLWRTGIQTDSVLSARLQIIRIYIREDGRLVIEFKTHAKFRGQFVMEHHTLPEVKSFVLTPDHLGGIEFDLQLLWSAQTFDSPHQLWRATSSYNRKDYSGEYTIYLIPCTVQPTQPWVDPGEKPLACTAHAPERFLIPIAFQQTNRPVPVVYSLNTEFQLCNNEKVFLMDPNTSDMSLAEMDYKGAFSKGQILYGRVLWNPEQNLNSAYKLQLEKVYLCTGKDGYVPFFDPTGTIYNEGPQYGCIQPNKHLKHRFLLLDRNQPEVTDKYFHDVPFEAHFASELPDFHVVSNMPGVDGFTLKVDALYKVEAGHQWYLQVIYIIGPDTISGPRVQRSLTAPLRRNRRDLVEPDGQLILDDSLIYDNEGDQVKNGTNMKSLNLEMQELAVAASLSQTGAS

SEQ ID NO: 1277 - protein, 3067 aa, synthetic construct
  REGION 1..3067: note = FREM2 (Q5SZK8) ECD
QPAAFGRALLSPGLAGAAGVPAEEAIVLANRGLRVPFGREVWLDPLHDLVLQVQPGDRCAVSVLDNDALAQRPGRLSPKRFPCDFGPGEVRYSHLGARSPSRDRVRLQLRYDAPGGAVVLPLVLEVEVVFTQLEVVTRNLPLVVEELLGTSNALDARSLEFAFQPETEECRVGILSGLGALPRYGELLHYPQVPGGAREGGAPETLLMDCKAFQELGVRYRHTAASRSPNRDWIPMVVELRSRGAPVGSPALKREHFQVLVRIRGGAENTAPKPSFVAMMMMEVDQFVLTALTPDMLAAEDAESPSDLLIFNLTSPFQPGQGYLVSTDDRSLPLSSFTQRDLRLLKIAYQPPSEDSDQERLFELELEVVDLEGAASDPFAFMVVVKPMNTMAPVVTRNTGLILYEGQSRPLTGPAGSGPQNLVISDEDDLEAVRLEVVAGLRHGHLVILGASSGSSAPKSFTVAELAAGQVVYQHDDRDGSLSDNLVLRMVDGGGRHQVQFLFPITLVPVDDQPPVLNANTGLTLAEGETVPILPLSLSATDMDSDDSLLLFVLESPFLTTGHLLLRQTHPPHEKQELLRGLWRKEGAFYERTVTEWQQQDITEGRLFYRHSGPHSPGPVTDQFTFRVQDNHDPPNQSGLQRFVIRIHPVDRLPPELGSGCPLRMVVQESQLTPLRKKWLRYTDLDTDDRELRYTVTQSPTDTDENHLPAPLGTLVLTDNPSVVVTHFTQAQINHHKIAYRPPGQELGVATRVAQFQFQVEDRAGNVAPGTFTLYLHPVDNQPPEILNTGFTIQEKGHHILSETELHVNDVDTDVAHISFTLTQAPKHGHMRVSGQILHVGGLFHLEDIKQGRVSYAHNGDKSLTDSCSLEVSDRHHVVPITLRVNVRPVDDEVPILSHPTGTLESYLDVLENGATEITANVIKGTNEETDDLMLTFLLEDPPLYGEILVNGIPAEQFTQRDILEGSVVYTHTSGEIGLLPKADSFNLSLSDMSQEWRIGGNTIQGVTIWVTILPVDSQAPEIFVGEQLIVMEGDKSVITSVHISAEDVDSLNDDILCTIVIQPTSGYVENISPAPGSEKSRAGIAISAFNLKDLRQGHINYVQSVHKGVEPVEDRFVFRCSDGINFSERQFFPIVIIPTNDEQPEMFMREFMVMEGMSLVIDTPILNAADADVPLDDLTFTITQFPTHGHIMNQLINGTVLVESFTLDQIIESSSIIYEHDDSETQEDSFVIKLTDGKHSVEKTVLIIVIPVDDETPRMTINNGLEIEIGDTKIINNKILMATDLDSEDKSLVYIIRYGPGHGLLQRRKPTGAFENITLGMNFTQDEVDRNLIQYVHLGQEGIRDLIKFDVTDGINPLIDRYFYVSIGSIDIVFPDVISKGVSLKEGGKVTLTTDLLSTSDLNSPDENLVFTITRAPMRGHLECTDQPGVSITSFTQLQLAGNKIYYIHTADDEVKMDSFEFQVTDGRNPVFRTFRISISDVDNKKPVVTIHKLVVSESENKLITPFELTVEDRDTPDKLLKFTITQVPIHGHLLFNNTRPVMVFTKQDLNENLISYKHDGTESSEDSFSFTVTDGTHTDFYVFPDTVFETRRPQVMKIQVLAVDNSVPQIAVNKGASTLRTLATGHLGFMITSKILKVEDRDSLHISLRFIVTEAPQHGYLLNLDKGNHSITQFTQADIDDMKICYVLREGANATSDMFYFAVEDGGGNKLTYQNFRLNWAWISFEKEYYLVNEDSKFLDVVLKRRGYLGETSFISIGTRDRTAEKDKDFKGKAQKQVQFNPGQTRATWRVRILSDGEHEQSETFQVVLSEPVLAALEFPTVATVEIVDPGDEPTVFIPQSKYSVEEDVGELFIPIRRSGDVSQELMVVCYTQQGTATGTVPTSVLSYSDYISRPEDHTSVVRFDKDEREKLCRIVIIDDSLYEEEETFHVLLSMPMGGRIGSEFPGAQVTIVPDKDDEPIFYFGDVEYSVDESAGYVEVQVWRTGTDLSKSSSVTVRSRKTDPPSADAGTDYVGISRNLDFAPGVNMQPVRVVILDDLGQPALEGIEKFELVLRMPMNAALGEPSKATVSINDSVSDLPKMQFKERIYTGSESDGQIVTMIHRTGDVQYRSSVRCYTRQGSAQVMMDFEERPNTDTSIITFLPGETEKPCILELMDDVLYEEVEELRLVLGTPQSNSPFGAAVGEQNETLIRIRDDADKTVIKFGETKFSVTEPKEPGESVVIRIPVIRQGDTSKVSIVRVHTKDGSATSGEDYHPVSEEIEFKEGETQHVVEIEVTFDGVREMREAFTVHLKPDENMIAEMQLTKAIVYIEEMSSMADVTFPSVPQIVSLLMYDDTSKAKESAEPMSGYPVICITACNPKYSDYDKTGSICASENINDTLTRYRWLISAPAGPDGVTSPMREVDFDTFFTSSKMVTLDSIYFQPGSRVQCAARAVNTNGDEGLELMSPIVTISREEGLCQPRVPGVVGAEPFSAKLRYTGPEDADYTNLIKLTVTMPHIDGMLPVISTRELSNFELTLSPDGTRVGNHKCSNLLDYTEVKTHYGFLTDATKNPEIIGETYPYQYSLSIRGSTTLRFYRNLNLEACLWEFVSYYDMSELLADCGGTIGTDGQVLNLVQSYVTLRVPLYVSYVFHSPVGVGGWQHFDLKSELRLTFVYDTAILWNDGIGSPPEAELQGSLYPTSMRIGDEGRLAVHFKTEAQFHGLFVLSHPASFTSSVIMSADHPGLTFSLRLIRSEPTYNQPVQQWSFVSDFAVRDYSGTYTVKLVPCTAPSHQEYRLPVTCNPREPVTFDLDIRFQQVSDPVAAEFSLNTQMYLLSKKSLWLSDGSMGFGQESDVAFAEGDIIYGRVMVDPVQNLGDSFYCSIEKVFLCTGADGYVPKYSPMNAEYGCLADSPSLLYRFKIVDKAQPETQATSFGNVLFNAKLAVDDPEAILLVNQPGSDGFKVDSTPLFQVALGREWYIHTIYTVRSKDNANRGIGKRSVEYHSLVSQGKPQSTTKSRKKREIRSTPSLAWEIGAENSRGTNIQHIALDRTKRQIPHGRAPPDGILPWELNSPSSAVSLVT

SEQ ID NO: 1278 - protein, 608 aa, synthetic construct
  REGION 1..608: note = FURIN (P09958) ECD
DVYQEPTDPKFPQQWYLSGVTQRDLNVKAAWAQGYTGHGIVVSILDDGIEKNHPDLAGNYDPGASFDVNDQDPDPQPRYTQMNDNRHGTRCAGEVAAVANNGVCGVGVAYNARIGGVRMLDGEVTDAVEARSLGLNPNHIHIYSASWGPEDDGKTVDGPARLAEEAFFRGVSQGRGGLGSIFVWASGNGGREHDSCNCDGYTNSIYTLSISSATQFGNVPWYSEACSSTLATTYSSGNQNEKQIVTTDLRQKCTESHTGTSASAPLAAGIIALTLEANKNLTWRDMQHLVVQTSKPAHLNANDWATNGVGRKVSHSYGYGLLDAGAMVALAQNWTTVAPQRKCIIDILTEPKDIGKRLEVRKTVTACLGEPNHITRLEHAQARLTLSYNRRGDLAIHLVSPMGTRSTLLAARPHDYSADGFNDWAFMTTHSWDEDPSGEWVLEIENTSEANNYGTLTKFTLVLYGTAPEGLPVPPESSGCKTLTSSQACVVCEEGFSLHQKSCVQHCPPGFAPQVLDTHYSTENDVETIRASVCAPCHASCATCQGPALTDCLSCPSHASLDPVEQTCSRQSQSSRESPPQQQPPRLPPEVEAGQRLRAGLLPSHLPE

SEQ ID NO: 1279 - protein, 125 aa, synthetic construct
  REGION 1..125: note = G6B (O95866) ECD
NPGASLDGRPGDRVNLSCGGVSHPIRWVWAPSFPACKGLSKGRRPILWASSSGTPTVPPLQPFVGRLRSLDSGIRRLELLLSAGDSGTFFCKGRHEDESRTVLHVLGDRTYCKAPGPTHGSVYPQ

SEQ ID NO: 1280 - protein, 333 aa, synthetic construct
  REGION 1..333: note = GFRAL (Q6UXV0) ECD
SQTNNCTYLREQCLRDANGCKHAWRVMEDACNDSDPGDPCKMRNSSYCNLSIQYLVESNFQFKECLCTDDFYCTVNKLLGKKCINKSDNVKEDKFKWNLTTRSHHGFKGMWSCLEVAEACVGDVVCNAQLASYLKACSANGNPCDLKQCQAAIRFFYQNIPFNIAQMLAFCDCAQSDIPCQQSKEALHSKTCAVNMVPPPTCLSVIRSCQNDELCRRHYRTFQSKCWQRVTRKCHEDENCISTLSKQDLTCSGSDDCKAAYIDILGTVLQVQCTCRTITQSEESLCKIFQHMLHRKSCFNYPTLSNVKGMALYTRKHANKITLTGFHSPFNGE

SEQ ID NO: 1281 - protein, 390 aa, synthetic construct
  REGION 1..390: note = GFY (I3L273) ECD
KAAPSAPLPLGCGFPDMAHPSETSPLKGASENSKRDRLNPEFPGTPYPEPSKLPHTVSLETFPLDFTEPLNPDLRETPHPESPETPKADSLTTSISESLDMPKTNLSKMAHPESSETPTPGPTEMPHPGSPETPKPNFSKTSRPEFPETPNTDLMQTTPQESPEILQLNATEVSQAELPETSNTNPTKTPDPKSPEKHDLNSTETPNSEFLQALHPDPSKTPHPESHVTHNPSPTEISQTEFPTTYYQNATDVPRTSDPQISTSLYPETPVPFKDDATALNELSLNPKPGTPAAIQPDSPKLPTSDSPGMVELKAPQNSGPKESNVPPPSARIAGPPALPGRPSQLAPATLRAPQRHSRGEGVNTIIVVERVKETGVTLVGRPRGAAGGA

SEQ ID NO: 1282 - protein, 246 aa, synthetic construct
  REGION 1..246: note = GHR (P10912) ECD
FSGSEATAAILSRAPWSLQSVNPGLKTNSSKEPKFTKCRSPERETFSCHWTDEVHHGTKNLGPIQLFYTRRNTQEWTQEWKECPDYVSAGENSCYFNSSFTSIWIPYCIKLTSNGGTVDEKCFSVDEIVQPDPPIALNWTLLNVSLTGIHADIQVRWEAPRNADIQKGWMVLEYELQYKEVNETKWKMMDPILTTSVPVYSLKVDKEYEVRVRSKQRNSGNYGEFSEVLYVTLPQMSQFTCEEDFY

SEQ ID NO: 1283 - protein, 245 aa, synthetic construct
  REGION 1..245: note = GINM1 (Q9NU53) ECD
WLTTGAPEPPPLSGAPQDGIRINVTTLKDDGDISKQQVVLNITYESGQVYVNDLPVNSGVTRISCQTLIVKNENLENLEEKEYFGIVSVRILVHEWPMTSGSSLQLIVIQEEVVEIDGKQVQQKDVTEIDILVKNRGVLRHSNYTLPLEESMLYSISRDSDILFTLPNLSKKESVSSLQTTSQYLIRNVETTVDEDVLPGKLPETPLRAEPPSSYKVMCQWMEKFRKDLCRFWSNVFPVFFQFLN

SEQ ID NO: 1284 - protein, 211 aa, synthetic construct
  REGION 1..211: note = GLIPR1 (P48060) ECD
ANILPDIENEDFIKDCVRIHNKFRSEVKPTASDMLYMTWDPALAQIAKAWASNCQFSHNTRLKPPHKLHPNFTSLGENIWTGSVPIFSVSSAITNWYDEIQDYDFKTRICKKVCGHYTQVVWADSYKVGCAVQFCPKVSGFDALSNGAHFICNYGPGGNYPTWPYKRGATCSACPNNDKCLDNLCVNRQRDQVKRYYSVVYPGWPIYPRNR

SEQ ID NO: 1285 - protein, 515 aa, synthetic construct
  REGION 1..515: note = GP1BA (P07359) ECD
HPICEVSKVASHLEVNCDKRNLTALPPDLPKDTTILHLSENLLYTFSLATLMPYTRLTQLNLDRCELTKLQVDGTLPVLGTLDLSHNQLQSLPLLGQTLPALTVLDVSFNRLTSLPLGALRGLGELQELYLKGNELKTLPPGLLTPTPKLEKLSLANNNLTELPAGLLNGLENLDTLLLQENSLYTIPKGFFGSHLLPFAFLHGNPWLCNCEILYFRRWLQDNAENVYVWKQGVDVKAMTSNVASVQCDNSDKFPVYKYPGKGCPTLGDEGDTDLYDYYPEEDTEGDKVRATRTVVKFPTKAHTTPWGLFYSWSTASLDSQMPSSLHPTQESTKEQTTFPPRWTPNFTLHMESITFSKTPKSTTEPTPSPTTSEPVPEPAPNMTTLEPTPSPTTPEPTSEPAPSPTTPEPTSEPAPSPTTPEPTSEPAPSPTTPEPTPIPTIATSPTILVSATSLITPKSTFLTTTKPVSLLESTKKTIPELDQPPKLRGVLQGHLESSRNDPFLHPDFCCLLPL

SEQ ID NO: 1286 - protein, 122 aa, synthetic construct
  REGION 1..122: note = GP1BB (P13224) ECD
CPAPCSCAGTLVDCGRRGLTWASLPTAFPVDTTELVLTGNNLTALPPGLLDALPALRTAHLGANPWRCDCRLVPLRAWLAGRPERAPYRDLRCVAPPALRGRLLPYLAEDELRAACAPGPLC

SEQ ID NO: 1287 - protein, 507 aa, synthetic construct
  REGION 1..507: note = GP5 (P40197) ECD
QPFPCPPACKCVFRDAAQCSGGDVARISALGLPTNLTHILLFGMGRGVLQSQSFSGMTVLQRLMISDSHISAVAPGTFSDLIKLKTLRLSRNKITHLPGALLDKMVLLEQLFLDHNALRGIDQNMFQKLVNLQELALNQNQLDFLPASLFTNLENLKLLDLSGNNLTHLPKGLLGAQAKLERLLLHSNRLVSLDSGLLNSLGALTELQFHRNHIRSIAPGAFDRLPNLSSLTLSRNHLAFLPSALFLHSHNLTLLTLFENPLAELPGVLFGEMGGLQELWLNRTQLRTLPAAAFRNLSRLRYLGVTLSPRLSALPQGAFQGLGELQVLALHSNGLTALPDGLLRGLGKLRQVSLRRNRLRALPRALFRNLSSLESVQLDHNQLETLPGDVFGALPRLTEVLLGHNSWRCDCGLGPFLGWLRQHLGLVGGEEPPRCAGPGAHAGLPLWALPGGDAECPGPRGPPPRPAADSSSEAPVHPALAPNSSEPWVWAQPVTTGKGQDHSPFWG

SEQ ID NO: 1288 - protein, 247 aa, synthetic construct
  REGION 1..247: note = GP6 (Q9HCN6) ECD
QSGPLPKPSLQALPSSLVPLEKPVTLRCQGPPGVDLYRLEKLSSSRYQDQAVLFIPAMKRSLAGRYRCSYQNGSLWSLPSDQLELVATGVFAKPSLSAQPGPAVSSGGDVTLQCQTRYGFDQFALYKEGDPAPYKNPERWYRASFPIITVTAAHSGTYRCYSFSSRDPYLWSAPSDPLELVVTGTSVTPSRLPTEPPSPVAEFSEATAELTVSFTNEVFTTETSRSITASPKESDSPAGPARQYYTK

SEQ ID NO: 1289 - protein, 214 aa, synthetic construct
  REGION 1..214: note = GPA33 (Q99795) ECD
ISVETPQDVLRASQGKSVTLPCTYHTSTSSREGLIQWDKLLLTHTERVVIWPFSNKNYIHGELYKNRVSISNNAEQSDASITIDQLTMADNGTYECSVSLMSDLEGNTKSRVRLLVLVPPSKPECGIEGETIIGNNIQLTCQSKEGSPTPQYSWKRYNILNQEQPLAQPASGQPVSLKNISTDTSGYYICTSSNEEGTQFCNITVAVRSPSMNV

SEQ ID NO: 1290 - protein, 476 aa, synthetic construct
  REGION 1..476: note = GPNMB (Q14956) ECD
KRFHDVLGNERPSAYMREHNQLNGWSSDENDWNEKLYPVWKRGDMRWKNSWKGGRVQAVLTSDSPALVGSNITFAVNLIFPRCQKEDANGNIVYEKNCRNEAGLSADPYVYNWTAWSEDSDGENGTGQSHHNVFPDGKPFPHHPGWRRWNFIYVFHTLGQYFQKLGRCSVRVSVNTANVTLGPQLMEVTVYRRHGRAYVPIAQVKDVYVVTDQIPVFVTMFQKNDRNSSDETFLKDLPIMFDVLIHDPSHFLNYSTINYKWSFGDNTGLFVSTNHTVNHTYVLNGTFSLNLTVKAAAPGPCPPPPPPPRPSKPTPSLATTLKSYDSNTPGPAGDNPLELSRIPDENCQINRYGHFQATITIVEGILEVNIIQMTDVLMPVPWPESSLIDFVVTCQGSIPTEVCTIISDPTCEITQNTVCSPVDVDEMCLLTVRRTFNGSGTYCVNLTLGDDTSLALTSTLISVPDRDPASPLRMAN

SEQ ID NO: 1291 - protein, 407 aa, synthetic construct
  REGION 1..407: note = GUCY2C (P25092) ECD
SQVSQNCHNGSYEISVLMMGNSAFAEPLKNLEDAVNEGLEIVRGRLQNAGLNVTVNATFMYSDGLIHNSGDCRSSTCEGLDLLRKISNAQRMGCVLIGPSCTYSTFQMYLDTELSYPMISAGSFGLSCDYKETLTRLMSPARKLMYFLVNFWKTNDLPFKTYSWSTSYVYKNGTETEDCFWYLNALEASVSYFSHELGFKVVLRQDKEFQDILMDHNRKSNVIIMCGGPEFLYKLKGDRAVAEDIVIILVDLFNDQYFEDNVTAPDYMKNVLVLTLSPGNSLLNSSFSRNLSPTKRDFALAYLNGILLFGHMLKIFLENGENITTPKFAHAFRNLTFEGYDGPVTLDDWGDVDSTMVLLYTSVDTKKYKVLLTYDTHVNKTYPVDMSPTFTWKNSKLPNDITGRGPQ

SEQ ID NO: 1292 - protein, 72 aa, synthetic construct
  REGION 1..72: note = GYPA (P02724) ECD
SSTTGVAMHTSTSSSVTKSYISSQTNDTHKRDTYAATPRAHEVSEISVRTVYPPEEETGERVQLAHHFSEPE

SEQ ID NO: 1293 - protein, 275 aa, synthetic construct
  REGION 1..275: note = HAVCR1 (Q96D42) ECD
SVKVGGEAGPSVTLPCHYSGAVTSMCWNRGSCSLFTCQNGIVWTNGTHVTYRKDTRYKLLGDLSRRDVSLTIENTAVSDSGVYCCRVEHRGWFNDMKITVSLEIVPPKVTTTPIVTTVPTVTTVRTSTTVPTTTTVPMTTVPTTTVPTTMSIPTTTTVLTTMTVSTTTSVPTTTSIPTTTSVPVTTTVSTFVPPMPLPRQNHEPVATSPSSPQPAETHPTTLQGAIRREPTSSPLYSYTTDGNDTVTESSDGLWNNNQTQLFLEHSLLTANTTKG

SEQ ID NO: 1294 - protein, 181 aa, synthetic construct
  REGION 1..181: note = HAVCR2 (Q8TDQ0) ECD
SEVEYRAEVGQNAYLPCFYTPAAPGNLVPVCWGKGACPVFECGNVVLRTDERDVNYWTSRYWLNGDFRKGDVSLTIENVTLADSGIYCCRIQIPGIMNDEKFNLKLVIKPAKVTPAPTRQRDFTAAFPRMLTTRGHGPAETQTLGSLPDINLTQISTLANELRDSRLANDLRDSGATIRIG

SEQ ID NO: 1295 - protein, 141 aa, synthetic construct
  REGION 1..141: note = HBEGF (Q99075) ECD
LVTGESLERLRRGLAAGTSNPDPPTVSTDQLLPLGGGRDRKVRDLQEADLDLLRVTLSSKPQALATPNKEEHGKRKKKGKGLGKKRDPCLRKYKDFCIHGECKYVKELRAPSCICHPGYHGERCHGLSLPVENRLYTYDHT

SEQ ID NO: 1296 - protein, 1219 aa, synthetic construct
  REGION 1..1219: note = HEG1 (Q9ULI3) ECD
TRDPPPSPARRALSLAPLAGAGLELQLERRPEREPPPTPPRERRGPATPGPSYRAPEPGAATQRGPSGRAPRGGSADAAWKHWPESNTEAHVENITFYQNQEDFSTVSSKEGVMVQTSGKSHAASDAPENLTLLAETADARGRSGSSSRTNFTILPVGYSLEIATALTSQSGNLASESLHLPSSSSEFDERIAAFQTKSGTASEMGTERAMGLSEEWTVHSQEATTSAWSPSFLPALEMGELTTPSRKRNSSGPDLSWLHFYRTAASSPLLDLSSSSESTEKLNNSTGLQSSSVSQTKTMHVATVFTDGGPRTLRSLTVSLGPVSKTEGFPKDSRIATTSSSVLLSPSAVESRRNSRVTGNPGDEEFIEPSTENEFGLTSLRWQNDSPTFGEHQLASSSEVQNGSPMSQTETVSRSVAPMRGGEITAHWLLTNSTTSADVTGSSASYPEGVNASVLTQFSDSTVQSGGSHTALGDRSYSESSSTSSSESLNSSAPRGERSIAGISYGQVRGTAIEQRTSSDHTDHTYLSSTFTKGERALLSITDNSSSSDIVESSTSYIKISNSSHSEYSSFFHAQTERSNISSYDGEYAQPSTESPVLHTSNLPSYTPTINMPNTSVVLDTDAEFVSDSSSSSSSSSSSSSSGPPLPLPSVSQSHHLFSSILPSTRASVHLLKSTSDASTPWSSSPSPLPVSLTTSTSAPLSVSQTTLPQSSSTPVLPRARETPVTSFQTSTMTSFMTMLHSSQTADLKSQSTPHQEKVITESKSPSLVSLPTESTKAVTTNSPLPPSLTESSTEQTLPATSTNLAQMSPTFTTTILKTSQPLMTTPGTLSSTASLVTGPIAVQTTAGKQLSLTHPEILVPQISTEGGISTERNRVIVDATTGLIPLTSVPTSAKEMTTKLGVTAEYSPASRSLGTSPSPQTTVVSTAEDLAPKSATFAVQSSTQSPTTVSSSASVNSCAVNPCLHNGECVADNTSRGYHCRCPPSWQGDDCSVDVNECLSNPCPSTAMCNNTQGSFICKCPVGYQLEKGICNLVRTFVTEFKLKRTFLNTTVEKHSDLQEVENEITKTLNMCFSALPSYIRSTVHASRESNAVVISLQTTFSLASNVTLFDLADRMQKCVNSCKSSAEVCQLLGSQRRIFRAGSLCKRKSPECDKDTSICTDLDGVALCQCKSGYFQFNKMDHSCRACEDGYRLENETCMSCPFGLGGLNCGNPYQL

SEQ ID NO: 1297 - protein, 207 aa, synthetic construct
  REGION 1..207: note = HEPACAM (Q14CZ8) ECD
VNITSPVRLIHGTVGKSALLSVQYSSTSSDRPVVKWQLKRDKPVTVVQSIGTEVIGTLRPDYRDRIRLFENGSLLLSDLQLADEGTYEVEISITDDTFTGEKTINLTVDVPISRPQVLVASTTVLELSEAFTLNCSHENGTKPSYTWLKDGKPLLNDSRMLLSPDQKVLTITRVLMEDDDLYSCMVENPISQGRSLPVKITVYRRSS

SEQ ID NO: 1298 - protein, 320 aa, synthetic construct
  REGION 1..320: note = HEPACAM2 (A8MVW5) ECD
LKVTVPSHTVHGVRGQALYLPVHYGFHTPASDIQIIWLFERPHTMPKYLLGSVNKSVVPDLEYQHKFTMMPPNASLLINPLQFPDEGNYIVKVNIQGNGTLSASQKIQVTVDDPVTKPVVQIHPPSGAVEYVGNMTLTCHVEGGTRLAYQWLKNGRPVHTSSTYSFSPQNNTLHIAPVTKEDIGNYSCLVRNPVSEMESDIIMPIIYYGPYGLQVNSDKGLKVGEVFTVDLGEAILFDCSADSHPPNTYSWIRRTDNTTYIIKHGPRLEVASEKVAQKTMDYVCCAYNNITGRQDETHFTVIITSVGLEKLAQKGKSLSP

SEQ ID NO: 1299 - protein, 1087 aa, synthetic construct
  REGION 1..1087: note = HEPH (Q9BQS7) ECD
ATRVYYLGIRDVQWNYAPKGRNVITNQPLDSDIVASSFLKSDKNRIGGTYKKTIYKEYKDDSYTDEVAQPAWLGFLGPVLQAEVGDVILIHLKNFATRPYTIHPHGVFYEKDSEGSLYPDGSSGPLKADDSVPPGGSHIYNWTIPEGHAPTDADPACLTWIYHSHVDAPRDIATGLIGPLITCKRGALDGNSPPQRQDVDHDFFLLFSVVDENLSWHLNENIATYCSDPASVDKEDETFQESNRMHAINGFVFGNLPELNMCAQKRVAWHLFGMGNEIDVHTAFFHGQMLTTRGHHTDVANIFPATFVTAEMVPWEPGTWLISCQVNSHFRDGMQALYKVKSCSMAPPVDLLTGKVRQYFIEAHEIQWDYGPMGHDGSTGKNLREPGSISDKFFQKSSSRIGGTYWKVRYEAFQDETFQEKMHLEEDRHLGILGPVIRAEVGDTIQVVFYNRASQPFSMQPHGVFYEKDYEGTVYNDGSSYPGLVAKPFEKVTYRWTVPPHAGPTAQDPACLTWMYFSAADPIRDTNSGLVGPLLVCRAGALGADGKQKGVDKEFFLLFTVLDENKSWYSNANQAAAMLDFRLLSEDIEGFQDSNRMHAINGFLFSNLPRLDMCKGDTVAWHLLGLGTETDVHGVMFQGNTVQLQGMRKGAAMLFPHTFVMAIMQPDNLGTFEIYCQAGSHREAGMRAIYNVSQCPGHQATPRQRYQAARIYYIMAEEVEWDYCPDRSWEREWHNQSEKDSYGYIFLSNKDGLLGSRYKKAVFREYTDGTFRIPRPRTGPEEHLGILGPLIKGEVGDILTVVFKNNASRPYSVHAHGVLESTTVWPLAAEPGEVVTYQWNIPERSGPGPNDSACVSWIYYSAVDPIKDMYSGLVGPLAICQKGILEPHGGRSDMDREFALLFLIFDENKSWYLEENVATHGSQDPGSINLQDETFLESNKMHAINGKLYANLRGLTMYQGERVAWYMLAMGQDVDLHTIHFHAESFLYRNGENYRADVVDLFPGTFEVVEMVASNPGTWLMHCHVTDHVHAGMETLFTVFSRTEHLSPLTVITKETEKAVPPRDIEEGNVKMLGMQIPIKNVEMLAS

SEQ ID NO: 1300 - protein, 1090 aa, synthetic construct
  REGION 1..1090: note = HEPHL1 (Q6MZM0) ECD
VTRTYYIGIVEEYWNYVPQGKNVITGKSFTEDKLATLFLERGPNRIGSIYKKAVYRRFTDGTYSIEIPKPPWLGFLGPILRAEVGDVIVIHLKNFASRPYSLHPHGVFYNKDSEGALYPDGTSGRNKNDDMVPPGKNYTYVWPVREEYAPTPADANCLTWVYHSHIDAPKDICSGLIGPLLVCKEGILNRYSGTRNDVDREFVIMFTLVDENQSWYLNENIKHFCTNPDSVDKKDAVFQRSNKMHALNGYLFGNFPEPDMCVGESVSWHLFGMGNEIDIHSIYFYGNTFISRGHRTDVVNLFPATFLTTEMIAENPGKWMITCQVSDHLQAGMLGQYNVDNCKSDIFYPKMKGQQRRYFIAAEKILWDYAPQGYNKFSGLPLNASGSDSDLYFTQGDNRIGGKYWKVRYTEFVDATFTKRKRLSAEEAHLGILGPVIKAEVGDTLLVTFANKADKVYSILPHGVIYDKASDAAPNLDGFVKPGAHVKPGETFTYKWTVPESVSPTAGDPPCLTYLYFSAVDPIKDTSSGLVGPLLVCKKGVLNADGTQKGIDKEFYLLFTVFDENLSRYFDENIQKFIWHPFSIDKEDKEFVKSNRMHAVNGYMYGNQPGLNMCKRDRVSWHLIGLGTDTDMHGIVFQGNTIHLRGTHRDSLALFPHMATTAFMQPDHAGIFRVFCATMPHLSRGMGQIYEVSSCDNRDPSEQRYGMIRTFYIAAEEVEWDYAPNKNWEFEKQHVDARGERHGDIFMNRTENWIGSQYKKVVYREYTDGEFVEIKARPPREEHLELLGPMIHAEVGNTVLIIFKNKASRPYSISAQGVEEMDSGKQFQVPMTKPGEVKTYRWNIPKRSGPGPSDPNCIPWVYYSTVNFVKDTYSGLMGPLITCRKGVLNEKGRRSDVDYEFALLFLVFNENESWYLDDNIKKYLNKDPRDFKRTDDFEESNRMHAINGKIFGNLHGLIMNEDTMTNWYLLGIGSEVDIHTIHYHAESFLFKIDKSYREDVYDLFPGTFQTIELFADHPGTWLLHCHVSDHIHAGMETTYTVLRNIDNRIPYSTTSPGVASHPATVPSNERPGKEQLYFFGKNLGPTGAKA

SEQ ID NO: 1301 - protein, 480 aa, synthetic construct
  REGION 1..480: note = HERVH59 (Q9N2J8) ECD
LPLPSYLHHTINLTHSLPAASNPSLANNCWLCISLSSSAYIAVPTLQTDRATSPVSLHLRTSFNSPHLYPPEELIYFLDRSSKTSPDISHQPAAALLHIYLKNLSPYINSTPPIFGPLTTQTTIPVAAPLCISRQRPTGIPLGNISPSRCSFTLHLQSPTTHVTETIGVFQLHIIDKPSINTDKLKNVSSNYCLGRHLPYISLHPWLPSPCSSDSPPRPSSCLLTPSPQNNSERLLVDTQRFLIHHENRTSSSMQLAHQSPLQPLTAAALAGSLGVWVQDTPFSTPSHPFSLHLQFCLTQGLFFLCGSSTYMCLPANWTGTCTLVFLTPKIQFANGTKELPVPLMTLTPQKRVIPLIPLMVGLGLSASTIALSTGIAGISTSVTTFRSPSNDFSASITDISQTLSVLQAQVDSLAAVVLQNRRGLGLSILLNEECCFYLNQSGLVYENIKKLKDRAQKLANQASNYAESPWALSNWMSWV

SEQ ID NO: 1302 - protein, 488 aa, synthetic construct
  REGION 1..488: note = HERVH62 (Q9N2K0) ECD
LPLPSYLHHTINLTHSLLAASNPSLVNNCWLCISLSSSAYTAVPAVQTDWATSPISLHLRTSFNSPHLYPPEELIYFLDRSSKTSPDISHQQAAALLRTYLKNLSPYINSTPPIFGPLTTQTTIPVAAPLCISWQRPTGIPLGNLSPSRCSFTLHLRSPTTNINETIGAFQLHITDKPSINTDKLKNISSNYCLGRHLPCISLHPWLSSPCSSDSPPRPSSCLLIPSPENNSERLLVDTRRFLIHHENRTFPSTQLPHQSPLQPLTAAALAGSLGVWVQDTPFSTPSHLFTLHLQFCLAQGLFFLCGSSTYMCLPANWTGTCTLVFLTPKIQFANGTEELPVPLMTPTQQKRVIPLIPLMVGLGLSASTVALGTGIAGISTSVMTFRSLSNDFSASITDISQTLSVLQAQVDSLAAVVLQNRRGLDLLTAEKGGLCIFLNEECCFYLNQSGLVYDNIKKLKDRAQKLANQASNYAEPPWALSNWMSWV

SEQ ID NO: 1303 - protein, 543 aa, synthetic construct
  REGION 1..543: note = HERVK_113 (Q902F9) ECD
LPMPAGAAAANYTYWAYVPFPPLIRAVTWMDNPIEIYVNDSVWVPGPTDDCCPAKPEEEGMMINISIGYRYPPICLGRAPGCLMPAVQNWLVEVPTVSPISRFTYHMVSGMSLRPRVNYLQDFSYQRSLKFRPKGKPCPKEIPKESKNTEVLVWEECVANSAVILQNNEFGTLIDWAPRGQFYHNCSGQTQSCPSAQVSPAVDSDLTESLDKHKHKKLQSFYPWEWGEKGISTARPKIISPVSGPEHPELWRLTVASHHIRIWSGNQTLETRDRKPFYTIDLNSSLTVPLQSCVKPPYMLVVGNIVIKPDSQTITCENCRLLTCIDSTFNWQHRILLVRAREGVWIPVSMDRPWEASPSVHILTEVLKGVLNRSKRFIFTLIAVIMGLIAVTATAAVAGVALHSSVQSVNFVNDWQNNSTRLWNSQSSIDQKLANQINDLRQTVIWMGDRLMSLEHRFQLQCDWNTSDFCITPQIYNESEHHWDMVRCHLQGREDNLTLDISKLKEQIFEASKAHLNLVPGTEAIAGVADGLANLNTVTWVKT

SEQ ID NO: 1304 - protein, 284 aa, synthetic construct
  REGION 1..284: note = HFE (Q30201) ECD
RLLRSHSLHYLFMGASEQDLGLSLFEALGYVDDQLFVFYDHESRRVEPRTPWVSSRISSQMWLQLSQSLKGWDHMFTVDFWTIMENHNHSKESHTLQVILGCEMQEDNSTEGYWKYGYDGQDHLEFCPDTLDWRAAEPRAWPTKLEWERHKIRARQNRAYLERDCPAQLQQLLELGRGVLDQQVPPLVKVTHHVTSSVTTLRCRALNYYPQNITMKWLKDKQPMDAKEFEPKDVLPNGDGTYQGWITLAVPPGEEQRYTCQVEHPGLDQPLIVIWEPSPSGTLV

SEQ ID NO: 1305 - protein, 322 aa, synthetic construct
  REGION 1..322: note = HHLA2 (Q9UM44) ECD
IFPLAFFIYVPMNEQIVIGRLDEDIILPSSFERGSEVVIHWKYQDSYKVHSYYKGSDHLESQDPRYANRTSLFYNEIQNGNASLFFRRVSLLDEGIYTCYVGTAIQVITNKVVLKVGVFLTPVMKYEKRNTNSFLICSVLSVYPRPIITWKMDNTPISENNMEETGSLDSFSINSPLNITGSNSSYECTIENSLLKQTWTGRWTMKDGLHKMQSEHVSLSCQPVNDYFSPNQDFKVTWSRMKSGTFSVLAYYLSSSQNTIINESRFSWNKELINQSDFSMNLMDLNLSDSGEYLCNISSDEYTLLTIHTVHVEPSQETASHN

SEQ ID NO: 1306 - protein, 98 aa, synthetic construct
  REGION 1..98: note = HIDE1 (A8MVS5) ECD
IRLVPPYPSSQEDPIHIACMAPGNFPGANFTLYRGGQVVQLLQAPTDQRGVTFNLSGGSSKAPGGPFHCQYGVLGELNQSQLSDLSEPVNVSFPVPTW

SEQ ID NO: 1307 - protein, 284 aa, synthetic construct
  REGION 1..284: note = HLA-A (P01891) ECD
GSHSMRYFFTSVSRPGRGEPRFIAVGYVDDTQFVRFDSDAASQRMEPRAPWIEQEGPEYWDQETRNVKAQSQTDRVDLGTLRGYYNQSEAGSHTIQIMYGCDVGSDGRFLRGYRQDAYDGKDYIALNEDLRSWTAADMAAQITKRKWEAAHEAEQLRAYLDGTCVEWLRRYLENGKETLQRTDPPKTHMTHHPISDHEATLRCWALGFYPAEITLTWQRDGEDQTQDTELVETRPAGDGTFQKWAAVVVPSGEEQRYTCHVQHEGLPKPLTLRWELSSQPTIPI

SEQ ID NO: 1308 - protein, 284 aa, synthetic construct; identical to SEQ ID NO: 1307
  REGION 1..284: note = HLA-A (P01892) ECD

SEQ ID NO: 1309 - protein, 284 aa, synthetic construct; identical to SEQ ID NO: 1307
  REGION 1..284: note = HLA-A (P04439) ECD

SEQ ID NO: 1310 - protein, 284 aa, synthetic construct; identical to SEQ ID NO: 1307
  REGION 1..284: note = HLA-A (P05534) ECD

SEQ ID NO: 1311 - protein, 284 aa, synthetic construct; identical to SEQ ID NO: 1307
  REGION 1..284: note = HLA-A (P10314) ECD

SEQ ID NO: 1312 - protein, 284 aa, synthetic construct; identical to SEQ ID NO: 1307
  REGION 1..284: note = HLA-A (P10316) ECD

SEQ ID NO: 1313 - protein, 284 aa, synthetic construct; identical to SEQ ID NO: 1307
  REGION 1..284: note = HLA-A (P13746) ECD

SEQ ID NO: 1314 - protein, 284 aa, synthetic construct; identical to SEQ ID NO: 1307
  REGION 1..284: note = HLA-A (P16188) ECD

SEQ ID NO: 1315 - protein, 284 aa, synthetic construct; identical to SEQ ID NO: 1307
  REGION 1..284: note = HLA-A (P16189) ECD

SEQ ID NO: 1316 - protein, 284 aa, synthetic construct; identical to SEQ ID NO: 1307
  REGION 1..284: note = HLA-A (P16190) ECD

SEQ ID NO: 1317 - protein, 284 aa, synthetic construct; identical to SEQ ID NO: 1307
  REGION 1..284: note = HLA-A (P18462) ECD

SEQ ID NO: 1318 - protein, 284 aa, synthetic construct; identical to SEQ ID NO: 1307
  REGION 1..284: note = HLA-A (P30443) ECD

SEQ ID NO: 1319 - protein, 284 aa, synthetic construct; identical to SEQ ID NO: 1307
  REGION 1..284: note = HLA-A (P30447) ECD

SEQ ID NO: 1320 - protein, 284 aa, synthetic construct; identical to SEQ ID NO: 1307
  REGION 1..284: note = HLA-A (P30450) ECD

SEQ ID NO: 1321 - protein, 284 aa, synthetic construct; identical to SEQ ID NO: 1307
  REGION 1..284: note = HLA-A (P30453) ECD

SEQ ID NO: 1322 - protein, 284 aa, synthetic construct; identical to SEQ ID NO: 1307
  REGION 1..284: note = HLA-A (P30455) ECD

SEQ ID NO: 1323 - protein, 284 aa, synthetic construct; identical to SEQ ID NO: 1307
  REGION 1..284: note = HLA-A (P30456) ECD

SEQ ID NO: 1324 - protein, 284 aa, synthetic construct; identical to SEQ ID NO: 1307
  REGION 1..284: note = HLA-A (P30457) ECD

SEQ ID NO: 1325 - protein, 284 aa, synthetic construct; identical to SEQ ID NO: 1307
  REGION 1..284: note = HLA-A (P30459) ECD

SEQ ID NO: 1326 - protein, 284 aa, synthetic construct; identical to SEQ ID NO: 1307
  REGION 1..284: note = HLA-A (P30512) ECD

SEQ ID NO: 1327 - protein, 284 aa, synthetic construct; identical to SEQ ID NO: 1307
  REGION 1..284: note = HLA-A (Q09160) ECD

SEQ ID NO: 1328 - protein, 285 aa, synthetic construct
  REGION 1..285: note = HLA-B (P01889) ECD
GSHSMRYFYTSVSRPGRGEPRFISVGYVDDTQFVRFDSDAASPREEPRAPWIEQEGPEYWDRNTQIYKAQAQTDRESLRNLRGYYNQSEAGSHTLQSMYGCDVGPDGRLLRGHDQYAYDGKDYIALNEDLRSWTAADTAAQITQRKWEAAREAEQRRAYLEGECVEWLRRYLENGKDKLERADPPKTHVTHHPISDHEATLRCWALGFYPAEITLTWQRDGEDQTQDTELVETRPAGDRTFQKWAAVVVPSGEEQRYTCHVQHEGLPKPLTLRWEPSSQSTVPIV

SEQ ID NO: 1329 - protein, 285 aa, synthetic construct; identical to SEQ ID NO: 1328
  REGION 1..285: note = HLA-B (P03989) ECD

SEQ ID NO: 1330 - protein, 285 aa, synthetic construct; identical to SEQ ID NO: 1328
  REGION 1..285: note = HLA-B (P10319) ECD

SEQ ID NO: 1331 - protein, 285 aa, synthetic construct; identical to SEQ ID NO: 1328
  REGION 1..285: note = HLA-B (P18463) ECD

SEQ ID NO: 1332 - protein, 285 aa, synthetic construct; identical to SEQ ID NO: 1328
  REGION 1..285: note = HLA-B (P18464) ECD

SEQ ID NO: 1333 - protein, 285 aa, synthetic construct; identical to SEQ ID NO: 1328
  REGION 1..285: note = HLA-B (P18465) ECD

SEQ ID NO: 1334 - protein, 285 aa, synthetic construct; identical to SEQ ID NO: 1328
  REGION 1..285: note = HLA-B (P30460) ECD

SEQ ID NO: 1335 - protein, 285 aa, synthetic construct; identical to SEQ ID NO: 1328
  REGION 1..285: note = HLA-B (P30461) ECD

SEQ ID NO: 1336 - protein, 285 aa, synthetic construct; identical to SEQ ID NO: 1328
  REGION 1..285: note = HLA-B (P30462) ECD

SEQ ID NO: 1337 - protein, 285 aa, synthetic construct; identical to SEQ ID NO: 1328
  REGION 1..285: note = HLA-B (P30464) ECD

SEQ ID NO: 1338 - protein, 285 aa, synthetic construct; identical to SEQ ID NO: 1328
  REGION 1..285: note = HLA-B (P30466) ECD

SEQ ID NO: 1339 - protein, 285 aa, synthetic construct; identical to SEQ ID NO: 1328
  REGION 1..285: note = HLA-B (P30475) ECD

SEQ ID NO: 1340 - protein, 285 aa, synthetic construct; identical to SEQ ID NO: 1328
  REGION 1..285: note = HLA-B (P30479) ECD

SEQ ID NO: 1341 - protein, 285 aa, synthetic construct; identical to SEQ ID NO: 1328
  REGION 1..285: note = HLA-B (P30480) ECD

SEQ ID NO: 1342 - protein, 285 aa, synthetic construct; identical to SEQ ID NO: 1328
  REGION 1..285: note = HLA-B (P30481) ECD

SEQ ID NO: 1343 - protein, 285 aa, synthetic construct; identical to SEQ ID NO: 1328
  REGION 1..285: note = HLA-B (P30483) ECD

SEQ ID NO: 1344 - protein, 285 aa, synthetic construct; identical to SEQ ID NO: 1328
  REGION 1..285: note = HLA-B (P30484) ECD

SEQ ID NO: 1345 - protein, 285 aa, synthetic construct; identical to SEQ ID NO: 1328
  REGION 1..285: note = HLA-B (P30485) ECD

SEQ ID NO: 1346 - protein, 285 aa, synthetic construct; identical to SEQ ID NO: 1328
  REGION 1..285: note = HLA-B (P30486) ECD

SEQ ID NO: 1347 - protein, 285 aa, synthetic construct; identical to SEQ ID NO: 1328
  REGION 1..285: note = HLA-B (P30487) ECD

SEQ ID NO: 1348 - protein, 285 aa, synthetic construct; identical to SEQ ID NO: 1328
  REGION 1..285: note = HLA-B (P30488) ECD

SEQ ID NO: 1349 - protein, 285 aa, synthetic construct; identical to SEQ ID NO: 1328
  REGION 1..285: note = HLA-B (P30490) ECD

SEQ ID NO: 1350 - protein, 285 aa, synthetic construct; identical to SEQ ID NO: 1328
  REGION 1..285: note = HLA-B (P30491) ECD

SEQ ID NO: 1351 - protein, 285 aa, synthetic construct; identical to SEQ ID NO: 1328
  REGION 1..285: note = HLA-B (P30492) ECD

SEQ ID NO: 1352 - protein, 285 aa, synthetic construct; identical to SEQ ID NO: 1328
  REGION 1..285: note = HLA-B (P30493) ECD

SEQ ID NO: 1353 - protein, 285 aa, synthetic construct; identical to SEQ ID NO: 1328
  REGION 1..285: note = HLA-B (P30495) ECD

SEQ ID NO: 1354 - protein, 285 aa, synthetic construct; identical to SEQ ID NO: 1328
  REGION 1..285: note = HLA-B (P30498) ECD

SEQ ID NO: 1355 - protein, 285 aa, synthetic construct; identical to SEQ ID NO: 1328
  REGION 1..285: note = HLA-B (P30685) ECD

SEQ ID NO: 1356 - protein, 285 aa, synthetic construct; identical to SEQ ID NO: 1328
  REGION 1..285: note = HLA-B (Q04826) ECD

SEQ ID NO: 1357 - protein, 285 aa, synthetic construct; identical to SEQ ID NO: 1328
  REGION 1..285: note = HLA-B (Q29718) ECD

SEQ ID NO: 1358 - protein, 285 aa, synthetic construct; identical to SEQ ID NO: 1328
  REGION 1..285: note = HLA-B (Q29836) ECD

SEQ ID NO: 1359 - protein, 285 aa, synthetic construct; identical to SEQ ID NO: 1328
  REGION 1..285: note = HLA-B (Q29940) ECD

SEQ ID NO: 1360 - protein, 285 aa, synthetic construct; identical to SEQ ID NO: 1328
  REGION 1..285: note = HLA-B (Q31610) ECD

SEQ ID NO: 1361 - protein, 285 aa, synthetic construct; identical to SEQ ID NO: 1328
  REGION 1..285: note = HLA-B (Q31612) ECD

SEQ ID NO: 1362 - protein, 285 aa, synthetic construct; identical to SEQ ID NO: 1328
  REGION 1..285: note = HLA-B (Q95365) ECD

SEQ ID NO: 1363 - protein, 284 aa, synthetic construct
  REGION 1..284: note = HLA-C (P04222) ECD
CSHSMRYFDTAVSRPGRGEPRFISVGYVDDTQFVRFDSDAASPRGEPRAPWVEQEGPEYWDRETQKYKRQAQADRVSLRNLRGYYNQSEDGSHTLQRMSGCDLGPDGRLLRGYDQSAYDGKDYIALNEDLRSWTAADTAAQITQRKLEAARAAEQLRAYLEGTCVEWLRRYLENGKETLQRAEPPKTHVTHHPLSDHEATLRCWALGFYPAEITLTWQRDGEDQTQDTELVETRPAGDGTFQKWAAVVVPSGQEQRYTCHMQHEGLQEPLTLSWEPSSQPTIPI

SEQ ID NO: 1364 - protein, 284 aa, synthetic construct; identical to SEQ ID NO: 1363
  REGION 1..284: note = HLA-C (P10321) ECD

SEQ ID NO: 1365 - protein, 284 aa, synthetic construct; identical to SEQ ID NO: 1363
  REGION 1..284: note = HLA-C (P30499) ECD

SEQ ID NO: 1366 - protein, 284 aa, synthetic construct; identical to SEQ ID NO: 1363
  REGION 1..284: note = HLA-C (P30501) ECD

SEQ ID NO: 1367 - protein, 284 aa, synthetic construct; identical to SEQ ID NO: 1363
  REGION 1..284: note = HLA-C (P30504) ECD

SEQ ID NO: 1368 - protein, 284 aa, synthetic construct; identical to SEQ ID NO: 1363
  REGION 1..284: note = HLA-C (P30505) ECD

SEQ ID NO: 1369 - protein, 284 aa, synthetic construct; identical to SEQ ID NO: 1363
  REGION 1..284: note = HLA-C (P30508) ECD

SEQ ID NO: 1370 - protein, 284 aa, synthetic construct; identical to SEQ ID NO: 1363
  REGION 1..284: note = HLA-C (P30510) ECD

SEQ ID NO: 1371 - protein, 284 aa, synthetic construct; identical to SEQ ID NO: 1363
  REGION 1..284: note = HLA-C (Q07000) ECD

SEQ ID NO: 1372 - protein, 284 aa, synthetic construct; identical to SEQ ID NO: 1363
  REGION 1..284: note = HLA-C (Q29865) ECD

SEQ ID NO: 1373 - protein, 284 aa, synthetic construct; identical to SEQ ID NO: 1363
  REGION 1..284: note = HLA-C (Q29960) ECD

SEQ ID NO: 1374 - protein, 284 aa, synthetic construct; identical to SEQ ID NO: 1363
  REGION 1..284: note = HLA-C (Q29963) ECD

SEQ ID NO: 1375 - protein, 284 aa, synthetic construct; identical to SEQ ID NO: 1363
  REGION 1..284: note = HLA-C (Q95604) ECD

SEQ ID NO: 1376 - protein, 284 aa, synthetic construct; identical to SEQ ID NO: 1363
  REGION 1..284: note = HLA-C (Q9TNN7) ECD

SEQ ID NO: 1377 - protein, 207 aa, synthetic construct
  REGION 1..207: note = HLA-DMA (P28067) ECD
VPEAPTPMWPDDLQNHTFLHTVYCQDGSPSVGLSEAYDEDQLFFFDFSQNTRVPRLPEFADWAQEQGDAPAILFDKEFCEWMIQQIGPKLDGKIPVSRGFPIAEVFTLKPLEFGKPNTLVCFVSNLFPPMLTVNWHDHSVPVEGFGPTFVSAVDGLSFQAFSYLNFTPEPSDIFSCIVTHEIDRYTAIAYWVPRNALPSDLLENVLC

SEQ ID NO: 1378 - protein, 200 aa, synthetic construct
  REGION 1..200: note = HLA-DMB (P28068) ECD
GGFVAHVESTCLLDDAGTPKDFTYCISFNKDLLTCWDPEENKMAPCEFGVLNSLANVLSQHLNQKDTLMQRLRNGLQNCATHTQPFWGSLTNRTRPPSVQVAKTTPFNTREPVMLACYVWGFYPAEVTITWRKNGKLVMPHSSAHKTAQPNGDWTYQTLSHLALTPSYGDTYTCVVEHIGAPEPILRDWTPGLSPMQTLK

SEQ ID NO: 1379 - protein, 192 aa, synthetic construct
  REGION 1..192: note = HLA-DOA (P06340) ECD
TKADHMGSYGPAFYQSYGASGQFTHEFDEEQLFSVDLKKSEAVWRLPEFGDFARFDPQGGLAGIAAIKAHLDILVERSNRSRAINVPPRVTVLPKSRVELGQPNILICIVDNIFPPVINITWLRNGQTVTEGVAQTSFYSQPDHLFRKFHYLPFVPSAEDVYDCQVEHWGLDAPLLRHWELQVPIPPPDAME

SEQ ID NO: 1380 - protein, 198 aa, synthetic construct
  REGION 1..198: note = HLA-DOB (P13765) ECD
TDSPEDFVIQAKADCYFTNGTEKVQFVVRFIFNLEEYVRFDSDVGMFVALTKLGQPDAEQWNSRLDLLERSRQAVDGVCRHNYRLGAPFTVGRKVQPEVTVYPERTPLLHQHNLLHCSVTGFYPGDIKIKWFLNGQEERAGVMSTGPIRNGDWTFQTVVMLEMTPELGHVYTCLVDHSSLLSPVSVEWRAQSEYSWRK

SEQ ID NO: 1381 - protein, 194 aa, synthetic construct
  REGION 1..194: note = HLA-DPA1 (P20036) ECD
AGAIKADHVSTYAAFVQTHRPTGEFMFEFDEDEMFYVDLDKKETVWHLEEFGQAFSFEAQGGLANIAILNNNLNTLIQRSNHTQATNDPPEVTVFPKEPVELGQPNTLICHIDKFFPPVLNVTWLCNGELVTEGVAESLFLPRTDYSFHKFHYLTFVPSAEDFYDCRVEHWGLDQPLLKHWEAQEPIQMPETTE

SEQ ID NO: 1382 - protein, 196 aa, synthetic construct
  REGION 1..196: note = HLA-DPB1 (P04440) ECD
RATPENYLFQGRQECYAFNGTQRFLERYIYNREEFARFDSDVGEFRAVTELGRPAAEYWNSQKDILEEKRAVPDRMCRHNYELGGPMTLQRRVQPRVNVSPSKKGPLQHHNLLVCHVTDFYPGSIQVRWFLNGQEETAGVVSTNLIRNGDWTFQILVMLEMTPQQGDVYTCQVEHTSLDSPVTVEWKAQSDSARSK

SEQ ID NO: 1383 - protein, 193 aa, synthetic construct
  REGION 1..193: note = HLA-DQA1 (P01909) ECD
EDIVADHVASYGVNLYQSYGPSGQYTHEFDGDEQFYVDLGRKETVWCLPVLRQFRFDPQFALTNIAVLKHNLNSLIKRSNSTAATNEVPEVTVFSKSPVTLGQPNILICLVDNIFPPVVNITWLSNGHSVTEGVSETSFLSKSDHSFFKISYLTLLPSAEESYDCKVEHWGLDKPLLKHWEPEIPAPMSELTE

SEQ ID NO: 1384 - protein, 194 aa, synthetic construct
  REGION 1..194: note = HLA-DQA2 (P01906) ECD
EDIVADHVASYGVNFYQSHGPSGQYTHEFDGDEEFYVDLETKETVWQLPMFSKFISFDPQSALRNMAVGKHTLEFMMRQSNSTAATNEVPEVTVFSKFPVTLGQPNTLICLVDNIFPPVVNITWLSNGHSVTEGVSETSFLSKSDHSFFKISYLTFLPSADEIYDCKVEHWGLDEPLLKHWEPEIPAPMSELTE

SEQ ID NO: 1385 - protein, 198 aa, synthetic construct
  REGION 1..198: note = HLA-DQB1 (P01920) ECD
RDSPEDFVYQFKAMCYFTNGTERVRYVTRYIYNREEYARFDSDVEVYRAVTPLGPPDAEYWNSQKEVLERTRAELDTVCRHNYQLELRTTLQRRVEPTVTISPSRTEALNHHNLLVCSVTDFYPAQIKVRWFRNDQEETTGVVSTPLIRNGDWTFQILVMLEMTPQHGDVYTCHVEHPSLQNPITVEWRAQSESAQSK

SEQ ID NO: 1386 - protein, 197 aa, synthetic construct
  REGION 1..197: note = HLA-DQB2 (P05538) ECD
RDFPKDFLVQFKGMCYFTNGTERVRGVARYIYNREEYGRFDSDVGEFQAVTELGRSIEDWNNYKDFLEQERAAVDKVCRHNYEAELRTTLQRQVEPTVTISPSRTEALNHHNLLVCSVTDFYPAQIKVRWFRNDQEETAGVVSTSLIRNGDWTFQILVMLEITPQRGDIYTCQVEHPSLQSPITVEWRAQSESAQSK

SEQ ID NO: 1387 - protein, 191 aa, synthetic construct
  REGION 1..191: note = HLA-DRA (P01903) ECD
IKEEHVIIQAEFYLNPDQSGEFMFDFDGDEIFHVDMAKKETVWRLEEFGRFASFEAQGALANIAVDKANLEIMTKRSNYTPITNVPPEVTVLTNSPVELREPNVLICFIDKFTPPVVNVTWLRNGKPVTTGVSETVFLPREDHLFRKFHYLPFLPSTEDVYDCRVEHWGLDEPLLKHWEFDAPSPLPETTE

SEQ ID NO: 1388 - protein, 198 aa, synthetic construct
  REGION 1..198: note = HLA-DRB1 (P01911) ECD
GDTRPRFLWQPKRECHFFNGTERVRFLDRYFYNQEESVRFDSDVGEFRAVTELGRPDAEYWNSQKDILEQARAAVDTYCRHNYGVVESFTVQRRVQPKVTVYPSKTQPLQHHNLLVCSVSGFYPGSIEVRWFLNGQEEKAGMVSTGLIQNGDWTFQTLVMLETVPRSGEVYTCQVEHPSVTSPLTVEWRARSESAQSK

SEQ ID NO: 1389 - protein, 198 aa, synthetic construct
  REGION 1..198: note = HLA-DRB3 (P79483) ECD
GDTRPRFLELRKSECHFFNGTERVRYLDRYFHNQEEFLRFDSDVGEYRAVTELGRPVAESWNSQKDLLEQKRGRVDNYCRHNYGVGESFTVQRRVHPQVTVYPAKTQPLQHHNLLVCSVSGFYPGSIEVRWFRNGQEEKAGVVSTGLIQNGDWTFQTLVMLETVPRSGEVYTCQVEHPSVTSALTVEWRARSESAQSK

SEQ ID NO: 1390 - protein, 198 aa, synthetic construct
  REGION 1..198: note = HLA-DRB4 (P13762) ECD
GDTQPRFLEQAKCECHFLNGTERVWNLIRYIYNQEEYARYNSDLGEYQAVTELGRPDAEYWNSQKDLLERRRAEVDTYCRYNYGVVESFTVQRRVQPKVTVYPSKTQPLQHHNLLVCSVNGFYPGSIEVRWFRNGQEEKAGVVSTGLIQNGDWTFQTLVMLETVPRSGEVYTCQVEHPSMMSPLTVQWSARSESAQSK

SEQ ID NO: 1391 - protein, 198 aa, synthetic construct
  REGION 1..198: note = HLA-DRB5 (Q30154) ECD
GDTRPRFLQQDKYECHFFNGTERVRFLHRDIYNQEEDLRFDSDVGEYRAVTELGRPDAEYWNSQKDFLEDRRAAVDTYCRHNYGVGESFTVQRRVEPKVTVYPARTQTLQHHNLLVCSVNGFYPGSIEVRWFRNSQEEKAGVVSTGLIQNGDWTFQTLVMLETVPRSGEVYTCQVEHPSVTSPLTVEWRAQSESAQSK

SEQ ID NO: 1392 - protein, 284 aa, synthetic construct
  REGION 1..284: note = HLA-E (P13747) ECD
GSHSLKYFHTSVSRPGRGEPRFISVGYVDDTQFVRFDNDAASPRMVPRAPWMEQEGSEYWDRETRSARDTAQIFRVNLRTLRGYYNQSEAGSHTLQWMHGCELGPDGRFLRGYEQFAYDGKDYLTLNEDLRSWTAVDTAAQISEQKSNDASEAEHQRAYLEDTCVEWLHKYLEKGKETLLHLEPPKTHVTHHPISDHEATLRCWALGFYPAEITLTWQQDGEGHTQDTELVETRPAGDGTFQKWAAVVVPSGEEQRYTCHVQHEGLPEPVTLRWKPASQPTIPI

SEQ ID NO: 1393 - protein, 284 aa, synthetic construct
  REGION 1..284: note = HLA-F (P30511) ECD
GSHSLRYFSTAVSRPGRGEPRYIAVEYVDDTQFLRFDSDAAIPRMEPREPWVEQEGPQYWEWTTGYAKANAQTDRVALRNLLRRYNQSEAGSHTLQGMNGCDMGPDGRLLRGYHQHAYDGKDYISLNEDLRSWTAADTVAQITQRFYEAEEYAEEFRTYLEGECLELLRRYLENGKETLQRADPPKAHVAHHPISDHEATLRCWALGFYPAEITLTWQRDGEEQTQDTELVETRPAGDGTFQKWAAVVVPPGEEQRYTCHVQHEGLPQPLILRWEQSPQPTIPI

SEQ ID NO: 1394 - protein, 284 aa, synthetic construct [sequence omitted]

SEQ ID NO: 1395 - protein, 284 aa, synthetic construct
  REGION 1..284: note = HLA-H (P01893) ECD
RSHSMRYFYTTMSRPGAGEPRFISVGYVDDTQFVRFDSDDASPREEPRAPWMEREGPKYWDRNTQICKAQAQTERENLRIALRYYNQSEGGSHTMQVMYGCDVGPDGPFLRGYEQHAYDGKDYIALNEDLRSWTAADMAAQITKRKWEAARRAEQRRVYLEGEFVEWLRRYLENGKETLQRADPPKTHMTHHPISDHEATLRCWALGFYPAEITLTWQRDGEDQTQDTELVETRPAGDGTFQKWAAVVVPSGEEQRYTCHVQHEGLPEPLTLRWEPSSQPTVPI

SEQ ID NO: 1396 - protein, 453 aa, synthetic construct
  REGION 1..453: note = ICAM1 (P05362) ECD
QTSVSPSKVILPRGGSVLVTCSTSCDQPKLLGIETPLPKKELLLPGNNRKVYELSNVQEDSQPMCYSNCPDGQSTAKTFLTVYWTPERVELAPLPSWQPVGKNLTLRCQVEGGAPRANLTVVLLRGEKELKREPAVGEPAEVTTTVLVRRDHHGANFSCRTELDLRPQGLELFENTSAPYQLQTFVLPATPPQLVSPRVLEVDTQGTVVCSLDGLFPVSEAQVHLALGDQRLNPTVTYGNDSFSAKASVSVTAEDEGTQRLTCAVILGNQSQETLQTVTIYSFPAPNVILTKPEVSEGTEVTVKCEAHPRAKVTLNGVPAQPLGPRAQLLLKATPEDNGRSFSCSATLEVAGQLIHKNQTRELRVLYGPRLDERDCPGNWTWPENSQQTPMCQAWGNPLPELKCLKDGTFPLPIGESVTVTRDLEGTYLCRARSTQGEVTRKVTVNVLSPRYE

SEQ ID NO: 1397 - protein, 199 aa, synthetic construct
  REGION 1..199: note = ICAM2 (P13598) ECD
KVFEVHVRPKKLAVEPKGSLEVNCSTTCNQPEVGGLETSLDKILLDEQAQWKHYLVSNISHDTVLQCHFTCSGKQESMNSNVSVYQPPRQVILTLQPTLVAVGKSFTIECRVPTVEPLDSLTLFLFRGNETLHYETFGKAAPAPQEATATFNSTADREDGHRNFSCLAVLDLMSRGGNIFHKHSAPKMLEIYEPVSDSQ

SEQ ID NO: 1398 - protein, 456 aa, synthetic construct
  REGION 1..456: note = ICAM3 (P32942) ECD
QEFLLRVEPQNPVLSAGGSLFVNCSTDCPSSEKIALETSLSKELVASGMGWAAFNLSNVTGNSRILCSVYCNGSQITGSSNITVYRLPERVELAPLPPWQPVGQNFTLRCQVEDGSPRTSLTVVLLRWEEELSRQPAVEEPAEVTATVLASRDDHGAPFSCRTELDMQPQGLGLFVNTSAPRQLRTFVLPVTPPRLVAPRFLEVETSWPVDCTLDGLFPASEAQVYLALGDQMLNATVMNHGDTLTATATATARADQEGAREIVCNVTLGGERREARENLTVFSFLGPIVNLSEPTAHEGSTVTVSCMAGARVQVTLDGVPAAAPGQPAQLQLNATESDDGRSFFCSATLEVDGEFLHRNSSVQLRVLYGPKIDRATCPQHLKWKDKTRHVLQCQARGNPYPELRCLKEGSSREVPVGIPFFVNVTHNGTYQCQASSSRGKYTLVVVMDIEAGSSH

SEQ ID NO: 1399 - protein, 218 aa, synthetic construct
  REGION 1..218: note = ICAM4 (Q14773) ECD
ALGRRTKRAQSPKGSPLAPSGTSVPFWVRMSPEFVAVQPGKSVQLNCSNSCPQPQNSSLRTPLRQGKTLRGPGWVSYQLLDVRAWSSLAHCLVTCAGKTRWATSRITAYKPPHSVILEPPVLKGRKYTLRCHVTQVFPVGYLVVTLRHGSRVIYSESLERFTGLDLANVTLTYEFAAGPRDFWQPVICHARLNLDGLVVRNSSAPITLMLAWSPAPTA

SEQ ID NO: 1400 - protein, 804 aa, synthetic construct
  REGION 1..804: note = ICAM5 (Q9UMF0) ECD
EPFWADLQPRVAFVERGGSLWLNCSTNCPRPERGGLETSLRRNGTQRGLRWLARQLVDIREPETQPVCFFRCARRTLQARGLIRTFQRPDRVELMPLPPWQPVGENFTLSCRVPGAGPRASLTLTLLRGAQELIRRSFAGEPPRARGAVLTATVLARREDHGANFSCRAELDLRPHGLGLFENSSAPRELRTFSLSPDAPRLAAPRLLEVGSERPVSCTLDGLFPASEARVYLALGDQNLSPDVTLEGDAFVATATATASAEQEGARQLVCNVTLGGENRETRENVTIYSFPAPLLTLSEPSVSEGQMVTVTCAAGAQALVTLEGVPAAVPGQPAQLQLNATENDDRRSFFCDATLDVDGETLIKNRSAELRVLYAPRLDDSDCPRSWTWPEGPEQTLRCEARGNPEPSVHCARSDGGAVLALGLLGPVTRALSGTYRCKAANDQGEAVKDVTLTVEYAPALDSVGCPERITWLEGTEASLSCVAHGVPPPDVICVRSGELGAVIEGLLRVAREHAGTYRCEATNPRGSAAKNVAVTVEYGPRFEEPSCPSNWTWVEGSGRLFSCEVDGKPQPSVKCVGSGGATEGVLLPLAPPDPSPRAPRIPRVLAPGIYVCNATNRHGSVAKTVVVSAESPPEMDESTCPSHQTWLEGAEASALACAARGRPSPGVRCSREGIPWPEQQRVSREDAGTYHCVATNAHGTDSRTVTVGVEYRPVVAELAASPPGGVRPGGNFTLTCRAEAWPPAQISWRAPPGALNIGLSSNNSTLSVAGAMGSHGGEYECAATNAHGRHARRITVRVAGPW

SEQ ID NO: 1401 - protein, 120 aa, synthetic construct
  REGION 1..120: note = ICOS (Q9Y6W8) ECD
EINGSANYEMFIFHNGGVQILCKYPDIVQQFKMQLLKGGQILCDLTKTKGSGNTVSIKSLKFCHSQLSNNSVSFFLYNLDHSHANYYFCNLSIFDPPPFKVTLTGGYLHIYESQLCCQLK

SEQ ID NO: 1402 - protein, 238 aa, synthetic construct [sequence omitted]

SEQ ID NO: 1403 - protein, 409 aa, synthetic construct
  REGION 1..409: note = IFNAR1 (P17181) ECD
KNLKSPQKVEVDIIDDNFILRWNRSDESVGNVTFSFDYQKTGMDNWIKLSGCQNITSTKCNFSSLKLNVYEEIKLRIRAEKENTSSWYEVDSFTPFRKAQIGPPEVHLEAEDKAIVIHISPGTKDSVMWALDGLSFTYSLVIWKNSSGVEERIENIYSRHKIYKLSPETTYCLKVKAALLTSWKIGVYSPVHCIKTTVENELPPPENIEVSVQNQNYVLKWDYTYANMTFQVQWLHAFLKRNPGNHLYKWKQIPDCENVKTTQCVFPQNVFQKGIYLLRVQASDGNNTSFWSEEIKFDTEIQAFLLPPVFNIRSLSDSFHIYIGAPKQSGNTPVIQDYPLIYEIIFWENTSNAERKIIEKKTDVTVPNLKPLTVYCVKARAHTMDEKLNKSSVFSDAVCEKTKPGNTSK

SEQ ID NO: 1404 - protein, 217 aa, synthetic construct
  REGION 1..217: note = IFNAR2 (P48551) ECD
ISYDSPDYTDESCTFKISLRNFRSILSWELKNHSIVPTHYTLLYTIMSKPEDLKVVKNCANTTRSFCDLTDEWRSTHEAYVTVLEGFSGNTTLFSCSHNFWLAIDMSFEPPEFEIVGFTNHINVMVKFPSIVEEELQFDLSLVIEEQSEGIVKKHKPEIKGNMSGNFTYIIDKLIPNTNYCVSVYLEHSDEQAVIKSPLKCTLLPPGQESESAESAK

SEQ ID NO: 1405 - protein, 228 aa, synthetic construct [sequence omitted]

SEQ ID NO: 1406 - protein, 220 aa, synthetic construct
  REGION 1..220: note = IFNGR2 (P38484) ECD
SQLPAPQHPKIRLYNAEQVLSWEPVALSNSTRPVVYQVQFKYTDSKWFTADIMSIGVNCTQITATECDFTAASPSAGFPMDFNVTLRLRAELGALHSAWVTMPWFQHYRNVTVGPPENIEVTPGEGSLIIRFSSPFDIADTSTAFFCYYVHYWEKGGIQQVKGPFRSNSISLDNLKPSRVYCLQVQAQLLWNKSNIFRVGHLSNISCYETMADASTELQQ

SEQ ID NO: 1407 - protein, 208 aa, synthetic construct
  REGION 1..208: note = IFNLR1 (Q8IU57) ECD
RPRLAPPQNVTLLSQNFSVYLTWLPGLGNPQDVTYFVAYQSSPTRRRWREVEECAGTKELLCSMMCLKKQDLYNKFKGRVRTVSPSSKSPWVESEYLDYLFEVEPAPPVLVLTQTEEILSANATYQLPPCMPPLDLKYEVAFWKEGAGNKTLFPVTPHGQPVQITLQPAASEHHCLSARTIYTFSVPKYSKFSKPTCFLLEVPEANWA

SEQ ID NO: 1408 - protein, 605 aa, synthetic construct
  REGION 1..605: note = IGDCC3 (Q8IVU1) ECD
LGHSAELAFAVEPSDDVAVPGQPIVLDCRVEGTPPVRITWRKNGVELPESTHSTLLANGSLMIRHFRLEPGGSPSDEGDYECVAQNRFGLVVSRKARIQAATMSDFHVHPQATVGEEGGVARFQCQIHGLPKPLITWEKNRVPIDTDNERYTLLPKGVLQITGLRAEDGGIFHCVASNIASIRISHGARLTVSGSGSGAYKEPAILVGPENLTLTVHQTAVLECVATGNPRPIVSWSRLDGRPIGVEGIQVLGTGNLIISDVTVQHSGVYVCAANRPGTRVRRTAQGRLVVQAPAEFVQHPQSISRPAGTTAMFTCQAQGEPPPHVTWLKNGQVLGPGGHVRLKNNNSTLTISGIGPEDEAIYQCVAENSAGSSQASARLTVLWAEGLPGPPRNVRAVSVSSTEVRVSWSEPLANTKEIIGYVLHIRKAADPPELEYQEAVSKSTFQHLVSDLEPSTAYSFYIKAYTPRGASSASVPTLASTLGEAPAPPPLSVRVLGSSSLQLLWEPWPRLAQHEGGFKLFYRPASKTSFTGPILLPGTVSSYNLSQLDPTAVYEVKLLAYNQHGDGNATVRFVSLRGASERTALSPPCDCRKEEAANQTSTTG

SEQ ID NO: 1409 - protein, 933 aa, synthetic construct
  REGION 1..933: note = IGDCC4 (Q8TDY8) ECD
ELLLPQETTVELSCGVGPLQVILGPEQAAVLNCSLGAAAAGPPTRVTWSKDGDTLLEHDHLHLLPNGSLWLSQPLAPNGSDESVPEAVGVIEGNYSCLAHGPLGVLASQTAVVKLATLADFSLHPESQTVEENGTARFECHIEGLPAPIITWEKDQVTLPEEPRLIVLPNGVLQILDVQESDAGPYRCVATNSARQHFSQEALLSVAHRGSLASTRGQDVVIVAAPENTTVVSGQSVVMECVASADPTPFVSWVRQDGKPISTDVIVLGRTNLLIANAQPWHSGVYVCRANKPRTRDFATAAAELRVLAAPAITQAPEALSRTRASTARFVCRASGEPRPALRWLHNGAPLRPNGRVKVQGGGGSLVITQIGLQDAGYYQCVAENSAGMACAAASLAVVVREGLPSAPTRVTATPLSSSAVLVAWERPEMHSEQIIGFSLHYQKARGMDNVEYQFAVNNDTTELQVRDLEPNTDYEFYVVAYSQLGASRTSTPALVHTLDDVPSAAPQLSLSSPNPSDIRVAWLPLPPSLSNGQVVKYKIEYGLGKEDQIFSTEVRGNETQLMLNSLQPNKVYRVRISAGTAAGFGAPSQWMHHRTPSMHNQSHVPFAPAELKVQAKMESLVVSWQPPPHPTQISGYKLYWREVGAEEEANGDRLPGGRGDQAWDVGPVRLKKKVKQYELTQLVPGRLYEVKLVAFNKHEDGYAAVWKGKTEKAPAPDMPIQRGPPLPPAHVHAESNSSTSIWLRWKKPDFTTVKIVNYTVRFSPWGLRNASLVTYYTSSGEDILIGGLKPFTKYEFAVQSHGVDMDGPFGSVVERSTLPDRPSTPPSDLRLSPLTPSTVRLHWCPPTEPNGEIVEYLILYSSNHTQPEHQWTLLTTQGNIFSAEVHGLESDTRYFFKMGARTEVGPGPFSRLQDVITLQEKLSDSLDMHSVT

SEQ ID NO: 1410 - protein, 195 aa, synthetic construct
  REGION 1..195: note = IGF1R (P08069) ECD
DVMQVANTTMSSRSRNTTAADTYNITDPEELETEYPFFESRVDNKERTVISNLRPFTLYRIDIHSCNHEAEKLGCSASNFVFARTMPAEGADDIPGPVTWEPRPENSIFLKWPEPENPNGLILMYEIKYGSQVEDQRECVSRQEYRKYGGAKLNRLNPGNYTARIQATSLSGNGSWTDPVFFYVQAKTGYENFIH

SEQ ID NO: 1411 - protein, 2264 aa, synthetic construct
  REGION 1..2264: note = IGF2R (P11717) ECD
QAAPFPELCSYTWEAVDTKNNVLYKINICGSVDIVQCGPSSAVCMHDLKTRTYHSVGDSVLRSATRSLLEFNTTVSCDQQGTNHRVQSSIAFLCGKTLGTPEFVTATECVHYFEWRTTAACKKDIFKANKEVPCYVFDEELRKHDLNPLIKLSGAYLVDDSDPDTSLFINVCRDIDTLRDPGSQLRACPPGTAACLVRGHQAFDVGQPRDGLKLVRKDRLVLSYVREEAGKLDFCDGHSPAVTITFVCPSERREGTIPKLTAKSNCRYEIEWITEYACHRDYLESKTCSLSGEQQDVSIDLTPLAQSGGSSYISDGKEYLFYLNVCGETEIQFCNKKQAAVCQVKKSDTSQVKAAGRYHNQTLRYSDGDLTLIYFGGDECSSGFQRMSVINFECNKTAGNDGKGTPVFTGEVDCTYFFTWDTEYACVKEKEDLLCGATDGKKRYDLSALVRHAEPEQNWEAVDGSQTETEKKHFFINICHRVLQEGKARGCPEDAAVCAVDKNGSKNLGKFISSPMKEKGNIQLSYSDGDDCGHGKKIKTNITLVCKPGDLESAPVLRTSGEGGCFYEFEWHTAAACVLSKTEGENCTVFDSQAGFSFDLSPLTKKNGAYKVETKKYDFYINVCGPVSVSPCQPDSGACQVAKSDEKTWNLGLSNAKLSYYDGMIQLNYRGGTPYNNERHTPRATLITFLCDRDAGVGFPEYQEEDNSTYNFRWYTSYACPEEPLECVVTDPSTLEQYDLSSLAKSEGGLGGNWYAMDNSGEHVTWRKYYINVCRPLNPVPGCNRYASACQMKYEKDQGSFTEVVSISNLGMAKTGPVVEDSGSLLLEYVNGSACTTSDGRQTTYTTRIHLVCSRGRLNSHPIFSLNWECVVSFLWNTEAACPIQTTTDTDQACSIRDPNSGFVFNLNPLNSSQGYNVSGIGKIFMFNVCGTMPVCGTILGKPASGCEAETQTEELKNWKPARPVGIEKSLQLSTEGFITLTYKGPLSAKGTADAFIVRFVCNDDVYSGPLKFLHQDIDSGQGIRNTYFEFETALACVPSPVDCQVTDLAGNEYDLTGLSTVRKPWTAVDTSVDGRKRTFYLSVCNPLPYIPGCQGSAVGSCLVSEGNSWNLGVVQMSPQAAANGSLSIMYVNGDKCGNQRFSTRITFECAQISGSPAFQLQDGCEYVFIWRTVEACPVVRVEGDNCEVKDPRHGNLYDLKPLGLNDTIVSAGEYTYYFRVCGKLSSDVCPTSDKSKVVSSCQEKREPQGFHKVAGLLTQKLTYENGLLKMNFTGGDTCHKVYQRSTAIFFYCDRGTQRPVFLKETSDCSYLFEWRTQYACPPFDLTECSFKDGAGNSFDLSSLSRYSDNWEAITGTGDPEHYLINVCKSLAPQAGTEPCPPEAAACLLGGSKPVNLGRVRDGPQWRDGIIVLKYVDGDLCPDGIRKKSTTIRFTCSESQVNSRPMFISAVEDCEYTFAWPTATACPMKSNEHDDCQVTNPSTGHLFDLSSLSGRAGFTAAYSEKGLVYMSICGENENCPPGVGACFGQTRISVGKANKRLRYVDQVLQLVYKDGSPCPSKSGLSYKSVISFVCRPEARPTNRPMLISLDKQTCTLFFSWHTPLACEQATECSVRNGSSIVDLSPLIHRTGGYEAYDESEDDASDTNPDFYINICQPLNPMHGVPCPAGAAVCKVPIDGPPIDIGRVAGPPILNPIANEIYLNFESSTPCLADKHFNYTSLIAFHCKRGVSMGTPKLLRTSECDFVFEWETPVVCPDEVRMDGCTLTDEQLLYSFNLSSLSTSTFKVTRDSRTYSVGVCTFAVGPEQGGCKDGGVCLLSGTKGASFGRLQSMKLDYRHQDEAVVLSYVNGDRCPPETDDGVPCVFPFIFNGKSYEECIIESRAKLWCSTTADYDRDHEWGFCRHSNSYRTSSIIFKCDEDEDIGRPQVFSEVRGCDVTFEWKTKVVCPPKKLECKFVQKHKTYDLRLLSSLTGSWSLVHNGVSYYINLCQKIYKGPLGCSERASICRRTTTGDVQVLGLVHTQKLGVIGDKVVVTYSKGYPCGGNKTASSVIELTCTKTVGRPAFKRFDIDSCTYYFSWDSRAACAVKPQEVQMVNGTITNPINGKSFSLGDIYFKLFRASGDMRTNGDNYLYEIQLSSITSSRNPACSGANICQVKPNDQHFSRKVGTSDKTKYYLQDGDLDVVFASSSKCGKDKTKSVSSTIFFHCDPLVEDGIPEFSHETADCQYLFSWYTSAVCPLGVGFDSENPGDDGQMHKGLSERSQ

SEQ ID NO: 1412 - protein, 141 aa, synthetic construct
  REGION 1..141: note = IGFLR1 (Q9H665) ECD
SQYCGRLEYWNPDNKCCSSCLQRFGPPPCPDYEFRENCGLNDHGDFVTPPFRKCSSGQCNPDGAELCSPCGGGAVTPTPAAGGGRTPWRCRERPVPAKGHCPLTPGNPGAPSSQERSSPASSIAWRTPEPVPQQAWPNFLP

SEQ ID NO: 1413 - protein, 219 aa, synthetic construct
  REGION 1..219: note = IGSF11 (Q5DX21) ECD
LEVSESPGSIQVARGQPAVLPCTFTTSAALINLNVIWMVTPLSNANQPEQVILYQGGQMFDGAPRFHGRVGFTGTMPATNVSIFINNTQLSDTGTYQCLVNNLPDIGGRNIGVTGLTVLVPPSAPHCQIQGSQDIGSDVILLCSSEEGIPRPTYLWEKLDNTLKLPPTATQDQVQGTVTIRNISALSSGLYQCVASNAIGTSTCLLDLQVISPQPRNIG

SEQ ID NO: 1414 - protein, 1105 aa, synthetic construct
  REGION 1..1105: note = IGSF3 (O75054) ECD
QRQVTVQEGPLYRTEGSHITIWCNVSGYQGPSEQNFQWSIYLPSSPEREVQIVSTMDSSFPYAIYTQRVRGGKIFIERVQGNSTLLHITDLQARDAGEYECHTPSTDKQYFGSYSAKMNLVVIPDSLQTTAMPQTLHRVEQDPLELTCEVASETIQHSHLSVAWLRQKVGEKPVEVISLSRDFMLHSSSEYAQRQSLGEVRLDKLGRTTFRLTIFHLQPSDQGEFYCEAAEWIQDPDGSWYAMTRKRSEGAVVNVQPTDKEFTVRLETEKRLHTVGEPVEFRCILEAQNVPDRYFAVSWAFNSSLIATMGPNAVPVLNSEFAHREARGQLKVAKESDSVFVLKIYHLRQEDSGKYNCRVTEREKTVTGEFIDKESKRPKNIPIIVLPLKSSISVEVASNASVILEGEDLRFSCSVRTAGRPQGRFSVIWQLVDRQNRRSNIMWLDRDGTVQPGSSYWERSSFGGVQMEQVQPNSFSLGIFNSRKEDEGQYECHVTEWVRAVDGEWQIVGERRASTPISITALEMGFAVTAISRTPGVTYSDSFDLQCIIKPHYPAWVPVSVTWRFQPVGTVEFHDLVTFTRDGGVQWGDRSSSFRTRTAIEKAESSNNVRLSISRASDTEAGKYQCVAELWRKNYNNTWTRLAERTSNLLEIRVLQPVTKLQVSKSKRTLTLVENKPIQLNCSVKSQTSQNSHFAVLWYVHKPSDADGKLILKTTHNSAFEYGTYAEEEGLRARLQFERHVSGGLFSLTVQRAEVSDSGSYYCHVEEWLLSPNYAWYKLAEEVSGRTEVTVKQPDSRLRLSQAQGNLSVLETRQVQLECVVLNRTSITSQLMVEWFVWKPNHPERETVARLSRDATFHYGEQAAKNNLKGRLHLESPSPGVYRLFIQNVAVQDSGTYSCHVEEWLPSPSGMWYKRAEDTAGQTALTVMRPDASLQVDTVVPNATVSEKAAFQLDCSIVSRSSQDSRFAVAWYSLRTKAGGKRSSPGLEEQEEEREEEEEEDDDDDDDPTERTALLSVGPDAVFGPEGSPWEGRLRFQRLSPVLYRLTVLQASPQDTGNYSCHVEEWLPSPQKEWYRLTEEESAPIGIRVLDTSPTLQSIICSNDA

SEQ ID NO: 1415 - protein, 126 aa, synthetic construct
  REGION 1..126: note = IGSF6 (O95976) ECD
CTLSVTQPWYLEVDYTHEAVTIKCTFSATGCPSEQPTCLWFRYGAHQPENLCLDGCKSEADKFTVREALKENQVSLTVNRVTSNDSAIYICGIAFPSVPEARAKQTGGGTTLVVREIKLLSKELRS

SEQ ID NO: 1416 - protein, 552 aa, synthetic construct
  REGION 1..552: note = IGSF8 (Q969P0) ECD
REVLVPEGPLYRVAGTAVSISCNVTGYEGPAQQNFEWFLYRPEAPDTALGIVSTKDTQFSYAVFKSRVVAGEVQVQRLQGDAVVLKIARLQAQDAGIYECHTPSTDTRYLGSYSGKVELRVLPDVLQVSAAPPGPRGRQAPTSPPRMTVHEGQELALGCLARTSTQKHTHLAVSFGRSVPEAPVGRSTLQEVVGIRSDLAVEAGAPYAERLAAGELRLGKEGTDRYRMVVGGAQAGDAGTYHCTAAEWIQDPDGSWAQIAEKRAVLAHVDVQTLSSQLAVTVGPGERRIGPGEPLELLCNVSGALPPAGRHAAYSVGWEMAPAGAPGPGRLVAQLDTEGVGSLGPGYEGRHIAMEKVASRTYRLRLEAARPGDAGTYRCLAKAYVRGSGTRLREAASARSRPLPVHVREEGVVLEAVAWLAGGTVYRGETASLLCNISVRGGPPGLRLAASWWVERPEDGELSSVPAQLVGGVGQDGVAELGVRPGGGPVSVELVGPRSHRLRLHSLGPEDEGVYHCAPSAWVQHADYSWYQAGSARSGPVTVYPYMHALDT

SEQ ID NO: 1417 - protein, 714 aa, synthetic construct
  REGION 1..714: note = IGSF9 (Q9P2J2) ECD
RGKPEVVSVVGRAGESVVLGCDLLPPAGRPPLHVIEWLRFGFLLPIFIQFGLYSPRIDPDYVGRVRLQKGASLQIEGLRVEDQGWYECRVFFLDQHIPEDDFANGSWVHLTVNSPPQFQETPPAVLEVQELEPVTLRCVARGSPLPHVTWKLRGKDLGQGQGQVQVQNGTLRIRRVERGSSGVYTCQASSTEGSATHATQLLVLGPPVIVVPPKNSTVNASQDVSLACHAEAYPANLTYSWFQDNINVFHISRLQPRVRILVDGSLRLLATQPDDAGCYTCVPSNGLLHPPSASAYLTVLYPAQVTAMPPETPLPIGMPGVIRCPVRANPPLLFVSWTKDGKALQLDKFPGWSQGTEGSLIIALGNEDALGEYSCTPYNSLGTAGPSPVTRVLLKAPPAFIERPKEEYFQEVGRELLIPCSAQGDPPPVVSWTKVGRGLQGQAQVDSNSSLILRPLTKEAHGHWECSASNAVARVATSTNVYVLGTSPHVVTNVSVVALPKGANVSWEPGFDGGYLQRFSVWYTPLAKRPDRMHHDWVSLAVPVGAAHLLVPGLQPHTQYQFSVLAQNKLGSGPFSEIVLSAPEGLPTTPAAPGLPPTEIPPPLSPPRGLVAVRTPRGVLLHWDPPELVPKRLDGYVLEGRQGSQGWEVLDPAVAGTETELLVPGLIKDVLYEFRLVAFAGSFVSDPSNTANVSTSGLEVYPSRTQLPGLLPQP

SEQ ID NO: 1418 - protein, 702 aa, synthetic construct
  REGION 1..702: note = IGSF9B (Q9UPX0) ECD
EGAHGLREEPEFVTARAGESVVLRCDVIHPVTGQPPPYVVEWFKFGVPIPIFIKFGYYPPHVDPEYAGRASLHDKASLRLEQVRSEDQGWYECKVLMLDQQYDTFHNGSWVHLTINAPPTFTETPPQYIEAKEGGSITMTCTAFGNPKPIVTWLKEGTLLGASGKYQVSDGSLTVTSVSREDRGAYTCRAYSIQGEAVHTTHLLVQGPPFIVSPPENITVNISQDALLTCRAEAYPGNLTYTWYWQDENVYFQNDLKLRVRILIDGTLIIFRVKPEDSGKYTCVPSNSLGRSPSASAYLTVQYPARVLNMPPVIYVPVGIHGYIRCPVDAEPPATVVKWNKDGRPLQVEKNLGWTLMEDGSIRIEEATEEALGTYTCVPYNTLGTMGQSAPARLVLKDPPYFTVLPGWEYRQEAGRELLIPCAAAGDPFPVITWRKVGKPSRSKHSALPSGSLQFRALSKEDHGEWECVATNVVTSITASTHLTVIGTSPHAPGSVRVQVSMTTANVSWEPGYDGGYEQTFSVWMKRAQFGPHDWLSLPVPPGPSWLLVDTLEPETAYQFSVLAQNKLGTSAFSEVVTVNTLAFPITTPEPLVLVTPPRCLIANRTQQGVLLSWLPPANHSFPIDRYIMEFRVAERWELLDDGIPGTEGEFFAKDLSQDTWYEFRVLAVMQDLISEPSNIAGVSSTDIFPQPDLTEDGLARP

SEQ ID NO: 1419 - protein, 214 aa, synthetic construct
  REGION 1..214: note = IL10RA (Q13651) ECD
HGTELPSPPSVWFEAEFFHHILHWTPIPNQSESTCYEVALLRYGIESWNSISNCSQTLSYDLTAVTLDLYHSNGYRARVRAVDGSRHSNWTVTNTRFSVDEVTLTVGSVNLEIHNGFILGKIQLPRPKMAPANDTYESIFSHFREYEIAIRKVPGNFTFTHKKVKHENFSLLTSGEVGEFCVQVKPSVASRSNKGMWSKEECISLTRQYFTVTN

SEQ ID NO: 1420 - protein, 201 aa, synthetic construct
  REGION 1..201: note = IL10RB (Q08334) ECD
MVPPPENVRMNSVNFKNILQWESPAFAKGNLTFTAQYLSYRIFQDKCMNTTLTECDFSSLSKYGDHTLRVRAEFADEHSDWVNITFCPVDDTIIGPPGMQVEVLADSLHMRFLAPKIENEYETWTMKNVYNSWTYNVQYWKNGTDEKFQITPQYDFEVLRNLEPWTTYCVQVRGFLPDRNKAGEWSEPVCEQTTHDETVPS

SEQ ID NO: 1421 - protein, 347 aa, synthetic construct
  REGION 1..347: note = IL11RA (Q14626) ECD
SPCPQAWGPPGVQYGQPGRSVKLCCPGVTAGDPVSWFRDGEPKLLQGPDSGLGHELVLAQADSTDEGTYICQTLDGALGGTVTLQLGYPPARPVVSCQAADYENFSCTWSPSQISGLPTRYLTSYRKKTVLGADSQRRSPSTGPWPCPQDPLGAARCVVHGAEFWSQYRINVTEVNPLGASTRLLDVSLQSILRPDPPQGLRVESVPGYPRRLRASWTYPASWPCQPHFLLKFRLQYRPAQHPAWSTVEPAGLEEVITDAVAGLPHAVRVSARDFLDAGTWSTWSPEAWGTPSTGTIPKEIPAWGQLHTQPEVEPQVDSPAPPRPSLQPHPRLLDHRDSVEQVAVLA

SEQ ID NO: 1422 - protein, 522 aa, synthetic construct
  REGION 1..522: note = IL12RB1 (P42701) ECD
CRTSECCFQDPPYPDADSGSASGPRDLRCYRISSDRYECSWQYEGPTAGVSHFLRCCLSSGRCCYFAAGSATRLQFSDQAGVSVLYTVTLWVESWARNQTEKSPEVTLQLYNSVKYEPPLGDIKVSKLAGQLRMEWETPDNQVGAEVQFRHRTPSSPWKLGDCGPQDDDTESCLCPLEMNVAQEFQLRRRQLGSQGSSWSKWSSPVCVPPENPPQPQVRFSVEQLGQDGRRRLTLKEQPTQLELPEGCQGLAPGTEVTYRLQLHMLSCPCKAKATRTLHLGKMPYLSGAAYNVAVISSNQFGPGLNQTWHIPADTHTEPVALNISVGTNGTTMYWPARAQSMTYCIEWQPVGQDGGLATCSLTAPQDPDPAGMATYSWSRESGAMGQEKCYYITIFASAHPEKLTLWSTVLSTYHFGGNASAAGTPHHVSVKNHSLDSVSVDWAPSLLSTCPGVLKEYVVRCRDEDSKQVSEHPVQPTETQVTLSGLRAGVAYTVQVRADTAWLRGVWSQPQRFSIEVQVSD

SEQ ID NO: 1423 - protein, 599 aa, synthetic construct
  REGION 1..599: note = IL12RB2 (Q99665) ECD
KIDACKRGDVTVKPSHVILLGSTVNITCSLKPRQGCFHYSRRNKLILYKFDRRINFHHGHSLNSQVTGLPLGTTLFVCKLACINSDEIQICGAEIFVGVAPEQPQNLSCIQKGEQGTVACTWERGRDTHLYTEYTLQLSGPKNLTWQKQCKDIYCDYLDFGINLTPESPESNFTAKVTAVNSLGSSSSLPSTFTFLDIVRPLPPWDIRIKFQKASVSRCTLYWRDEGLVLLNRLRYRPSNSRLWNMVNVTKAKGRHDLLDLKPFTEYEFQISSKLHLYKGSWSDWSESLRAQTPEEEPTGMLDVWYMKRHIDYSRQQISLFWKNLSVSEARGKILHYQVTLQELTGGKAMTQNITGHTSWTTVIPRTGNWAVAVSAANSKGSSLPTRINIMNLCEAGLLAPRQVSANSEGMDNILVTWQPPRKDPSAVQEYVVEWRELHPGGDTQVPLNWLRSRPYNVSALISENIKSYICYEIRVYALSGDQGGCSSILGNSKHKAPLSGPHINAITEEKGSILISWNSIPVQEQMGCLLHYRIYWKERDSNSQPQLCEIPYRVSQNSHPINSLQPRVTYVLWMTALTAAGESSHGNEREFCLQGKAN

SEQ ID NO: 1424 - protein, 322 aa, synthetic construct
  REGION 1..322: note = IL13RA1 (P78552) ECD
GGGGAAPTETQPPVTNLSVSVENLCTVIWTWNPPEGASSNCSLWYFSHFGDKQDKKIAPETRRSIEVPLNERICLQVGSQCSTNESEKPSILVEKCISPPEGDPESAVTELQCIWHNLSYMKCSWLPGRNTSPDTNYTLYYWHRSLEKIHQCENIFREGQYFGCSFDLTKVKDSSFEQHSVQIMVKDNAGKIKPSFNIVPLTSRVKPDPPHIKNLSFHNDDLYVQWENPQNFISRCLFYEVEVNNSQTETHNVFYVQEAKCENPEFERNVENTSCFMVPGVLPDTLNTVRIRVKTNKLCYEDDKLWSNWSQEMSIGKKRNST

SEQ ID NO: 1425 - protein, 317 aa, synthetic construct
  REGION 1..317: note = IL13RA2 (Q14627) ECD
DTEIKVNPPQDFEIVDPGYLGYLYLQWQPPLSLDHFKECTVEYELKYRNIGSETWKTIITKNLHYKDGFDLNKGIEAKIHTLLPWQCTNGSEVQSSWAETTYWISPQGIPETKVQDMDCVYYNWQYLLCSWKPGIGVLLDTNYNLFYWYEGLDHALQCVDYIKADGQNIGCRFPYLEASDYKDFYICVNGSSENKPIRSSYFTFQLQNIVKPLPPVYLTFTRESSCEIKLKWSIPLGPIPARCFDYEIEIREDDTTLVTATVENETYTLKTTNETRQLCFVVRSKVNIYCSDDGIWSEWSDKQCWEGEDLSKKTLLR

SEQ ID NO: 1426 - protein, 175 aa, synthetic construct
  REGION 1..175: note = IL15RA (Q13261) ECD
ITCPPPMSVEHADIWVKSYSLYSRERYICNSGFKRKAGTSSLTECVLNKATNVAHWTTPSLKCIRDPALVHQRPAPPSTVTTAGVTPQPESLSPSGKEPAASSPSSNNTAATTAAIVPGSQLMPSKSPSTGTTEISSHESSHGTPSQTTAKNWELTASASHQPPGVYPQGHSDTT

SEQ ID NO: 1427 - protein, 288 aa, synthetic construct
  REGION 1..288: note = IL17RA (Q96F46) ECD
LRLLDHRALVCSQPGLNCTVKNSTCLDDSWIHPRNLTPSSPKDLQIQLHFAHTQQGDLFPVAHIEWTLQTDASILYLEGAELSVLQLNTNERLCVRFEFLSKLRHHHRRWRFTFSHFVVDPDQEYEVTVHHLPKPIPDGDPNHQSKNFLVPDCEHARMKVTTPCMSSGSLWDPNITVETLEAHQLRVSFTLWNESTHYQILLTSFPHMENHSCFEHMHHIPAPRPEEFHQRSNVTLTLRNLKGCCRHQVQIQPFFSSCLNDCLRHSATVSCPEMPDTPEPIPDYMPLW

SEQ ID NO: 1428 - protein, 275 aa, synthetic construct
  REGION 1..275: note = IL17RB (Q9NRM6) ECD
REPTVQCGSETGPSPEWMLQHDLIPGDLRDLRVEPVTTSVATGDYSILMNVSWVLRADASIRLLKATKICVTGKSNFQSYSCVRCNYTEAFQTQTRPSGGKWTFSYIGFPVELNTVYFIGAHNIPNANMNEDGPSMSVNFTSPGCLDHIMKYKKKCVKAGSLWDPNITACKKNEETVEVNFTTTPLGNRYMALIQHSTIIGFSQVFEPHQKKQTRASVVIPVTGDSEGATVQLTPYFPTCGSDCIRHKGTVVLCPQTGVPFPLDNNKSKPGGWLP

SEQ ID NO: 1429 - protein, 518 aa, synthetic construct
  REGION 1..518: note = IL17RC (Q8NAC3) ECD
LERLVGPQDATHCSPVSLEPWGDEERLRVQFLAQQSLSLAPVTAATARTALSGLSGADGRREERGRGKSWVCLSLGGSGNTEPQKKGLSCRLWDSDILCLPGDIVPAPGPVLAPTHLQTELVLRCQKETDCDLCLRVAVHLAVHGHWEEPEDEEKFGGAADSGVEEPRNASLQAQVVLSFQAYPTARCVLLEVQVPAALVQFGQSVGSVVYDCFEAALGSEVRIWSYTQPRYEKELNHTQQLPDCRGLEVWNSIPSCWALPWLNVSADGDNVHLVLNVSEEQHFGLSLYWNQVQGPPKPRWHKNLTGPQIITLNHTDLVPCLCIQVWPLEPDSVRTNICPFREDPRAHQNLWQAARLQLLTLQSWLLDAPCSLPAEAALCWRAPGGDPCQPLVPPLSWENVTVDKVLEFPLLKGHPNLCVQVNSSEKLQLQECLWADSLGPLKDDVLLLETRGPQDNRSLCALEPSGCTSLPSKASTRAARLGEYLLQDLQSGQCLQLWDDDLGALWACPMDKYIHKR

SEQ ID NO: 1430 - protein, 283 aa, synthetic construct
  REGION 1..283: note = IL17RD (Q8NFM7) ECD
CLNGSQLAVAAGGSGRARGADTCGWRGVGPASRNSGLYNITFKYDNCTTYLNPVGKHVIADAQNITISQYACHDQVAVTILWSPGALGIEFLKGFRVILEELKSEGRQCQQLILKDPKQLNSSFKRTGMESQPFLNMKFETDYFVKVVPFPSIKNESNYHPFFFRTRACDLLLQPDNLACKPFWKPRNLNISQHGSDMQVSFDHAPHNFGFRFFYLHYKLKHEGPFKRKTCKQEQTTETTSCLLQNVSPGDYIIELVDDTNTTRKVMHYALKPVHSPWAGPIR

SEQ ID NO: 1431 - protein, 431 aa, synthetic construct
  REGION 1..431: note = IL17RE (Q8NFR9) ECD
AGIGFRHLPHWNTRCPLASHTDDSFTGSSAYIPCRTWWALFSTKPWCVRVWHCSRCLCQHLLSGGSGLQRGLFHLLVQKSKKSSTFKFYRRHKMPAPAQRKLLPRRHLSEKSHHISIPSPDISHKGLRSKRTQPSDPETWESLPRLDSQRHGGPEFSFDLLPEARAIRVTISSGPEVSVRLCHQWALECEELSSPYDVQKIVSGGHTVELPYEFLLPCLCIEASYLQEDTVRRKKCPFQSWPEAYGSDFWKSVHFTDYSQHTQMVMALTLRCPLKLEAALCQRHDWHTLCKDLPNATARESDGWYVLEKVDLHPQLCFKFSFGNSSHVECPHQTGSLTSWNVSMDTQAQQLILHFSSRMHATFSAAWSLPGLGQDTLVPPVYTVSQARGSSPVSLDLIIPFLRPGCCVLVWRSDVQFAWKHLLCPDVSYRH

SEQ ID NO: 1432 - protein, 308 aa, synthetic construct
  REGION 1..308: note = IL18R1 (Q13478) ECD
CTSRPHITVVEGEPFYLKHCSCSLAHEIETTTKSWYKSSGSQEHVELNPRSSSRIALHDCVLEFWPVELNDTGSYFFQMKNYTQKWKLNVIRRNKHSCFTERQVTSKIVEVKKFFQITCENSYYQTLVNSTSLYKNCKKLLLENNKNPTIKKNAEFEDQGYYSCVHFLHHNGKLFNITKTFNITIVEDRSNIVPVLLGPKLNHVAVELGKNVRLNCSALLNEEDVIYWMFGEENGSDPNIHEEKEMRIMTPEGKWHASKVLRIENIGESNLNVLYNCTVASTGGTDTKSFILVRKADMADIPGHVFTR

SEQ ID NO: 1433 - protein, 337 aa, synthetic construct
  REGION 1..337: note = IL18RAP (O95256) ECD
FNISGCSTKKLLWTYSTRSEEEFVLFCDLPEPQKSHFCHRNRLSPKQVPEHLPFMGSNDLSDVQWYQQPSNGDPLEDIRKSYPHIIQDKCTLHFLTPGVNNSGSYICRPKMIKSPYDVACCVKMILEVKPQTNASCEYSASHKQDLLLGSTGSISCPSLSCQSDAQSPAVTWYKNGKLLSVERSNRIVVDEVYDYHQGTYVCDYTQSDTVSSWTVRAVVQVRTIVGDTKLKPDILDPVEDTLEVELGKPLTISCKARFGFERVFNPVIKWYIKDSDLEWEVSVPEAKSIKSTLKDEIIERNIILEKVTQRDLRRKFVCFVQNSIGNTTQSVQLKEKR

SEQ ID NO: 1434 - protein, 319 aa, synthetic construct
  REGION 1..319: note = IL1R1 (P14778) ECD
LEADKCKEREEKIILVSSANEIDVRPCPLNPNEHKGTITWYKDDSKTPVSTEQASRIHQHKEKLWFVPAKVEDSGHYYCVVRNSSYCLRIKISAKFVENEPNLCYNAQAIFKQKLPVAGDGGLVCPYMEFFKNENNELPKLQWYKDCKPLLLDNIHFSGVKDRLIVMNVAEKHRGNYTCHASYTYLGKQYPITRVIEFITLEENKPTRPVIVSPANETMEVDLGSQIQLICNVTGQLSDIAYWKWNGSVIDEDDPVLGEDYYSVENPANKRRSTLITVLNISEIESRFYKHPFTCFAKNTHGIDAAYIQLIYPVTNFQK

SEQ ID NO: 1435 - protein, 330 aa, synthetic construct
  REGION 1..330: note = IL1R2 (P27930) ECD
FTLQPAAHTGAARSCRFRGRHYKREFRLEGEPVALRCPQVPYWLWASVSPRINLTWHKNDSARTVPGEEETRMWAQDGALWLLPALQEDSGTYVCTTRNASYCDKMSIELRVFENTDAFLPFISYPQILTLSTSGVLVCPDLSEFTRDKTDVKIQWYKDSLLLDKDNEKFLSVRGTTHLLVHDVALEDAGYYRCVLTFAHEGQQYNITRSIELRIKKKKEETIPVIISPLKTISASLGSRLTIPCKVFLGTGTPLTTMLWWTANDTHIESAYPGGRVTEGPRQEYSENNENYIEVPLIFDPVTREDLHMDFKCVVHNTLSFQTLRTTVKE

SEQ ID NO: 1436 - protein, 347 aa, synthetic construct
  REGION 1..347: note = IL1RAP (Q9NPH3) ECD
SERCDDWGLDTMRQIQVFEDEPARIKCPLFEHFLKFNYSTAHSAGLTLIWYWTRQDRDLEEPINFRLPENRISKEKDVLWFRPTLLNDTGNYTCMLRNTTYCSKVAFPLEVVQKDSCFNSPMKLPVHKLYIEYGIQRITCPNVDGYFPSSVKPTITWYMGCYKIQNFNNVIPEGMNLSFLIALISNNGNYTCVVTYPENGRTFHLTRTLTVKVVGSPKNAVPPVIHSPNDHVVYEKEPGEELLIPCTVYFSFLMDSRNEVWWTIDGKKPDDITIDVTINESISHSRTEDETRTQILSIKKVTSEDLKRSYVCHARSAKGEVAKAAKVKQKVPAPRYTVELACGFGAT

SEQ ID NO: 1437 - protein, 339 aa, synthetic construct
  REGION 1..339: note = IL1RAPL1 (Q9NZN1) ECD
LKVVTKRGSADGCTDWSIDIKKYQVLVGEPVRIKCALFYGYIRTNYSLAQSAGLSLMWYKSSGPGDFEEPIAFDGSRMSKEEDSIWFRPTLLQDSGLYACVIRNSTYCMKVSISLTVGENDTGLCYNSKMKYFEKAELSKSKEISCRDIEDFLLPTREPEILWYKECRTKTWRPSIVFKRDTLLIREVREDDIGNYTCELKYGGFVVRRTTELTVTAPLTDKPPKLLYPMESKLTIQETQLGDSANLTCRAFFGYSGDVSPLIYWMKGEKFIEDLDENRVWESDIRILKEHLGEQEVSISLIVDSVEEGDLGNYSCYVENGNGRRHASVLLHKRELMYT

SEQ ID NO: 1438 - protein, 338 aa, synthetic construct
  REGION 1..338: note = IL1RAPL2 (Q9NP60) ECD
TNLKMVSKRNSVDGCIDWSVDLKTYMALAGEPVRVKCALFYSYIRTNYSTAQSTGLRLMWYKNKGDLEEPIIFSEVRMSKEEDSIWFHSAEAQDSGFYTCVLRNSTYCMKVSMSLTVAENESGLCYNSRIRYLEKSEVTKRKEISCPDMDDFKKSDQEPDVVWYKECKPKMWRSIIIQKGNALLIQEVQEEDGGNYTCELKYEGKLVRRTTELKVTALLTDKPPKPLFPMENQPSVIDVQLGKPLNIPCKAFFGFSGESGPMIYWMKGEKFIEELAGHIREGEIRLLKEHLGEKEVELALIFDSVVEADLANYTCHVENRNGRKHASVLLRKKDLIYK

SEQ ID NO: 1439 - protein, 310 aa, synthetic construct
  REGION 1..310: note = IL1RL1 (Q01638) ECD
KFSKQSWGLENEALIVRCPRQGKPSYTVDWYYSQTNKSIPTQERNRVFASGQLLKFLPAAVADSGIYTCIVRSPTFNRTGYANVTIYKKQSDCNVPDYLMYSTVSGSEKNSKIYCPTIDLYNWTAPLEWFKNCQALQGSRYRAHKSFLVIDNVMTEDAGDYTCKFIHNENGANYSVTATRSFTVKDEQGFSLFPVIGAPAQNEIKEVEIGKNANLTCSACFGKGTQFLAAVLWQLNGTKITDFGEPRIQQEEGQNQSFSNGLACLDMVLRIADVKEEDLLLQYDCLALNLHGLRRHTVRLSRKNPIDHHS

SEQ ID NO: 1440 - protein, 316 aa, synthetic construct
  REGION 1..316: note = IL1RL2 (Q9HB29) ECD
DGCKDIFMKNEILSASQPFAFNCTFPPITSGEVSVTWYKNSSKIPVSKIIQSRIHQDETWILFLPMEWGDSGVYQCVIKGRDSCHRIHVNLTVFEKHWCDTSIGGLPNLSDEYKQILHLGKDDSLTCHLHFPKSCVLGPIKWYKDCNEIKGERFTVLETRLLVSNVSAEDRGNYACQAILTHSGKQYEVLNGITVSITERAGYGGSVPKIIYPKNHSIEVQLGTTLIVDCNVTDTKDNTNLRCWRVNNTLVDDYYDESKRIREGVETHVSFREHNLYTVNITFLEVKMEDYGLPFMCHAGVSTAYIILQLPAPDFR

SEQ ID NO: 1441 - protein, 221 aa, synthetic construct
  REGION 1..221: note = IL20RA (Q9UHF4) ECD
VPCVSGGLPKPANITFLSINMKNVLQWTPPEGLQGVKVTYTVQYFIYGQKKWLNKSECRNINRTYCDLSAETSDYEHQYYAKVKAIWGTKCSKWAESGRFYPFLETQIGPPEVALTTDEKSISVVLTAPEKWKRNPEDLPVSMQQIYSNLKYNVSVLNTKSNRTWSQCVTNHTLVLTWLEPNTLYCVHVESFVPGPPRRAQPSEKQCARTLKDQSSEFKAK

SEQ ID NO: 1442 - protein, 204 aa, synthetic construct
  REGION 1..204: note = IL20RB (Q6UXL0) ECD
DEVAILPAPQNLSVLSTNMKHLLMWSPVIAPGETVYYSVEYQGEYESLYTSHIWIPSSWCSLTEGPECDVTDDITATVPYNLRVRATLGSQTSAWSILKHPFNRNSTILTRPGMEITKDGFHLVIELEDLGPQFEFLVAYWRREPGAEEHVKMVRSGGIPVHLETMEPGAAYCVKAQTFVKAIGRYSAFSQTECVEVQGEAIPL

SEQ ID NO: 1443 - protein, 213 aa, synthetic construct
  REGION 1..213: note = IL21R (Q9HBE5) ECD
CPDLVCYTDYLQTVICILEMWNLHPSTLTLTWQDQYEELKDEATSCSLHRSAHNATHATYTCHMDVFHFMADDIFSVNITDQSGNYSQECGSFLLAESIKPAPPFNVTVTFSGQYNISWRSDYEDPAFYMLKGKLQYELQYRNRGDPWAVSPRRKLISVDSRSVSLLPLEFRKDSSYELQVRAGPMPGSSYQGTWSEWSDPVIFQTQSEELKE

SEQ ID NO: 1444 - protein, 213 aa, synthetic construct
  REGION 1..213: note = IL22RA1 (Q8N6P7) ECD
HAPEDPSDLLQHVKFQSSNFENILTWDSGPEGTPDTVYSIEYKTYGERDWVAKKGCQRITRKSCNLTVETGNLTELYYARVTAVSAGGRSATKMTDRFSSLQHTTLKPPDVTCISKVRSIQMIVHPTPTPIRAGDGHRLTLEDIFHDLFYHLELQVNRTYQMHLGGKQREYEFFGLTPDTEFLGTIMICVPTWAKESAPYMCRVKTLPDRTWT

SEQ ID NO: 1445 - protein, 332 aa, synthetic construct; identical to SEQ ID NO: 874
  REGION 1..332: note = IL23R (Q5VWK5) ECD

SEQ ID NO: 1446 - protein, 484 aa, synthetic construct
  REGION 1..484: note = IL27RA (Q6UWB1) ECD
QGSAGPLQCYGVGPLGDLNCSWEPLGDLGAPSELHLQSQKYRSNKTQTVAVAAGRSWVAIPREQLTMSDKLLVWGTKAGQPLWPPVFVNLETQMKPNAPRLGPDVDFSEDDPLEATVHWAPPTWPSHKVLICQFHYRRCQEAAWTLLEPELKTIPLTPVEIQDLELATGYKVYGRCRMEKEEDLWGEWSPILSFQTPPSAPKDVWVSGNLCGTPGGEEPLLLWKAPGPCVQVSYKVWFWVGGRELSPEGITCCCSLIPSGAEWARVSAVNATSWEPLTNLSLVCLDSASAPRSVAVSSIAGSTELLVTWQPGPGEPLEHVVDWARDGDPLEKLNWVRLPPGNLSALLPGNFTVGVPYRITVTAVSASGLASASSVWGFREELAPLVGPTLWRLQDAPPGTPAIAWGEVPRHQLRGHLTHYTLCAQSGTSPSVCMNVSGNTQSVTLPDLPWGPCELWVTASTIAGQGPPGPILRLHLPDNTLRWK

SEQ ID NO: 1447 - protein, 219 aa, synthetic construct
  REGION 1..219: note = IL2RA (P01589) ECD
ELCDDDPPEIPHATFKAMAYKEGTMLNCECKRGFRRIKSGSLYMLCTGNSSHSSWDNQCQCTSSATRNTTKQVTPQPEEQKERKTTEMQSPMQPVDQASLPGHCREPPPWENEATERIYHFVVGQMVYYQCVQGYRALHRGPAESVCKMTHGKTRWTQPQLICTGEMETSQFPGEEKPQASPEGRPESETSCLVTTTDFQIQTEMAATMETSIFTTEYQ

SEQ ID NO: 1448 - protein, 214 aa, synthetic construct
  REGION 1..214: note = IL2RB (P14784) ECD
AVNGTSQFTCFYNSRANISCVWSQDGALQDTSCQVHAWPDRRRWNQTCELLPVSQASWACNLILGAPDSQKLTTVDIVTLRVLCREGVRWRVMAIQDFKPFENLRLMAPISLQVVHVETHRCNISWEISQASHYFERHLEFEARTLSPGHTWEEAPLLTLKQKQEWICLETLTPDTQYEFQVRVKPLQGEFTTWSPWSQPLAFRTKPAALGKDT

SEQ ID NO: 1449 - protein, 240 aa, synthetic construct
  REGION 1..240: note = IL2RG (P31785) ECD
LNTTILTPNGNEDTTADFFLTTMPTDSLSVSTLPLPEVQCFVFNVEYMNCTWNSSSEPQPTNLTLHYWYKNSDNDKVQKCSHYLFSEEITSGCQLQKKEIHLYQTFVVQLQDPREPRRQATQMLKLQNLVIPWAPENLTLHKLSESQLELNWNNRFLNHCLEHLVQYRTDWDHSWTEQSVDYRHKFSLPSVDGQKRYTFRVRSRFNPLCGSAQHWSEWSHPIHWGSNTSKENPFLFALEA

SEQ ID NO: 1450 - protein, 500 aa, synthetic construct
  REGION 1..500: note = IL31RA (Q8NI17) ECD
ALPAKPENISCVYYYRKNLTCTWSPGKETSYTQYTVKRTYAFGEKHDNCTTNSSTSENRASCSFFLPRITIPDNYTIEVEAENGDGVIKSHMTYWRLENIAKTEPPKIFRVKPVLGIKRMIQIEWIKPELAPVSSDLKYTLRFRTVNSTSWMEVNFAKNRKDKNQTYNLTGLQPFTEYVIALRCAVKESKFWSDWSQEKMGMTEEEAPCGLELWRVLKPAEADGRRPVRLLWKKARGAPVLEKTLGYNIWYYPESNTNLTETMNTTNQQLELHLGGESFWVSMISYNSLGKSPVATLRIPAIQEKSFQCIEVMQACVAEDQLVVKWQSSALDVNTWMIEWFPDVDSEPTTLSWESVSQATNWTIQQDKLKPFWCYNISVYPMLHDKVGEPYSIQAYAKEGVPSEGPETKVENIGVKTVTITWKEIPKSERKGIICNYTIFYQAEGGKGFSKTVNSSILQYGLESLKRKTSYIVQVMASTSAGGTNGTSINFKTLSFSVFE

SEQ ID NO: 1451 - protein, 287 aa, synthetic construct
  REGION 1..287: note = IL3RA (P26951) ECD
TKEDPNPPITNLRMKAKAQQLTWDLNRNVTDIECVKDADYSMPAVNNSYCQFGAISLCEVTNYTVRVANPPFSTWILFPENSGKPWAGAENLTCWIHDVDFLSCSWAVGPGAPADVQYDLYLNVANRRQQYECLHYKTDAQGTRIGCRFDDISRLSSGSQSSHILVRGRSAAFGIPCTDKFVVFSQIEILTPPNMTAKCNKTHSFMHWKMRSHFNRKFRYELQIQKRMQPVITEQVRDRTSFQLLNPGTYTVQIRARERVYEFLSAWSTPQRFECDQEEGANTRAWR

SEQ ID NO: 1452 - protein, 207 aa, synthetic construct
  REGION 1..207: note = IL4R (P24394) ECD
MKVLQEPTCVSDYMSISTCEWKMNGPTNCSTELRLLYQLVFLLSEAHTCIPENNGGAGCVCHLLMDDVVSADNYTLDLWAGQQLLWKGSFKPSEHVKPRAPGNLTVHTNVSDTLLLTWSNPYPPDNYLYNHLTYAVNIWSENDPADFRIYNVTYLEPSLRIAASTLKSGISYRARVRAWAQCYNTTWSEWSPSTKWHNSYREPFEQH

SEQ ID NO: 1453 - protein, 322 aa, synthetic construct
  REGION 1..322: note = IL5RA (Q01344) ECD
DLLPDEKISLLPPVNFTIKVTGLAQVLLQWKPNPDQEQRNVNLEYQVKINAPKEDDYETRITESKCVTILHKGFSASVRTILQNDHSLLASSWASAELHAPPGSPGTSIVNLTCTTNTTEDNYSRLRSYQVSLHCTWLVGTDAPEDTQYFLYYRYGSWTEECQEYSKDTLGRNIACWFPRTFILSKGRDWLAVLVNGSSKHSAIRPFDQLFALHAIDQINPPLNVTAEIEGTRLSIQWEKPVSAFPIHCFDYEVKIHNTRNGYLQIEKLMTNAFISIIDDLSKYDVQVRAAVSSMCREAGLWSEWSQPIYVGNDEHKPLREW

SEQ ID NO: 1454 - protein, 346 aa, synthetic construct
  REGION 1..346: note = IL6R (P08887) ECD
LAPRRCPAQEVARGVLTSLPGDSVTLTCPGVEPEDNATVHWVLRKPAAGSHPSRWAGMGRRLLLRSVQLHDSGNYSCYRAGRPAGTVHLLVDVPPEEPQLSCFRKSPLSNVVCEWGPRSTPSLTTKAVLLVRKFQNSPAEDFQEPCQYSQESQKFSCQLAVPEGDSSFYIVSMCVASSVGSKFSKTQTFQGCGILQPDPPANITVTAVARNPRWLSVTWQDPHSWNSSFYRLRFELRYRAERSKTFTTWMVKDLQHHCVIHDAWSGLRHVVQLRAQEEFGQGEWSEWSPEAMGTPWTESRSPPAENEVSTPMQALTTNKDDDNILFRDSANATSLPVQDSSSVPLP

SEQ ID NO: 1455 - protein, 597 aa, synthetic construct
  REGION 1..597: note = IL6ST (P40189) ECD
ELLDPCGYISPESPVVQLHSNFTAVCVLKEKCMDYFHVNANYIVWKTNHFTIPKEQYTIINRTASSVTFTDIASLNIQLTCNILTFGQLEQNVYGITIISGLPPEKPKNLSCIVNEGKKMRCEWDGGRETHLETNFTLKSEWATHKFADCKAKRDTPTSCTVDYSTVYFVNIEVWVEAENALGKVTSDHINFDPVYKVKPNPPHNLSVINSEELSSILKLTWTNPSIKSVIILKYNIQYRTKDASTWSQIPPEDTASTRSSFTVQDLKPFTEYVFRIRCMKEDGKGYWSDWSEEASGITYEDRPSKAPSFWYKIDPSHTQGYRTVQLVWKTLPPFEANGKILDYEVTLTRWKSHLQNYTVNATKLTVNLTNDRYLATLTVRNLVGKSDAAVLTIPACDFQATHPVMDLKAFPKDNMLWVEWTTPRESVKKYILEWCVLSDKAPCITDWQQEDGTVHRTYLRGNLAESKCYLITVTPVYADGPGSPESIKAYLKQAPPSKGPTVRTKKVGKNEAVLEWDQLPVDVQNGFIRNYTIFYRTIIGNETAVNVDSSHTEYTLSSLTSDTLYMVRMAAYTDEGGKDGPEFTFTTPKFAQGEIE

SEQ ID NO: 1456 - protein, 219 aa, synthetic construct
  REGION 1..219: note = IL7R (P16871) ECD
ESGYAQNGDLEDAELDDYSFSCYSQLEVNGSQHSLTCAFEDPDVNITNLEFEICGALVEVKCLNFRKLQEIYFIETKKFLLIGKSNICVKVGEKSLTCKKIDLTTIVKPEAPFDLSVVYREGANDFVVTFNTSHLQKKYVKVLMHDVAYRQEKDENKWTHVNLSSTKLTLLQRKLQPAAMYEIKVRSIPDHYFKGFWSEWSPSYYFRTPEINNSSGEMD

SEQ ID NO: 1457 - protein, 230 aa, synthetic construct; identical to SEQ ID NO: 856
  REGION 1..230: note = IL9R (Q01113) ECD

SEQ ID NO: 1458 - protein, 144 aa, synthetic construct
  REGION 1..144: note = ILDR1 (Q86SU0) ECD
LLVTVQHTERYVTLFASIILKCDYTTSAQLQDVVVTWRFKSFCKDPIFDYYSASYQAALSLGQDPSNDCNDNQREVRIVAQRRGQNEPVLGVDYRQRKITIQNRADLVINEVMWWDHGVYYCTIEAPGDTSGDPDKEVKLIVLH

SEQ ID NO: 1459 - protein, 1077 aa, synthetic construct
  REGION 1..1077: note = IMPG2 (Q9BZV3) ECD
DFPSLTAQTYLSIEEIQEPKSAVSFLLPEESTDLSLATKKKQPLDRRETERQWLIRRRRSILFPNGVKICPDESVAEAVANHVKYFKVRVCQEAVWEAFRTFWDRLPGREEYHYWMNLCEDGVTSIFEMGTNFSESVEHRSLIMKKLTYAKETVSSSELSSPVPVGDTSTLGDTTLSVPHPEVDAYEGASESSLERPEESISNEIENVIEEATKPAGEQIAEFSIHLLGKQYREELQDSSSFHHQHLEEEFISEVENAFTGLPGYKEIRVLEFRSPKENDSGVDVYYAVTFNGEAISNTTWDLISLHSNKVENHGLVELDDKPTVVYTISNFRDYIAETLQQNFLLGNSSLNPDPDSLQLINVRGVLRHQTEDLVWNTQSSSLQATPSSILDNTFQAAWPSADESITSSIPPLDFSSGPPSATGRELWSESPLGDLVSTHKLAFPSKMGLSSSPEVLEVSSLTLHSVTPAVLQTGLPVASEERTSGSHLVEDGLANVEESEDFLSIDSLPSSSFTQPVPKETIPSMEDSDVSLTSSPYLTSSIPFGLDSLTSKVKDQLKVSPFLPDASMEKELIFDGGLGSGSGQKVDLITWPWSETSSEKSAEPLSKPWLEDDDSLLPAEIEDKKLVLVDKMDSTDQISKHSKYEHDDRSTHFPEEEPLSGPAVPIFADTAAESASLTLPKHISEVPGVDDYSVTKAPLILTSVAISASTDKSDQADAILREDMEQITESSNYEWFDSEVSMVKPDMQTLWTILPESERVWTRTSSLEKLSRDILASTPQSADRLWLSVTQSTKLPPTTISTLLEDEVIMGVQDISLELDRIGTDYYQPEQVQEQNGKVGSYVEMSTSVHSTEMVSVAWPTEGGDDLSYTQTSGALVVFFSLRVTNMMFSEDLFNKNSLEYKALEQRFLELLVPYLQSNLTGFQNLEILNFRNGSIVVNSRMKFANSVPPNVNNAVYMILEDFCTTAYNTMNLAIDKYSLDVESGDEANPCKFQACNEFSECLVNPWSGEAKCRCFPGYLSVEERPCQSLCDLQPDFCLNDGKCDIMPGHGAICRCRVGENWWYRGKHCEEFVSEP

SEQ ID NO: 1460 - protein, 929 aa, synthetic construct
  REGION 1..929: note = INSR (P06213) ECD
HLYPGEVCPGMDIRNNLTRLHELENCSVIEGHLQILLMFKTRPEDFRDLSFPKLIMITDYLLLFRVYGLESLKDLFPNLTVIRGSRLFFNYALVIFEMVHLKELGLYNLMNITRGSVRIEKNNELCYLATIDWSRILDSVEDNYIVLNKDDNEECGDICPGTAKGKTNCPATVINGQFVERCWTHSHCQKVCPTICKSHGCTAEGLCCHSECLGNCSQPDDPTKCVACRNFYLDGRCVETCPPPYYHFQDWRCVNFSFCQDLHHKCKNSRRQGCHQYVIHNNKCIPECPSGYTMNSSNLLCTPCLGPCPKVCHLLEGEKTIDSVTSAQELRGCTVINGSLIINIRGGNNLAAELEANLGLIEEISGYLKIRRSYALVSLSFFRKLRLIRGETLEIGNYSFYALDNQNLRQLWDWSKHNLTITQGKLFFHYNPKLCLSEIHKMEEVSGTKGRQERNDIALKTNGDQASCENELLKFSYIRTSFDKILLRWEPYWPPDFRDLLGFMLFYKEAPYQNVTEFDGQDACGSNSWTVVDIDPPLRSNDPKSQNHPGWLMRGLKPWTQYAIFVKTLVTFSDERRTYGAKSDIIYVQTDATNPSVPLDPISVSNSSSQIILKWKPPSDPNGNITHYLVFWERQAEDSELFELDYCLKGLKLPSRTWSPPFESEDSQKHNQSEYEDSAGECCSCPKTDSQILKELEESSFRKTFEDYLHNVVFVPRKTSSGTGAEDPRPSRKRRSLGDVGNVTVAVPTVAAFPNTSSTSVPTSPEEHRPFEKVVNKESLVISGLRHFTGYRIELQACNQDTPEERCSVAAYVSARTMPEAKADDIVGPVTHEIFENNVVHLMWQEPKEPNGLIVLYEVSYRRYGDEELHLCVSRKHFALERGCRLRGLSPGNYSVRIRATSLAGNGSWTEPTYFYVTDYLDVPSNIAK

SEQ ID NO: 1461 - protein, 175 aa, synthetic construct
  REGION 1..175: note = INSRR (P14616) ECD
AAGPLRLGGNSSDFEIQEDKVPRERAVLSGLRHFTEYRIDIHACNHAAHTVGCSAATFVFARTMPHREADGIPGKVAWEASSKNSVLLRWLEPPDPNGLILKYEIKYRRLGEEATVLCVSRLRYAKFGGVHLALLPPGNYSARVRATSLAGNGSWTDSVAFYILGPEEEDAGGLH

SEQ ID NO: 1462 - protein, 571 aa, synthetic construct
  REGION 1..571: note = ISLR2 (Q6UXK2) ECD
SCPEPCACVDKYAHQFADCAYKELREVPEGLPANVTTLSLSANKITVLRRGAFADVTQVTSLWLAHNEVRTVEPGALAVLSQLKNLDLSHNFISSFPWSDLRNLSALQLLKMNHNRLGSLPRDALGALPDLRSLRINNNRLRTLAPGTFDALSALSHLQLYHNPFHCGCGLVWLQAWAASTRVSLPEPDSIACASPPALQGVPVYRLPALPCAPPSVHLSAEPPLEAPGTPLRAGLAFVLHCIADGHPTPRLQWQLQIPGGTVVLEPPVLSGEDDGVGAEEGEGEGDGDLLTQTQAQTPTPAPAWPAPPATPRFLALANGSLLVPLLSAKEAGVYTCRAHNELGANSTSIRVAVAATGPPKHAPGAGGEPDGQAPTSERKSTAKGRGNSVLPSKPEGKIKGQGLAKVSILGETETEPEEDTSEGEEAEDQILADPAEEQRCGNGDPSRYVSNHAFNQSAELKPHVFELGVIALDVAEREARVQLTPLAARWGPGPGGAGGAPRPGRRPLRLLYLCPAGGGAAVQWSRVEEGVNAYWFRGLRPGTNYSVCLALAGEACHVQVVFSTKKELPS

SEQ ID NO: 1463 - protein, 533 aa, synthetic construct
  REGION 1..533: note = ITFG1 (Q8TB96) ECD
LHNVTAELFGAEAWGTLAAFGDLNSDKQTDLFVLRERNDLIVFLADQNAPYFKPKVKVSFKNHSALITSVVPGDYDGDSQMDVLLTYLPKNYAKSELGAVIFWGQNQTLDPNNMTILNRTFQDEPLIMDFNGDLIPDIFGITNESNQPQILLGGNLSWHPALTTTSKMRIPHSHAFIDLTEDFTADLFLTTLNATTSTFQFEIWENLDGNFSVSTILEKPQNMMVVGQSAFADFDGDGHMDHLLPGCEDKNCQKSTIYLVRSGMKQWVPVLQDFSNKGTLWGFVPFVDEQQPTEIPIPITLHIGDYNMDGYPDALVILKNTSGSNQQAFLLENVPCNNASCEEARRMFKVYWELTDLNQIKDAMVATFFDIYEDGILDIVVLSKGYTKNDFAIHTLKNNFEADAYFVKVIVLSGLCSNDCPRKITPFGVNQPGPYIMYTTVDANGYLKNGSAGQLSQSAHLALQLPYNVLGLGRSANFLDHLYVGIPRPSGEKSIRKQEWTAIIPNSQLIVIPYPHNVPRSWSAKLYLTPSNI

SEQ ID NO: 1464 - protein, 1113 aa, synthetic construct
  REGION 1..1113: note = ITGA1 (P56199) ECD
FNVDVKNSMTFSGPVEDMFGYTVQQYENEEGKWVLIGSPLVGQPKNRTGDVYKCPVGRGESLPCVKLDLPVNTSIPNVTEVKENMTFGSTLVTNPNGGFLACGPLYAYRCGHLHYTTGICSDVSPTFQVVNSIAPVQECSTQLDIVIVLDGSNSIYPWDSVTAFLNDLLERMDIGPKQTQVGIVQYGENVTHEFNLNKYSSTEEVLVAAKKIVQRGGRQTMTALGIDTARKEAFTEARGARRGVKKVMVIVTDGESHDNHRLKKVIQDCEDENIQRFSIAILGSYNRGNLSTEKFVEEIKSIASEPTEKHFFNVSDELALVTIVKTLGERIFALEATADQSAASFEMEMSQTGFSAHYSQDWVMLGAVGAYDWNGTVVMQKASQIIIPRNTTFNVESTKKNEPLASYLGYTVNSATASSGDVLYIAGQPRYNHTGQVIIYRMEDGNIKILQTLSGEQIGSYFGSILTTTDIDKDSNTDILLVGAPMYMGTEKEEQGKVYVYALNQTRFEYQMSLEPIKQTCCSSRQHNSCTTENKNEPCGARFGTAIAAVKDLNLDGFNDIVIGAPLEDDHGGAVYIYHGSGKTIRKEYAQRIPSGGDGKTLKFFGQSIHGEMDLNGDGLTDVTIGGLGGAALFWSRDVAVVKVTMNFEPNKVNIQKKNCHMEGKETVCINATVCFDVKLKSKEDTIYEADLQYRVTLDSLRQISRSFFSGTQERKVQRNITVRKSECTKHSFYMLDKHDFQDSVRITLDFNLTDPENGPVLDDSLPNSVHEYIPFAKDCGNKEKCISDLSLHVATTEKDLLIVRSQNDKFNVSLTVKNTKDSAYNTRTIVHYSPNLVFSGIEAIQKDSCESNHNITCKVGYPFLRRGEMVTFKILFQFNTSYLMENVTIYLSATSDSEEPPETLSDNVVNISIPVKYEVGLQFYSSASEYHISIAANETVPEVINSTEDIGNEINIFYLIRKSGSFPMPELKLSISFPNMTSNGYPVLYPTGLSSSENANCRPHIFEDPFSINSGKKMTTSTDHLKRGTILDCNTCKFATITCNLTSSDISQVNVSLILWKPTFIKSYFSSLNLTIRGELRSENASLVLSSSNQKRELAIQISKDGLPGRVP

SEQ ID NO: 1465 - protein, 1100 aa, synthetic construct
  REGION 1..1100: note = ITGA10 (O75578) ECD
FNLDEHHPRLFPGPPEAEFGYSVLQHVGGGQRWMLVGAPWDGPSGDRRGDVYRCPVGGAHNAPCAKGHLGDYQLGNSSHPAVNMHLGMSLLETDGDGGFMACAPLWSRACGSSVFSSGICARVDASFQPQGSLAPTAQRCPTYMDVVIVLDGSNSIYPWSEVQTFLRRLVGKLFIDPEQIQVGLVQYGESPVHEWSLGDFRTKEEVVRAAKNLSRREGRETKTAQAIMVACTEGFSQSHGGRPEAARLLVVVTDGESHDGEELPAALKACEAGRVTRYGIAVLGHYLRRQRDPSSFLREIRTIASDPDERFFFNVTDEAALTDIVDALGDRIFGLEGSHAENESSFGLEMSQIGFSTHRLKDGILFGMVGAYDWGGSVLWLEGGHRLFPPRMALEDEFPPALQNHAAYLGYSVSSMLLRGGRRLFLSGAPRFRHRGKVIAFQLKKDGAVRVAQSLQGEQIGSYFGSELCPLDTDRDGTTDVLLVAAPMFLGPQNKETGRVYVYLVGQQSLLTLQGTLQPEPPQDARFGFAMGALPDLNQDGFADVAVGAPLEDGHQGALYLYHGTQSGVRPHPAQRIAAASMPHALSYFGRSVDGRLDLDGDDLVDVAVGAQGAAILLSSRPIVHLTPSLEVTPQAISVVQRDCRRRGQEAVCLTAALCFQVTSRTPGRWDHQFYMRFTASLDEWTAGARAAFDGSGQRLSPRRLRLSVGNVTCEQLHFHVLDTSDYLRPVALTVTFALDNTTKPGPVLNEGSPTSIQKLVPFSKDCGPDNECVTDLVLQVNMDIRGSRKAPFVVRGGRRKVLVSTTLENRKENAYNTSLSLIFSRNLHLASLTPQRESPIKVECAAPSAHARLCSVGHPVFQTGAKVTFLLEFEFSCSSLLSQVFVKLTASSDSLERNGTLQDNTAQTSAYIQYEPHLLFSSESTLHRYEVHPYGTLPVGPGPEFKTTLRVQNLGCYVVSGLIISALLPAVAHGGNYFLSLSQVITNNASCIVQNLTEPPGPPVHPEELQHTNRLNGSNTQCQVVRCHLGQLAKGTEVSVGLLRLVHNEFFRRAKFKSLTVVSTFELGTEEGSVLQLTEASRWSESLLEVVQTRPILIS

SEQ ID NO: 1466 - protein, 1119 aa, synthetic construct
  REGION 1..1119: note = ITGA11 (Q9UKX5) ECD
FNMDTRKPRVIPGSRTAFFGYTVQQHDISGNKWLVVGAPLETNGYQKTGDVYKCPVIHGNCTKLNLGRVTLSNVSERKDNMRLGLSLATNPKDNSFLACSPLWSHECGSSYYTTGMCSRVNSNFRFSKTVAPALQRCQTYMDIVIVLDGSNSIYPWVEVQHFLINILKKFYIGPGQIQVGVVQYGEDVVHEFHLNDYRSVKDVVEAASHIEQRGGTETRTAFGIEFARSEAFQKGGRKGAKKVMIVITDGESHDSPDLEKVIQQSERDNVTRYAVAVLGYYNRRGINPETFLNEIKYIASDPDDKHFFNVTDEAALKDIVDALGDRIFSLEGTNKNETSFGLEMSQTGFSSHVVEDGVLLGAVGAYDWNGAVLKETSAGKVIPLRESYLKEFPEELKNHGAYLGYTVTSVVSSRQGRVYVAGAPRFNHTGKVILFTMHNNRSLTIHQAMRGQQIGSYFGSEITSVDIDGDGVTDVLLVGAPMYFNEGRERGKVYVYELRQNLFVYNGTLKDSHSYQNARFGSSIASVRDLNQDSYNDVVVGAPLEDNHAGAIYIFHGFRGSILKTPKQRITASELATGLQYFGCSIHGQLDLNEDGLIDLAVGALGNAVILWSRPVVQINASLHFEPSKINIFHRDCKRSGRDATCLAAFLCFTPIFLAPHFQTTTVGIRYNATMDERRYTPRAHLDEGGDRFTNRAVLLSSGQELCERINFHVLDTADYVKPVTFSVEYSLEDPDHGPMLDDGWPTTLRVSVPFWNGCNEDEHCVPDLVLDARSDLPTAMEYCQRVLRKPAQDCSAYTLSFDTTVFIIESTRQRVAVEATLENRGENAYSTVLNISQSANLQFASLIQKEDSDGSIECVNEERRLQKQVCNVSYPFFRAKAKVAFRLDFEFSKSIFLHHLEIELAAGSDSNERDSTKEDNVAPLRFHLKYEADVLFTRSSSLSHYEVKPNSSLERYDGIGPPFSCIFRIQNLGLFPIHGMMMKITIPIATRSGNRLLKLRDFLTDEANTSCNIWGNSTEYRPTPVEEDLRRAPQLNHSNSDVVSINCNIRLVPNQEINFHLLGNLWLRSLKALKYKSMKIMVNAALQRQFHSPFIFREEDPSRQIVFEISKQEDWQVP

SEQ ID NO: 1467 - protein, 1103 aa, synthetic construct
  REGION 1..1103: note = ITGA2 (P17301) ECD
YNVGLPEAKIFSGPSSEQFGYAVQQFINPKGNWLLVGSPWSGFPENRMGDVYKCPVDLSTATCEKLNLQTSTSIPNVTEMKTNMSLGLILTRNMGTGGFLTCGPLWAQQCGNQYYTTGVCSDISPDFQLSASFSPATQPCPSLIDVVVVCDESNSIYPWDAVKNFLEKFVQGLDIGPTKTQVGLIQYANNPRVVFNLNTYKTKEEMIVATSQTSQYGGDLTNTFGAIQYARKYAYSAASGGRRSATKVMVVVTDGESHDGSMLKAVIDQCNHDNILRFGIAVLGYLNRNALDTKNLIKEIKAIASIPTERYFFNVSDEAALLEKAGTLGEQIFSIEGTVQGGDNFQMEMSQVGFSADYSSQNDILMLGAVGAFGWSGTIVQKTSHGHLIFPKQAFDQILQDRNHSSYLGYSVAAISTGESTHFVAGAPRANYTGQIVLYSVNENGNITVIQAHRGDQIGSYFGSVLCSVDVDKDTITDVLLVGAPMYMSDLKKEEGRVYLFTIKKGILGQHQFLEGPEGIENTRFGSAIAALSDINMDGFNDVIVGSPLENQNSGAVYIYNGHQGTIRTKYSQKILGSDGAFRSHLQYFGRSLDGYGDLNGDSITDVSIGAFGQVVQLWSQSIADVAIEASFTPEKITLVNKNAQIILKLCFSAKFRPTKQNNQVAIVYNITLDADGFSSRVTSRGLFKENNERCLQKNMVVNQAQSCPEHIIYIQEPSDVVNSLDLRVDISLENPGTSPALEAYSETAKVFSIPFHKDCGEDGLCISDLVLDVRQIPAAQEQPFIVSNQNKRLTFSVTLKNKRESAYNTGIVVDFSENLFFASFSLPVDGTEVTCQVAASQKSVACDVGYPALKREQQVTFTINFDFNLQNLQNQASLSFQALSESQEENKADNLVNLKIPLLYDAEIHLTRSTNINFYEISSDGNVPSIVHSFEDVGPKFIFSLKVTTGSVPVSMATVIIHIPQYTKEKNPLMYLTGVQTDKAGDISCNADINPLKIGQTSSSVSFKSENFRHTKELNCRTASCSNVTCWLKDVHMKGEYFVNVTTRIWNGTFASSTFQTVQLTAAAEINTYNPEIYVIEDNTVTIPLMIMKPDEKAEVPT

SEQ ID NO: 1468 - protein, 962 aa, synthetic construct
  REGION 1..962: note = ITGA2B (P08514) ECD
LNLDPVQLTFYAGPNGSQFGFSLDFHKDSHGRVAIVVGAPRTLGPSQEETGGVFLCPWRAEGGQCPSLLFDLRDETRNVGSQTLQTFKARQGLGASVVSWSDVIVACAPWQHWNVLEKTEEAEKTPVGSCFLAQPESGRRAEYSPCRGNTLSRIYVENDFSWDKRYCEAGFSSVVTQAGELVLGAPGGYYFLGLLAQAPVADIFSSYRPGILLWHVSSQSLSFDSSNPEYFDGYWGYSVAVGEFDGDLNTTEYVVGAPTWSWTLGAVEILDSYYQRLHRLRGEQMASYFGHSVAVTDVNGDGRHDLLVGAPLYMESRADRKLAEVGRVYLFLQPRGPHALGAPSLLLTGTQLYGRFGSAIAPLGDLDRDGYNDIAVAAPYGGPSGRGQVLVFLGQSEGLRSRPSQVLDSPFPTGSAFGFSLRGAVDIDDNGYPDLIVGAYGANQVAVYRAQPVVKASVQLLVQDSLNPAVKSCVLPQTKTPVSCFNIQMCVGATGHNIPQKLSLNAELQLDRQKPRQGRRVLLLGSQQAGTTLNLDLGGKHSPICHTTMAFLRDEADFRDKLSPIVLSLNVSLPPTEAGMAPAVVLHGDTHVQEQTRIVLDCGEDDVCVPQLQLTASVTGSPLLVGADNVLELQMDAANEGEGAYEAELAVHLPQGAHYMRALSNVEGFERLICNQKKENETRVVLCELGNPMKKNAQIGIAMLVSVGNLEEAGESVSFQLQIRSKNSQNPNSKIVLLDVPVRAEAQVELRGNSFPASLVVAAEEGEREQNSLDSWGPKVEHTYELHNNGPGTVNGLHLSIHLPGQSQPSDLLYILDIQPQGGLQCFPQPPVNPLKVDWGLPIPSPSPIHPAHHKRDRRQIFLPEPEQPSRLQDPVLVSCDSAPCTVVQCDLQEMARGQRAMVTVLAFLWLPSLYQRPLDQFVLQSHAWFNVSSLPYAVPPLSLPRGEAQVWTQLLRALEER

SEQ ID NO: 1469 - protein, 959 aa, synthetic construct
  REGION 1..959: note = ITGA3 (P26006) ECD
FNLDTRFLVVKEAGNPGSLFGYSVALHRQTERQQRYLLLAGAPRELAVPDGYTNRTGAVYLCPLTAHKDDCERMNITVKNDPGHHIIEDMWLGVTVASQGPAGRVLVCAHRYTQVLWSGSEDQRRMVGKCYVRGNDLELDSSDDWQTYHNEMCNSNTDYLETGMCQLGTSGGFTQNTVYFGAPGAYNWKGNSYMIQRKEWDLSEYSYKDPEDQGNLYIGYTMQVGSFILHPKNITIVTGAPRHRHMGAVFLLSQEAGGDLRRRQVLEGSQVGAYFGSAIALADLNNDGWQDLLVGAPYYFERKEEVGGAIYVFMNQAGTSFPAHPSLLLHGPSGSAFGLSVASIGDINQDGFQDIAVGAPFEGLGKVYIYHSSSKGLLRQPQQVIHGEKLGLPGLATFGYSLSGQMDVDENFYPDLLVGSLSDHIVLLRARPVINIVHKTLVPRPAVLDPALCTATSCVQVELCFAYNQSAGNPNYRRNITLAYTLEADRDRRPPRLRFAGSESAVFHGFFSMPEMRCQKLELLLMDNLRDKLRPIIISMNYSLPLRMPDRPRLGLRSLDAYPILNQAQALENHTEVQFQKECGPDNKCESNLQMRAAFVSEQQQKLSRLQYSRDVRKLLLSINVTNTRTSERSGEDAHEALLTLVVPPALLLSSVRPPGACQANETIFCELGNPFKRNQRMELLIAFEVIGVTLHTRDLQVQLQLSTSSHQDNLWPMILTLLVDYTLQTSLSMVNHRLQSFFGGTVMGESGMKTVEDVGSPLKYEFQVGPMGEGLVGLGTLVLGLEWPYEVSNGKWLLYPTEITVHGNGSWPCRPPGDLINPLNLTLSDPGDRPSSPQRRRRQLDPGGGQGPPPVTLAAAKKAKSETVLTCATGRAHCVWLECPIPDAPVVTNVTVKARVWNSTFIEDYRDFDRVRVNGWATLFLRTSIPTINMENKTTWFSVDIDSELVEELPAEIE

SEQ ID NO: 1470 - protein, 943 aa, synthetic construct
  REGION 1..943: note = ITGA4 (P13612) ECD
NVDTESALLYQGPHNTLFGYSVVLHSHGANRWLLVGAPTANWLANASVINPGAIYRCRIGKNPGQTCEQLQLGSPNGEPCGKTCLEERDNQWLGVTLSRQPGENGSIVTCGHRWKNIFYIKNENKLPTGGCYGVPPDLRTELSKRIAPCYQDYVKKFGENFASCQAGISSFYTKDLIVMGAPGSSYWTGSLFVYNITTNKYKAFLDKQNQVKFGSYLGYSVGAGHFRSQHTTEVVGGAPQHEQIGKAYIFSIDEKELNILHEMKGKKLGSYFGASVCAVDLNADGFSDLLVGAPMQSTIREEGRVFVYINSGSGAVMNAMETNLVGSDKYAARFGESIVNLGDIDNDGFEDVAIGAPQEDDLQGAIYIYNGRADGISSTFSQRIEGLQISKSLSMFGQSISGQIDADNNGYVDVAVGAFRSDSAVLLRTRPVVIVDASLSHPESVNRTKFDCVENGWPSVCIDLTLCFSYKGKEVPGYIVLFYNMSLDVNRKAESPPRFYFSSNGTSDVITGSIQVSSREANCRTHQAFMRKDVRDILTPIQIEAAYHLGPHVISKRSTEEFPPLQPILQQKKEKDIMKKTINFARFCAHENCSADLQVSAKIGFLKPHENKTYLAVGSMKTLMLNVSLFNAGDDAYETTLHVKLPVGLYFIKILELEEKQINCEVTDNSGVVQLDCSIGYIYVDHLSRIDISFLLDVSSLSRAEEDLSITVHATCENEEEMDNLKHSRVTVAIPLKYEVKLTVHGFVNPTSFVYGSNDENEPETCMVEKMNLTFHVINTGNSMAPNVSVEIMVPNSFSPQTDKLFNILDVQTTTGECHFENYQRVCALEQQKSAMQTLKGIVRFLSKTDKRLLYCIKADPHCLNFLCNFGKMESGKEASVHIQLEGRPSILEMDETSALKFEIRATGFPEPNPRVIELNKDENVAHVLLEGLHHQRPKRYFT

SEQ ID NO: 1471 - protein, 954 aa, synthetic construct
  REGION 1..954: note = ITGA5 (P08648) ECD
FNLDAEAPAVLSGPPGSFFGFSVEFYRPGTDGVSVLVGAPKANTSQPGVLQGGAVYLCPWGASPTQCTPIEFDSKGSRLLESSLSSSEGEEPVEYKSLQWFGATVRAHGSSILACAPLYSWRTEKEPLSDPVGTCYLSTDNFTRILEYAPCRSDFSWAAGQGYCQGGFSAEFTKTGRVVLGGPGSYFWQGQILSATQEQIAESYYPEYLINLVQGQLQTRQASSIYDDSYLGYSVAVGEFSGDDTEDFVAGVPKGNLTYGYVTILNGSDIRSLYNFSGEQMASYFGYAVAATDVNGDGLDDLLVGAPLLMDRTPDGRPQEVGRVYVYLQHPAGIEPTPTLTLTGHDEFGRFGSSLTPLGDLDQDGYNDVAIGAPFGGETQQGVVFVFPGGPGGLGSKPSQVLQPLWAASHTPDFFGSALRGGRDLDGNGYPDLIVGSFGVDKAVVYRGRPIVSASASLTIFPAMFNPEERSCSLEGNPVACINLSFCLNASGKHVADSIGFTVELQLDWQKQKGGVRRALFLASRQATLTQTLLIQNGAREDCREMKIYLRNESEFRDKLSPIHIALNFSLDPQAPVDSHGLRPALHYQSKSRIEDKAQILLDCGEDNICVPDLQLEVFGEQNHVYLGDKNALNLTFHAQNVGEGGAYEAELRVTAPPEAEYSGLVRHPGNFSSLSCDYFAVNQSRLLVCDLGNPMKAGASLWGGLRFTVPHLRDTKKTIQFDFQILSKNLNNSQSDVVSFRLSVEAQAQVTLNGVSKPEAVLFPVSDWHPRDQPQKEEDLGPAVHHVYELINQGPSSISQGVLELSCPQALEGQQLLYVTRVTGLNCTTNHPINPKGLELDPEGSLHHQQKREAPSRSSASSGPQILKCPEAECFRLRCELGPLHQQESQSLQLHFRVWAKTFLQREHQPFSLQCEAVYKALKMPYRILPRQLPQKERQVATAVQWTKAEGSY

SEQ ID NO: 1472 - protein, 1027 aa, synthetic construct
  REGION 1..1027: note = ITGA6 (P23229) ECD
FNLDTREDNVIRKYGDPGSLFGFSLAMHWQLQPEDKRLLLVGAPRAEALPLQRANRTGGLYSCDITARGPCTRIEFDNDADPTSESKEDQWMGVTVQSQGPGGKVVTCAHRYEKRQHVNTKQESRDIFGRCYVLSQNLRIEDDMDGGDWSFCDGRLRGHEKFGSCQQGVAATFTKDFHYIVFGAPGTYNWKGIVRVEQKNNTFFDMNIFEDGPYEVGGETEHDESLVPVPANSYLGLLFLTSVSYTDPDQFVYKTRPPREQPDTFPDVMMNSYLGFSLDSGKGIVSKDEITFVSGAPRANHSGAVVLLKRDMKSAHLLPEHIFDGEGLASSFGYDVAVVDLNKDGWQDIVIGAPQYFDRDGEVGGAVYVYMNQQGRWNNVKPIRLNGTKDSMFGIAVKNIGDINQDGYPDIAVGAPYDDLGKVFIYHGSANGINTKPTQVLKGISPYFGYSIAGNMDLDRNSYPDVAVGSLSDSVTIFRSRPVINIQKTITVTPNRIDLRQKTACGAPSGICLQVKSCFEYTANPAGYNPSISIVGTLEAEKERRKSGLSSRVQFRNQGSEPKYTQELTLKRQKQKVCMEETLWLQDNIRDKLRPIPITASVEIQEPSSRRRVNSLPEVLPILNSDEPKTAHIDVHFLKEGCGDDNVCNSNLKLEYKFCTREGNQDKFSYLPIQKGVPELVLKDQKDIALEITVTNSPSNPRNPTKDGDDAHEAKLIATFPDTLTYSAYRELRAFPEKQLSCVANQNGSQADCELGNPFKRNSNVTFYLVLSTTEVTFDTPDLDINLKLETTSNQDNLAPITAKAKVVIELLLSVSGVAKPSQVYFGGTVVGEQAMKSEDEVGSLIEYEFRVINLGKPLTNLGTATLNIQWPKEISNGKWLLYLVKVESKGLEKVTCEPQKEINSLNLTESHNSRKKREITEKQIDDNRKFSLFAERKYQTLNCSVNVNCVNIRCPLRGLDSKASLILRSRLWNSTFLEEYSKLNYLDILMRAFIDVTAAAENIRLPNAGTQVRVTVFPSKTVAQYS

SEQ ID NO: 1473 - protein, 1049 aa, synthetic construct
  REGION 1..1049: note = ITGA7 (Q13683) ECD
FNLDVMGALRKEGEPGSLFGFSVALHRQLQPRPQSWLLVGAPQALALPGQQANRTGGLFACPLSLEETDCYRVDIDQGADMQKESKENQWLGVSVRSQGPGGKIVTCAHRYEARQRVDQILETRDMIGRCFVLSQDLAIRDELDGGEWKFCEGRPQGHEQFGFCQQGTAAAFSPDSHYLLFGAPGTYNWKGTARVELCAQGSADLAHLDDGPYEAGGEKEQDPRLIPVPANSYFGLLFVTNIDSSDPDQLVYKTLDPADRLPGPAGDLALNSYLGFSIDSGKGLVRAEELSFVAGAPRANHKGAVVILRKDSASRLVPEVMLSGERLTSGFGYSLAVADLNSDGWPDLIVGAPYFFERQEELGGAVYVYLNQGGHWAGISPLRLCGSPDSMFGISLAVLGDLNQDGFPDIAVGAPFDGDGKVFIYHGSSLGVVAKPSQVLEGEAVGIKSFGYSLSGSLDMDGNQYPDLLVGSLADTAVLFRARPILHVSHEVSIAPRSIDLEQPNCAGGHSVCVDLRVCFSYIAVPSSYSPTVALDYVLDADTDRRLRGQVPRVTFLSRNLEEPKHQASGTVWLKHQHDRVCGDAMFQLQENVKDKLRAIVVTLSYSLQTPRLRRQAPGQGLPPVAPILNAHQPSTQRAEIHFLKQGCGEDKICQSNLQLVRARFCTRVSDTEFQPLPMDVDGTTALFALSGQPVIGLELMVTNLPSDPAQPQADGDDAHEAQLLVMLPDSLHYSGVRALDPAEKPLCLSNENASHVECELGNPMKRGAQVTFYLILSTSGISIETTELEVELLLATISEQELHPVSARARVFIELPLSIAGMAIPQQLFFSGVVRGERAMQSERDVGSKVKYEVTVSNQGQSLRTLGSAFLNIMWPHEIANGKWLLYPMQVELEGGQGPGQKGLCSPRPNILHLDVDSRDRRRRELEPPEQQEPGERQEPSMSWWPVSSAEKKKNITLDCARGTANCVVFSCPLYSFDRAAVLHVWGRLWNSTFLEEYSAVKSLEVIVRANITVKSSIKNLMLRDASTVIPVMVYLDPMAVVAEGVPW

SEQ ID NO: 1474 - protein, 974 aa, synthetic construct [sequence omitted]

SEQ ID NO: 1475 - protein, 952 aa, synthetic construct
  REGION 1..952: note = ITGA9 (Q13797) ECD
YNLDPQRPVHFQGPADSFFGYAVLEHFHDNTRWVLVGAPKADSKYSPSVKSPGAVFKCRVHTNPDRRCTELDMARGKNRGTSCGKTCREDRDDEWMGVSLARQPKADGRVLACAHRWKNIYYEADHILPHGFCYIIPSNLQAKGRTLIPCYEEYKKKYGEEHGSCQAGIAGFFTEELVVMGAPGSFYWAGTIKVLNLTDNTYLKLNDEVIMNRRYTYLGYAVTAGHFSHPSTIDVVGGAPQDKGIGKVYIFRADRRSGTLIKIFQASGKKMGSYFGSSLCAVDLNGDGLSDLLVGAPMFSEIRDEGQVTVYINRGNGALEEQLALTGDGAYNAHFGESIASLDDLDNDGFPDVAIGAPKEDDFAGAVYIYHGDAGGIVPQYSMKLSGQKINPVLRMFGQSISGGIDMDGNGYPDVTVGAFMSDSVVLLRARPVITVDVSIFLPGSINITAPQCHDGQQPVNCLNVTTCFSFHGKHVPGEIGLNYVLMADVAKKEKGQMPRVYFVLLGETMGQVTEKLQLTYMEETCRHYVAHVKRRVQDVISPIVFEAAYSLSEHVTGEEERELPPLTPVLRWKKGQKIAQKNQTVFERNCRSEDCAADLQLQGKLLLSSMDEKTLYLALGAVKNISLNISISNLGDDAYDANVSFNVSRELFFINMWQKEEMGISCELLESDFLKCSVGFPFMRSKSKYEFSVIFDTSHLSGEEEVLSFIVTAQSGNTERSESLHDNTLVLMVPLMHEVDTSITGIMSPTSFVYGESVDAANFIQLDDLECHFQPINITLQVYNTGPSTLPGSSVSISFPNRLSSGGAEMFHVQEMVVGQEKGNCSFQKNPTPCIIPQEQENIFHTIFAFFTKSGRKVLDCEKPGISCLTAHCNFSALAKEESRTIDIYMLLNTEILKKDSSSVIQFMSRAKVKVDPALRVVEIAHGNPEEVTVVFEALHNLEPRGYVVGW

SEQ ID NO: 1476 - protein, 1082 aa, synthetic construct
  REGION 1..1082: note = ITGAD (Q13349) ECD
FNLDVEEPTIFQEDAGGFGQSVVQFGGSRLVVGAPLEVVAANQTGRLYDCAAATGMCQPIPLHIRPEAVNMSLGLTLAASTNGSRLLACGPTLHRVCGENSYSKGSCLLLGSRWEIIQTVPDATPECPHQEMDIVFLIDGSGSIDQNDFNQMKGFVQAVMGQFEGTDTLFALMQYSNLLKIHFTFTQFRTSPSQQSLVDPIVQLKGLTFTATGILTVVTQLFHHKNGARKSAKKILIVITDGQKYKDPLEYSDVIPQAEKAGIIRYAIGVGHAFQGPTARQELNTISSAPPQDHVFKVDNFAALGSIQKQLQEKIYAVEGTQSRASSSFQHEMSQEGFSTALTMDGLFLGAVGSFSWSGGAFLYPPNMSPTFINMSQENVDMRDSYLGYSTELALWKGVQNLVLGAPRYQHTGKAVIFTQVSRQWRKKAEVTGTQIGSYFGASLCSVDVDSDGSTDLILIGAPHYYEQTRGGQVSVCPLPRGRVQWQCDAVLRGEQGHPWGRFGAALTVLGDVNEDKLIDVAIGAPGEQENRGAVYLFHGASESGISPSHSQRIASSQLSPRLQYFGQALSGGQDLTQDGLMDLAVGARGQVLLLRSLPVLKVGVAMRFSPVEVAKAVYRCWEEKPSALEAGDATVCLTIQKSSLDQLGDIQSSVRFDLALDPGRLTSRAIFNETKNPTLTRRKTLGLGIHCETLKLLLPDCVEDVVSPIILHLNFSLVREPIPSPQNLRPVLAVGSQDLFTASLPFEKNCGQDGLCEGDLGVTLSFSGLQTLTVGSSLELNVIVTVWNAGEDSYGTVVSLYYPAGLSHRRVSGAQKQPHQSALRLACETVPTEDEGLRSSRCSVNHPIFHEGSNGTFIVTFDVSYKATLGDRMLMRASASSENNKASSSKATFQLELPVKYAVYTMISRQEESTKYFNFATSDEKKMKEAEHRYRVNNLSQRDLAISINFWVPVLLNGVAVWDVVMEAPSQSLPCVSERKPPQHSDFLTQISRSPMLDCSIADCLQFRCDVPSFSVQEELDFTLKGNLSFGWVRETLQKKVLVVSVAEITFDTSVYSQLPGQEAFMRAQMEMVLEEDEVYN

SEQ ID NO: 1477 - protein, 1106 aa, synthetic construct
  REGION 1..1106: note = ITGAE (P38570) ECD
FNVDVARPWLTPKGGAPFVLSSLLHQDPSTNQTWLLVTSPRTKRTPGPLHRCSLVQDEILCHPVEHVPIPKGRHRGVTVVRSHHGVLICIQVLVRRPHSLSSELTGTCSLLGPDLRPQAQANFFDLENLLDPDARVDTGDCYSNKEGGGEDDVNTARQRRALEKEEEEDKEEEEDEEEEEAGTEIAIILDGSGSIDPPDFQRAKDFISNMMRNFYEKCFECNFALVQYGGVIQTEFDLRDSQDVMASLARVQNITQVGSVTKTASAMQHVLDSIFTSSHGSRRKASKVMVVLTDGGIFEDPLNLTTVINSPKMQGVERFAIGVGEEFKSARTARELNLIASDPDETHAFKVTNYMALDGLLSKLRYNIISMEGTVGDALHYQLAQIGFSAQILDERQVLLGAVGAFDWSGGALLYDTRSRRGRFLNQTAAAAADAEAAQYSYLGYAVAVLHKTCSLSYIAGAPRYKHHGAVFELQKEGREASFLPVLEGEQMGSYFGSELCPVDIDMDGSTDFLLVAAPFYHVHGEEGRVYVYRLSEQDGSFSLARILSGHPGFTNARFGFAMAAMGDLSQDKLTDVAIGAPLEGFGADDGASFGSVYIYNGHWDGLSASPSQRIRASTVAPGLQYFGMSMAGGFDISGDGLADITVGTLGQAVVFRSRPVVRLKVSMAFTPSALPIGFNGVVNVRLCFEISSVTTASESGLREALLNFTLDVDVGKQRRRLQCSDVRSCLGCLREWSSGSQLCEDLLLMPTEGELCEEDCFSNASVKVSYQLQTPEGQTDHPQPILDRYTEPFAIFQLPYEKACKNKLFCVAELQLATTVSQQELVVGLTKELTLNINLTNSGEDSYMTSMALNYPRNLQLKRMQKPPSPNIQCDDPQPVASVLIMNCRIGHPVLKRSSAHVSVVWQLEENAFPNRTADITVTVTNSNERRSLANETHTLQFRHGFVAVLSKPSIMYVNTGQGLSHHKEFLFHVHGENLFGAEYQLQICVPTKLRGLQVVAVKKLTRTQASTVCTWSQERACAYSSVQHVEEWHSVSCVIASDKENVTVAAEISWDHSEELLKDVTELQILGEISFNKSLYEGLNAENHRTKITVVFLKDEKYHS

SEQ ID NO: 1478 - protein, 1065 aa, synthetic construct
  REGION 1..1065: note = ITGAL (P20701) ECD
YNLDVRGARSFSPPRAGRHFGYRVLQVGNGVIVGAPGEGNSTGSLYQCQSGTGHCLPVTLRGSNYTSKYLGMTLATDPTDGSILACDPGLSRTCDQNTYLSGLCYLFRQNLQGPMLQGRPGFQECIKGNVDLVFLFDGSMSLQPDEFQKILDFMKDVMKKLSNTSYQFAAVQFSTSYKTEFDFSDYVKRKDPDALLKHVKHMLLLTNTFGAINYVATEVFREELGARPDATKVLIIITDGEATDSGNIDAAKDIIRYIIGIGKHFQTKESQETLHKFASKPASEFVKILDTFEKLKDLFTELQKKIYVIEGTSKQDLTSFNMELSSSGISADLSRGHAVVGAVGAKDWAGGFLDLKADLQDDTFIGNEPLTPEVRAGYLGYTVTWLPSRQKTSLLASGAPRYQHMGRVLLFQEPQGGGHWSQVQTIHGTQIGSYFGGELCGVDVDQDGETELLLIGAPLFYGEQRGGRVFIYQRRQLGFEEVSELQGDPGYPLGRFGEAITALTDINGDGLVDVAVGAPLEEQGAVYIFNGRHGGLSPQPSQRIEGTQVLSGIQWFGRSIHGVKDLEGDGLADVAVGAESQMIVLSSRPVVDMVTLMSFSPAEIPVHEVECSYSTSNKMKEGVNITICFQIKSLIPQFQGRLVANLTYTLQLDGHRTRRRGLFPGGRHELRRNIAVTTSMSCTDFSFHFPVCVQDLISPINVSLNFSLWEEEGTPRDQRAQGKDIPPILRPSLHSETWEIPFEKNCGEDKKCEANLRVSFSPARSRALRLTAFASLSVELSLSNLEEDAYWVQLDLHFPPGLSFRKVEMLKPHSQIPVSCEELPEESRLLSRALSCNVSSPIFKAGHSVALQMMFNTLVNSSWGDSVELHANVTCNNEDSDLLEDNSATTIIPILYPINILIQDQEDSTLYVSFTPKGPKIHQVKHMYQVRIQPSIHDHNIPTLEAVVGVPQPPSEGPITHQWSVQMEPPVPCHYEDLERLPDAAEPCLPGALFRCPVVFRQEILVQVIGTLELVGEIEASSMFSLCSSLSISFNSSKHFHLYGSNASLAQVVMKVDVVYEKQML

SEQ ID NO: 1479 - protein, 1088 aa, synthetic construct
  REGION 1..1088: note = ITGAM (P11215) ECD
FNLDTENAMTFQENARGFGQSVVQLQGSRVVVGAPQEIVAANQRGSLYQCDYSTGSCEPIRLQVPVEAVNMSLGLSLAATTSPPQLLACGPTVHQTCSENTYVKGLCFLFGSNLRQQPQKFPEALRGCPQEDSDIAFLIDGSGSIIPHDFRRMKEFVSTVMEQLKKSKTLFSLMQYSEEFRIHFTFKEFQNNPNPRSLVKPITQLLGRTHTATGIRKVVRELFNITNGARKNAFKILVVITDGEKFGDPLGYEDVIPEADREGVIRYVIGVGDAFRSEKSRQELNTIASKPPRDHVFQVNNFEALKTIQNQLREKIFAIEGTQTGSSSSFEHEMSQEGFSAAITSNGPLLSTVGSYDWAGGVFLYTSKEKSTFINMTRVDSDMNDAYLGYAAAIILRNRVQSLVLGAPRYQHIGLVAMFRQNTGMWESNANVKGTQIGAYFGASLCSVDVDSNGSTDLVLIGAPHYYEQTRGGQVSVCPLPRGRARWQCDAVLYGEQGQPWGRFGAALTVLGDVNGDKLTDVAIGAPGEEDNRGAVYLFHGTSGSGISPSHSQRIAGSKLSPRLQYFGQSLSGGQDLTMDGLVDLTVGAQGHVLLLRSQPVLRVKAIMEFNPREVARNVFECNDQVVKGKEAGEVRVCLHVQKSTRDRLREGQIQSVVTYDLALDSGRPHSRAVFNETKNSTRRQTQVLGLTQTCETLKLQLPNCIEDPVSPIVLRLNFSLVGTPLSAFGNLRPVLAEDAQRLFTALFPFEKNCGNDNICQDDLSITFSFMSLDCLVVGGPREFNVTVTVRNDGEDSYRTQVTFFFPLDLSYRKVSTLQNQRSQRSWRLACESASSTEVSGALKSTSCSINHPIFPENSEVTFNITFDVDSKASLGNKLLLKANVTSENNMPRTNKTEFQLELPVKYAVYMVVTSHGVSTKYLNFTASENTSRVMQHQYQVSNLGQRSLPISLVFLVPVRLNQTVIWDRPQVTFSENLSSTCHTKERLPSHSDFLAELRKAPVVNCSIAVCQRIQCDIPFFGIQEEFNATLKGNLSFDWYIKTSHNHLLIVSTAEILFNDSVFTLLPGQGAFVRSQTETKVEPFEVPN

SEQ ID NO: 1480 - protein, 962 aa, synthetic construct
  REGION 1..962: note = ITGAV (P06756) ECD
FNLDVDSPAEYSGPEGSYFGFAVDFFVPSASSRMFLLVGAPKANTTQPGIVEGGQVLKCDWSSTRRCQPIEFDATGNRDYAKDDPLEFKSHQWFGASVRSKQDKILACAPLYHWRTEMKQEREPVGTCFLQDGTKTVEYAPCRSQDIDADGQGFCQGGFSIDFTKADRVLLGGPGSFYWQGQLISDQVAEIVSKYDPNVYSIKYNNQLATRTAQAIFDDSYLGYSVAVGDFNGDGIDDFVSGVPRAARTLGMVYIYDGKNMSSLYNFTGEQMAAYFGFSVAATDINGDDYADVFIGAPLFMDRGSDGKLQEVGQVSVSLQRASGDFQTTKLNGFEVFARFGSAIAPLGDLDQDGFNDIAIAAPYGGEDKKGIVYIFNGRSTGLNAVPSQILEGQWAARSMPPSFGYSMKGATDIDKNGYPDLIVGAFGVDRAILYRARPVITVNAGLEVYPSILNQDNKTCSLPGTALKVSCFNVRFCLKADGKGVLPRKLNFQVELLLDKLKQKGAIRRALFLYSRSPSHSKNMTISRGGLMQCEELIAYLRDESEFRDKLTPITIFMEYRLDYRTAADTTGLQPILNQFTPANISRQAHILLDCGEDNVCKPKLEVSVDSDQKKIYIGDDNPLTLIVKAQNQGEGAYEAELIVSIPLQADFIGVVRNNEALARLSCAFKTENQTRQVVCDLGNPMKAGTQLLAGLRFSVHQQSEMDTSVKFDLQIQSSNLFDKVSPVVSHKVDLAVLAAVEIRGVSSPDHVFLPIPNWEHKENPETEEDVGPVVQHIYELRNNGPSSFSKAMLHLQWPYKYNNNTLLYILHYDIDGPMNCTSDMEINPLRIKISSLQTTEKNDTVAGQGERDHLITKRDLALSEGDIHTLGCGVAQCLKIVCQVGRLDRGKSAILYVKSLLWTETFMNKENQNHSYSLKSSASFNVIEFPYKNLPIEDITNSTLVTTNVTWGIQPAPMPV

SEQ ID NO: 1481 - protein, 1088 aa, synthetic construct
  REGION 1..1088: note = ITGAX (P20702) ECD
FNLDTEELTAFRVDSAGFGDSVVQYANSWVVVGAPQKITAANQTGGLYQCGYSTGACEPIGLQVPPEAVNMSLGLSLASTTSPSQLLACGPTVHHECGRNMYLTGLCFLLGPTQLTQRLPVSRQECPRQEQDIVFLIDGSGSISSRNFATMMNFVRAVISQFQRPSTQFSLMQFSNKFQTHFTFEEFRRSSNPLSLLASVHQLQGFTYTATAIQNVVHRLFHASYGARRDAAKILIVITDGKKEGDSLDYKDVIPMADAAGIIRYAIGVGLAFQNRNSWKELNDIASKPSQEHIFKVEDFDALKDIQNQLKEKIFAIEGTETTSSSSFELEMAQEGFSAVFTPDGPVLGAVGSFTWSGGAFLYPPNMSPTFINMSQENVDMRDSYLGYSTELALWKGVQSLVLGAPRYQHTGKAVIFTQVSRQWRMKAEVTGTQIGSYFGASLCSVDVDSDGSTDLVLIGAPHYYEQTRGGQVSVCPLPRGWRRWWCDAVLYGEQGHPWGRFGAALTVLGDVNGDKLTDVVIGAPGEEENRGAVYLFHGVLGPSISPSHSQRIAGSQLSSRLQYFGQALSGGQDLTQDGLVDLAVGARGQVLLLRTRPVLWVGVSMQFIPAEIPRSAFECREQVVSEQTLVQSNICLYIDKRSKNLLGSRDLQSSVTLDLALDPGRLSPRATFQETKNRSLSRVRVLGLKAHCENFNLLLPSCVEDSVTPITLRLNFTLVGKPLLAFRNLRPMLAADAQRYFTASLPFEKNCGADHICQDNLGISFSFPGLKSLLVGSNLELNAEVMVWNDGEDSYGTTITFSHPAGLSYRYVAEGQKQGQLRSLHLTCDSAPVGSQGTWSTSCRINHLIFRGGAQITFLATFDVSPKAVLGDRLLLTANVSSENNTPRTSKTTFQLELPVKYAVYTVVSSHEQFTKYLNFSESEEKESHVAMHRYQVNNLGQRDLPVSINFWVPVELNQEAVWMDVEVSHPQNPSLRCSSEKIAPPASDFLAHIQKNPVLDCSIAGCLRFRCDVPSFSVQEELDFTLKGNLSFGWVRQILQKKVSVVSVAEITFDTSVYSQLPGQEAFMRAQTTTVLEKYKVHNPTP

SEQ ID NO: 1482 - protein, 708 aa, synthetic construct
  REGION 1..708: note = ITGB1 (P05556) ECD
QTDENRCLKANAKSCGECIQAGPNCGWCTNSTFLQEGMPTSARCDDLEALKKKGCPPDDIENPRGSKDIKKNKNVTNRSKGTAEKLKPEDITQIQPQQLVLRLRSGEPQTFTLKFKRAEDYPIDLYYLMDLSYSMKDDLENVKSLGTDLMNEMRRITSDFRIGFGSFVEKTVMPYISTTPAKLRNPCTSEQNCTSPFSYKNVLSLTNKGEVFNELVGKQRISGNLDSPEGGFDAIMQVAVCGSLIGWRNVTRLLVFSTDAGFHFAGDGKLGGIVLPNDGQCHLENNMYTMSHYYDYPSIAHLVQKLSENNIQTIFAVTEEFQPVYKELKNLIPKSAVGTLSANSSNVIQLIIDAYNSLSSEVILENGKLSEGVTISYKSYCKNGVNGTGENGRKCSNISIGDEVQFEISITSNKCPKKDSDSFKIRPLGFTEEVEVILQYICECECQSEGIPESPKCHEGNGTFECGACRCNEGRVGRHCECSTDEVNSEDMDAYCRKENSSEICSNNGECVCGQCVCRKRDNTNEIYSGKFCECDNFNCDRSNGLICGGNGVCKCRVCECNPNYTGSACDCSLDTSTCEASNGQICNGRGICECGVCKCTDPKFQGQTCEMCQTCLGVCAEHKECVQCRAFNKGEKKDTCTQECSYFNITKVESRDKLPQPVQPDPVSHCKEKDVDDCWFYFTYSVNGNNEVMVHVVENPECPTGPD

SEQ ID NO: 1483 - protein, 678 aa, synthetic construct
  REGION 1..678: note = ITGB2 (P05107) ECD
QECTKFKVSSCRECIESGPGCTWCQKLNFTGPGDPDSIRCDTRPQLLMRGCAADDIMDPTSLAETQEDHNGGQKQLSPQKVTLYLRPGQAAAFNVTFRRAKGYPIDLYYLMDLSYSMLDDLRNVKKLGGDLLRALNEITESGRIGFGSFVDKTVLPFVNTHPDKLRNPCPNKEKECQPPFAFRHVLKLTNNSNQFQTEVGKQLISGNLDAPEGGLDAMMQVAACPEEIGWRNVTRLLVFATDDGFHFAGDGKLGAILTPNDGRCHLEDNLYKRSNEFDYPSVGQLAHKLAENNIQPIFAVTSRMVKTYEKLTEIIPKSAVGELSEDSSNVVQLIKNAYNKLSSRVFLDHNALPDTLKVTYDSFCSNGVTHRNQPRGDCDGVQINVPITFQVKVTATECIQEQSFVIRALGFTDIVTVQVLPQCECRCRDQSRDRSLCHGKGFLECGICRCDTGYIGKNCECQTQGRSSQELEGSCRKDNNSIICSGLGDCVCGQCLCHTSDVPGKLIYGQYCECDTINCERYNGQVCGGPGRGLCFCGKCRCHPGFEGSACQCERTTEGCLNPRRVECSGRGRCRCNVCECHSGYQLPLCQECPGCPSPCGKYISCAECLKFEKGPFGKNCSAACPGLQLSNNPVKGRTCKERDSEGCWVAYTLEQQDGMDRYLIYVDESRECVAGPN

SEQ ID NO: 1484 - protein, 692 aa, synthetic construct
  REGION 1..692: note = ITGB3 (P05106) ECD
GPNICTTRGVSSCQQCLAVSPMCAWCSDEALPLGSPRCDLKENLLKDNCAPESIEFPVSEARVLEDRPLSDKGSGDSSQVTQVSPQRIALRLRPDDSKNFSIQVRQVEDYPVDIYYLMDLSYSMKDDLWSIQNLGTKLATQMRKLTSNLRIGFGAFVDKPVSPYMYISPPEALENPCYDMKTTCLPMFGYKHVLTLTDQVTRFNEEVKKQSVSRNRDAPEGGFDAIMQATVCDEKIGWRNDASHLLVFTTDAKTHIALDGRLAGIVQPNDGQCHVGSDNHYSASTTMDYPSLGLMTEKLSQKNINLIFAVTENVVNLYQNYSELIPGTTVGVLSMDSSNVLQLIVDAYGKIRSKVELEVRDLPEELSLSFNATCLNNEVIPGLKSCMGLKIGDTVSFSIEAKVRGCPQEKEKSFTIKPVGFKDSLIVQVTFDCDCACQAQAEPNSHRCNNGNGTFECGVCRCGPGWLGSQCECSEEDYRPSQQDECSPREGQPVCSQRGECLCGQCVCHSSDFGKITGKYCECDDFSCVRYKGEMCSGHGQCSCGDCLCDSDWTGYYCNCTTRTDTCMSSNGLLCSGRGKCECGSCVCIQPGSYGDTCEKCPTCPDACTFKKECVECKKFDRGALHDENTCNRYCRDEIESVKELKDTGKDAVNCTYKNEDDCVVRFQYYEDSSGKSILYVVEEPECPKGPD

SEQ ID NO: 1485 - protein, 683 aa, synthetic construct
  REGION 1..683: note = ITGB4 (P16144) ECD
NRCKKAPVKSCTECVRVDKDCAYCTDEMFRDRRCNTQAELLAAGCQRESIVVMESSFQITEETQIDTTLRRSQMSPQGLRVRLRPGEERHFELEVFEPLESPVDLYILMDFSNSMSDDLDNLKKMGQNLARVLSQLTSDYTIGFGKFVDKVSVPQTDMRPEKLKEPWPNSDPPFSFKNVISLTEDVDEFRNKLQGERISGNLDAPEGGFDAILQTAVCTRDIGWRPDSTHLLVFSTESAFHYEADGANVLAGIMSRNDERCHLDTTGTYTQYRTQDYPSVPTLVRLLAKHNIIPIFAVTNYSYSYYEKLHTYFPVSSLGVLQEDSSNIVELLEEAFNRIRSNLDIRALDSPRGLRTEVTSKMFQKTRTGSFHIRRGEVGIYQVQLRALEHVDGTHVCQLPEDQKGNIHLKPSFSDGLKMDAGIICDVCTCELQKEVRSARCSFNGDFVCGQCVCSEGWSGQTCNCSTGSLSDIQPCLREGEDKPCSGRGECQCGHCVCYGEGRYEGQFCEYDNFQCPRTSGFLCNDRGRCSMGQCVCEPGWTGPSCDCPLSNATCIDSNGGICNGRGHCECGRCHCHQQSLYTDTICEINYSAIHPGLCEDLRSCVQCQAWGTGEKKGRTCEECNFKVKMVDELKRAEEVVVRCSFRDEDDDCTYSYTMEGDGAPGPNSTVLVHKKKDCPPGS

SEQ ID NO: 1486 - protein, 696 aa, synthetic construct
  REGION 1..696: note = ITGB5 (P18084) ECD
GLNICTSGSATSCEECLLIHPKCAWCSKEDFGSPRSITSRCDLRANLVKNGCGGEIESPASSFHVLRSLPLSSKGSGSAGWDVIQMTPQEIAVNLRPGDKTTFQLQVRQVEDYPVDLYYLMDLSLSMKDDLDNIRSLGTKLAEEMRKLTSNFRLGFGSFVDKDISPFSYTAPRYQTNPCIGYKLFPNCVPSFGFRHLLPLTDRVDSFNEEVRKQRVSRNRDAPEGGFDAVLQAAVCKEKIGWRKDALHLLVFTTDDVPHIALDGKLGGLVQPHDGQCHLNEANEYTASNQMDYPSLALLGEKLAENNINLIFAVTKNHYMLYKNFTALIPGTTVEILDGDSKNIIQLIINAYNSIRSKVELSVWDQPEDLNLFFTATCQDGVSYPGQRKCEGLKIGDTASFEVSLEARSCPSRHTEHVFALRPVGFRDSLEVGVTYNCTCGCSVGLEPNSARCNGSGTYVCGLCECSPGYLGTRCECQDGENQSVYQNLCREAEGKPLCSGRGDCSCNQCSCFESEFGKIYGPFCECDNFSCARNKGVLCSGHGECHCGECKCHAGYIGDNCNCSTDISTCRGRDGQICSERGHCLCGQCQCTEPGAFGEMCEKCPTCPDACSTKRDCVECLLLHSGKPDNQTCHSLCRDEVITWVDTIVKDDQEAVLCFYKTAKDCVMMFTYVELPSGKSNLTVLREPECGNTPN

SEQ ID NO: 1487 - protein, 688 aa, synthetic construct
  REGION 1..688: note = ITGB6 (P18564) ECD
GCALGGAETCEDCLLIGPQCAWCAQENFTHPSGVGERCDTPANLLAKGCQLNFIENPVSQVEILKNKPLSVGRQKNSSDIVQIAPQSLILKLRPGGAQTLQVHVRQTEDYPVDLYYLMDLSASMDDDLNTIKELGSRLSKEMSKLTSNFRLGFGSFVEKPVSPFVKTTPEEIANPCSSIPYFCLPTFGFKHILPLTNDAERFNEIVKNQKISANIDTPEGGFDAIMQAAVCKEKIGWRNDSLHLLVFVSDADSHFGMDSKLAGIVIPNDGLCHLDSKNEYSMSTVLEYPTIGQLIDKLVQNNVLLIFAVTQEQVHLYENYAKLIPGATVGLLQKDSGNILQLIISAYEELRSEVELEVLGDTEGLNLSFTAICNNGTLFQHQKKCSHMKVGDTASFSVTVNIPHCERRSRHIIIKPVGLGDALELLVSPECNCDCQKEVEVNSSKCHHGNGSFQCGVCACHPGHMGPRCECGEDMLSTDSCKEAPDHPSCSGRGDCYCGQCICHLSPYGNIYGPYCQCDNFSCVRHKGLLCGGNGDCDCGECVCRSGWTGEYCNCTTSTDSCVSEDGVLCSGRGDCVCGKCVCTNPGASGPTCERCPTCGDPCNSKRSCIECHLSAAGQAREECVDKCKLAGATISEEEDFSKDGSVSCSLQGENECLITFLITTDNEGKTIIHSINEKDCPKPPNIP

SEQ ID NO: 1488 - protein, 704 aa, synthetic construct
  REGION 1..704: note = ITGB7 (P26010) ECD
ELDAKIPSTGDATEWRNPHLSMLGSCQPAPSCQKCILSHPSCAWCKQLNFTASGEAEARRCARREELLARGCPLEELEEPRGQQEVLQDQPLSQGARGEGATQLAPQRVRVTLRPGEPQQLQVRFLRAEGYPVDLYYLMDLSYSMKDDLERVRQLGHALLVRLQEVTHSVRIGFGSFVDKTVLPFVSTVPSKLRHPCPTRLERCQSPFSFHHVLSLTGDAQAFEREVGRQSVSGNLDSPEGGFDAILQAALCQEQIGWRNVSRLLVFTSDDTFHTAGDGKLGGIFMPSDGHCHLDSNGLYSRSTEFDYPSVGQVAQALSAANIQPIFAVTSAALPVYQELSKLIPKSAVGELSEDSSNVVQLIMDAYNSLSSTVTLEHSSLPPGVHISYESQCEGPEKREGKAEDRGQCNHVRINQTVTFWVSLQATHCLPEPHLLRLRALGFSEELIVELHTLCDCNCSDTQPQAPHCSDGQGHLQCGVCSCAPGRLGRLCECSVAELSSPDLESGCRAPNGTGPLCSGKGHCQCGRCSCSGQSSGHLCECDDASCERHEGILCGGFGRCQCGVCHCHANRTGRACECSGDMDSCISPEGGLCSGHGRCKCNRCQCLDGYYGALCDQCPGCKTPCERHRDCAECGAFRTGPLATNCSTACAHTNVTLALAPILDDGWCKERTLDNQLFFFLVEDDARGTVVLRVRPQEKGADH

SEQ ID NO: 1489 - protein, 642 aa, synthetic construct
  REGION 1..642: note = ITGB8 (P26012) ECD
EDNRCASSNAASCARCLALGPECGWCVQEDFISGGSRSERCDIVSNLISKGCSVDSIEYPSVHVIIPTENEINTQVTPGEVSIQLRPGAEANFMLKVHPLKKYPVDLYYLVDVSASMHNNIEKLNSVGNDLSRKMAFFSRDFRLGFGSYVDKTVSPYISIHPERIHNQCSDYNLDCMPPHGYIHVLSLTENITEFEKAVHRQKISGNIDTPEGGFDAMLQAAVCESHIGWRKEAKRLLLVMTDQTSHLALDSKLAGIVVPNDGNCHLKNNVYVKSTTMEHPSLGQLSEKLIDNNINVIFAVQGKQFHWYKDLLPLLPGTIAGEIESKAANLNNLVVEAYQKLISEVKVQVENQVQGIYFNITAICPDGSRKPGMEGCRNVTSNDEVLFNVTVTMKKCDVTGGKNYAIIKPIGFNETAKIHIHRNCSCQCEDNRGPKGKCVDETFLDSKCFQCDENKCHFDEDQFSSESCKSHKDQPVCSGRGVCVCGKCSCHKIKLGKVYGKYCEKDDFSCPYHHGNLCAGHGECEAGRCQCFSGWEGDRCQCPSAAAQHCVNSKGQVCSGRGTCVCGRCECTDPRSIGRFCEHCPTCYTACKENWNCMQCLHPHNLSQAILDQCKTSCALMEQQHYVDQTSECFSSPSYLR

SEQ ID NO: 1490 - protein, 271 aa, synthetic construct
  REGION 1..271: note = IZUMO1 (Q8IYV9) ECD
CVICDPSVVLALKSLEKDYLPGHLDAKHHKAMMERVENAVKDFQELSLNEDAYMGVVDEATLQKGSWSLLKDLKRITDSDVKGDLFVKELFWMLHLQKETFATYVARFQKEAYCPNKCGVMLQTLIWCKNCKKEVHACRKSYDCGERNVEVPQMEDMILDCELNWHQASEGLTDYSFYRVWGNNTETLVSKGKEATLTKPMVGPEDAGSYRCELGSVNSSPATIINFHVTVLPKMIKEEKPSPNIVTPGEATTESSISLQPLQPEKMLASR

SEQ ID NO: 1491 - protein, 154 aa, synthetic construct
  REGION 1..154: note = IZUMO3 (Q5VZ72) ECD
CLECDPKFIEDVGSLLGNLIPSEVPGRTQLLERQIKEMIHLSFKVSHSDKRLRVLAVQQVVKLRTWLKNEFYKLGNETWKGVFIYQGKLLDVCQNLESKLKELLKNFSEIACSEDCIVVEGPILDCWTCLRMTNRCFKGEYCGDEDPRKAENRE

SEQ ID NO: 1492 - protein, 1034 aa, synthetic construct
  REGION 1..1034: note = JAG1 (P78504) ECD
QFELEILSMQNVNGELQNGNCCGGARNPGDRKCTRDECDTYFKVCLKEYQSRVTAGGPCSFGSGSTPVIGGNTFNLKASRGNDRNRIVLPFSFAWPRSYTLLVEAWDSSNDTVQPDSIIEKASHSGMINPSRQWQTLKQNTGVAHFEYQIRVTCDDYYYGFGCNKFCRPRDDFFGHYACDQNGNKTCMEGWMGPECNRAICRQGCSPKHGSCKLPGDCRCQYGWQGLYCDKCIPHPGCVHGICNEPWQCLCETNWGGQLCDKDLNYCGTHQPCLNGGTCSNTGPDKYQCSCPEGYSGPNCEIAEHACLSDPCHNRGSCKETSLGFECECSPGWTGPTCSTNIDDCSPNNCSHGGTCQDLVNGFKCVCPPQWTGKTCQLDANECEAKPCVNAKSCKNLIASYYCDCLPGWMGQNCDININDCLGQCQNDASCRDLVNGYRCICPPGYAGDHCERDIDECASNPCLNGGHCQNEINRFQCLCPTGFSGNLCQLDIDYCEPNPCQNGAQCYNRASDYFCKCPEDYEGKNCSHLKDHCRTTPCEVIDSCTVAMASNDTPEGVRYISSNVCGPHGKCKSQSGGKFTCDCNKGFTGTYCHENINDCESNPCRNGGTCIDGVNSYKCICSDGWEGAYCETNINDCSQNPCHNGGTCRDLVNDFYCDCKNGWKGKTCHSRDSQCDEATCNNGGTCYDEGDAFKCMCPGGWEGTTCNIARNSSCLPNPCHNGGTCVVNGESFTCVCKEGWEGPICAQNTNDCSPHPCYNSGTCVDGDNWYRCECAPGFAGPDCRININECQSSPCAFGATCVDEINGYRCVCPPGHSGAKCQEVSGRPCITMGSVIPDGAKWDDDCNTCQCLNGRIACSKVWCGPRPCLLHKGHSECPSGQSCIPILDDQCFVHPCTGVGECRSSSLQPVKTKCTSDSYYQDNCANITFTFNKEMMSPGLTTEHICSELRNLNILKNVSAEYSIYIACEPSPSANNEIHVAISAEDIRDDGNPIKEITDKIIDLVSKRDGNSSLIAAVAEVRVQRRPLKNRTD

SEQ ID NO: 1493 - protein, 1054 aa, synthetic construct
  REGION 1..1054: note = JAG2 (Q9Y219) ECD
MGYFELQLSALRNVNGELLSGACCDGDGRTTRAGGCGHDECDTYVRVCLKEYQAKVTPTGPCSYGHGATPVLGGNSFYLPPAGAAGDRARARARAGGDQDPGLVVIPFQFAWPRSFTLIVEAWDWDNDTTPNEELLIERVSHAGMINPEDRWKSLHFSGHVAHLELQIRVRCDENYYSATCNKFCRPRNDFFGHYTCDQYGNKACMDGWMGKECKEAVCKQGCNLLHGGCTVPGECRCSYGWQGRFCDECVPYPGCVHGSCVEPWQCNCETNWGGLLCDKDLNYCGSHHPCTNGGTCINAEPDQYRCTCPDGYSGRNCEKAEHACTSNPCANGGSCHEVPSGFECHCPSGWSGPTCALDIDECASNPCAAGGTCVDQVDGFECICPEQWVGATCQLDANECEGKPCLNAFSCKNLIGGYYCDCIPGWKGINCHINVNDCRGQCQHGGTCKDLVNGYQCVCPRGFGGRHCELERDECASSPCHSGGLCEDLADGFHCHCPQGFSGPLCEVDVDLCEPSPCRNGARCYNLEGDYYCACPDDFGGKNCSVPREPCPGGACRVIDGCGSDAGPGMPGTAASGVCGPHGRCVSQPGGNFSCICDSGFTGTYCHENIDDCLGQPCRNGGTCIDEVDAFRCFCPSGWEGELCDTNPNDCLPDPCHSRGRCYDLVNDFYCACDDGWKGKTCHSREFQCDAYTCSNGGTCYDSGDTFRCACPPGWKGSTCAVAKNSSCLPNPCVNGGTCVGSGASFSCICRDGWEGRTCTHNTNDCNPLPCYNGGICVDGVNWFRCECAPGFAGPDCRINIDECQSSPCAYGATCVDEINGYRCSCPPGRAGPRCQEVIGFGRSCWSRGTPFPHGSSWVEDCNSCRCLDGRRDCSKVWCGWKPCLLAGQPEALSAQCPLGQRCLEKAPGQCLRPPCEAWGECGAEEPPSTPCLPRSGHLDNNCARLTLHFNRDHVPQGTTVGAICSGIRSLPATRAVARDRLLVLLCDRASSGASAVEVAVSFSPARDLPDSSLIQGAAHAIVAAITQRGNSSLLLAVTEVKVETVVTGGSST

SEQ ID NO: 1494 - protein, 210 aa, synthetic construct
  REGION 1..210: note = JAM2 (P57087) ECD
FSAPKDQQVVTAVEYQEAILACKTPKKTVSSRLEWKKLGRSVSFVYYQQTLQGDFKNRAEMIDFNIRIKNVTRSDAGKYRCEVSAPSEQGQNLEEDTVTLEVLVAPAVPSCEVPSSALSGTVVELRCQDKEGNPAPEYTWFKDGIRLLENPRLGSQSTNSSYTMNTKTGTLQFNTVSKLDTGEYSCEARNSVGYRRCPGKRMQVDDLNIS

SEQ ID NO: 1495 - protein, 210 aa, synthetic construct
  REGION 1..210: note = JAM3 (Q9BX67) ECD
VNLKSSNRTPVVQEFESVELSCIITDSQTSDPRIEWKKIQDEQTTYVFFDNKIQGDLAGRAEILGKTSLKIWNVTRRDSALYRCEVVARNDRKEIDEIVIELTVQVKPVTPVCRVPKAVPVGKMATLHCQESEGHPRPHYSWYRNDVPLPTDSRANPRFRNSSFHLNSETGTLVFTAVHKDDSGQYYCIASNDAGSARCEEQEMEVYDLN

SEQ ID NO: 1496 - protein, 147 aa, synthetic construct
  REGION 1..147: note = KCT2 (Q8NC54) ECD
RTDSPSPTVLNSHISTPNVNALTHENQTKPSISQISTTLPPTTSTKKSGGASVVPHPSPTPLSQEEADNNEDPSIEEEDLLMLNSSPSTAKDTLDNGDYGEPDYDWTTGPRDDDESDDTLEENRGYMEIEQSVKSFKMPSSNIEEED

SEQ ID NO: 1497 - protein, 745 aa, synthetic construct
  REGION 1..745: note = KDR (P35968) ECD
ASVGLPSVSLDLPRLSIQKDILTIKANTTLQITCRGQRDLDWLWPNNQSGSEQRVEVTECSDGLFCKTLTIPKVIGNDTGAYKCFYRETDLASVIYVYVQDYRSPFIASVSDQHGVVYITENKNKTVVIPCLGSISNLNVSLCARYPEKRFVPDGNRISWDSKKGFTIPSYMISYAGMVFCEAKINDESYQSIMYIVVVVGYRIYDVVLSPSHGIELSVGEKLVLNCTARTELNVGIDFNWEYPSSKHQHKKLVNRDLKTQSGSEMKKFLSTLTIDGVTRSDQGLYTCAASSGLMTKKNSTFVRVHEKPFVAFGSGMESLVEATVGERVRIPAKYLGYPPPEIKWYKNGIPLESNHTIKAGHVLTIMEVSERDTGNYTVILTNPISKEKQSHVVSLVVYVPPQIGEKSLISPVDSYQYGTTQTLTCTVYAIPPPHHIHWYWQLEEECANEPSQAVSVTNPYPCEEWRSVEDFQGGNKIEVNKNQFALIEGKNKTVSTLVIQAANVSALYKCEAVNKVGRGERVISFHVTRGPEITLQPDMQPTEQESVSLWCTADRSTFENLTWYKLGPQPLPIHVGELPTPVCKNLDTLWKLNATMFSNSTNDILIMELKNASLQDQGDYVCLAQDRKTKKRHCVVRQLTVLERVAPTITGNLENQTTSIGESIEVSCTASGNPPPQIMWFKDNETLVEDSGIVLKDGNRNLTIRRVRKEDEGLYTCQACSVLGCAKVEAFFIIEGAQEKTNLE

SEQ ID NO: 1498 - protein, 81 aa, synthetic construct
  REGION 1..81: note = KIAA0247 (Q92537) ECD
SVCPLPPEPENGGYICHPRPCRDPLTAGSVIEYLCAEGYMLKGDYKYLTCKNGEWKPAMEISCRLNEDKDTHTSLGVPTLS

SEQ ID NO: 1499 - protein, 935 aa, synthetic construct
  REGION 1..935: note = KIAA0319 (Q5VV43) ECD
ARKQCSEGRTYSNAVISPNLETTRIMRVSHTFPVVDCTAACCDLSSCDLAWWFEGRCYLVSCPHKENCEPKKMGPIRSYLTFVLRPVQRPAQLLDYGDMMLNRGSPSGIWGDSPEDIRKDLTFLGKDWGLEEMSEYSDDYRELEKDLLQPSGKQEPRGSAEYTDWGLLPGSEGAFNSSVGDSPAVPAETQQDPELHYLNESASTPAPKLPERSVLLPLPTTPSSGEVLEKEKASQLQEQSSNSSGKEVLMPSHSLPPASLELSSVTVEKSPVLTVTPGSTEHSIPTPPTSAAPSESTPSELPISPTTAPRTVKELTVSAGDNLIITLPDNEVELKAFVAPAPPVETTYNYEWNLISHPTDYQGEIKQGHKQTLNLSQLSVGLYVFKVTVSSENAFGEGFVNVTVKPARRVNLPPVAVVSPQLQELTLPLTSALIDGSQSTDDTEIVSYHWEEINGPFIEEKTSVDSPVLRLSNLDPGNYSFRLTVTDSDGATNSTTAALIVNNAVDYPPVANAGPNHTITLPQNSITLNGNQSSDDHQIVLYEWSLGPGSEGKHVVMQGVQTPYLHLSAMQEGDYTFQLKVTDSSRQQSTAVVTVIVQPENNRPPVAVAGPDKELIFPVESATLDGSSSSDDHGIVFYHWEHVRGPSAVEMENIDKAIATVTGLQVGTYHFRLTVKDQQGLSSTSTLTVAVKKENNSPPRARAGGRHVLVLPNNSITLDGSRSTDDQRIVSYLWIRDGQSPAAGDVIDGSDHSVALQLTNLVEGVYTFHLRVTDSQGASDTDTATVEVQPDPRKSGLVELTLQVGVGQLTEQRKDTLVRQLAVLLNVLDSDIKVQKIRAHSDLSTVIVFYVQSRPPFKVLKAAEVARNLHMRLSKEKADFLLFKVLRVDTAGCLLKCSGHGHCDPLTKRCICSHLWMENLIQRYIWDGESNCEWS

SEQ ID NO: 1500 - protein, 829 aa, synthetic construct
  REGION 1..829: note = KIAA0922 (A2VDJ0) ECD
QAIEPLPNVVELWQAEEGELLLPTQGDSEEGLEEPSQEQSFSDKLFSGKGLHFQPSVLDFGIQFLGHPVAKILHAYNPSRDSEVVVNSVFAAAGHFHVPPVPCRVIPAMGKTSFRIIFLPTEEGSIESSLFINTSSYGVLSYHVSGIGTRRISTEGSAKQLPNAYFLLPKVQSIQLSQMQAETTNTSLLQVQLECSLHNKVCQQLKGCYLESDDVLRLQMSIMVTMENFSKEFEENTQHLLDHLSIVYVATDESETSDDSAVNMYILHSGNSLIWIQDIRHFSQRDALSLQFEPVLLPTSTTNFTKIASFTCKATSCDSGIIEDVKKTTHTPTLKACLFSSVAQGYFRMDSSATQFHIETHENTSGLWSIWYRNHFDRSVVLNDVFLSKETKHMLKILNFTGPLFLPPGCWNIFSLKLAVKDIAINLFTNVFLTTNIGAIFAIPLQIYSAPTKEGSLGFEVIAHCGMHYFMGKSKAGNPNWNGSLSLDQSTWNVDSELANKLYERWKKYKNGDVCKRNVLGTTRFAHLKKSKESESFVFFLPRLIAEPGLMLNFSATALRSRMIKYFVVQNPSSWPVSLQLLPLSLYPKPEALVHLLHRWFGTDMQMINFTTGEFQLTEACPYLGTHSEESRFGILHLHLQPLEMKRVGVVFTPADYGKVTSLILIRNNLTVIDMIGVEGFGARELLKVGGRLPGAGGSLRFKVPESTLMDCRRQLKDSKQILSITKNFKVENIGPLPITVSSLKINGYNCQGYGFEVLDCHQFSLDPNTSRDISIVFTPDFTSSWVIRDLSLVTAADLEFRFTLNVTLPHHLLPLCADVVPGPSWEES

SEQ ID NO: 1501 - protein, 869 aa, synthetic construct
  REGION 1..869: note = KIAA1324 (Q6UXG2) ECD
TGPELHACKESEYHYEYTACDSTGSRWRVAVPHTPGLCTSLPDPIKGTECSFSCNAGEFLDMKDQSCKPCAEGRYSLGTGIRFDEWDELPHGFASLSANMELDDSAAESTGNCTSSKWVPRGDYIASNTDECTATLMYAVNLKQSGTVNFEYYYPDSSIIFEFFVQNDQCQPNADDSRWMKTTEKGWEFHSVELNRGNNVLYWRTTAFSVWTKVPKPVLVRNIAITGVAYTSECFPCKPGTYADKQGSSFCKLCPANSYSNKGETSCHQCDPDKYSEKGSSSCNVRPACTDKDYFYTHTACDANGETQLMYKWAKPKICSEDLEGAVKLPASGVKTHCPPCNPGFFKTNNSTCQPCPYGSYSNGSDCTRCPAGTEPAVGFEYKWWNTLPTNMETTVLSGINFEYKGMTGWEVAGDHIYTAAGASDNDFMILTLVVPGFRPPQSVMADTENKEVARITFVFETLCSVNCELYFMVGVNSRTNTPVETWKGSKGKQSYTYIIEENTTTSFTWAFQRTTFHEASRKYTNDVAKIYSINVTNVMNGVASYCRPCALEASDVGSSCTSCPAGYYIDRDSGTCHSCPTNTILKAHQPYGVQACVPCGPGTKNNKIHSLCYNDCTFSRNTPTRTFNYNFSALANTVTLAGGPSFTSKGLKYFHHFTLSLCGNQGRKMSVCTDNVTDLRIPEGESGFSKSITAYVCQAVIIPPEVTGYKAGVSSQPVSLADRLIGVTTDMTLDGITSPAELFHLESLGIPDVIFFYRSNDVTQSCSSGRSTTIRVRCSPQKTVPGSLLLPGTCSDGTCDGCNFHFLWESAAACPLCSVADYHAIVSSCVAGIQKTTYVWREPKLCSGGISLPEQRVTICKTIDFWLK

SEQ ID NO: 1502 - protein, 882 aa, synthetic construct
  REGION 1..882: note = KIAA1324L (A8MWY0) ECD
GDLPSSSSRPLPPCQEKDYHFEYTECDSSGSRWRVAIPNSAVDCSGLPDPVRGKECTFSCASGEYLEMKNQVCSKCGEGTYSLGSGIKFDEWDELPAGFSNIATFMDTVVGPSDSRPDGCNNSSWIPRGNYIESNRDDCTVSLIYAVHLKKSGYVFFEYQYVDNNIFFEFFIQNDQCQEMDTTTDKWVKLTDNGEWGSHSVMLKSGTNILYWRTTGILMGSKAVKPVLVKNITIEGVAYTSECFPCKPGTFSNKPGSFNCQVCPRNTYSEKGAKECIRCKDDSQFSEEGSSECTERPPCTTKDYFQIHTPCDEEGKTQIMYKWIEPKICREDLTDAIRLPPSGEKKDCPPCNPGFYNNGSSSCHPCPPGTFSDGTKECRPCPAGTEPALGFEYKWWNVLPGNMKTSCFNVGNSKCDGMNGWEVAGDHIQSGAGGSDNDYLILNLHIPGFKPPTSMTGATGSELGRITFVFETLCSADCVLYFMVDINRKSTNVVESWGGTKEKQAYTHIIFKNATFTFTWAFQRTNQGQDNRRFINDMVKIYSITATNAVDGVASSCRACALGSEQSGSSCVPCPPGHYIEKETNQCKECPPDTYLSIHQVYGKEACIPCGPGSKNNQDHSVCYSDCFFYHEKENQSLHYDFSNLSSVGSLMNGPSFTSKGTKYFHFFNISLCGHEGKKMALCTNNITDFTVKEIVAGSDDYTNLVGAFVCQSTIIPSESKGFRAALSSQSIILADTFIGVTVETTLKNINIKEDMFPVPTSQIPDVHFFYKSSTATTSCINGRSTAVKMRCNPTKSGAGVISVPSKCPAGTCDGCTFYFLWESAEACPLCTEHDFHEIEGACKRGFQETLYVWNEPKWCIKGISLPEKKLATCETVDFWLK

SEQ ID NO: 1503 - protein, 72 aa, synthetic construct
  REGION 1..72: note = KIAA1644 (Q3SXP7) ECD
AHFRVCEPYTDHKGRYHFGFHCPRLSDNKTFILCCHHNNTVFKYCCNETEFQAVMQANLTASSEGYMHNNYT

SEQ ID NO: 1504 - protein, 224 aa, synthetic construct
  REGION 1..224: note = KIR2DL1 (P43626) ECD
HEGVHRKPSLLAHPGPLVKSEETVILQCWSDVMFEHFLLHREGMFNDTLRLIGEHHDGVSKANFSISRMTQDLAGTYRCYGSVTHSPYQVSAPSDPLDIVIIGLYEKPSLSAQPGPTVLAGENVTLSCSSRSSYDMYHLSREGEAHERRLPAGPKVNGTFQADFPLGPATHGGTYRCFGSFHDSPYEWSKSSDPLLVSVTGNPSNSWPSPTEPSSKTGNPRHLH

SEQ ID NO: 1505 - protein, 224 aa, synthetic construct
  REGION 1..224: note = KIR2DL2 (P43627) ECD
HEGVHRKPSLLAHPGRLVKSEETVILQCWSDVRFEHFLLHREGKFKDTLHLIGEHHDGVSKANFSIGPMMQDLAGTYRCYGSVTHSPYQLSAPSDPLDIVITGLYEKPSLSAQPGPTVLAGESVTLSCSSRSSYDMYHLSREGEAHECRFSAGPKVNGTFQADFPLGPATHGGTYRCFGSFRDSPYEWSNSSDPLLVSVIGNPSNSWPSPTEPSSKTGNPRHLH

SEQ ID NO: 1506 - protein, 224 aa, synthetic construct
  REGION 1..224: note = KIR2DL3 (P43628) ECD
HEGVHRKPSLLAHPGPLVKSEETVILQCWSDVRFQHFLLHREGKFKDTLHLIGEHHDGVSKANFSIGPMMQDLAGTYRCYGSVTHSPYQLSAPSDPLDIVITGLYEKPSLSAQPGPTVLAGESVTLSCSSRSSYDMYHLSREGEAHERRFSAGPKVNGTFQADFPLGPATHGGTYRCFGSFRDSPYEWSNSSDPLLVSVTGNPSNSWPSPTEPSSETGNPRHLH

SEQ ID NO: 1507 - protein, 221 aa, synthetic construct
  REGION 1..221: note = KIR2DL4 (Q99706) ECD
WAHVGGQDKPFCSAWPSAVVPQGGHVTLRCHYRRGFNIFTLYKKDGVPVPELYNRIFWNSFLISPVTPAHAGTYRCRGFHPHSPTEWSAPSNPLVIMVTGLYEKPSLTARPGPTVRAGENVTLSCSSQSSFDIYHLSREGEAHELRLPAVPSINGTFQADFPLGPATHGETYRCFGSFHGSPYEWSDPSDPLPVSVTGNPSSSWPSPTEPSFKTGIARHLH

SEQ ID NO: 1508 - protein, 217 aa, synthetic construct
  REGION 1..217: note = KIR2DL5A (Q8N109) ECD
HEGGQDKPLLSAWPSAVVPRGGHVTLLCRSRLGFTIFSLYKEDGVPVPELYNKIFWKSILMGPVTPAHAGTYRCRGSHPRSPIEWSAPSNPLVIVVTGLFGKPSLSAQPGPTVRTGENVTLSCSSRSSFDMYHLSREGRAHEPRLPAVPSVNGTFQADFPLGPATHGGTYTCFGSLHDSPYEWSDPSDPLLVSVTGNSSSSSSSPTEPSSKTGIRRH

SEQ ID NO: 1509 - protein, 217 aa, synthetic construct
  REGION 1..217: note = KIR2DL5B (Q8NHK3) ECD
HEGGQDKPLLSAWPSAVVPRGGHVTLLCRSRLGFTIFSLYKEDGVPVPELYNKIFWKSILMGPVTPAHAGTYRCRGSHPRSPIEWSAPSNPLVIVVTGLFGKPSLSAQPGPTVRTGENVTLSCSSRSSFDMYHLSREGRAHEPRLPAVPSVDGTFQADFPLGPATHGGTYTCFSSLHDSPYEWSDPSDPLLVSVTGNSSSSSSSPTEPSSKTGIRRH

SEQ ID NO: 1510 - protein, 224 aa, synthetic construct
  REGION 1..224: note = KIR2DS1 (Q14954) ECD
HEGVHRKPSLLAHPGRLVKSEETVILQCWSDVMFEHFLLHREGMFNDTLRLIGEHHDGVSKANFSISRMKQDLAGTYRCYGSVTHSPYQLSAPSDPLDIVIIGLYEKPSLSAQPGPTVLAGENVTLSCSSRSSYDMYHLSREGEAHERRLPAGTKVNGTFQANFPLGPATHGGTYRCFGSFRDSPYEWSKSSDPLLVSVTGNPSNSWPSPTEPSSETGNPRHLH

SEQ ID NO: 1511 - protein, 224 aa, synthetic construct
  REGION 1..224: note = KIR2DS2 (P43631) ECD
HEGVHRKPSLLAHPGPLVKSEETVILQCWSDVRFEHFLLHREGKYKDTLHLIGEHHDGVSKANFSIGPMMQDLAGTYRCYGSVTHSPYQLSAPSDPLDIVITGLYEKPSLSAQPGPTVLAGESVTLSCSSRSSYDMYHLSREGEAHERRFSAGPKVNGTFQADFPLGPATHGGTYRCFGSFRDSPYEWSNSSDPLLVSVTGNPSNSWPSPTEPSSKTGNPRHLH

SEQ ID NO: 1512 - protein, 224 aa, synthetic construct
  REGION 1..224: note = KIR2DS3 (Q14952) ECD
HEGFRRKPSLLAHPGRLVKSEETVILQCWSDVMFEHFLLHREGTFNDTLRLIGEHIDGVSKANFSIGRMRQDLAGTYRCYGSVPHSPYQFSAPSDPLDIVITGLYEKPSLSAQPGPTVLAGESVTLSCSSWSSYDMYHLSTEGEAHERRFSAGPKVNGTFQADFPLGPATQGGTYRCFGSFHDSPYEWSKSSDPLLVSVTGNPSNSWPSPTEPSSKTGNPRHLH

SEQ ID NO: 1513 - protein, 224 aa, synthetic construct
  REGION 1..224: note = KIR2DS4 (P43632) ECD
QEGVHRKPSFLALPGHLVKSEETVILQCWSDVMFEHFLLHREGKFNNTLHLIGEHHDGVSKANFSIGPMMPVLAGTYRCYGSVPHSPYQLSAPSDPLDMVIIGLYEKPSLSAQPGPTVQAGENVTLSCSSRSSYDMYHLSREGEAHERRLPAVRSINGTFQADFPLGPATHGGTYRCFGSFRDAPYEWSNSSDPLLVSVTGNPSNSWPSPTEPSSKTGNPRHLH

SEQ ID NO: 1514 - protein, 224 aa, synthetic construct
  REGION 1..224: note = KIR2DS5 (Q14953) ECD
HEGFRRKPSLLAHPGPLVKSEETVILQCWSDVMFEHFLLHREGTFNHTLRLIGEHIDGVSKGNFSIGRMTQDLAGTYRCYGSVTHSPYQLSAPSDPLDIVITGLYEKPSLSAQPGPTVLAGESVTLSCSSRSSYDMYHLSREGEAHERRLPAGPKVNRTFQADFPLDPATHGGTYRCFGSFRDSPYEWSKSSDPLLVSVTGNSSNSWPSPTEPSSETGNPRHLH

SEQ ID NO: 1515 - protein, 319 aa, synthetic construct
  REGION 1..319: note = KIR3DL1 (P43629) ECD
HMGGQDKPFLSAWPSAVVPRGGHVTLRCHYRHRFNNFMLYKEDRIHIPIFHGRIFQESFNMSPVTTAHAGNYTCRGSHPHSPTGWSAPSNPVVIMVTGNHRKPSLLAHPGPLVKSGERVILQCWSDIMFEHFFLHKEGISKDPSRLVGQIHDGVSKANFSIGPMMLALAGTYRCYGSVTHTPYQLSAPSDPLDIVVTGPYEKPSLSAQPGPKVQAGESVTLSCSSRSSYDMYHLSREGGAHERRLPAVRKVNRTFQADFPLGPATHGGTYRCFGSFRHSPYEWSDPSDPLLVSVTGNPSSSWPSPTEPSSKSGNPRHLH

SEQ ID NO: 1516 - protein, 319 aa, synthetic construct
  REGION 1..319: note = KIR3DL2 (P43630) ECD
LMGGQDKPFLSARPSTVVPRGGHVALQCHYRRGFNNFMLYKEDRSHVPIFHGRIFQESFIMGPVTPAHAGTYRCRGSRPHSLTGWSAPSNPLVIMVTGNHRKPSLLAHPGPLLKSGETVILQCWSDVMFEHFFLHREGISEDPSRLVGQIHDGVSKANFSIGPLMPVLAGTYRCYGSVPHSPYQLSAPSDPLDIVITGLYEKPSLSAQPGPTVQAGENVTLSCSSWSSYDIYHLSREGEAHERRLRAVPKVNRTFQADFPLGPATHGGTYRCFGSFRALPCVWSNSSDPLLVSVTGNPSSSWPSPTEPSSKSGICRHLH

SEQ ID NO: 1517 - protein, 297 aa, synthetic construct
  REGION 1..297: note = KIR3DL3 (Q8N743) ECD
QDKPFLSAWPGTVVSEGQHVTLQCRSRLGFNEFSLSKEDGMPVPELYNRIFRNSFLMGPVTPAHAGTYRCCSSHPHSPTGWSAPSNPVVIMVTGVHRKPSLLAHPGPLVKSGETVILQCWSDVRFERFLLHREGITEDPLRLVGQLHDAGSQVNYSMGPMTPALAGTYRCFGSVTHLPYELSAPSDPLDIVVVGLYGKPSLSAQPGPTVQAGENVTLSCSSRSLFDIYHLSREAEAGELRLTAVLRVNGTFQANFPLGPVTHGGNYRCFGSFRALPHAWSDPSDPLPVSVTGNSRHL

SEQ ID NO: 1518 - protein, 319 aa, synthetic construct
  REGION 1..319: note = KIR3DS1 (Q14943) ECD
HMGGQDKPFLSAWPSAVVPRGGHVTLRCHYRHRFNNFMLYKEDRIHVPIFHGRIFQEGFNMSPVTTAHAGNYTCRGSHPHSPTGWSAPSNPMVIMVTGNHRKPSLLAHPGPLVKSGERVILQCWSDIMFEHFFLHREWISKDPSRLVGQIHDGVSKANFSIGSMMRALAGTYRCYGSVTHTPYQLSAPSDPLDIVVTGLYEKPSLSAQPGPKVQAGESVTLSCSSRSSYDMYHLSREGGAHERRLPAVRKVNRTFQADFPLGPATHGGTYRCFGSFRHSPYEWSDPSDPLLVSVTGNPSSSWPSPTEPSSKSGNLRHLH

SEQ ID NO: 1519 - protein, 483 aa, synthetic construct
  REGION 1..483: note = KIRREL (Q96J84) ECD
QGTQTRFSQEPADQTVVAGQRAVLPCVLLNYSGIVQWTKDGLALGMGQGLKAWPRYRVVGSADAGQYNLEITDAELSDDASYECQATEAALRSRRAKLTVLIPPEDTRIDGGPVILLQAGTPHNLTCRAFNAKPAATIIWFRDGTQQEGAVASTELLKDGKRETTVSQLLINPTDLDIGRVFTCRSMNEAIPSGKETSIELDVHHPPTVTLSIEPQTVQEGERVVFTCQATANPEILGYRWAKGGFLIEDAHESRYETNVDYSFFTEPVSCEVHNKVGSTNVSTLVNVHFAPRIVVDPKPTTTDIGSDVTLTCVWVGNPPLTLTWTKKDSNMVLSNSNQLLLKSVTQADAGTYTCRAIVPRIGVAEREVPLYVNGPPIISSEAVQYAVRGDGGKVECFIGSTPPPDRIAWAWKENFLEVGTLERYTVERTNSGSGVLSTLTINNVMEADFQTHYNCTAWNSFGPGTAIIQLEEREVLPVGIIA

SEQ ID NO: 1520 - protein, 490 aa, synthetic construct
  REGION 1..490: note = KIRREL2 (Q6UWL6) ECD
GPSPHFLQQPEDLVVLLGEEARLPCALGAYWGLVQWTKSGLALGGQRDLPGWSRYWISGNAANGQHDLHIRPVELEDEASYECQATQAGLRSRPAQLHVLVPPEAPQVLGGPSVSLVAGVPANLTCRSRGDARPTPELLWFRDGVLLDGATFHQTLLKEGTPGSVESTLTLTPFSHDDGATFVCRARSQALPTGRDTAITLSLQYPPEVTLSASPHTVQEGEKVIFLCQATAQPPVTGYRWAKGGSPVLGARGPRLEVVADASFLTEPVSCEVSNAVGSANRSTALDVLFGPILQAKPEPVSVDVGEDASFSCAWRGNPLPRVTWTRRGGAQVLGSGATLRLPSVGPEDAGDYVCRAEAGLSGLRGGAAEARLTVNAPPVVTALHSAPAFLRGPARLQCLVFASPAPDAVVWSWDEGFLEAGSQGRFLVETFPAPESRGGLGPGLISVLHISGTQESDFSRSFNCSARNRLGEGGAQASLGRRDLLPTVR

SEQ ID NO: 1521 - protein, 514 aa, synthetic construct
  REGION 1..514: note = KIRREL3 (Q8IZU9) ECD
LQKRGCCLVLGYMAKDKFRRMNEGQVYSFSQQPQDQVVVSGQPVTLLCAIPEYDGFVLWIKDGLALGVGRDLSSYPQYLVVGNHLSGEHHLKILRAELQDDAVYECQAIQAAIRSRPARLTVLVPPDDPVILGGPVISLRAGDPLNLTCHADNAKPAASIIWLRKGEVINGATYSKTLLRDGKRESIVSTLFISPGDVENGQSIVCRATNKAIPGGKETSVTIDIQHPPLVNLSVEPQPVLEDNVVTFHCSAKANPAVTQYRWAKRGQIIKEASGEVYRTTVDYTYFSEPVSCEVTNALGSTNLSRTVDVYFGPRMTTEPQSLLVDLGSDAIFSCAWTGNPSLTIVWMKRGSGVVLSNEKTLTLKSVRQEDAGKYVCRAVVPRVGAGEREVTLTVNGPPIISSTQTQHALHGEKGQIKCFIRSTPPPDRIAWSWKENVLESGTSGRYTVETISTEEGVISTLTISNIVRADFQTIYNCTAWNSFGSDTEIIRLKEQGSEMKSGAGLEAESVPMA

SEQ ID NO: 1522 - protein, 499 aa, synthetic construct
  REGION 1..499: note = KIT (P10721) ECD
QPSVSPGEPSPPSIHPGKSDLIVRVGDEIRLLCTDPGFVKWTFEILDETNENKQNEWITEKAEATNTGKYTCTNKHGLSNSIYVFVRDPAKLFLVDRSLYGKEDNDTLVRCPLTDPEVTNYSLKGCQGKPLPKDLRFIPDPKAGIMIKSVKRAYHRLCLHCSVDQEGKSVLSEKFILKVRPAFKAVPVVSVSKASYLLREGEEFTVTCTIKDVSSSVYSTWKRENSQTKLQEKYNSWHHGDFNYERQATLTISSARVNDSGVFMCYANNTFGSANVTTTLEVVDKGFINIFPMINTTVFVNDGENVDLIVEYEAFPKPEHQQWIYMNRTFTDKWEDYPKSENESNIRYVSELHLTRLKGTEGGTYTFLVSNSDVNAAIAFNVYVNTKPEILTYDRLVNGMLQCVAAGFPEPTIDWYFCPGTEQRCSASVLPVDVQTLNSSGPPFGKLVVQSSIDSSAFKHNGTVECKAYNDVGKTSAYFNFAFKGNNKEQIHPHTLFTP

SEQ ID NO: 1523 - protein, 189 aa, synthetic construct
  REGION 1..189: note = KITLG (P21583) ECD
EGICRNRVTNNVKDVTKLVANLPKDYMITLKYVPGMDVLPSHCWISEMVVQLSDSLTDLLDKFSNISEGLSNYSIIDKLVNIVDDLVECVKENSSKDLKKSFKSPEPRLFTPEEFFRIFNRSIDAFKDFVVASETSDCVVSSTLSPEKDSRVSVTKPFMLPPVAASSLRNDSSSSNRKAKNPPGDSSLH

SEQ ID NO: 1524 - protein, 948 aa, synthetic construct
  REGION 1..948: note = KL (Q9UEF7) ECD
EPGDGAQTWARFSRPPAPEAAGLFQGTFPDGFLWAVGSAAYQTEGGWQQHGKGASIWDTFTHHPLAPPGDSRNASLPLGAPSPLQPATGDVASDSYNNVFRDTEALRELGVTHYRFSISWARVLPNGSAGVPNREGLRYYRRLLERLRELGVQPVVTLYHWDLPQRLQDAYGGWANRALADHFRDYAELCFRHFGGQVKYWITIDNPYVVAWHGYATGRLAPGIRGSPRLGYLVAHNLLLAHAKVWHLYNTSFRPTQGGQVSIALSSHWINPRRMTDHSIKECQKSLDFVLGWFAKPVFIDGDYPESMKNNLSSILPDFTESEKKFIKGTADFFALCFGPTLSFQLLDPHMKFRQLESPNLRQLLSWIDLEFNHPQIFIVENGWFVSGTTKRDDAKYMYYLKKFIMETLKAIKLDGVDVIGYTAWSLMDGFEWHRGYSIRRGLFYVDFLSQDKMLLPKSSALFYQKLIEKNGFPPLPENQPLEGTFPCDFAWGVVDNYIQVDTTLSQFTDLNVYLWDVHHSKRLIKVDGVVTKKRKSYCVDFAAIQPQIALLQEMHVTHFRFSLDWALILPLGNQSQVNHTILQYYRCMASELVRVNITPVVALWQPMAPNQGLPRLLARQGAWENPYTALAFAEYARLCFQELGHHVKLWITMNEPYTRNMTYSAGHNLLKAHALAWHVYNEKFRHAQNGKISIALQADWIEPACPFSQKDKEVAERVLEFDIGWLAEPIFGSGDYPWVMRDWLNQRNNFLLPYFTEDEKKLIQGTFDFLALSHYTTILVDSEKEDPIKYNDYLEVQEMTDITWLNSPSQVAVVPWGLRKVLNWLKFKYGDLPMYIISNGIDDGLHAEDDQLRVYYMQNYINEALKAHILDGINLCGYFAYSFNDRTAPRFGLYRYAADQFEPKASMKHYRKIIDSNGFPGPETLERFCPEEFTVCTECSFFHTRKS

SEQ ID NO: 1525 - protein, 372 aa, synthetic construct
  REGION 1..372: note = KREMEN1 (Q96MU8) ECD
RPAPSPGLGPECFTANGADYRGTQNWTALQGGKPCLFWNETFQHPYNTLKYPNGEGGLGEHNYCRNPDGDVSPWCYVAEHEDGVYWKYCEIPACQMPGNLGCYKDHGNPPPLTGTSKTSNKLTIQTCISFCRSQRFKFAGMESGYACFCGNNPDYWKYGEAASTECNSVCFGDHTQPCGGDGRIILFDTLVGACGGNYSAMSSVVYSPDFPDTYATGRVCYWTIRVPGASHIHFSFPLFDIRDSADMVELLDGYTHRVLARFHGRSRPPLSFNVSLDFVILYFFSDRINQAQGFAVLYQAVKEELPQERPAVNQTVAEVITEQANLSVSAARSSKVLYVITTSPSHPPQTVPGSNSWAPPMGAGSHRVEGWT

SEQ ID NO: 1526 - protein, 339 aa, synthetic construct
  REGION 1..339: note = KREMEN2 (Q8NCW0) ECD
GSLHSPGLSECFQVNGADYRGHQNRTGPRGAGRPCLFWDQTQQHSYSSASDPHGRWGLGAHNFCRNPDGDVQPWCYVAETEEGIYWRYCDIPSCHMPGYLGCFVDSGAPPALSGPSGTSTKLTVQVCLRFCRMKGYQLAGVEAGYACFCGSESDLARGRLAPATDCDQICFGHPGQLCGGDGRLGVYEVSVGSCQGNWTAPQGVIYSPDFPDEYGPDRNCSWALGPPGAALELTFRLFELADPRDRLELRDAASGSLLRAFDGARPPPSGPLRLGTAALLLTFRSDARGHAQGFALTYRGLQDAAEDPEAPEGSAQTPAAPLDGANVSCSPRPGAPPAA

SEQ ID NO: 1527 - protein, 1101 aa, synthetic construct
  REGION 1..1101: note = L1CAM (P32004) ECD
IQIPEEYEGHHVMEPPVITEQSPRRLVVFPTDDISLKCEASGKPEVQFRWTRDGVHFKPKEELGVTVYQSPHSGSFTITGNNSNFAQRFQGIYRCFASNKLGTAMSHEIRLMAEGAPKWPKETVKPVEVEEGESVVLPCNPPPSAEPLRIYWMNSKILHIKQDERVTMGQNGNLYFANVLTSDNHSDYICHAHFPGTRTIIQKEPIDLRVKATNSMIDRKPRLLFPTNSSSHLVALQGQPLVLECIAEGFPTPTIKWLRPSGPMPADRVTYQNHNKTLQLLKVGEEDDGEYRCLAENSLGSARHAYYVTVEAAPYWLHKPQSHLYGPGETARLDCQVQGRPQPEVTWRINGIPVEELAKDQKYRIQRGALILSNVQPSDTMVTQCEARNRHGLLLANAYIYVVQLPAKILTADNQTYMAVQGSTAYLLCKAFGAPVPSVQWLDEDGTTVLQDERFFPYANGTLGIRDLQANDTGRYFCLAANDQNNVTIMANLKVKDATQITQGPRSTIEKKGSRVTFTCQASFDPSLQPSITWRGDGRDLQELGDSDKYFIEDGRLVIHSLDYSDQGNYSCVASTELDVVESRAQLLVVGSPGPVPRLVLSDLHLLTQSQVRVSWSPAEDHNAPIEKYDIEFEDKEMAPEKWYSLGKVPGNQTSTTLKLSPYVHYTFRVTAINKYGPGEPSPVSETVVTPEAAPEKNPVDVKGEGNETTNMVITWKPLRWMDWNAPQVQYRVQWRPQGTRGPWQEQIVSDPFLVVSNTSTFVPYEIKVQAVNSQGKGPEPQVTIGYSGEDYPQAIPELEGIEILNSSAVLVKWRPVDLAQVKGHLRGYNVTYWREGSQRKHSKRHIHKDHVVVPANTTSVILSGLRPYSSYHLEVQAFNGRGSGPASEFTFSTPEGVPGHPEALHLECQSNTSLLLRWQPPLSHNGVLTGYVLSYHPLDEGGKGQLSFNLRDPELRTHNLTDLSPHLRYRFQLQATTKEGPGEAIVREGGTMALSGISDFGNISATAGENYSVVSWVPKEGQCNFRFHILFKALGEEKGGASLSPQYVSYNQSSYTQWDLQPDTDYEIHLFKERMFRHQMAVKTNGTGRVRLPPAGFATE

SEQ ID NO: 1528 - protein, 428 aa, synthetic construct
  REGION 1..428: note = LAG3 (P18627) ECD
LQPGAEVPVVWAQEGAPAQLPCSPTIPLQDLSLLRRAGVTWQHQPDSGPPAAAPGHPLAPGPHPAAPSSWGPRPRRYTVLSVGPGGLRSGRLPLQPRVQLDERGRQRGDFSLWLRPARRADAGEYRAAVHLRDRALSCRLRLRLGQASMTASPPGSLRASDWVILNCSFSRPDRPASVHWFRNRGQGRVPVRESPHHHLAESFLFLPQVSPMDSGPWGCILTYRDGFNVSIMYNLTVLGLEPPTPLTVYAGAGSRVGLPCRLPAGVGTRSFLTAKWTPPGGGPDLLVTGDNGDFTLRLEDVSQAQAGTYTCHIHLQEQQLNATVTLAIITVTPKSFGSPGSLGKLLCEVTPVSGQERFVWSSLDTPSQRSFSGPWLEAQEAQLLSQPWQCQLYQGERLLGAAVYFTELSSPGAQRSGRAPGALPAGHL

SEQ ID NO: 1529 - protein, 144 aa, synthetic construct
  REGION 1..144: note = LAIR1 (Q6GTX8) ECD
QEEDLPRPSISAEPGTVIPLGSHVTFVCRGPVGVQTFRLERESRSTYNDTEDVSQASPSESEARFRIDSVSEGNAGPYRCIYYKPPKWSEQSDYLELLVKETSGGPDSPDTEPGSSAGPTQRPSDNSHNEHAPASQGLKAEHLY

SEQ ID NO: 1530 - protein, 354 aa, synthetic construct
  REGION 1..354: note = LAMP1 (P11279) ECD
AMFMVKNGNGTACIMANFSAAFSVNYDTKSGPKNMTFDLPSDATVVLNRSSCGKENTSDPSLVIAFGRGHTLTLNFTRNATRYSVQLMSFVYNLSDTHLFPNASSKEIKTVESITDIRADIDKKYRCVSGTQVHMNNVTVTLHDATIQAYLSNSSFSRGETRCEQDRPSPTTAPPAPPSPSPSPVPKSPSVDKYNVSGTNGTCLLASMGLQLNLTYERKDNTTVTRLLNINPNKTSASGSCGAHLVTLELHSEGTTVLLFQFGMNASSSRFFLQGIQLNTILPDARDPAFKAANGSLRALQATVGNSYKCNAEEHVRVTKAFSVNIFKVWVQAFKVEGGQFGSVEECLLDENSM

SEQ ID NO: 1531 - protein, 347 aa, synthetic construct
  REGION 1..347: note = LAMP2 (P13473) ECD
LELNLTDSENATCLYAKWQMNFTVRYETTNKTYKTVTISDHGTVTYNGSICGDDQNGPKIAVQFGPGFSWIANFTKAASTYSIDSVSFSYNTGDNTTFPDAEDKGILTVDELLAIRIPLNDLFRCNSLSTLEKNDVVQHYWDVLVQAFVQNGTVSTNEFLCDKDKTSTVAPTIHTTVPSPTTTPTPKEKPEAGTYSVNNGNDTCLLATMGLQLNITQDKVASVININPNTTHSTGSCRSHTALLRLNSSTIKYLDFVFAVKNENRFYLKEVNISMYLVNGSVFSIANNNLSYWDAPLGSSYMCNKEQTVSVSGAFQINTFDLRVQPFNVTQGKYSTAQDCSADDDNF

SEQ ID NO: 1532 - protein, 354 aa, synthetic construct
  REGION 1..354: note = LAMP3 (Q9UQV4) ECD
KAFPETRDYSQPTAAATVQDIKKPVQQPAKQAPHQTLAARFMDGHITFQTAATVKIPTTTPATTKNTATTSPITYTLVTTQATPNNSHTAPPVTEVTVGPSLAPYSLPPTITPPAHTTGTSSSTVSHTTGNTTQPSNQTTLPATLSIALHKSTTGQKPVQPTHAPGTTAAAHNTTRTAAPASTVPGPTLAPQPSSVKTGIYQVLNGSRLCIKAEMGIQLIVQDKESVFSPRRYFNIDPNATQASGNCGTRKSNLLLNFQGGFVNLTFTKDEESYYISEVGAYLTVSDPETIYQGIKHAVVMFQTAVGHSFKCVSEQSLQLSAHLQVKTTDVQLQAFDFEDDHFGNVDECSSDYT

SEQ ID NO: 1533 - protein, 206 aa, synthetic construct
  REGION 1..206: note = LAMP5 (Q9UJQ1) ECD
EQEVENLSGLSTNPEKDIFVVRENGTTCLMAEFAAKFIVPYDVWASNYVDLITEQADIALTRGAEVKGRCGHSQSELQVFWVDRAYALKMLFVKESHNMSKGPEATWRLSKVQFVYDSSEKTHFKDAVSAGKHTANSHHLSALVTPAGKSYECQAQQTISLASSDPQKTVTMILSAVHIQPFDIISDFVFSEEHKCPVDEREQLEE

SEQ ID NO: 1534 - protein, 214 aa, synthetic construct
  REGION 1..214: note = LAYN (Q6UX15) ECD
ATGRLLSASDLDLRGGQPVCRGGTQRPCYKVIYFHDTSRRLNFEEAKEACRRDGGQLVSIESEDEQKLIEKFIENLLPSDGDFWIGLRRREEKQSNSTACQDLYAWTDGSISQFRNWYVDEPSCGSEVCVVMYHQPSAPAGIGGPYMFQWNDDRCNMKNNFICKYSDEKPAVPSREAEGEETELTTPVLPEETQEEDAKKTFKESREAALNLAY

SEQ ID NO: 1535 - protein, 1863 aa, synthetic construct
  REGION 1..1863: note = LCT (P09848) ECD
SDWESDRNFISTAGPLTNDLLHNLSGLLGDQSSNFVAGDKDMYVCHQPLPTFLPEYFSSLHASQITHYKVFLSWAQLLPAGSTQNPDEKTVQCYRRLLKALKTARLQPMVILHHQTLPASTLRRTEAFADLFADYATFAFHSFGDLVGIWFTFSDLEEVIKELPHQESRASQLQTLSDAHRKAYEIYHESYAFQGGKLSVVLRAEDIPELLLEPPISALAQDTVDFLSLDLSYECQNEASLRQKLSKLQTIEPKVKVFIFNLKLPDCPSTMKNPASLLFSLFEAINKDQVLTIGFDINEFLSCSSSSKKSMSCSLTGSLALQPDQQQDHETTDSSPASAYQRIWEAFANQSRAERDAFLQDTFPEGFLWGASTGAFNVEGGWAEGGRGVSIWDPRRPLNTTEGQATLEVASDSYHKVASDVALLCGLRAQVYKFSISWSRIFPMGHGSSPSLPGVAYYNKLIDRLQDAGIEPMATLFHWDLPQALQDHGGWQNESVVDAFLDYAAFCFSTFGDRVKLWVTFHEPWVMSYAGYGTGQHPPGISDPGVASFKVAHLVLKAHARTWHHYNSHHRPQQQGHVGIVLNSDWAEPLSPERPEDLRASERFLHFMLGWFAHPVFVDGDYPATLRTQIQQMNRQCSHPVAQLPEFTEAEKQLLKGSADFLGLSHYTSRLISNAPQNTCIPSYDTIGGFSQHVNHVWPQTSSSWIRVVPWGIRRLLQFVSLEYTRGKVPIYLAGNGMPIGESENLFDDSLRVDYFNQYINEVLKAIKEDSVDVRSYIARSLIDGFEGPSGYSQRFGLHHVNFSDSSKSRTPRKSAYFFTSIIEKNGFLTKGAKRLLPPNTVNLPSKVRAFTFPSEVPSKAKVVWEKFSSQPKFERDLFYHGTFRDDFLWGVSSSAYQIEGAWDADGKGPSIWDNFTHTPGSNVKDNATGDIACDSYHQLDADLNMLRALKVKAYRFSISWSRIFPTGRNSSINSHGVDYYNRLINGLVASNIFPMVTLFHWDLPQALQDIGGWENPALIDLFDSYADFCFQTFGDRVKFWMTFNEPMYLAWLGYGSGEFPPGVKDPGWAPYRIAHAVIKAHARVYHTYDEKYRQEQKGVISLSLSTHWAEPKSPGVPRDVEAADRMLQFSLGWFAHPIFRNGDYPDTMKWKVGNRSELQHLATSRLPSFTEEEKRFIRATADVFCLNTYYSRIVQHKTPRLNPPSYEDDQEMAEEEDPSWPSTAMNRAAPWGTRRLLNWIKEEYGDIPIYITENGVGLTNPNTEDTDRIFYHKTYINEALKAYRLDGIDLRGYVAWSLMDNFEWLNGYTVKFGLYHVDFNNTNRPRTARASARYYTEVITNNGMPLAREDEFLYGRFPEGFIWSAASAAYQIEGAWRADGKGLSIWDTFSHTPLRVENDAIGDVACDSYHKIAEDLVTLQNLGVSHYRFSISWSRILPDGTTRYINEAGLNYYVRLIDTLLAASIQPQVTIYHWDLPQTLQDVGGWENETIVQRFKEYADVLFQRLGDKVKFWITLNEPFVIAYQGYGYGTAAPGVSNRPGTAPYIVGHNLIKAHAEAWHLYNDVYRASQGGVISITISSDWAEPRDPSNQEDVEAARRYVQFMGGWFAHPIFKNGDYNEVMKTRIRDRSLAAGLNKSRLPEFTESEKRRINGTYDFFGFNHYTTVLAYNLNYATAISSFDADRGVASIADRSWPDSGSFWLKMTPFGFRRILNWLKEEYNDPPIYVTENGVSQREETDLNDTARIYYLRTYINEALKAVQDKVDLRGYTVWSAMDNFEWATGFSERFGLHFVNYSDPSLPRIPKASAKFYASVVRCNGFPDPATGPHACLHQPDAGPTISPVRQEEVQFLGLMLGTTEAQT

SEQ ID NO: 1536 - protein, 767 aa, synthetic construct
  REGION 1..767: note = LDLR (P01130) ECD
AVGDRCERNEFQCQDGKCISYKWVCDGSAECQDGSDESQETCLSVTCKSGDFSCGGRVNRCIPQFWRCDGQVDCDNGSDEQGCPPKTCSQDEFRCHDGKCISRQFVCDSDRDCLDGSDEASCPVLTCGPASFQCNSSTCIPQLWACDNDPDCEDGSDEWPQRCRGLYVFQGDSSPCSAFEFHCLSGECIHSSWRCDGGPDCKDKSDEENCAVATCRPDEFQCSDGNCIHGSRQCDREYDCKDMSDEVGCVNVTLCEGPNKFKCHSGECITLDKVCNMARDCRDWSDEPIKECGTNECLDNNGGCSHVCNDLKIGYECLCPDGFQLVAQRRCEDIDECQDPDTCSQLCVNLEGGYKCQCEEGFQLDPHTKACKAVGSIAYLFFTNRHEVRKMTLDRSEYTSLIPNLRNVVALDTEVASNRIYWSDLSQRMICSTQLDRAHGVSSYDTVISRDIQAPDGLAVDWIHSNIYWTDSVLGTVSVADTKGVKRKTLFRENGSKPRAIVVDPVHGFMYWTDWGTPAKIKKGGLNGVDIYSLVTENIQWPNGITLDLLSGRLYWVDSKLHSISSIDVNGGNRKTILEDEKRLAHPFSLAVFEDKVFWTDIINEAIFSANRLTGSDVNLLAENLLSPEDMVLFHNLTQPRGVNWCERTTLSNGGCQYLCLPAPQINPHSPKFTCACPDGMLLARDMRSCLTEAEAAVATQETSTVRLKVSSTAVRTQHTTTRPVPDTSRLPGATPGLTTVEIVTMSHQALGDVAGRGNEKKPSSVR

SEQ ID NO: 1537 - protein, 156 aa, synthetic construct
  REGION 1..156: note = LDLRAD3 (Q86YD5) ECD
QLLPGNNFTNECNIPGNFMCSNGRCIPGAWQCDGLPDCFDKSDEKECPKAKSKCGPTFFPCASGIHCIIGRFRCNGFEDCPDGSDEENCTANPLLCSTARYHCKNGLCIDKSFICDGQNNCQDNSDEESCESSQEPGSGQVFVTSENQLVYYPSIT

SEQ ID NO: 1538 - protein, 818 aa, synthetic construct
  REGION 1..818: note = LEPR (P48357) ECD
FNLSYPITPWRFKLSCMPPNSTYDYFLLPAGLSKNTSNSNGHYETAVEPKFNSSGTHFSNLSKTTFHCCFRSEQDRNCSLCADNIEGKTFVSTVNSLVFQQIDANWNIQCWLKGDLKLFICYVESLFKNLFRNYNYKVHLLYVLPEVLEDSPLVPQKGSFQMVHCNCSVHECCECLVPVPTAKLNDTLLMCLKITSGGVIFQSPLMSVQPINMVKPDPPLGLHMEITDDGNLKISWSSPPLVPFPLQYQVKYSENSTTVIREADKIVSATSLLVDSILPGSSYEVQVRGKRLDGPGIWSDWSTPRVFTTQDVIYFPPKILTSVGSNVSFHCIYKKENKIVPSKEIVWWMNLAEKIPQSQYDVVSDHVSKVTFFNLNETKPRGKFTYDAVYCCNEHECHHRYAELYVIDVNINISCETDGYLTKMTCRWSTSTIQSLAESTLQLRYHRSSLYCSDIPSIHPISEPKDCYLQSDGFYECIFQPIFLLSGYTMWIRINHSLGSLDSPPTCVLPDSVVKPLPPSSVKAEITINIGLLKISWEKPVFPENNLQFQIRYGLSGKEVQWKMYEVYDAKSKSVSLPVPDLCAVYAVQVRCKRLDGLGYWSNWSNPAYTVVMDIKVPMRGPEFWRIINGDTMKKEKNVTLLWKPLMKNDSLCSVQRYVINHHTSCNGTWSEDVGNHTKFTFLWTEQAHTVTVLAINSIGASVANFNLTFSWPMSKVNIVQSLSAYPLNSSCVIVSWILSPSDYKLMYFIIEWKNLNEDGEIKWLRISSSVKKYYIHDHFIPIEKYQFSLYPIFMEGVGKPKIINSFTQDDIEKHQSD

SEQ ID NO: 1539 - protein, 789 aa, synthetic construct
  REGION 1..789: note = LIFR (P42702) ECD
QKKGAPHDLKCVTNNLQVWNCSWKAPSGTGRGTDYEVCIENRSRSCYQLEKTSIKIPALSHGDYEITINSLHDFGSSTSKFTLNEQNVSLIPDTPEILNLSADFSTSTLYLKWNDRGSVFPHRSNVIWEIKVLRKESMELVKLVTHNTTLNGKDTLHHWSWASDMPLECAIHFVEIRCYIDNLHFSGLEEWSDWSPVKNISWIPDSQTKVFPQDKVILVGSDITFCCVSQEKVLSALIGHTNCPLIHLDGENVAIKIRNISVSASSGTNVVFTTEDNIFGTVIFAGYPPDTPQQLNCETHDLKEIICSWNPGRVTALVGPRATSYTLVESFSGKYVRLKRAEAPTNESYQLLFQMLPNQEIYNFTLNAHNPLGRSQSTILVNITEKVYPHTPTSFKVKDINSTAVKLSWHLPGNFAKINFLCEIEIKKSNSVQEQRNVTIKGVENSSYLVALDKLNPYTLYTFRIRCSTETFWKWSKWSNKKQHLTTEASPSKGPDTWREWSSDGKNLIIYWKPLPINEANGKILSYNVSCSSDEETQSLSEIPDPQHKAEIRLDKNDYIISVVAKNSVGSSPPSKIASMEIPNDDLKIEQVVGMGKGILLTWHYDPNMTCDYVIKWCNSSRSEPCLMDWRKVPSNSTETVIESDEFRPGIRYNFFLYGCRNQGYQLLRSMIGYIEELAPIVAPNFTVEDTSADSILVKWEDIPVEELRGFLRGYLFYFGKGERDTSKMRVLESGRSDIKVKNITDISQKTLRIADLQGKTSYHLVLRAYTDGGVGPEKSMYVVTKENS

SEQ ID NO: 1540 - protein, 445 aa, synthetic construct
  REGION 1..445: note = LILRA1 (O75019) ECD
PRTHVQAGTLPKPTLWAEPGSVITQGSPVTLWCQGILETQEYRLYREKKTAPWITRIPQEIVKKGQFPIPSITWEHTGRYRCFYGSHTAGWSEPSDPLELVVTGAYIKPTLSALPSPVVTSGGNVTLHCVSQVAFGSFILCKEGEDEHPQCLNSQPRTHGWSRAIFSVGPVSPSRRWSYRCYAYDSNSPHVWSLPSDLLELLVLGVSKKPSLSVQPGPIVAPGESLTLQCVSDVSYDRFVLYKEGERDFLQLPGPQPQAGLSQANFTLGPVSRSYGGQYRCSGAYNLSSEWSAPSDPLDILIAGQFRGRPFISVHPGPTVASGENVTLLCQSWGPFHTFLLTKAGAADAPLRLRSIHEYPKYQAEFPMSPVTSAHSGTYRCYGSLSSNPYLLSHPSDSLELMVSGAAETLSPPQNKSDSKAGAANTLSPSQNKTASHPQDYTVEN

SEQ ID NO: 1541 - protein, 426 aa, synthetic construct
  REGION 1..426: note = LILRA2 (Q8N149) ECD
GHLPKPTLWAEPGSVIIQGSPVTLRCQGSLQAEEYHLYRENKSASWVRRIQEPGKNGQFPIPSITWEHAGRYHCQYYSHNHSSEYSDPLELVVTGAYSKPTLSALPSPVVTLGGNVTLQCVSQVAFDGFILCKEGEDEHPQRLNSHSHARGWSWAIFSVGPVSPSRRWSYRCYAYDSNSPYVWSLPSDLLELLVPGVSKKPSLSVQPGPMVAPGESLTLQCVSDVGYDRFVLYKEGERDFLQRPGWQPQAGLSQANFTLGPVSPSHGGQYRCYSAHNLSSEWSAPSDPLDILITGQFYDRPSLSVQPVPTVAPGKNVTLLCQSRGQFHTFLLTKEGAGHPPLHLRSEHQAQQNQAEFRMGPVTSAHVGTYRCYSSLSSNPYLLSLPSDPLELVVSEAAETLSPSQNKTDSTTTSLGQHPQDYTVEN

SEQ ID NO: 1542 - protein, 423 aa, synthetic construct
  REGION 1..423: note = LILRA4 (P59901) ECD
ENLPKPILWAEPGPVITWHNPVTIWCQGTLEAQGYRLDKEGNSMSRHILKTLESENKVKLSIPSMMWEHAGRYHCYYQSPAGWSEPSDPLELVVTAYSRPTLSALPSPVVTSGVNVTLRCASRLGLGRFTLIEEGDHRLSWTLNSHQHNHGKFQALFPMGPLTFSNRGTFRCYGYENNTPYVWSEPSDPLQLLVSGVSRKPSLLTLQGPVVTPGENLTLQCGSDVGYIRYTLYKEGADGLPQRPGRQPQAGLSQANFTLSPVSRSYGGQYRCYGAHNVSSEWSAPSDPLDILIAGQISDRPSLSVQPGPTVTSGEKVTLLCQSWDPMFTFLLTKEGAAHPPLRLRSMYGAHKYQAEFPMSPVTSAHAGTYRCYGSRSSNPYLLSHPSEPLELVVSGATETLNPAQKKSDSKTAPHLQDYTVEN

SEQ ID NO: 1543 - protein, 227 aa, synthetic construct
  REGION 1..227: note = LILRA5 (A6NI73) ECD
GNLSKATLWAEPGSVISRGNSVTIRCQGTLEAQEYRLVKEGSPEPWDTQNPLEPKNKARFSIPSMTEHHAGRYRCYYYSPAGWSEPSDPLELVVTGFYNKPTLSALPSPVVTSGENVTLQCGSRLRFDRFILTEEGDHKLSWTLDSQLTPSGQFQALFPVGPVTPSHRWMLRCYGSRRHILQVWSEPSDLLEIPVSGAADNLSPSQNKSDSGTASHLQDYAVENLIR

SEQ ID NO: 1544 - protein, 424 aa, synthetic construct
  REGION 1..424: note = LILRA6 (Q6PI73) ECD
GPFPKPTLWAEPGSVISWGSPVTIWCQGSLEAQEYQLDKEGSPEPLDRNNPLEPKNKARFSIPSMTQHHAGRYRCHYYSSAGWSEPSDPLELVMTGFYNKPTLSALPSPVVASGGNMTLRCGSQKGYHHFVLMKEGEHQLPRTLDSQQLHSGGFQALFPVGPVTPSHRWRFTCYYYYTNTPRVWSHPSDPLEILPSGVSRKPSLLTLQGPVLAPGQSLTLQCGSDVGYDRFVLYKEGERDFLQRPGQQPQAGLSQANFTLGPVSPSHGGQYRCYGAHNLSSEWSAPSDPLNILMAGQIYDTVSLSAQPGPTVASGENVTLLCQSRGYFDTFLLTKEGAAHPPLRLRSMYGAHKYQAEFPMSPVTSAHAGTYRCYGSYSSNPHLLSFPSEPLELMVSGHSGGSSLPPTGPPSTPASHAKDYTVEN

SEQ ID NO: 1545 - protein, 438 aa, synthetic construct
  REGION 1..438: note = LILRB1 (Q8NHL6) ECD
GHLPKPTLWAEPGSVITQGSPVTLRCQGGQETQEYRLYREKKTALWITRIPQELVKKGQFPIPSITWEHAGRYRCYYGSDTAGRSESSDPLELVVTGAYIKPTLSAQPSPVVNSGGNVILQCDSQVAFDGFSLCKEGEDEHPQCLNSQPHARGSSRAIFSVGPVSPSRRWWYRCYAYDSNSPYEWSLPSDLLELLVLGVSKKPSLSVQPGPIVAPEETLTLQCGSDAGYNRFVLYKDGERDFLQLAGAQPQAGLSQANFTLGPVSRSYGGQYRCYGAHNLSSEWSAPSDPLDILIAGQFYDRVSLSVQPGPTVASGENVTLLCQSQGWMQTFLLTKEGAADDPWRLRSTYQSQKYQAEFPMGPVTSAHAGTYRCYGSQSSKPYLLTHPSDPLELVVSGPSGGPSSPTTGPTSTSGPEDQPLTPTGSDPQSGLGRHLGV

SEQ ID NO: 1546 - protein, 440 aa, synthetic construct
  REGION 1..440: note = LILRB2 (Q8N423) ECD
QTGTIPKPTLWAEPDSVITQGSPVTLSCQGSLEAQEYRLYREKKSASWITRIRPELVKNGQFHIPSITWEHTGRYGCQYYSRARWSELSDPLVLVMTGAYPKPTLSAQPSPVVTSGGRVTLQCESQVAFGGFILCKEGEEEHPQCLNSQPHARGSSRAIFSVGPVSPNRRWSHRCYGYDLNSPYVWSSPSDLLELLVPGVSKKPSLSVQPGPVVAPGESLTLQCVSDVGYDRFVLYKEGERDLRQLPGRQPQAGLSQANFTLGPVSRSYGGQYRCYGAHNLSSECSAPSDPLDILITGQIRGTPFISVQPGPTVASGENVTLLCQSWRQFHTFLLTKAGAADAPLRLRSIHEYPKYQAEFPMSPVTSAHAGTYRCYGSLNSDPYLLSHPSEPLELVVSGPSMGSSPPPTGPISTPAGPEDQPLTPTGSDPQSGLGRHLGV

SEQ ID NO: 1547 - protein, 420 aa, synthetic construct
  REGION 1..420: note = LILRB3 (O75022) ECD
GPFPKPTLWAEPGSVISWGSPVTIWCQGSQEAQEYRLHKEGSPEPLDRNNPLEPKNKARFSIPSMTEHHAGRYRCHYYSSAGWSEPSDPLEMVMTGAYSKPTLSALPSPVVASGGNMTLRCGSQKGYHHFVLMKEGEHQLPRTLDSQQLHSRGFQALFPVGPVTPSHRWRFTCYYYYTNTPWVWSHPSDPLEILPSGVSRKPSLLTLQGPVLAPGQSLTLQCGSDVGYNRFVLYKEGERDFLQRPGQQPQAGLSQANFTLGPVSPSNGGQYRCYGAHNLSSEWSAPSDPLNILMAGQIYDTVSLSAQPGPTVASGENVTLLCQSWWQFDTFLLTKEGAAHPPLRLRSMYGAHKYQAEFPMSPVTSAHAGTYRCYGSYSSNPHLLSHPSEPLELVVSGHSGGSSLPPTGPPSTPGLGRYLE

SEQ ID NO: 1548 - protein, 435 aa, synthetic construct
  REGION 1..435: note = LILRB5 (O75023) ECD
GTLPKPTLWAEPASVIARGKPVTLWCQGPLETEEYRLDKEGLPWARKRQNPLEPGAKAKFHIPSTVYDSAGRYRCYYETPAGWSEPSDPLELVATGFYAEPTLLALPSPVVASGGNVTLQCDTLDGLLTFVLVEEEQKLPRTLYSQKLPKGPSQALFPVGPVTPSCRWRFRCYYYYRKNPQVWSNPSDLLEILVPGVSRKPSLLIPQGSVVARGGSLTLQCRSDVGYDIFVLYKEGEHDLVQGSGQQPQAGLSQANFTLGPVSRSHGGQYRCYGAHNLSPRWSAPSDPLDILIAGLIPDIPALSVQPGPKVASGENVTLLCQSWHQIDTFFLTKEGAAHPPLCLKSKYQSYRHQAEFSMSPVTSAQGGTYRCYSAIRSYPYLLSSPSYPQELVVSGPSGDPSLSPTGSTPTPGPEDQPLTPTGLDPQSGLGRHLG

SEQ ID NO: 1549 - protein, 520 aa, synthetic construct
  REGION 1..520: note = LINGO1 (Q96FE5) ECD
CPPRCECSAQDRAVLCHRKRFVAVPEGIPTETRLLDLGKNRIKTLNQDEFASFPHLEELELNENIVSAVEPGAFNNLFNLRTLGLRSNRLKLIPLGVFTGLSNLTKLDISENKIVILLDYMFQDLYNLKSLEVGDNDLVYISHRAFSGLNSLEQLTLEKCNLTSIPTEALSHLHGLIVLRLRHLNINAIRDYSFKRLYRLKVLEISHWPYLDTMTPNCLYGLNLTSLSITHCNLTAVPYLAVRHLVYLRFLNLSYNPISTIEGSMLHELLRLQEIQLVGGQLAVVEPYAFRGLNYLRVLNVSGNQLTTLEESVFHSVGNLETLILDSNPLACDCRLLWVFRRRWRLNFNRQQPTCATPEFVQGKEFKDFPDVLLPNYFTCRRARIRDRKAQQVFVDEGHTVQFVCRADGDPPPAILWLSPRKHLVSAKSNGRLTVFPDGTLEVRYAQVQDNGTYLCIAANAGGNDSMPAHLHVRSYSPDWPHQPNKTFAFISNQPGEGEANSTRATVPFPFDIKTLIIAT

SEQ ID NO: 1550 - protein, 518 aa, synthetic construct
  REGION 1..518: note = LINGO2 (Q7L985) ECD
CPARCECSAQNKSVSCHRRRLIAIPEGIPIETKILDLSKNRLKSVNPEEFISYPLLEEIDLSDNIIANVEPGAFNNLFNLRSLRLKGNRLKLVPLGVFTGLSNLTKLDISENKIVILLDYMFQDLHNLKSLEVGDNDLVYISHRAFSGLLSLEQLTLEKCNLTAVPTEALSHLRSLISLHLKHLNINNMPVYAFKRLFHLKHLEIDYWPLLDMMPANSLYGLNLTSLSVTNTNLSTVPFLAFKHLVYLTHLNLSYNPISTIEAGMFSDLIRLQELHIVGAQLRTIEPHSFQGLRFLRVLNVSQNLLETLEENVFSSPRALEVLSINNNPLACDCRLLWILQRQPTLQFGGQQPMCAGPDTIRERSFKDFHSTALSFYFTCKKPKIREKKLQHLLVDEGQTVQLECSADGDPQPVISWVTPRRRFITTKSNGRATVLGDGTLEIRFAQDQDSGMYVCIASNAAGNDTFTASLTVKGFASDRFLYANRTPMYMTDSNDTISNGTNANTFSLDLKTILVST

SEQ ID NO: 1551 - protein, 507 aa, synthetic construct
  REGION 1..507: note = LINGO3 (P0C6S8) ECD
CPARCECTVQTRAVACTRRRLTAVPDGIPAETRLLELSRNRIRCLNPGDLAALPALEELDLSENAIAHVEPGAFANLPRLRVLRLRGNQLKLIPPGVFTRLDNLTLLDLSENKLVILLDYTFQDLHSLRRLEVGDNDLVFVSRRAFAGLLALEELTLERCNLTALSGESLGHLRSLGALRLRHLAIASLEDQNFRRLPGLLHLEIDNWPLLEEVAAGSLRGLNLTSLSVTHTNITAVPAAALRHQAHLTCLNLSHNPISTVPRGSFRDLVRLRELHLAGALLAVVEPQAFLGLRQIRLLNLSNNLLSTLEESTFHSVNTLETLRVDGNPLACDCRLLWIVQRRKTLNFDGRLPACATPAEVRGDALRNLPDSVLFEYFVCRKPKIRERRLQRVTATAGEDVRFLCRAEGEPAPTVAWVTPQHRPVTATSAGRARVLPGGTLEIQDARPQDSGTYTCVASNAGGNDTYFATLTVRPEPAANRTPGEAHNETLAALRAPLDLTTILVST

SEQ ID NO: 1552 - protein, 505 aa, synthetic construct
  REGION 1..505: note = LINGO4 (Q6UY18) ECD
GSCPAVCDCTSQPQAVLCGHRQLEAVPGGLPLDTELLDLSGNRLWGLQQGMLSRLSLLQELDLSYNQLSTLEPGAFHGLQSLLTLRLQGNRLRIMGPGVFSGLSALTLLDLRLNQIVLFLDGAFGELGSLQKLEVGDNHLVFVAPGAFAGLAKLSTLTLERCNLSTVPGLALARLPALVALRLRELDIGRLPAGALRGLGQLKELEIHLWPSLEALDPGSLVGLNLSSLAITRCNLSSVPFQALYHLSFLRVLDLSQNPISAIPARRLSPLVRLQELRLSGACLTSIAAHAFHGLTAFHLLDVADNALQTLEETAFPSPDKLVTLRLSGNPLTCDCRLLWLLRLRRHLDFGMSPPACAGPHHVQGKSLKEFSDILPPGHFTCKPALIRKSGPRWVIAEEGGHAVFSCSGDGDPAPTVSWMRPHGAWLGRAGRVRVLEDGTLEIRSVQLRDRGAYVCVVSNVAGNDSLRTWLEVIQVEPPNGTLSDPNITVPGIPGPFFLDSRGVA

SEQ ID NO: 1553 - protein, 278 aa, synthetic construct
  REGION 1..278: note = LMAN2 (Q12907) ECD
DITDGNSEHLKREHSLIKPYQGVGSSSMPLWDFQGSTMLTSQYVRLTPDERSKEGSIWNHQPCFLKDWEMHVHFKVHGTGKKNLHGDGIALWYTRDRLVPGPVFGSKDNFHGLAIFLDTYPNDETTERVFPYISVMVNNGSLSYDHSKDGRWTELAGCTADFRNRDHDTFLAVRYSRGRLTVMTDLEDKNEWKNCIDITGVRLPTGYYFGASAGTGDLSDNHDIISMKLFQLMVEHTPDEESIDWTKIEPSVNFLKSPKDNVDDPTGNFRSGPLTGWR

SEQ ID NO: 1554 - protein, 269 aa, synthetic construct
  REGION 1..269: note = LMAN2L (Q9H0V9) ECD
GQTFEYLKREHSLSKPYQGVGTGSSSLWNLMGNAMVMTQYIRLTPDMQSKQGALWNRVPCFLRDWELQVHFKIHGQGKKNLHGDGLAIWYTKDRMQPGPVFGNMDKFVGLGVFVDTYPNEEKQQERVFPYISAMVNNGSLSYDHERDGRPTELGGCTAIVRNLHYDTFLVIRYVKRHLTIMMDIDGKHEWRDCIEVPGVRLPRGYYFGTSSITGDLSDNHDVISLKLFELTVERTPEEEKLHRDVFLPSVDNMKLPEMTAPLPPLSGLA

SEQ ID NO: 1555 - protein, 505 aa, synthetic construct
  REGION 1..505: note = LRFN1 (Q9P244) ECD
QPCPGRCICQNVAPTLTMLCAKTGLLFVPPAIDRRVVELRLTDNFIAAVRRRDFANMTSLVHLTLSRNTIGQVAAGAFADLRALRALHLDSNRLAEVRGDQLRGLGNLRHLILGNNQIRRVESAAFDAFLSTVEDLDLSYNNLEALPWEAVGQMVNLNTLTLDHNLIDHIAEGTFVQLHKLVRLDMTSNRLHKLPPDGLFLRSQGTGPKPPTPLTVSFGGNPLHCNCELLWLRRLTREDDLETCATPEHLTDRYFWSIPEEEFLCEPPLITRQAGGRALVVEGQAVSLRCRAVGDPEPVVHWVAPDGRLLGNSSRTRVRGDGTLDVTITTLRDSGTFTCIASNAAGEATAPVEVCVVPLPLMAPPPAAPPPLTEPGSSDIATPGRPGANDSAAERRLVAAELTSNSVLIRWPAQRPVPGIRMYQVQYNSSVDDSLVYRMIPSTSQTFLVNDLAAGRAYDLCVLAVYDDGATALPATRVVGCVQFTTAGDPAPCRPLRAHFLGGTM

SEQ ID NO: 1556 - protein, 514 aa, synthetic construct
  REGION 1..514: note = LRFN2 (Q9ULH4) ECD
CPKYCVCQNLSESLGTLCPSKGLLFVPPDIDRRTVELRLGGNFIIHISRQDFANMTGLVDLTLSRNTISHIQPFSFLDLESLRSLHLDSNRLPSLGEDTLRGLVNLQHLIVNNNQLGGIADEAFEDFLLTLEDLDLSYNNLHGLPWDSVRRMVNLHQLSLDHNLLDHIAEGTFADLQKLARLDLTSNRLQKLPPDPIFARSQASALTATPFAPPLSFSFGGNPLHCNCELLWLRRLERDDDLETCGSPGGLKGRYFWHVREEEFVCEPPLITQHTHKLLVLEGQAATLKCKAIGDPSPLIHWVAPDDRLVGNSSRTAVYDNGTLDIFITTSQDSGAFTCIAANAAGEATAMVEVSIVQLPHLSNSTSRTAPPKSRLSDITGSSKTSRGGGGSGGGEPPKSPPERAVLVSEVTTTSALVKWSVSKSAPRVKMYQLQYNCSDDEVLIYRMIPASNKAFVVNNLVSGTGYDLCVLAMWDDTATTLTATNIVGCAQFFTKADYPQCQSMHSQILGGTM

SEQ ID NO: 1557 - protein, 523 aa, synthetic construct
  REGION 1..523: note = LRFN3 (Q9BTN0) ECD
SSPPQSATPSPCPRRCRCQTQSLPLSVLCPGAGLLFVPPSLDRRAAELRLADNFIASVRRRDLANMTGLLHLSLSRNTIRHVAAGAFADLRALRALHLDGNRLTSLGEGQLRGLVNLRHLILSNNQLAALAAGALDDCAETLEDLDLSYNNLEQLPWEALGRLGNVNTLGLDHNLLASVPAGAFSRLHKLARLDMTSNRLTTIPPDPLFSRLPLLARPRGSPASALVLAFGGNPLHCNCELVWLRRLAREDDLEACASPPALGGRYFWAVGEEEFVCEPPVVTHRSPPLAVPAGRPAALRCRAVGDPEPRVRWVSPQGRLLGNSSRARAFPNGTLELLVTEPGDGGIFTCIAANAAGEATAAVELTVGPPPPPQLANSTSCDPPRDGDPDALTPPSAASASAKVADTGPPTDRGVQVTEHGATAALVQWPDQRPIPGIRMYQIQYNSSADDILVYRMIPAESRSFLLTDLASGRTYDLCVLAVYEDSATGLTATRPVGCARFSTEPALRPCGAPHAPFLGGTM

SEQ ID NO: 1558 - protein, 502 aa, synthetic construct
  REGION 1..502: note = LRFN4 (Q6PJG9) ECD
CPLPCVCQNLSESLSTLCAHRGLLFVPPNVDRRTVELRLADNFIQALGPPDFRNMTGLVDLTLSRNAITRIGARAFGDLESLRSLHLDGNRLVELGTGSLRGPVNLQHLILSGNQLGRIAPGAFDDFLESLEDLDLSYNNLRQVPWAGIGAMPALHTLNLDHNLIDALPPGAFAQLGQLSRLDLTSNRLATLAPDPLFSRGRDAEASPAPLVLSFSGNPLHCNCELLWLRRLARPDDLETCASPPGLAGRYFWAVPEGEFSCEPPLIARHTQRLWVLEGQRATLRCRALGDPAPTMHWVGPDDRLVGNSSRARAFPNGTLEIGVTGAGDAGGYTCIATNPAGEATARVELRVLALPHGGNSSAEGGRPGPSDIAASARTAAEGEGTLESEPAVQVTEVTATSGLVSWGPGRPADPVWMFQIQYNSSEDETLIYRIVPASSHHFLLKHLVPGADYDLCLLALSPAAGPSDLTATRLLGCAHFSTLPASPLCHALQAHVLGGTL

SEQ ID NO: 1559 - protein, 512 aa, synthetic construct
  REGION 1..512: note = LRFN5 (Q96NI6) ECD
QICPKRCVCQILSPNLATLCAKKGLLFVPPNIDRRTVELRLADNFVTNIKRKDFANMTSLVDLTLSRNTISFITPHAFADLRNLRALHLNSNRLTKITNDMFSGLSNLHHLILNNNQLTLISSTAFDDVFALEELDLSYNNLETIPWDAVEKMVSLHTLSLDHNMIDNIPKGTFSHLHKMTRLDVTSNKLQKLPPDPLFQRAQVLATSGIISPSTFALSFGGNPLHCNCELLWLRRLSREDDLETCASPPLLTGRYFWSIPEEEFLCEPPLITRHTHEMRVLEGQRATLRCKARGDPEPAIHWISPEGKLISNATRSLVYDNGTLDILITTVKDTGAFTCIASNPAGEATQIVDLHIIKLPHLLNSTNHIHEPDPGSSDISTSTKSGSNTSSSNGDTKLSQDKIVVAEATSSTALLKFNFQRNIPGIRMFQIQYNGTYDDTLVYRMIPPTSKTFLVNNLAAGTMYDLCVLAIYDDGITSLTATRVVGCIQFTTEQDYVRCHFMQSQFLGGTM

SEQ ID NO: 1560 - protein, 760 aa, synthetic construct
  REGION 1..760: note = LRIG1 (Q96JA1) ECD
AGPRAPCAAACTCAGDSLDCGGRGLAALPGDLPSWTRSLNLSYNKLSEIDPAGFEDLPNLQEVYLNNNELTAVPSLGAASSHVVSLFLQHNKIRSVEGSQLKAYLSLEVLDLSLNNITEVRNTCFPHGPPIKELNLAGNRIGTLELGAFDGLSRSLLTLRLSKNRITQLPVRAFKLPRLTQLDLNRNRIRLIEGLTFQGLNSLEVLKLQRNNISKLTDGAFWGLSKMHVLHLEYNSLVEVNSGSLYGLTALHQLHLSNNSIARIHRKGWSFCQKLHELVLSFNNLTRLDEESLAELSSLSVLRLSHNSISHIAEGAFKGLRSLRVLDLDHNEISGTIEDTSGAFSGLDSLSKLTLFGNKIKSVAKRAFSGLEGLEHLNLGGNAIRSVQFDAFVKMKNLKELHISSDSFLCDCQLKWLPPWLIGRMLQAFVTATCAHPESLKGQSIFSVPPESFVCDDFLKPQIITQPETTMAMVGKDIRFTCSAASSSSSPMTFAWKKDNEVLTNADMENFVHVHAQDGEVMEYTTILHLRQVTFGHEGRYQCVITNHFGSTYSHKARLTVNVLPSFTKTPHDITIRTTTMARLECAATGHPNPQIAWQKDGGTDFPAARERRMHVMPDDDVFFITDVKIDDAGVYSCTAQNSAGSISANATLTVLETPSLVVPLEDRVVSVGETVALQCKATGNPPPRITWFKGDRPLSLTERHHLTPDNQLLVVQNVVAEDAGRYTCEMSNTLGTERAHSQLSVLPAAGCRKDGTTVG

SEQ ID NO: 1561 - protein, 767 aa, synthetic construct
  REGION 1..767: note = LRIG2 (O94898) ECD
GLCPAPCSCRIPLLDCSRRKLPAPSWRALSGLLPPDTAILDFSHNRLSNWNISLESQTLQEVKMNYNELTEIPYFGEPTSNITLLSLVHNIIPEINAQALQFYPALESLDLSSNIISEIKTSSFPRMQLKYLNLSNNRITTLEAGCFDNLSSSLLVVKLNRNRMSMIPPKIFKLPHLQFLELKRNRIKIVEGLTFQGLDSLRSLKMQRNGISKLKDGAFFGLNNMEELELEHNNLTRVNKGWLYGLRMLQQLYVSQNAIERISPDAWEFCQRLSELDLSYNQLTRLDESAFVGLSLLERLNLGDNRVTHIADGVFRFLSNLQTLDLRNNEISWAIEDASEAFAGLTSLTKLILQGNQIKSITKKAFIGLESLEHLDLNNNAIMSIQENAFSQTHLKELILNTSSLLCDCHLKWLLQWLVDNNFQHSVNVSCAHPEWLAGQSILNVDLKDFVCDDFLKPQIRTHPETIIALRGMNVTLTCTAVSSSDSPMSTVWRKDSEILYDVDTENFVRYWQQAGEALEYTSILHLFNVNFTDEGKYQCIVTNHFGSNYSQKAKLTVNEMPSFLKTPMDLTIRTGAMARLECAAEGHPAPQISWQKDGGTDFPAARERRMHVMPEDDVFFIANVKIEDMGIYSCMAQNTAGGLSANASLTVLETPSFIRPLEDKTVTRGETAVLQCIAGGSPAPRLNWTKDDGPLLVTERHFFAAANQLLIIVDAGLEDAGKYTCIMSNTLGTERGHIYLNVISSPNCDSSQSSIGHEDDGWTTVG

SEQ ID NO: 1562 - protein, 785 aa, synthetic construct
  REGION 1..785: note = LRIG3 (Q6UXM1) ECD
GRSDSGGRGELGQPSGVAAERPCPTTCRCLGDLLDCSRKRLARLPEPLPSWVARLDLSHNRLSFIKASSMSHLQSLREVKLNNNELETIPNLGPVSANITLLSLAGNRIVEILPEHLKEFQSLETLDLSSNNISELQTAFPALQLKYLYLNSNRVTSMEPGYFDNLANTLLVLKLNRNRISAIPPKMFKLPQLQHLELNRNKIKNVDGLTFQGLGALKSLKMQRNGVTKLMDGAFWGLSNMEILQLDHNNLTEITKGWLYGLLMLQELHLSQNAINRISPDAWEFCQKLSELDLTFNHLSRLDDSSFLGLSLLNTLHIGNNRVSYIADCAFRGLSSLKTLDLKNNEISWTIEDMNGAFSGLDKLRRLILQGNRIRSITKKAFTGLDALEHLDLSDNAIMSLQGNAFSQMKKLQQLHLNTSSLLCDCQLKWLPQWVAENNFQSFVNASCAHPQLLKGRSIFAVSPDGFVCDDFPKPQITVQPETQSAIKGSNLSFICSAASSSDSPMTFAWKKDNELLHDAEMENYAHLRAQGGEVMEYTTILRLREVEFASEGKYQCVISNHFGSSYSVKAKLTVNMLPSFTKTPMDLTIRAGAMARLECAAVGHPAPQIAWQKDGGTDFPAARERRMHVMPEDDVFFIVDVKIEDIGVYSCTAQNSAGSISANATLTVLETPSFLRPLLDRTVTKGETAVLQCIAGGSPPPKLNWTKDDSPLVVTERHFFAAGNQLLIIVDSDVSDAGKYTCEMSNTLGTERGNVRLSVIPTPTCDSPQMTAPSLDDDGWATVG

SEQ ID NO: 1563 - protein, 505 aa, synthetic construct
  REGION 1..505: note = LRIT1 (Q9P2V4) ECD
FCPSQCSCSLHIMGDGSKARTVVCNDPDMTLPPASIPPDTSRLRLERTAIRRVPGEAFRPLGRLEQLWLPYNALSELNALMLRGLRRLRELRLPGNRLAAFPWAALRDAPKLRLLDLQANRLSAVPAEAARFLENLTFLDLSSNQLMRLPQELIVSWAHLETGIFPPGHHPRRVLGLQDNPWACDCRLYDLVHLLDGWAPNLAFIETELRCASPRSLAGVAFSQLELRKCQGPELHPGVASIRSLLGGTALLRCGATGVPGPEMSWRRANGRPLNGTVHQEVSSDGTSWTLLGLPAVSHLDSGDYICQAKNFLGASETVISLIVTEPPTSTEHSGSPGALWARTGGGGEAAAYNNKLVARHVPQIPKPAVLATGPSVPSTKEELTLEHFQMDALGELSDGRAGPSEARMVRSVKVVGDTYHSVSLVWKAPQAKNTTAFSVLYAVFGQHSMRRVIVQPGKTRVTITGLLPKTKYVACVCVQGLVPRKEQCVIFSTNEVVDAENTQQ

SEQ ID NO: 1564 - protein, 446 aa, synthetic construct
  REGION 1..446: note = LRIT2 (A6NDA9) ECD
AQPFCLPGCTCSEESFGRTLQCTSVSLGKIPGNLSEEFKQVRIENSPLFEMPQGSFINMSTLEYLWLNFNNISVIHLGALEHLPELRELRLEGNKLCSVPWTAFRATPLLRVLDLKRNKIDALPELALQFLVSLTYLDLSSNRLTVVSKSVFLNWPAYQKCRQPDCGAEILSSLVVALHDNPWVCDCRLRGLVQFVKSITLPVILVNSYLICQGPLSKAGQLFHETELSACMKPQISTPSANITIRAGQNVTLRCLAQASPSPSIAWTYPLSMWREFDVLTSSTGEDTALSELAIPAAHLVDSGNYTCMASNSIGKSNLVISLHVQPAQALHAPDSLSIPSEGNAYIDLRVVKQTVHGILLEWLAVADTSKEEWFTLYIASDEAFRKEVVHIGPGINTYAVDDLLPGTKYEACLSLEGQPPHQGQCVAFVTGRDAGGLEAREHLLH

SEQ ID NO: 1565 - protein, 563 aa, synthetic construct
  REGION 1..563: note = LRIT3 (Q3SXY7) ECD
LCPSQCTCDYHGRNDGSGSRLVLCNDMDMNELPTNLPVDTVKLRIEKTVIRRISAEAFYYLVELQYLWVTYNSVASIDPSSFYNLKQLHELRLDGNSLAAFPWASLLDMPLLRTLDLHNNKITSVPNEALRYLKNLAYLDLSSNRLTTLPPDFLESWTHLVSTPSGVLDLSPSRIILGLQDNPWFCDCHISKMIELSKVVDPAIVLLDPLMTCSEPERLTGILFQRAELEHCLKPSVMTSATKIMSALGSNVLLRCDATGFPTPQITWTRSDSSPVNYTVIQESPEEGVRWSIMSLTGISSKDAGDYKCKAKNLAGMSEAVVTVTVLGITTTPIPPDTSERTGDHPEWDVQPGSGRSTSVSSASSYLWSSSFSPTSSFSASTLSPPSTASFSLSPFSSSTVSSTTTLSTSISASTTMANKRSFQLHQGGKRNLKVAKNGSKLPPASTSKKEELALLDQTMLTETNAAIENLRVVSETKESVTLTWNMINTTHNSAVTVLYSKYGGKDLLLLNADSSKNQVTIDGLEPGGQYMACVCPKGVPPQKDQCITFSTERVEGDDSQWS

SEQ ID NO: 1566 - protein, 4400 aa, synthetic construct
  REGION 1..4400: note = LRP1 (Q07954) ECD
AIDAPKTCSPKQFACRDQITCISKGWRCDGERDCPDGSDEAPEICPQSKAQRCQPNEHNCLGTELCVPMSRLCNGVQDCMDGSDEGPHCRELQGNCSRLGCQHHCVPTLDGPTCYCNSSFQLQADGKTCKDFDECSVYGTCSQLCTNTDGSFICGCVEGYLLQPDNRSCKAKNEPVDRPPVLLIANSQNILATYLSGAQVSTITPTSTRQTTAMDFSYANETVCWVHVGDSAAQTQLKCARMPGLKGFVDEHTINISLSLHHVEQMAIDWLTGNFYFVDDIDDRIFVCNRNGDTCVTLLDLELYNPKGIALDPAMGKVFFTDYGQIPKVERCDMDGQNRTKLVDSKIVFPHGITLDLVSRLVYWADAYLDYIEVVDYEGKGRQTIIQGILIEHLYGLTVFENYLYATNSDNANAQQKTSVIRVNRFNSTEYQVVTRVDKGGALHIYHQRRQPRVRSHACENDQYGKPGGCSDICLLANSHKARTCRCRSGFSLGSDGKSCKKPEHELFLVYGKGRPGIIRGMDMGAKVPDEHMIPIENLMNPRALDFHAETGFIYFADTTSYLIGRQKIDGTERETILKDGIHNVEGVAVDWMGDNLYWTDDGPKKTISVARLEKAAQTRKTLIEGKMTHPRAIVVDPLNGWMYWTDWEEDPKDSRRGRLERAWMDGSHRDIFVTSKTVLWPNGLSLDIPAGRLYWVDAFYDRIETILLNGTDRKIVYEGPELNHAFGLCHHGNYLFWTEYRSGSVYRLERGVGGAPPTVTLLRSERPPIFEIRMYDAQQQQVGTNKCRVNNGGCSSLCLATPGSRQCACAEDQVLDADGVTCLANPSYVPPPQCQPGEFACANSRCIQERWKCDGDNDCLDNSDEAPALCHQHTCPSDRFKCENNRCIPNRWLCDGDNDCGNSEDESNATCSARTCPPNQFSCASGRCIPISWTCDLDDDCGDRSDESASCAYPTCFPLTQFTCNNGRCININWRCDNDNDCGDNSDEAGCSHSCSSTQFKCNSGRCIPEHWTCDGDNDCGDYSDETHANCTNQATRPPGGCHTDEFQCRLDGLCIPLRWRCDGDTDCMDSSDEKSCEGVTHVCDPSVKFGCKDSARCISKAWVCDGDNDCEDNSDEENCESLACRPPSHPCANNTSVCLPPDKLCDGNDDCGDGSDEGELCDQCSLNNGGCSHNCSVAPGEGIVCSCPLGMELGPDNHTCQIQSYCAKHLKCSQKCDQNKFSVKCSCYEGWVLEPDGESCRSLDPFKPFIIFSNRHEIRRIDLHKGDYSVLVPGLRNTIALDFHLSQSALYWTDVVEDKIYRGKLLDNGALTSFEVVIQYGLATPEGLAVDWIAGNIYWVESNLDQIEVAKLDGTLRTTLLAGDIEHPRAIALDPRDGILFWTDWDASLPRIEAASMSGAGRRTVHRETGSGGWPNGLTVDYLEKRILWIDARSDAIYSARYDGSGHMEVLRGHEFLSHPFAVTLYGGEVYWTDWRTNTLAKANKWTGHNVTVVQRTNTQPFDLQVYHPSRQPMAPNPCEANGGQGPCSHLCLINYNRTVSCACPHLMKLHKDNTTCYEFKKFLLYARQMEIRGVDLDAPYYNYIISFTVPDIDNVTVLDYDAREQRVYWSDVRTQAIKRAFINGTGVETVVSADLPNAHGLAVDWVSRNLFWTSYDTNKKQINVARLDGSFKNAVVQGLEQPHGLVVHPLRGKLYWTDGDNISMANMDGSNRTLLFSGQKGPVGLAIDFPESKLYWISSGNHTINRCNLDGSGLEVIDAMRSQLGKATALAIMGDKLWWADQVSEKMGTCSKADGSGSVVLRNSTTLVMHMKVYDESIQLDHKGTNPCSVNNGDCSQLCLPTSETTRSCMCTAGYSLRSGQQACEGVGSFLLYSVHEGIRGIPLDPNDKSDALVPVSGTSLAVGIDFHAENDTIYWVDMGLSTISRAKRDQTWREDVVTNGIGRVEGIAVDWIAGNIYWTDQGFDVIEVARLNGSFRYVVISQGLDKPRAITVHPEKGYLFWTEWGQYPRIERSRLDGTERVVLVNVSISWPNGISVDYQDGKLYWCDARTDKIERIDLETGENREVVLSSNNMDMFSVSVFEDFIYWSDRTHANGSIKRGSKDNATDSVPLRTGIGVQLKDIKVFNRDRQKGTNVCAVANGGCQQLCLYRGRGQRACACAHGMLAEDGASCREYAGYLLYSERTILKSIHLSDERNLNAPVQPFEDPEHMKNVIALAFDYRAGTSPGTPNRIFFSDIHFGNIQQINDDGSRRITIVENVGSVEGLAYHRGWDTLYWTSYTTSTITRHTVDQTRPGAFERETVITMSGDDHPRAFVLDECQNLMFWTNWNEQHPSIMRAALSGANVLTLIEKDIRTPNGLAIDHRAEKLYFSDATLDKIERCEYDGSHRYVILKSEPVHPFGLAVYGEHIFWTDWVRRAVQRANKHVGSNMKLLRVDIPQQPMGIIAVANDTNSCELSPCRINNGGCQDLCLLTHQGHVNCSCRGGRILQDDLTCRAVNSSCRAQDEFECANGECINFSLTCDGVPHCKDKSDEKPSYCNSRRCKKTFRQCSNGRCVSNMLWCNGADDCGDGSDEIPCNKTACGVGEFRCRDGTCIGNSSRCNQFVDCEDASDEMNCSATDCSSYFRLGVKGVLFQPCERTSLCYAPSWVCDGANDCGDYSDERDCPGVKRPRCPLNYFACPSGRCIPMSWTCDKEDDCEHGEDETHCNKFCSEAQFECQNHRCISKQWLCDGSDDCGDGSDEAAHCEGKTCGPSSFSCPGTHVCVPERWLCDGDKDCADGADESIAAGCLYNSTCDDREFMCQNRQCIPKHFVCDHDRDCADGSDESPECEYPTCGPSEFRCANGRCLSSRQWECDGENDCHDQSDEAPKNPHCTSQEHKCNASSQFLCSSGRCVAEALLCNGQDDCGDSSDERGCHINECLSRKLSGCSQDCEDLKIGFKCRCRPGFRLKDDGRTCADVDECSTTFPCSQRCINTHGSYKCLCVEGYAPRGGDPHSCKAVTDEEPFLIFANRYYLRKLNLDGSNYTLLKQGLNNAVALDFDYREQMIYWTDVTTQGSMIRRMHLNGSNVQVLHRTGLSNPDGLAVDWVGGNLYWCDKGRDTIEVSKLNGAYRTVLVSSGLREPRALVVDVQNGYLYWTDWGDHSLIGRIGMDGSSRSVIVDTKITWPNGLTLDYVTERIYWADAREDYIEFASLDGSNRHVVLSQDIPHIFALTLFEDYVYWTDWETKSINRAHKTTGTNKTLLISTLHRPMDLHVFHALRQPDVPNHPCKVNNGGCSNLCLLSPGGGHKCACPTNFYLGSDGRTCVSNCTASQFVCKNDKCIPFWWKCDTEDDCGDHSDEPPDCPEFKCRPGQFQCSTGICTNPAFICDGDNDCQDNSDEANCDIHVCLPSQFKCTNTNRCIPGIFRCNGQDNCGDGEDERDCPEVTCAPNQFQCSITKRCIPRVWVCDRDNDCVDGSDEPANCTQMTCGVDEFRCKDSGRCIPARWKCDGEDDCGDGSDEPKEECDERTCEPYQFRCKNNRCVPGRWQCDYDNDCGDNSDEESCTPRPCSESEFSCANGRCIAGRWKCDGDHDCADGSDEKDCTPRCDMDQFQCKSGHCIPLRWRCDADADCMDGSDEEACGTGVRTCPLDEFQCNNTLCKPLAWKCDGEDDCGDNSDENPEECARFVCPPNRPFRCKNDRVCLWIGRQCDGTDNCGDGTDEEDCEPPTAHTTHCKDKKEFLCRNQRCLSSSLRCNMFDDCGDGSDEEDCSIDPKLTSCATNASICGDEARCVRTEKAAYCACRSGFHTVPGQPGCQDINECLRFGTCSQLCNNTKGGHLCSCARNFMKTHNTCKAEGSEYQVLYIADDNEIRSLFPGHPHSAYEQAFQGDESVRIDAMDVHVKAGRVYWTNWHTGTISYRSLPPAAPPTTSNRHRRQIDRGVTHLNISGLKMPRGIAIDWVAGNVYWTDSGRDVIEVAQMKGENRKTLISGMIDEPHAIVVDPLRGTMYWSDWGNHPKIETAAMDGTLRETLVQDNIQWPTGLAVDYHNERLYWADAKLSVIGSIRLNGTDPIVAADSKRGLSHPFSIDVFEDYIYGVTYINNRVFKIHKFGHSPLVNLTGGLSHASDVVLYHQHKQPEVTNPCDRKKCEWLCLLSPSGPVCTCPNGKRLDNGTCVPVPSPTPPPDAPRPGTCNLQCFNGGSCFLNARRQPKCRCQPRYTGDKCELDQCWEHCRNGGTCAASPSGMPTCRCPTGFTGPKCTQQVCAGYCANNSTCTVNQGNQPQCRCLPGFLGDRCQYRQCSGYCENFGTCQMAADGSRQCRCTAYFEGSRCEVNKCSRCLEGACVVNKQSGDVTCNCTDGRVAPSCLTCVGHCSNGGSCTMNSKMMPECQCPPHMTGPRCEEHVFSQQQPG

SEQ ID NO: 1567 - protein, 424 aa, synthetic construct
  REGION 1..424: note = LRP10 (Q7Z4F1) ECD
HPDRIIFPNHACEDPPAVLLEVQGTLQRPLVRDSRTSPANCTWLILGSKEQTVTIRFQKLHLACGSERLTLRSPLQPLISLCEAPPSPLQLPGGNVTITYSYAGARAPMGQGFLLSYSQDWLMCLQEEFQCLNHRCVSAVQRCDGVDACGDGSDEAGCSSDPFPGLTPRPVPSLPCNVTLEDFYGVFSSPGYTHLASVSHPQSCHWLLDPHDGRRLAVRFTALDLGFGDAVHVYDGPGPPESSRLLRSLTHFSNGKAVTVETLSGQAVVSYHTVAWSNGRGFNATYHVRGYCLPWDRPCGLGSGLGAGEGLGERCYSEAQRCDGSWDCADGTDEEDCPGCPPGHFPCGAAGTSGATACYLPADRCNYQTFCADGADERRCRHCQPGNFRCRDEKCVYETWVCDGQPDCADGSDEWDCSYVLPRK

SEQ ID NO: 1568 - protein, 413 aa, synthetic construct
  REGION 1..413: note = LRP11 (Q86VZ4) ECD
ALPPAAPLSELHAQLSGVEQLLEEFRRQLQQERPQEELELELRAGGGPQEDCPGPGSGGYSAMPDAIIRTKDSLAAGASFLRAPAAVRGWRQCVAACCSEPRCSVAVVELPRRPAPPAAVLGCYLFNCTARGRNVCKFALHSGYSSYSLSRAPDGAALATARASPRQEKDAPPLSKAGQDVVLHLPTDGVVLDGRESTDDHAIVQYEWALLQGDPSVDMKVPQSGTLKLSHLQEGTYTFQLTVTDTAGQRSSDNVSVTVLRAAYSTGGCLHTCSRYHFFCDDGCCIDITLACDGVQQCPDGSDEDFCQNLGLDRKMVTHTAASPALPRTTGPSEDAGGDSLVEKSQKATAPNKPPALSNTEKRNHSAFWGPESQIIPVMPDSSSSGKNRKEESYIFESKGDGGGGEHPAPETG

SEQ ID NO: 1569 - protein, 460 aa, synthetic construct
  REGION 1..460: note = LRP12 (Q9Y561) ECD
EHSENVHISGVSTACGETPEQIRAPSGIITSPGWPSEYPAKINCSWFIRANPGEIITISFQDFDIQGSRRCNLDWLTIETYKNIESYRACGSTIPPPYISSQDHIWIRFHSDDNISRKGFRLAYFSGKSEEPNCACDQFRCGNGKCIPEAWKCNNMDECGDSSDEEICAKEANPPTAAAFQPCAYNQFQCLSRFTKVYTCLPESLKCDGNIDCLDLGDEIDCDVPTCGQWLKYFYGTFNSPNYPDFYPPGSNCTWLIDTGDHRKVILRFTDFKLDGTGYGDYVKIYDGLEENPHKLLRVLTAFDSHAPLTVVSSSGQIRVHFCADKVNAARGFNATYQVDGFCLPWEIPCGGNWGCYTEQQRCDGYWHCPNGRDETNCTMCQKEEFPCSRNGVCYPRSDRCNYQNHCPNGSDEKNCFFCQPGNFHCKNNRCVFESWVCDSQDDCGDGSDEENCPVIVPTR

SEQ ID NO: 1570 - protein, 4420 aa, synthetic construct
  REGION 1..4420: note = LRP1B (Q9NZR2) ECD
ADRDQQLCDPGEFLCHDHVTCVSQSWLCDGDPDCPDDSDESLDTCPEEVEIKCPLNHIACLGTNKCVHLSQLCNGVLDCPDGYDEGVHCQELLSNCQQLNCQYKCTMVRNSTRCYCEDGFEITEDGRSCKDQDECAVYGTCSQTCRNTHGSYTCSCVEGYLMQPDNRSCKAKIEPTDRPPILLIANFETIEVFYLNGSKMATLSSVNGNEIHTLDFIYNEDMICWIESRESSNQLKCIQITKAGGLTDEWTINILQSFHNVQQMAIDWLTRNLYFVDHVGDRIFVCNSNGSVCVTLIDLELHNPKAIAVDPIAGKLFFTDYGNVAKVERCDMDGMNRTRIIDSKTEQPAALALDLVNKLVYWVDLYLDYVGVVDYQGKNRHTVIQGRQVRHLYGITVFEDYLYATNSDNYNIVRINRFNGTDIHSLIKIENAWGIRIYQKRTQPTVRSHACEVDPYGMPGGCSHICLLSSSYKTRTCRCRTGFNLGSDGRSCKRPKNELFLFYGKGRPGIVRGMDLNTKIADEYMIPIENLVNPRALDFHAETNYIYFADTTSFLIGRQKIDGTERETILKDDLDNVEGIAVDWIGNNLYWTNDGHRKTINVARLEKASQSRKTLLEGEMSHPRGIVVDPVNGWMYWTDWEEDEIDDSVGRIEKAWMDGFNRQIFVTSKMLWPNGLTLDFHTNTLYWCDAYYDHIEKVFLNGTHRKIVYSGRELNHPFGLSHHGNYVFWTDYMNGSIFQLDLITSEVTLLRHERPPLFGLQIYDPRKQQGDNMCRVNNGGCSTLCLAIPGGRVCACADNQLLDENGTTCTFNPGEALPHICKAGEFRCKNRHCIQARWKCDGDDDCLDGSDEDSVNCFNHSCPDDQFKCQNNRCIPKRWLCDGANDCGSNEDESNQTCTARTCQVDQFSCGNGRCIPRAWLCDREDDCGDQTDEMASCEFPTCEPLTQFVCKSGRCISSKWHCDSDDDCGDGSDEVGCVHSCFDNQFRCSSGRCIPGHWACDGDNDCGDFSDEAQINCTKEEIHSPAGCNGNEFQCHPDGNCVPDLWRCDGEKDCEDGSDEKGCNGTIRLCDHKTKFSCWSTGRCINKAWVCDGDIDCEDQSDEDDCDSFLCGPPKHPCANDTSVCLQPEKLCNGKKDCPDGSDEGYLCDECSLNNGGCSNHCSVVPGRGIVCSCPEGLQLNKDNKTCEIVDYCSNHLKCSQVCEQHKHTVKCSCYEGWKLDVDGESCTSVDPFEAFIIFSIRHEIRRIDLHKRDYSLLVPGLRNTIALDFHFNQSLLYWTDVVEDRIYRGKLSESGGVSAIEVVVEHGLATPEGLTVDWIAGNIYWIDSNLDQIEVAKLDGSLRTTLIAGAMEHPRAIALDPRYGILFWTDWDANFPRIESASMSGAGRKTIYKDMKTGAWPNGLTVDHFEKRIVWTDARSDAIYSALYDGTNMIEIIRGHEYLSHPFAVSLYGSEVYWTDWRTNTLSKANKWTGQNVSVIQKTSAQPFDLQIYHPSRQPQAPNPCAANDGKGPCSHMCLINHNRSAACACPHLMKLSSDKKTCYEMKKFLLYARRSEIRGVDIDNPYFNFITAFTVPDIDDVTVIDFDASEERLYWTDIKTQTIKRAFINGTGLETVISRDIQSIRGLAVDWVSRNLYWISSEFDETQINVARLDGSLKTSIIHGIDKPQCLAAHPVRGKLYWTDGNTINMANMDGSNSKILFQNQKEPVGLSIDYVENKLYWISSGNGTINRCNLDGGNLEVIESMKEELTKATALTIMDKKLWWADQNLAQLGTCSKRDGRNPTILRNKTSGVVHMKVYDKEAQQGSNSCQLNNGGCSQLCLPTSETTRTCMCTVGYYLQKNRMSCQGIESFLMYSVHEGIRGIPLEPSDKMDALMPISGTSFAVGIDFHAENDTIYWTDMGFNKISRAKRDQTWKEDIITNGLGRVEGIAVDWIAGNIYWTDHGFNLIEVARLNGSFRYVIISQGLDQPRSIAVHPEKGLLFWTEWGQMPCIGKARLDGSEKVVLVSMGIAWPNGISIDYEENKLYWCDARTDKIERIDLETGGNREMVLSGSNVDMFSVAVFGAYIYWSDRAHANGSVRRGHKNDATETITMRTGLGVNLKEVKIFNRVREKGTNVCARDNGGCKQLCLYRGNSRRTCACAHGYLAEDGVTCLRHEGYLLYSGRTILKSIHLSDETNLNSPIRPYENPRYFKNVIALAFDYNQRRKGTNRIFYSDAHFGNIQLIKDNWEDRQVIVENVGSVEGLAYHRAWDTLYWTSSTTSSITRHTVDQTRPGAFDREAVITMSEDDHPHVLALDECQNLMFWTNWNEQHPSIMRSTLTGKNAQVVVSTDILTPNGLTIDYRAEKLYFSDGSLGKIERCEYDGSQRHVIVKSGPGTFLSLAVYDNYIFWSDWGRRAILRSNKYTGGDTKILRSDIPHQPMGIIAVANDTNSCELSPCALLNGGCHDLCLLTPNGRVNCSCRGDRILLEDNRCVTKNSSCNAYSEFECGNGECIDYQLTCDGIPHCKDKSDEKLLYCENRSCRRGFKPCYNRRCIPHGKLCDGENDCGDNSDELDCKVSTCATVEFRCADGTCIPRSARCNQNIDCADASDEKNCNNTDCTHFYKLGVKTTGFIRCNSTSLCVLPTWICDGSNDCGDYSDELKCPVQNKHKCEENYFSCPSGRCILNTWICDGQKDCEDGRDEFHCDSSCSWNQFACSAQKCISKHWICDGEDDCGDGLDESDSICGAITCAADMFSCQGSRACVPRHWLCDGERDCPDGSDELSTAGCAPNNTCDENAFMCHNKVCIPKQFVCDHDDDCGDGSDESPQCGYRQCGTEEFSCADGRCLLNTQWQCDGDFDCPDHSDEAPLNPKCKSAEQSCNSSFFMCKNGRCIPSGGLCDNKDDCGDGSDERNCHINECLSKKVSGCSQDCQDLPVSYKCKCWPGFQLKDDGKTCVDIDECSSGFPCSQQCINTYGTYKCLCTDGYEIQPDNPNGCKSLSDEEPFLILADHHEIRKISTDGSNYTLLKQGLNNVIAIDFDYREEFIYWIDSSRPNGSRINRMCLNGSDIKVVHNTAVPNALAVDWIGKNLYWSDTEKRIIEVSKLNGLYPTILVSKRLKFPRDLSLDPQAGYLYWIDCCEYPHIGRVGMDGTNQSVVIETKISRPMALTIDYVNRRLYWADENHIEFSNMDGSHRHKVPNQDIPGVIALTLFEDYIYWTDGKTKSLSRAHKTSGADRLSLIYSWHAITDIQVYHSYRQPDVSKHLCMINNGGCSHLCLLAPGKTHTCACPTNFYLAADNRTCLSNCTASQFRCKTDKCIPFWWKCDTVDDCGDGSDEPDDCPEFRCQPGRFQCGTGLCALPAFICDGENDCGDNSDELNCDTHVCLSGQFKCTKNQKCIPVNLRCNGQDDCGDEEDERDCPENSCSPDYFQCKTTKHCISKLWVCDEDPDCADASDEANCDKKTCGPHEFQCKNNNCIPDHWRCDSQNDCSDNSDEENCKPQTCTLKDFLCANGDCVSSRFWCDGDFDCADGSDERNCETSCSKDQFRCSNGQCIPAKWKCDGHEDCKYGEDEKSCEPASPTCSSREYICASDGCISASLKCNGEYDCADGSDEMDCVTECKEDQFRCKNKAHCIPIRWLCDGIHDCVDGSDEENCERGGNICRADEFLCNNSLCKLHFWVCDGEDDCGDNSDEAPDMCVKFLCPSTRPHRCRNNRICLQSEQMCNGIDECGDNSDEDHCGGKLTYKARPCKKDEFACSNKKCIPMDLQCDRLDDCGDGSDEQGCRIAPTEYTCEDNVNPCGDDAYCNQIKTSVFCRCKPGFQRNMKNRQCEDLNECLVFGTCSHQCINVEGSYKCVCDQNFQERNNTCIAEGSEDQVLYIANDTDILGFIYPFNYSGDHQQISHIEHNSRITGMDVYYQRDMIIWSTQFNPGGIFYKRIHGREKRQANSGLICPEFKRPRDIAVDWVAGNIYWTDHSRMHWFSYYTTHWTSLRYSINVGQLNGPNCTRLLTNMAGEPYAIAVNPKRGMMYWTVVGDHSHIEEAAMDGTLRRILVQKNLQRPTGLAVDYFSERIYWADFELSIIGSVLYDGSNSVVSVSSKQGLLHPHRIDIFEDYIYGAGPKNGVFRVQKFGHGSVEYLALNIDKTKGVLISHRYKQLDLPNPCLDLACEFLCLLNPSGATCVCPEGKYLINGTCNDDSLLDDSCKLTCENGGRCILNEKGDLRCHCWPSYSGERCEVNHCSNYCQNGGTCVPSVLGRPTCSCALGFTGPNCGKTVCEDFCQNGGTCIVTAGNQPYCHCQPEYTGDRCQYYVCHHYCVNSESCTIGDDGSVECVCPTRYEGPKCEVDKCVRCHGGHCIINKDSEDIFCNCTNGKIASSCQLCDGYCYNGGTCQLDPETNVPVCLCSTNWSGTQCERPAPKSSKSDHISTRSI

SEQ ID NO: 1571 - protein, 4398 aa, synthetic construct
  REGION 1..4398: note = LRP2 (P98164) ECD
QECDSAHFRCGSGHCIPADWRCDGTKDCSDDADEIGCAVVTCQQGYFKCQSEGQCIPNSWVCDQDQDCDDGSDERQDCSQSTCSSHQITCSNGQCIPSEYRCDHVRDCPDGADENDCQYPTCEQLTCDNGACYNTSQKCDWKVDCRDSSDEINCTEICLHNEFSCGNGECIPRAYVCDHDNDCQDGSDEHACNYPTCGGYQFTCPSGRCIYQNWVCDGEDDCKDNGDEDGCESGPHDVHKCSPREWSCPESGRCISIYKVCDGILDCPGREDENNTSTGKYCSMTLCSALNCQYQCHETPYGGACFCPPGYIINHNDSRTCVEFDDCQIWGICDQKCESRPGRHLCHCEEGYILERGQYCKANDSFGEASIIFSNGRDLLIGDIHGRSFRILVESQNRGVAVGVAFHYHLQRVFWTDTVQNKVFSVDINGLNIQEVLNVSVETPENLAVDWVNNKIYLVETKVNRIDMVNLDGSYRVTLITENLGHPRGIAVDPTVGYLFFSDWESLSGEPKLERAFMDGSNRKDLVKTKLGWPAGVTLDMISKRVYWVDSRFDYIETVTYDGIQRKTVVHGGSLIPHPFGVSLFEGQVFFTDWTKMAVLKANKFTETNPQVYYQASLRPYGVTVYHSLRQPYATNPCKDNNGGCEQVCVLSHRTDNDGLGFRCKCTFGFQLDTDERHCIAVQNFLIFSSQVAIRGIPFTLSTQEDVMVPVSGNPSFFVGIDFDAQDSTIFFSDMSKHMIFKQKIDGTGREILAANRVENVESLAFDWISKNLYWTDSHYKSISVMRLADKTRRTVVQYLNNPRSVVVHPFAGYLFFTDWFRPAKIMRAWSDGSHLLPVINTTLGWPNGLAIDWAASRLYWVDAYFDKIEHSTFDGLDRRRLGHIEQMTHPFGLAIFGEHLFFTDWRLGAIIRVRKADGGEMTVIRSGIAYILHLKSYDVNIQTGSNACNQPTHPNGDCSHFCFPVPNFQRVCGCPYGMRLASNHLTCEGDPTNEPPTEQCGLFSFPCKNGRCVPNYYLCDGVDDCHDNSDEQLCGTLNNTCSSSAFTCGHGECIPAHWRCDKRNDCVDGSDEHNCPTHAPASCLDTQYTCDNHQCISKNWVCDTDNDCGDGSDEKNCNSTETCQPSQFNCPNHRCIDLSFVCDGDKDCVDGSDEVGCVLNCTASQFKCASGDKCIGVTNRCDGVFDCSDNSDEAGCPTRPPGMCHSDEFQCQEDGICIPNFWECDGHPDCLYGSDEHNACVPKTCPSSYFHCDNGNCIHRAWLCDRDNDCGDMSDEKDCPTQPFRCPSWQWQCLGHNICVNLSVVCDGIFDCPNGTDESPLCNGNSCSDFNGGCTHECVQEPFGAKCLCPLGFLLANDSKTCEDIDECDILGSCSQHCYNMRGSFRCSCDTGYMLESDGRTCKVTASESLLLLVASQNKIIADSVTSQVHNIYSLVENGSYIVAVDFDSISGRIFWSDATQGKTWSAFQNGTDRRVVFDSSIILTETIAIDWVGRNLYWTDYALETIEVSKIDGSHRTVLISKNLTNPRGLALDPRMNEHLLFWSDWGHHPRIERASMDGSMRTVIVQDKIFWPCGLTIDYPNRLLYFMDSYLDYMDFCDYNGHHRRQVIASDLIIRHPYALTLFEDSVYWTDRATRRVMRANKWHGGNQSVVMYNIQWPLGIVAVHPSKQPNSVNPCAFSRCSHLCLLSSQGPHFYSCVCPSGWSLSPDLLNCLRDDQPFLITVRQHIIFGISLNPEVKSNDAMVPIAGIQNGLDVEFDDAEQYIYWVENPGEIHRVKTDGTNRTVFASISMVGPSMNLALDWISRNLYSTNPRTQSIEVLTLHGDIRYRKTLIANDGTALGVGFPIGITVDPARGKLYWSDQGTDSGVPAKIASANMDGTSVKTLFTGNLEHLECVTLDIEEQKLYWAVTGRGVIERGNVDGTDRMILVHQLSHPWGIAVHDSFLYYTDEQYEVIERVDKATGANKIVLRDNVPNLRGLQVYHRRNAAESSNGCSNNMNACQQICLPVPGGLFSCACATGFKLNPDNRSCSPYNSFIVVSMLSAIRGFSLELSDHSETMVPVAGQGRNALHVDVDVSSGFIYWCDFSSSVASDNAIRRIKPDGSSLMNIVTHGIGENGVRGIAVDWVAGNLYFTNAFVSETLIEVLRINTTYRRVLLKVTVDMPRHIVVDPKNRYLFWADYGQRPKIERSFLDCTNRTVLVSEGIVTPRGLAVDRSDGYVYWVDDSLDIIARIRINGENSEVIRYGSRYPTPYGITVFENSIIWVDRNLKKIFQASKEPENTEPPTVIRDNINWLRDVTIFDKQVQPRSPAEVNNNPCLENNGGCSHLCFALPGLHTPKCDCAFGTLQSDGKNCAISTENFLIFALSNSLRSLHLDPENHSPPFQTINVERTVMSLDYDSVSDRIYFTQNLASGVGQISYATLSSGIHTPTVIASGIGTADGIAFDWITRRIYYSDYLNQMINSMAEDGSNRTVIARVPKPRAIVLDPCQGYLYWADWDTHAKIERATLGGNFRVPIVNSSLVMPSGLTLDYEEDLLYWVDASLQRIERSTLTGVDREVIVNAAVHAFGLTLYGQYIYWTDLYTQRIYRANKYDGSGQIAMTTNLLSQPRGINTVVKNQKQQCNNPCEQFNGGCSHICAPGPNGAECQCPHEGNWYLANNRKHCIVDNGERCGASSFTCSNGRCISEEWKCDNDNDCGDGSDEMESVCALHTCSPTAFTCANGRCVQYSYRCDYYNDCGDGSDEAGCLFRDCNATTEFMCNNRRCIPREFICNGVDNCHDNNTSDEKNCPDRTCQSGYTKCHNSNICIPRVYLCDGDNDCGDNSDENPTYCTTHTCSSSEFQCASGRCIPQHWYCDQETDCFDASDEPASCGHSERTCLADEFKCDGGRCIPSEWICDGDNDCGDMSDEDKRHQCQNQNCSDSEFLCVNDRPPDRRCIPQSWVCDGDVDCTDGYDENQNCTRRTCSENEFTCGYGLCIPKIFRCDRHNDCGDYSDERGCLYQTCQQNQFTCQNGRCISKTFVCDEDNDCGDGSDELMHLCHTPEPTCPPHEFKCDNGRCIEMMKLCNHLDDCLDNSDEKGCGINECHDPSISGCDHNCTDTLTSFYCSCRPGYKLMSDKRTCVDIDECTEMPFVCSQKCENVIGSYICKCAPGYLREPDGKTCRQNSNIEPYLIFSNRYYLRNLTIDGYFYSLILEGLDNVVALDFDRVEKRLYWIDTQRQVIERMFLNKTNKETIINHRLPAAESLAVDWVSRKLYWLDARLDGLFVSDLNGGHRRMLAQHCVDANNTFCFDNPRGLALHPQYGYLYWADWGHRAYIGRVGMDGTNKSVIISTKLEWPNGITIDYTNDLLYWADAHLGYIEYSDLEGHHRHTVYDGALPHPFAITIFEDTIYWTDWNTRTVEKGNKYDGSNRQTLVNTTHRPFDIHVYHPYRQPIVSNPCGTNNGGCSHLCLIKPGGKGFTCECPDDFRTLQLSGSTYCMPMCSSTQFLCANNEKCIPIWWKCDGQKDCSDGSDELALCPQRFCRLGQFQCSDGNCTSPQTLCNAHQNCPDGSDEDRLLCENHHCDSNEWQCANKRCIPESWQCDTFNDCEDNSDEDSSHCASRTCRPGQFRCANGRCIPQAWKCDVDNDCGDHSDEPIEECMSSAHLCDNFTEFSCKTNYRCIPKWAVCNGVDDCRDNSDEQGCEERTCHPVGDFRCKNHHCIPLRWQCDGQNDCGDNSDEENCAPRECTESEFRCVNQQCIPSRWICDHYNDCGDNSDERDCEMRTCHPEYFQCTSGHCVHSELKCDGSADCLDASDEADCPTRFPDGAYCQATMFECKNHVCIPPYWKCDGDDDCGDGSDEELHLCLDVPCNSPNRFRCDNNRCIYSHEVCNGVDDCGDGTDETEEHCRKPTPKPCTEYEYKCGNGHCIPHDNVCDDADDCGDWSDELGCNKGKERTCAENICEQNCTQLNEGGFICSCTAGFETNVFDRTSCLDINECEQFGTCPQHCRNTKGSYECVCADGFTSMSDRPGKRCAAEGSSPLLLLPDNVRIRKYNLSSERFSEYLQDEEYIQAVDYDWDPKDIGLSVVYYTVRGEGSRFGAIKRAYIPNFESGRNNLVQEVDLKLKYVMQPDGIAVDWVGRHIYWSDVKNKRIEVAKLDGRYRKWLISTDLDQPAAIAVNPKLGLMFWTDWGKEPKIESAWMNGEDRNILVFEDLGWPTGLSIDYLNNDRIYWSDFKEDVIETIKYDGTDRRVIAKEAMNPYSLDIFEDQLYWISKEKGEVWKQNKFGQGKKEKTLVVNPWLTQVRIFHQLRYNKSVPNLCKQICSHLCLLRPGGYSCACPQGSSFIEGSTTECDAAIELPINLPPPCRCMHGGNCYFDETDLPKCKCPSGYTGKYCEMAFSKGISPGTT

SEQ ID NO: 1572 - protein, 460 aa, synthetic construct
  REGION 1..460: note = LRP3 (O75074) ECD
VPALAACSGKLEQHTERRGVIYSPAWPLNYPPGTNCSWYIQGDRGDMITISFRNFDVEESHQCSLDWLLLGPAAPPRQEAFRLCGSAIPPAFISARDHVWIFFHSDASSSGQAQGFRLSYIRGKLGQASCQADEFRCDNGKCLPGPWQCNTVDECGDGSDEGNCSAPASEPPGSLCPGGTFPCSGARSTRCLPVERRCDGLQDCGDGSDEAGCPDLACGRRLGSFYGSFASPDLFGAARGPSDLHCTWLVDTQDSRRVLLQLELRLGYDDYVQVYEGLGERGDRLLQTLSYRSNHRPVSLEAAQGRLTVAYHARARSAGHGFNATYQVKGYCLPWEQPCGSSSDSDGGSLGDQGCFSEPQRCDGWWHCASGRDEQGCPACPPDQYPCEGGSGLCYTPADRCNNQKSCPDGADEKNCFSCQPGTFHCGTNLCIFETWRCDGQEDCQDGSDEHGCLAAVPRK

SEQ ID NO: 1573 - protein, 1705 aa, synthetic construct
  REGION 1..1705: note = LRP4 (O75096) ECD
SSPECACGRSHFTCAVSALGECTCIPAQWQCDGDNDCGDHSDEDGCILPTCSPLDFHCDNGKCIRRSWVCDGDNDCEDDSDEQDCPPRECEEDEFPCQNGYCIRSLWHCDGDNDCGDNSDEQCDMRKCSDKEFRCSDGSCIAEHWYCDGDTDCKDGSDEENCPSAVPAPPCNLEEFQCAYGRCILDIYHCDGDDDCGDWSDESDCSSHQPCRSGEFMCDSGLCINAGWRCDGDADCDDQSDERNCTTSMCTAEQFRCHSGRCVRLSWRCDGEDDCADNSDEENCENTGSPQCALDQFLCWNGRCIGQRKLCNGVNDCGDNSDESPQQNCRPRTGEENCNVNNGGCAQKCQMVRGAVQCTCHTGYRLTEDGHTCQDVNECAEEGYCSQGCTNSEGAFQCWCETGYELRPDRRSCKALGPEPVLLFANRIDIRQVLPHRSEYTLLLNNLENAIALDFHHRRELVFWSDVTLDRILRANLNGSNVEEVVSTGLESPGGLAVDWVHDKLYWTDSGTSRIEVANLDGAHRKVLLWQNLEKPRAIALHPMEGTIYWTDWGNTPRIEASSMDGSGRRIIADTHLFWPNGLTIDYAGRRMYWVDAKHHVIERANLDGSHRKAVISQGLPHPFAITVFEDSLYWTDWHTKSINSANKFTGKNQEIIRNKLHFPMDIHTLHPQRQPAGKNRCGDNNGGCTHLCLPSGQNYTCACPTGFRKISSHACAQSLDKFLLFARRMDIRRISFDTEDLSDDVIPLADVRSAVALDWDSRDDHVYWTDVSTDTISRAKWDGTGQEVVVDTSLESPAGLAIDWVTNKLYWTDAGTDRIEVANTDGSMRTVLIWENLDRPRDIVVEPMGGYMYWTDWGASPKIERAGMDASGRQVIISSNLTWPNGLAIDYGSQRLYWADAGMKTIEFAGLDGSKRKVLIGSQLPHPFGLTLYGERIYWTDWQTKSIQSADRLTGLDRETLQENLENLMDIHVFHRRRPPVSTPCAMENGGCSHLCLRSPNPSGFSCTCPTGINLLSDGKTCSPGMNSFLIFARRIDIRMVSLDIPYFADVVVPINITMKNTIAIGVDPQEGKVYWSDSTLHRISRANLDGSQHEDIITTGLQTTDGLAVDAIGRKVYWTDTGTNRIEVGNLDGSMRKVLVWQNLDSPRAIVLYHEMGFMYWTDWGENAKLERSGMDGSDRAVLINNNLGWPNGLTVDKASSQLLWADAHTERIEAADLNGANRHTLVSPVQHPYGLTLLDSYIYWTDWQTRSIHRADKGTGSNVILVRSNLPGLMDMQAVDRAQPLGFNKCGSRNGGCSHLCLPRPSGFSCACPTGIQLKGDGKTCDPSPETYLLFSSRGSIRRISLDTSDHTDVHVPVPELNNVISLDYDSVDGKVYYTDVFLDVIRRADLNGSNMETVIGRGLKTTDGLAVDWVARNLYWTDTGRNTIEASRLDGSCRKVLINNSLDEPRAIAVFPRKGYLFWTDWGHIAKIERANLDGSERKVLINTDLGWPNGLTLDYDTRRIYWVDAHLDRIESADLNGKLRQVLVSHVSHPFALTQQDRWIYWTDWQTKSIQRVDKYSGRNKETVLANVEGLMDIIVVSPQRQTGTNACGVNNGGCTHLCFARASDFVCACPDEPDSRPCSLVPGLVPPAPRATGMSEKSPVLPNTPPTTLYSSTTRTRTSLEEVEGRCSERDARLGLCARSNDAVPAAPGEGLHIS

SEQ ID NO: 1574 - protein, 1353 aa, synthetic construct
  REGION 1..1353: note = LRP5 (O75197) ECD
SPLLLFANRRDVRLVDAGGVKLESTIVVSGLEDAAAVDFQFSKGAVYWTDVSEEAIKQTYLNQTGAAVQNVVISGLVSPDGLACDWVGKKLYWTDSETNRIEVANLNGTSRKVLFWQDLDQPRAIALDPAHGYMYWTDWGETPRIERAGMDGSTRKIIVDSDIYWPNGLTIDLEEQKLYWADAKLSFIHRANLDGSFRQKVVEGSLTHPFALTLSGDTLYWTDWQTRSIHACNKRTGGKRKEILSALYSPMDIQVLSQERQPFFHTRCEEDNGGCSHLCLLSPSEPFYTCACPTGVQLQDNGRTCKAGAEEVLLLARRTDLRRISLDTPDFTDIVLQVDDIRHAIAIDYDPLEGYVYWTDDEVRAIRRAYLDGSGAQTLVNTEINDPDGIAVDWVARNLYWTDTGTDRIEVTRLNGTSRKILVSEDLDEPRAIALHPVMGLMYWTDWGENPKIECANLDGQERRVLVNASLGWPNGLALDLQEGKLYWGDAKTDKIEVINVDGTKRRTLLEDKLPHIFGFTLLGDFIYWTDWQRRSIERVHKVKASRDVIIDQLPDLMGLKAVNVAKVVGTNPCADRNGGCSHLCFFTPHATRCGCPIGLELLSDMKTCIVPEAFLVFTSRAAIHRISLETNNNDVAIPLTGVKEASALDFDVSNNHIYWTDVSLKTISRAFMNGSSVEHVVEFGLDYPEGMAVDWMGKNLYWADTGTNRIEVARLDGQFRQVLVWRDLDNPRSLALDPTKGYIYWTEWGGKPRIVRAFMDGTNCMTLVDKVGRANDLTIDYADQRLYWTDLDTNMIESSNMLGQERVVIADDLPHPFGLTQYSDYIYWTDWNLHSIERADKTSGRNRTLIQGHLDFVMDILVFHSSRQDGLNDCMHNNGQCGQLCLAIPGGHRCGCASHYTLDPSSRNCSPPTTFLLFSQKSAISRMIPDDQHSPDLILPLHGLRNVKAIDYDPLDKFIYWVDGRQNIKRAKDDGTQPFVLTSLSQGQNPDRQPHDLSIDIYSRTLFWTCEATNTINVHRLSGEAMGVVLRGDRDKPRAIVVNAERGYLYFTNMQDRAAKIERAALDGTEREVLFTTGLIRPVALVVDNTLGKLFWVDADLKRIESCDLSGANRLTLEDANIVQPLGLTILGKHLYWIDRQQQMIERVEKTTGDKRTRIQGRVAHLTGIHAVEEVSLEEFSAHPCARDNGGCSHICIAKGDGTPRCSCPVHLVLLQNLLTCGEPPTCSPDQFACATGEIDCIPGAWRCDGFPECDDQSDEEGCPVCSAAQFPCARGQCVDLRLRCDGEADCQDRSDEADCDAICLPNQFRCASGQCVLIKQQCDSFPDCIDGSDELMCEITKPPSDDSPAHS

SEQ ID NO: 1575 - protein, 1351 aa, synthetic construct
  REGION 1..1351: note = LRP6 (O75581) ECD
APLLLYANRRDLRLVDATNGKENATIVVGGLEDAAAVDFVFSHGLIYWSDVSEEAIKRTEFNKTESVQNVVVSGLLSPDGLACDWLGEKLYWTDSETNRIEVSNLDGSLRKVLFWQELDQPRAIALDPSSGFMYWTDWGEVPKIERAGMDGSSRFIIINSEIYWPNGLTLDYEEQKLYWADAKLNFIHKSNLDGTNRQAVVKGSLPHPFALTLFEDILYWTDWSTHSILACNKYTGEGLREIHSDIFSPMDIHAFSQQRQPNATNPCGIDNGGCSHLCLMSPVKPFYQCACPTGVKLLENGKTCKDGATELLLLARRTDLRRISLDTPDFTDIVLQLEDIRHAIAIDYDPVEGYIYWTDDEVRAIRRSFIDGSGSQFVVTAQIAHPDGIAVDWVARNLYWTDTGTDRIEVTRLNGTMRKILISEDLEEPRAIVLDPMVGYMYWTDWGEIPKIERAALDGSDRVVLVNTSLGWPNGLALDYDEGKIYWGDAKTDKIEVMNTDGTGRRVLVEDKIPHIFGFTLLGDYVYWTDWQRRSIERVHKRSAEREVIIDQLPDLMGLKATNVHRVIGSNPCAEENGGCSHLCLYRPQGLRCACPIGFELISDMKTCIVPEAFLLFSRRADIRRISLETNNNNVAIPLTGVKEASALDFDVTDNRIYWTDISLKTISRAFMNGSALEHVVEFGLDYPEGMAVDWLGKNLYWADTGTNRIEVSKLDGQHRQVLVWKDLDSPRALALDPAEGFMYWTEWGGKPKIDRAAMDGSERTTLVPNVGRANGLTIDYAKRRLYWTDLDTNLIESSNMLGLNREVIADDLPHPFGLTQYQDYIYWTDWSRRSIERANKTSGQNRTIIQGHLDYVMDILVFHSSRQSGWNECASSNGHCSHLCLAVPVGGFVCGCPAHYSLNADNRTCSAPTTFLLFSQKSAINRMVIDEQQSPDIILPIHSLRNVRAIDYDPLDKQLYWIDSRQNMIRKAQEDGSQGFTVVVSSVPSQNLEIQPYDLSIDIYSRYIYWTCEATNVINVTRLDGRSVGVVLKGEQDRPRAVVVNPEKGYMYFTNLQERSPKIERAALDGTEREVLFFSGLSKPIALALDSRLGKLFWADSDLRRIESSDLSGANRIVLEDSNILQPVGLTVFENWLYWIDKQQQMIEKIDMTGREGRTKVQARIAQLSDIHAVKELNLQEYRQHPCAQDNGGCSHICLVKGDGTTRCSCPMHLVLLQDELSCGEPPTCSPQQFTCFTGEIDCIPVAWRCDGFTECEDHSDELNCPVCSESQFQCASGQCIDGALRCNGDANCQDKSDEKNCEVLCLIDQFRCANGQCIGKHKKCDHNVDCSDKSDELDCYPTEEPAPQA

SEQ ID NO: 1576 - protein, 785 aa, synthetic construct
  REGION 1..785: note = LRP8 (Q14114) ECD
GPAKDCEKDQFQCRNERCIPSVWRCDEDDDCLDHSDEDDCPKKTCADSDFTCDNGHCIHERWKCDGEEECPDGSDESEATCTKQVCPAEKLSCGPTSHKCVPASWRCDGEKDCEGGADEAGCATLCAPHEFQCGNRSCLAAVFVCDGDDDCGDGSDERGCADPACGPREFRCGGDGGGACIPERWVCDRQFDCEDRSDEAAELCGRPGPGATSAPAACATASQFACRSGECVHLGWRCDGDRDCKDKSDEADCPLGTCRGDEFQCGDGTCVLAIKHCNQEQDCPDGSDEAGCLQGLNECLHNNGGCSHICTDLKIGFECTCPAGFQLLDQKTCGDIDECKDPDACSQICVNYKGYFKCECYPGYEMDLLTKNCKAAAGKSPSLIFTNRHEVRRIDLVKRNYSRLIPMLKNVVALDVEVATNRIYWCDLSYRKIYSAYMDKASDPKEQEVLIDEQLHSPEGLAVDWVHKHIYWTDSGNKTISVATVDGGRRRTLFSRNLSEPRAIAVDPLRGFMYWSDWGDQAKIEKSGLNGVDRQTLVSDNIEWPNGITLDLLSQRLYWVDSKLHQLSSIDFSGGNRKTLISSTDFLSHPFGIAVFEDKVFWTDLENEAIFSANRLNGLEISILAENLNNPHDIVIFHELKQPRAPDACELSVQPNGGCEYLCLPAPQISSHSPKYTCACPDTMWLGPDMKRCYRAPQSTSTTTLASTMTRTVPATTRAPGTTVHRSTYQNHSTETPSLTAAVPSSVSVPRAPSISPSTLSPATSNHSQHYANEDSKMGSTVTAA

SEQ ID NO: 1577 - protein, 517 aa, synthetic construct
  REGION 1..517: note = LRRC15 (Q8TF66) ECD
YHGCPSECTCSRASQVECTGARIVAVPTPLPWNAMSLQILNTHITELNESPFLNISALIALRIEKNELSRITPGAFRNLGSLRYLSLANNKLQVLPIGLFQGLDSLESLLLSSNQLLQIQPAHFSQCSNLKELQLHGNHLEYIPDGAFDHLVGLTKLNLGKNSLTHISPRVFQHLGNLQVLRLYENRLTDIPMGTFDGLVNLQELALQQNQIGLLSPGLFHNNHNLQRLYLSNNHISQLPPSVFMQLPQLNRLTLFGNSLKELSPGIFGPMPNLRELWLYDNHISSLPDNVFSNLRQLQVLILSRNQISFISPGAFNGLTELRELSLHTNALQDLDGNVFRMLANLQNISLQNNRLRQLPGNIFANVNGLMAIQLQNNQLENLPLGIFDHLGKLCELRLYDNPWRCDSDILPLRNWLLLNQPRLGTDTVPVCFSPANVRGQSLIIINVNVAVPSVHVPEVPSYPETPWYPDTPSYPDTTSVSSTTELTSPVEDYTDLTTIQVTDDRSVWGMTQAQSG

SEQ ID NO: 1578 - protein, 246 aa, synthetic construct
  REGION 1..246: note = LRRC19 (Q9H756) ECD
SKREVQCNFTEKNYTLIPADIKKDVTILDLSYNQITLNGTDTRVLQTYFLLTELYLIENKVTILHNNGFGNLSSLEILNICRNSIYVIQQGAFLGLNKLKQLYLCQNKIEQLNADVFVPLRSLKLLNLQGNLISYLDVPPLFHLELITLYGNLWNCSCSLFNLQNWLNTSNVTLENENITMCSYPNSLQSYNIKTVPHKAECHSKFPSSVTEDLYIHFQPISNSIFNSSSNNLTRNSEHEPLGKSW

SEQ ID NO: 1579 - protein, 385 aa, synthetic construct
  REGION 1..385: note = LRRC24 (Q50LG9) ECD
AGCPAACRCYSATVECGALRLRVVPLGIPPGTQTLFLQDNNIARLEPGALAPLAALRRLYLHNNSLRALEAGAFRAQPRLLELALTSNRLRGLRSGAFVGLAQLRVLYLAGNQLARLLDFTFLHLPRLQELHLQENSIELLEDQALAGLSSLALLDLSRNQLGTISREALQPLASLQVLRLTENPWRCDCALHWLGAWIKEGGQRLLTSRDRKIMCAEPPRLALQSLLDVSHSSLICIPPSVHVQPLELTANLGEDLRVACQASGYPQPLVTWRKVPQPREGRPRAQAQLEGGLLGLGGHSASDTGSGMLFLSNITLAHAGKYECEASNAGGAARVPFRLLVNASRQQPQQPAQPPPPAARPAGSEPRPEAGSMAFRALGVATQT

SEQ ID NO: 1580 - protein, 145 aa, synthetic construct
  REGION 1..145: note = LRRC25 (Q8N386) ECD
LEPSCTVSSADVDWNAEFSATCLNFSGLSLSLPHNQSLRASNVILLDLSGNGLRELPVTFFAHLQKLEVLNVLRNPLSRVDGALAARCDLDLQADCNCALESWHDIRRDNCSGQKPLLCWDTTSSQHNLSAFLEVSCAPGLASAT

SEQ ID NO: 1581 - protein, 608 aa, synthetic construct
  REGION 1..608: note = LRRC32 (Q14392) ECD
HQDKVPCKMVDKKVSCQVLGLLQVPSVLPPDTETLDLSGNQLRSILASPLGFYTALRHLDLSTNEISFLQPGAFQALTHLEHLSLAHNRLAMATALSAGGLGPLPRVTSLDLSGNSLYSGLLERLLGEAPSLHTLSLAENSLTRLTRHTFRDMPALEQLDLHSNVLMDIEDGAFEGLPRLTHLNLSRNSLTCISDFSLQQLRVLDLSCNSIEAFQTASQPQAEFQLTWLDLRENKLLHFPDLAALPRLIYLNLSNNLIRLPTGPPQDSKGIHAPSEGWSALPLSAPSGNASGRPLSQLLNLDLSYNEIELIPDSFLEHLTSLCFLNLSRNCLRTFEARRLGSLPCLMLLDLSHNALETLELGARALGSLRTLLLQGNALRDLPPYTFANLASLQRLNLQGNRVSPCGGPDEPGPSGCVAFSGITSLRSLSLVDNEIELLRAGAFLHTPLTELDLSSNPGLEVATGALGGLEASLEVLALQGNGLMVLQVDLPCFICLKRLNLAENRLSHLPAWTQAVSLEVLDLRNNSFSLLPGSAMGGLETSLRRLYLQGNPLSCCGNGWLAAQLHQGRVDVDATQDLICRFSSQEEVSLSHVRPEDCEKGGLKNIN

SEQ ID NO: 1582 - protein, 1547 aa, synthetic construct
  REGION 1..1547: note = LRRC37A (A6NMS7) ECD
EAQPLEWVKDPLQLTSNPLGPPESWSSHSSHFPRESPHAPTLPADPWDFDHLGPSASSEMPAPPQESTENLVPFLDTWDSAGEQPLEPEQFLASQQDLKDKLSPQERLPVSPKKLKKDPAQRWSLAEIIGITRQLSTPQSQKQTLQNEYSSTDTPYPGSLPPELRVKSDEPPGPSEQVGPSQFHLEPETQNPETLEDIQSSSLQQEAPAQLPQLLEEEPSSMQQEAPALPPESSMESLTLPNHEVSVQPPGEDQAYYHLPNITVKPADVEVTITSEPTNETESSQAQQETPIQFPEEVEPSATQQEAPIEPPVPPMEHELSISEQQQPVQPSESPREVESSPTQQETPGQPPEHHEVTVSPPGHHQTHHLASPSVSVKPPDVQLTIAAEPSAEVGTSLVHQEATTRLSGSGNDVEPPAIQHGGPPLLPESSEEAGPLAVQQETSFQSPEPINNENPSPTQQEAAAEHPQTAEEGESSLTHQEAPAQTPEFPNVVVAQPPEHSHLTQATVQPLDLGFTITPESKTEVELSPTMKETPTQPPKKVVPQLRVYQGVTNPTPGQDQAQHPVSPSVTVQLLDLGLTITPEPTTEVGHSTPPKRTIVSPKHPEVTLPHPDQVQTQHSHLTRATVQPLDLGFTITPKSMTEVEPSTALMTTAPPPGHPEVTLPPSDKGQAQHSHLTQATVQPLDLELTITTKPTTEVKPSPTTEETSTQPPDLGLAIIPEPTTETGHSTALEKTTAPRPDRVQTLHRSLTEVTGPPTELEPAQDSLVQSESYTQNKALTAPEEHKASTSTNICELCTCGDEMLSCIDLNPEQRLRQVPVPEPNTHNGTFTILNFQGNYISYIDGNVWKAYSWTEKLILRENNLTELHKDSFEGLLSLQYLDLSCNKIQSIERHTFEPLPFLKFINLSCNVITELSFGTFQAWHGMQFLHKLILNHNPLTTVEDPYLFKLPALKYLDMGTTLVPLTTLKNILMMTVELEKLILPSHMACCLCQFKNSIEAVCKTVKLHCNSACLTNTTHCPEEASVGNPEGAFMKVLQARKNYTSTELIVEPEEPSDSSGINLSGFGSEQLDTNDESDFISTLSYILPYFSAVNLDVKSLLLPFIKLPTTGNSLAKIQTVGQNRQRVKRVLMGPRSIQKRHFKEVGRQSIRREQGAQASVENAAEEKRLTSPAPREVEQPHTQQGPEKLAGNAVYTKPSFTQEHKAAVSVLKPFSKGTPSTSSPAKALPQVRDRSKDLTHAISILESAKARVTNTKTSKPIVHARKKYRFHKTRSHVTHRTTKVKKSPKVRKKSYLSRLMLANRLPFSAAKSLINSPSQGAFSSLGDLSPQENPFLEVSALSEHFIEKNNTKHTTARNAFEENDFMENTNMPEGTISENTNYNHPPEADSAGTAFNLGPTVKQTETKWEYNNVGTDLSPEPKSFNYPLLSSPGDQFEIQLTQQLQSLIPNNNVRRLIAHVIRTLKMDCSGAHVQVTCAKLISRTGHLMKLLSGQQEVKASKIEWDTDQWKIENYINESTEAQSEQKEKSLELKKEVPGYGYTDKL

SEQ ID NO: 1583 - protein, 1547 aa, synthetic construct
  REGION 1..1547: note = LRRC37A2 (A6NM11) ECD
EAQPLEWVKDPLQLTSNPLGPPDSWSSHSSHFPRESPHAPTLPADPWDFDHLGPSASSEMPAPPQESTENLVPFLDTWDSAGEQPLEPEQFLASQQDLKDKLSPQERLPVSPKKLKKDPAQRWSLAEIIGITRQLSTPQSQKQTLQNEYSSTDTPYPGSLPPELRVKSDEPPGPSEQVGPSQFHLEPETQNPETLEDIQSSSLQQEAPAQLPQLLEEEPSSMQQEAPALPPESSMESLTLPNHEVSVQPPGEDQAYYHLPNITVKPADVEVTITSEPTNETESSQAQQETPIQFPEEVEPSATQQEAPIEPPVPPMEHELSISEQQQPVQPSESPREVESSPTQQETPGQPPEHHEVTVSPPGHHQTHHLASPSVSVKPPDVQLTIAAEPSAEVGTSLVHQEATTRLSGSGNDVEPPAIQHGGPPLLPESSEEAGPLAVQQETSFQSPEPINNENPSPTQQEAAAEHPQTAEEGESSLTHQEAPAQTPEFPNVVVAQPPEHSHLTQATVQPLDLGFTITPESKTEVELSPTMKETPTQPPKKVVPQLRVYQGVTNPTPGQDQAQHPVSPSVTVQLLDLGLTITPEPTTEVGHSTPPKRTIVSPKHPEVTLPHPDQVQTQHSHLTRATVQPLDLGFTITPKSMTEVEPSTALMTTAPPPGHPEVTLPPSDKGQAQHSHLTQATVQPLDLELTITTKPTTEVKPSPTTEETSTQPPDLGLAIIPEPTTETRHSTALEKTTAPRPDRVQTLHRSLTEVTGPPTELEPAQDSLVQSESYTQNKALTAPEEHKASTSTNICELCTCGDEMLSCIDLNPEQRLRQVPVPEPNTHNGTFTILNFQGNYISYIDGNVWKAYSWTEKLILRENNLTELHKDSFEGLLSLQYLDLSCNKIQSIERHTFEPLPFLKFINLSCNVITELSFGTFQAWHGMQFLHKLILNHNPLTTVEDPYLFKLPALKYLDMGTTLVPLTTLKNILMMTVELEKLILPSHMACCLCQFKNSIEAVCKTVKLHCNSACLTNTTHCPEEASVGNPEGAFMKVLQARKNYTSTELIVEPEEPSDSSGINLSGFGSEQLDTNDESDFISTLSYILPYFSAVNLDVKSLLLPFIKLPTTGNSLAKIQTVGQNRQRVKRVLMGPRSIQKRHFKEVGRQSIRREQGAQASVENAAEEKRLGSPAPREVEQPHTQQGPEKLAGNAVYTKPSFTQEHKAAVSVLKPFSKGAPSTSSPAKALPQVRDRWKDLTHAISILESAKARVTNTKTSKPIVHARKKYRFHKTRSHVTHRTPKVKKSPKVRKKSYLSRLMLANRLPFSAAKSLINSPSQGAFSSLGDLSPQENPFLEVSAPSEHFIENNNTKHTTARNAFEENDFMENTNMPEGTISENTNYNHPHEADSAGTAFNLGPTVKQTETKWEYNNVGTDLSPEPKSFNYPLLSSPGDQFEIQLTQQLQSLIPNNNVRRLIAHVIRTLKMDCSGAHVQVTCAKLISRTGHLMKLLSGQQEVKASKIEWDTDQWKIENYINESTEAQSEQKEKSLELKKEVPGYGYTDKL

SEQ ID NO: 1584 - protein, 1546 aa, synthetic construct
  REGION 1..1546: note = LRRC37A3 (O60309) ECD
EAQPLEWVKDPLQLTSNPLGPPEPWSSHSSHFPRESPHAPTLPADPWDFDHLGPSASSEMPAPPQESTENLVPFLDTWDSAGELPLEPEQFLASQQDLKDKLSPQERLPVSPKKLKKDPAQRWSLAEIIGIIHQLSTPQSQKQTLQNEYSSTDTPYPGSLPPELRVKSDEPPGPSEQVGPSQFHLEPETQNPETLEDIQSSSLQQEAPAQLPQLLEEEPSSMQQEAPALPPESSMESLTLPNHEVSVQPPGEDQAYYHLPNITVKPADVEVTITSEPTNETESSQAQQETPIQFPEEVEPSATQQEAPIEPPVPPMEHELSISEQQQPVQPSESSREVESSPTQQETPGQPPEHHEVTVSPPGHHQTHHLASPSVSVKPPDVQLTIAAEPSAEVGTSLVHQEATTRLSGSGNDVEPPAIQHGGPPLLPESSEEAGPLAVQQETSFQSPEPINNENPSPTQQEAAAEHPQTAEEGESSLTHQEAPAQTPEFPNVVVAQPPEHSHLTQATVQPLDLGFTITPESMTEVELSPTMKETPTQPPKKVVPQLRVYQGVTNPTPGQDQAQHPVSPSVTVQLLDLGLTITPEPTTEVGHSTPPKRTIVSPKHPEVTLPHPDQVQTQHSHLTRATVQPLDLGFTITPKSMTEVEPSTALMTTAPPPGHPEVTLPPSDKGQAQHSHLTQATVQPLDLELTITTKPTTEVKPSPTTEETSTQLPDLGLAIIPEPTTETGHSTALEKTTAPRPDRVQTLHRSLTEVTGPPTELEPAQDSLVQSESYTQNKALTAPEEHKASTSTNICELCTCGDEMLSCIDLNPEQRLRQVPVPEPNTHNGTFTILNFQGNYISYIDGNVWKAYSWTEKLILRENNLTELHKDSFEGLLSLQYLDLSCNKIQSIERHTFEPLPFLKFINLSCNVITELSFGTFQAWHGMQFLHKLILNHNPLTTVEDPYLFKLPALKYLDMGTTLVPLTTLKNILMMTVELEKLIVPSHMACCLCQFKNSIEAVCKTVKLHCNSACLTNTTHCPEEASVGNPEGAFMKVLQARKNYTSTELIIEPEEPSDSSGINLSGFGSEQLDTNDESDVTSTLSYILPYFSAVNLDVKSLLLPFIKLPTTGNSLAKIQTVGKNRQRLNRVLMGPRSIQKRHFKEVGRQSIRREQGAQASVENTAEEKRLGSPAPRELKQPHTQQGPEKLAGNAVYTKPSFTQEHKAAVSVLKPFSKGAPSTSSPAKALPQVRDRWKDLTHAISILESAKARVTNMKTSKPIVHSRKKYRFHKTRSRMTHRTPKVKKSPKVRKKSYLSRLMLSNRLPFSAAKSLINSPSQGAFSSLRDLSPQENPFLEVSAPSEHFIENNNTKDTTARNAFEENVFMENTNMPEGTISENTNYNHPPEADSAGTAFNLGPTVKQTETKWEYNNVGTDLSPEPKSFNYPLLSSPGDQFEIQLTQQLQSVIPNNNVRRLIAHVIRTLKMDCSGAHVQVTCAKLVSRTGHLMKLLSGQQEVKASKIEWDTDQWKTENYINESTEAQSEQKEKSLEFTKELPGYGYTKK

SEQ ID NO: 1585 - protein, 878 aa, synthetic construct
  REGION 1..878: note = LRRC37B (Q96QE4) ECD
LVWVKDPLQLTSNPLGPPEPWSSRSSHLPWESPHAPAPPAAPGDFDYLGPSASSQMSALPQEPTENLAPFLKELDSAGELPLGPEPFLAAHQDLNDKRTPEERLPEVVPLLNRDQNQALVQLPRLKWVQTTDLDRAAGHQADEILVPLDSKVSRPTKFVVSPKNLKKDLAERWSLPEIVGIPHQLSKPQRQKQTLPDDYLSMDTLYPGSLPPELRVNADEPPGPPEQVGLSQFHLEPKSQNPETLEDIQSSSLQEEAPAQLLQLPQEVEPSTQQEAPALPPESSMESLAQTPLNHEVTVQPPGEDQAHYNLPKFTVKPADVEVTMTSEPKNETESTQAQQEAPIQPPEEAEPSSTALRTTDPPPEHPEVTLPPSDKGQAQHSHLTEATVQPLDLELSITTEPTTEVKPSPTTEETSAQPPDPGLAITPEPTTEIGHSTALEKTRAPHPDQVQTLHRSLTEVTGPPTKLESSQDSLVQSETAPEEQKASTSTNICELCTCGDETLSCVGLSPKQRLRQVPVPEPDTYNGIFTTLNFQGNYISYLDGNVWKAYSWTEKLILSENYLTELPKDSFEGLLYLQYLDLSCNKIRYIERQTFESLPFLQYINLGCNLITKLSLGTFQAWHGMQFLHNLILNRNPLTTVEDPYLFELPALKYLDMGTTHITLTTLKNILTMTVELEKLILPSHMACCLCQFKNSIEAVCKTVKLHCNTACLTNSIHCPEEASVGNPEGAFMKMLQARKQHMSTQLTIESEAPSDSSGINLSGFGGDQLEIQLTEQLRSLIPNEDVRKFMSHVIRTLKMECSETHVQGSCAKLMLRTGLLMKLLSEQQEAKALNVEWDTDQQKTNYINENMEQNEQKEQKSSELMKEVPGDDYKNK

SEQ ID NO: 1586 - protein, 222 aa, synthetic construct
  REGION 1..222: note = LRRC38 (Q5VT99) ECD
CPAGCACTDPHTVDCRDRGLPSVPDPFPLDVRKLLVAGNRIQRIPEDFFIFYGDLVYLDFRNNSLRSLEEGTFSGSAKLVFLDLSYNNLTQLGAGAFRSAGRLVKLSLANNNLVGVHEDAFETLESLQVLELNDNNLRSLSVAALAALPALRSLRLDGNPWLCDCDFAHLFSWIQENASKLPKGLDEIQCSLPMESRRISLRELSEASFSECRFSLSLTDLC

SEQ ID NO: 1587 - protein, 171 aa, synthetic construct
  REGION 1..171: note = LRRC3B (Q96PB8) ECD
CPKGCLCSSSGGLNVTCSNANLKEIPRDLPPETVLLYLDSNQITSIPNEIFKDLHQLRVLNLSKNGIEFIDEHAFKGVAETLQTLDLSDNRIQSVHKNAFNNLKARARIANNPWHCDCTLQQVLRSMASNHETAHNVICKTSVLDEHAGRPFLNAANDADLCNLPKKTTDY

SEQ ID NO: 1588 - protein, 489 aa, synthetic construct
  REGION 1..489: note = LRRC4 (Q9HBW1) ECD
ASAGPQNCPSVCSCSNQFSKVVCTRRGLSEVPQGIPSNTRYLNLMENNIQMIQADTFRHLHHLEVLQLGRNSIRQIEVGAFNGLASLNTLELFDNWLTVIPSGAFEYLSKLRELWLRNNPIESIPSYAFNRVPSLMRLDLGELKKLEYISEGAFEGLFNLKYLNLGMCNIKDMPNLTPLVGLEELEMSGNHFPEIRPGSFHGLSSLKKLWVMNSQVSLIERNAFDGLASLVELNLAHNNLSSLPHDLFTPLRYLVELHLHHNPWNCDCDILWLAWWLREYIPTNSTCCGRCHAPMHMRGRYLVEVDQASFQCSAPFIMDAPRDLNISEGRMAELKCRTPPMSSVKWLLPNGTVLSHASRHPRISVLNDGTLNFSHVLLSDTGVYTCMVTNVAGNSNASAYLNVSTAELNTSNYSFFTTVTVETTEISPEDTTRKYKPVPTTSTGYQPAYTTSTTVLIQTTRVPKQVAVPATDTTDKMQTSLDEVMKTTK

SEQ ID NO: 1589 - protein, 541 aa, synthetic construct
  REGION 1..541: note = LRRC4B (Q9NT99) ECD
AGGGGVAVTSAAGGGSPPATSCPVACSCSNQASRVICTRRDLAEVPASIPVNTRYLNLQENGIQVIRTDTFKHLRHLEILQLSKNLVRKIEVGAFNGLPSLNTLELFDNRLTTVPTQAFEYLSKLRELWLRNNPIESIPSYAFNRVPSLRRLDLGELKRLEYISEAAFEGLVNLRYLNLGMCNLKDIPNLTALVRLEELELSGNRLDLIRPGSFQGLTSLRKLWLMHAQVATIERNAFDDLKSLEELNLSHNNLMSLPHDLFTPLHRLERVHLNHNPWHCNCDVLWLSWWLKETVPSNTTCCARCHAPAGLKGRYIGELDQSHFTCYAPVIVEPPTDLNVTEGMAAELKCRTGTSMTSVNWLTPNGTLMTHGSYRVRISVLHDGTLNFTNVTVQDTGQYTCMVTNSAGNTTASATLNVSAVDPVAAGGTGSGGGGPGGSGGVGGGSGGYTYFTTVTVETLETQPGEEALQPRGTEKEPPGPTTDGVWGGGRPGDAAGPASSSTTAPAPRSSRPTEKAFTVPITDVTENALKDLDDVMKTTK

SEQ ID NO: 1590 - protein, 483 aa, synthetic construct
  REGION 1..483: note = LRRC4C (Q9HCJ2) ECD
QTCPSVCSCSNQFSKVICVRKNLREVPDGISTNTRLLNLHENQIQIIKVNSFKHLRHLEILQLSRNHIRTIEIGAFNGLANLNTLELFDNRLTTIPNGAFVYLSKLKELWLRNNPIESIPSYAFNRIPSLRRLDLGELKRLSYISEGAFEGLSNLRYLNLAMCNLREIPNLTPLIKLDELDLSGNHLSAIRPGSFQGLMHLQKLWMIQSQIQVIERNAFDNLQSLVEINLAHNNLTLLPHDLFTPLHHLERIHLHHNPWNCNCDILWLSWWIKDMAPSNTACCARCNTPPNLKGRYIGELDQNYFTCYAPVIVEPPADLNVTEGMAAELKCRASTSLTSVSWITPNGTVMTHGAYKVRIAVLSDGTLNFTNVTVQDTGMYTCMVSNSVGNTTASATLNVTAATTTPFSYFSTVTVETMEPSQDEARTTDNNVGPTPVVDWETTNVTTSLTPQSTRSTEKTFTIPVTDINSGIPGIDEVMKTTK

SEQ ID NO: 1591 - protein, 221 aa, synthetic construct
  REGION 1..221: note = LRRC52 (Q8N7C0) ECD
SKCPNNCLCQAQEVICTGKQLTEYPLDIPLNTRRLFLNENRITSLPAMHLGLLSDLVYLDCQNNRIREVMDYTFIGVFKLIYLDLSSNNLTSISPFTFSVLSNLVQLNIANNPHLLSLHKFTFANTTSLRYLDLRNTGLQTLDSAALYHLTTLETLFLSGNPWKCNCSFLDFAIFLIVFHMDPSDDLNATCVEPTELTGWPITRVGNPLRYMCITHLDHKD

SEQ ID NO: 1592 - protein, 606 aa, synthetic construct
  REGION 1..606: note = LRRN1 (Q6UXK5) ECD
SIQNSECPQLCVCEIRPWFTPQSTYREATTVDCNDLRLTRIPSNLSSDTQVLLLQSNNIAKTVDELQQLFNLTELDFSQNNFTNIKEVGLANLTQLTTLHLEENQITEMTDYCLQDLSNLQELYINHNQISTISAHAFAGLKNLLRLHLNSNKLKVIDSRWFDSTPNLEILMIGENPVIGILDMNFKPLANLRSLVLAGMYLTDIPGNALVGLDSLESLSFYDNKLVKVPQLALQKVPNLKFLDLNKNPIHKIQEGDFKNMLRLKELGINNMGELVSVDRYALDNLPELTKLEATNNPKLSYIHRLAFRSVPALESLMLNNNALNAIYQKTVESLPNLREISIHSNPLRCDCVIHWINSNKTNIRFMEPLSMFCAMPPEYKGHQVKEVLIQDSSEQCLPMISHDSFPNRLNVDIGTTVFLDCRAMAEPEPEIYWVTPIGNKITVETLSDKYKLSSEGTLEISNIQIEDSGRYTCVAQNVQGADTRVATIKVNGTLLDGTQVLKIYVKQTESHSILVSWKVNSNVMTSNLKWSSATMKIDNPHITYTARVPVDVHEYNLTHLQPSTDYEVCLTVSNIHQQTQKSCVNVTTKNAAFAVDISDQETSTA

SEQ ID NO: 1593 - protein, 612 aa, synthetic construct
  REGION 1..612: note = LRRN2 (O75325) ECD
AVPVVPWHVPCPPQCACQIRPWYTPRSSYREATTVDCNDLFLTAVPPALPAGTQTLLLQSNSIVRVDQSELGYLANLTELDLSQNSFSDARDCDFHALPQLLSLHLEENQLTRLEDHSFAGLASLQELYLNHNQLYRIAPRAFSGLSNLLRLHLNSNLLRAIDSRWFEMLPNLEILMIGGNKVDAILDMNFRPLANLRSLVLAGMNLREISDYALEGLQSLESLSFYDNQLARVPRRALEQVPGLKFLDLNKNPLQRVGPGDFANMLHLKELGLNNMEELVSIDKFALVNLPELTKLDITNNPRLSFIHPRAFHHLPQMETLMLNNNALSALHQQTVESLPNLQEVGLHGNPIRCDCVIRWANATGTRVRFIEPQSTLCAEPPDLQRLPVREVPFREMTDHCLPLISPRSFPPSLQVASGESMVLHCRALAEPEPEIYWVTPAGLRLTPAHAGRRYRVYPEGTLELRRVTAEEAGLYTCVAQNLVGADTKTVSVVVGRALLQPGRDEGQGLELRVQETHPYHILLSWVTPPNTVSTNLTWSSASSLRGQGATALARLPRGTHSYNITRLLQATEYWACLQVAFADAHTQLACVWARTKEATSCHRALGDRPG

SEQ ID NO: 1594 - protein, 606 aa, synthetic construct
  REGION 1..606: note = LRRN3 (Q9H3W5) ECD
VDKKVDCPRLCTCEIRPWFTPRSIYMEASTVDCNDLGLLTFPARLPANTQILLLQTNNIAKIEYSTDFPVNLTGLDLSQNNLSSVTNINVKKMPQLLSVYLEENKLTELPEKCLSELSNLQELYINHNLLSTISPGAFIGLHNLLRLHLNSNRLQMINSKWFDALPNLEILMIGENPIIRIKDMNFKPLINLRSLVIAGINLTEIPDNALVGLENLESISFYDNRLIKVPHVALQKVVNLKFLDLNKNPINRIRRGDFSNMLHLKELGINNMPELISIDSLAVDNLPDLRKIEATNNPRLSYIHPNAFFRLPKLESLMLNSNALSALYHGTIESLPNLKEISIHSNPIRCDCVIRWMNMNKTNIRFMEPDSLFCVDPPEFQGQNVRQVHFRDMMEICLPLIAPESFPSNLNVEAGSYVSFHCRATAEPQPEIYWITPSGQKLLPNTLTDKFYVHSEGTLDINGVTPKEGGLYTCIATNLVGADLKSVMIKVDGSFPQDNNGSLNIKIRDIQANSVLVSWKASSKILKSSVKWTAFVKTENSHAAQSARIPSDVKVYNLTHLNPSTEYKICIDIPTIYQKNRKKCVNVTTKGLHPDQKEYEKNNTTT

SEQ ID NO: 1595 - protein, 661 aa, synthetic construct
  REGION 1..661: note = LRRN4 (Q8WUT4) ECD
DPPQEKVPLFRVTQQGPWGSSGSNATDSPCEGLPAADATALTLANRNLERLPGCLPRTLRSLDASHNLLRALSTSELGHLEQLQVLTLRHNRIAALRWGPGGPAGLHTLDLSYNQLAALPPCTGPALSSLRALALAGNPLRALQPRAFACFPALQLLNLSCTALGRGAQGGIAEAAFAGEDGAPLVTLEVLDLSGTFLERVESGWIRDLPKLTSLYLRKMPRLTTLEGDIFKMTPNLQQLDCQDSPALASVATHIFQDTPHLQVLLFQNCNLSSFPPWTLDSSQVLSINLFGNPLTCSCDLSWLLTDAKRTVLSRAADTMCAPAAGSSGPFSASLSLSQLPGVCQSDQSTTLGASHPPCFNRSTYAQGTTVAPSAAPATRPAGDQQSVSKAPNVGSRTIAAWPHSDAREGTAPSTTNSVAGHSNSSVFPRAASTTRTQHRGEHAPELVLEPDISAASTPLASKLLGPFPTSWDRSISSPQPGQRTHATPQAPNPSLSEGEIPVLLLDDYSEEEEGRKEEVGTPHQDVPCDYHPCKHLQTPCAELQRRWRCRCPGLSGEDTIPDPPRLQGVTETTDTSALVHWCAPNSVVHGYQIRYSAEGWAGNQSVVGVIYATARQHPLYGLSPGTTYRVCVLAANRAGLSQPRSSGWRSPCAAFTTKPS

SEQ ID NO: 1596 - protein, 172 aa, synthetic construct
  REGION 1..172: note = LRRN4CL (Q8ND94) ECD
LAPQDFEEEEADETETAWPPLPAVPCDYDHCRHLQVPCKELQRVGPAACLCPGLSSPAQPPDPPRMGEVRIAAEEGRAVVHWCAPFSPVLHYWLLLWDGSEAAQKGPPLNATVRRAELKGLKPGGIYVVCVVAANEAGASRVPQAGGEGLEGADIPAFGPCSRLAVPPNPRT

SEQ ID NO: 1597 - protein, 389 aa, synthetic construct
  REGION 1..389: note = LRRTM2 (O43300) ECD
CPPKCRCEKLLFYCDSQGFHSVPNATDKGSLGLSLRHNHITELERDQFASFSQLTWLHLDHNQISTVKEDAFQGLYKLKELILSSNKIFYLPNTTFTQLINLQNLDLSFNQLSSLHPELFYGLRKLQTLHLRSNSLRTIPVRLFWDCRSLEFLDLSTNRLRSLARNGFAGLIKLRELHLEHNQLTKINFAHFLRLSSLHTLFLQWNKISNLTCGMEWTWGTLEKLDLTGNEIKAIDLTVFETMPNLKILLMDNNKLNSLDSKILNSLRSLTTVGLSGNLWECSARICALASWLGSFQGRWEHSILCHSPDHTQGEDILDAVHGFQLCWNLSTTVTVMATTYRDPTTEYTKRISSSSYHVGDKEIPTTAGIAVTTEEHFPEPDNAIFTQR

SEQ ID NO: 1598 - protein, 389 aa, synthetic construct
  REGION 1..389: note = LRRTM3 (Q86VH5) ECD
ERGCPKGCRCEGKMVYCESQKLQEIPSSISAGCLGLSLRYNSLQKLKYNQFKGLNQLTWLYLDHNHISNIDENAFNGIRRLKELILSSNRISYFLNNTFRPVTNLRNLDLSYNQLHSLGSEQFRGLRKLLSLHLRSNSLRTIPVRIFQDCRNLELLDLGYNRIRSLARNVFAGMIRLKELHLEHNQFSKLNLALFPRLVSLQNLYLQWNKISVIGQTMSWTWSSLQRLDLSGNEIEAFSGPSVFQCVPNLQRLNLDSNKLTFIGQEILDSWISLNDISLAGNIWECSRNICSLVNWLKSFKGLRENTIICASPKELQGVNVIDAVKNYSICGKSTTERFDLARALPKPTFKPKLPRPKHESKPPLPPTVGATEPGPETDADAEHISFHK

SEQ ID NO: 1599 - protein, 394 aa, synthetic construct
  REGION 1..394: note = LRRTM4 (Q86VH4) ECD
QRACPKNCRCDGKIVYCESHAFADIPENISGGSQGLSLRFNSIQKLKSNQFAGLNQLIWLYLDHNYISSVDEDAFQGIRRLKELILSSNKITYLHNKTFHPVPNLRNLDLSYNKLQTLQSEQFKGLRKLIILHLRSNSLKTVPIRVFQDCRNLDFLDLGYNRLRSLSRNAFAGLLKLKELHLEHNQFSKINFAHFPRLFNLRSIYLQWNRIRSISQGLTWTWSSLHNLDLSGNDIQGIEPGTFKCLPNLQKLNLDSNKLTNISQETVNAWISLISITLSGNMWECSRSICPLFYWLKNFKGNKESTMICAGPKHIQGEKVSDAVETYNICSEVQVVNTERSHLVPQTPQKPLIIPRPTIFKPDVTQSTFETPSPSPGFQIPGAEQEYEHVSFHK

SEQ ID NO: 1600 - protein, 261 aa, synthetic construct
  REGION 1..261: note = LRTM1 (Q9HBL6) ECD
QSSTNFVDCSQQGLAEIPSHLPPQTRTLHLQDNQIHHLPAFAFRSVPWLMTLNLSNNSLSNLAPGAFHGLQHLQVLNLTQNSLLSLESRLFHSLPQLRELDLSSNNISHLPTSLGETWENLTILAVQQNQLQQLDRALLESMPSVRLLLLKDNLWKCNCHLLGLKLWLEKFVYKGGLTDGIICESPDTWKGKDLLRIPHELYQPCPLPAPDPVSSQAQWPGSAHGVVLRPPENHNAGERELLECELKPKPRPANLRHAIAT

SEQ ID NO: 1601 - protein, 275 aa, synthetic construct
  REGION 1..275: note = LRTM2 (Q8N967) ECD
LPTCPFSCKCDSRSLEVDCSGLGLTTVPPDVPAATRTLLLLNNKLSALPSWAFANLSSLQRLDLSNNFLDRLPRSIFGDLTNLTELQLRNNSIRTLDRDLLRHSPLLRHLDLSINGLAQLPPGLFDGLLALRSLSLRSNRLQNLDRLTFEPLANLQLLQVGDNPWECDCNLREFKHWMEWFSYRGGRLDQLACTLPKELRGKDMRMVPMEMFNYCSQLEDENSSAGLDIPGPPCTKASPEPAKPKPGAEPEPEPSTACPQKQRHRPASVRRAMGT

SEQ ID NO: 1602 - protein, 197 aa, synthetic construct
  REGION 1..197: note = LTBR (P36941) ECD
QAVPPYASENQTCRDQEKEYYEPQHRICCSRCPPGTYVSAKCSRIRDTVCATCAENSYNEHWNYLTICQLCRPCDPVMGLEEIAPCTSKRKTQCRCQPGMFCAAWALECTHCELLSDCPPGTEAELKDEVGKGNNHCVPCKAGHFQNTSSPSARCQPHTRCENQGLVEAAPGTAQSDTTCKNPLEPLPPEMSGTMLM

SEQ ID NO: 1603 - protein, 408 aa, synthetic construct
  REGION 1..408: note = LTK (P29376) ECD
ILCSSPGSQETFLRSSPLPLASPSPRDPKVSAPPSILEPASPLNSPGTEGSWLFSTCGASGRHGPTQTQCDGAYAGTSVVVTVGAAGQLRGVQLWRVPGPGQYLISAYGAAGGKGAKNHLSRAHGVFVSAIFSLGLGESLYILVGQQGEDACPGGSPESQLVCLGESRAVEEHAAMDGSEGVPGSRRWAGGGGGGGGATYVFRVRAGELEPLLVAAGGGGRAYLRPRDRGRTQASPEKLENRSEAPGSGGRGGAAGGGGGWTSRAPSPQAGRSLQEGAEGGQGCSEAWATLGWAAAGGFGGGGGACTAGGGGGGYRGGDASETDNLWADGEDGVSFIHPSSELFLQPLAVTENHGEVEIRRHLNCSHCPLRDCQWQAELQLAECLCPEGMELAVDNVTCMDLHKPPGP

SEQ ID NO: 1604 - protein, 219 aa, synthetic construct
  REGION 1..219: note = LY6G6F (Q5SQ64) ECD
ADNMQAIYVALGEAVELPCPSPPTLHGDEHLSWFCSPAAGSFTTLVAQVQVGRPAPDPGKPGRESRLRLLGNYSLWLEGSKEEDAGRYWCAVLGQHHNYQNWRVYDVLVLKGSQLSARAADGSPCNVLLCSVVPSRRMDSVTWQEGKGPVRGRVQSFWGSEAALLLVCPGEGLSEPRSRRPRIIRCLMTHNKGVSFSLAASIDASPALCAPSTGWDMPW

SEQ ID NO: 1605 - protein, 1639 aa, synthetic construct
  REGION 1..1639: note = LY75 (O60449) ECD
SGRAANDPFTIVHGNTGKCIKPVYGWIVADDCDETEDKLWKWVSQHRLFHLHSQKCLGLDITKSVNELRMFSCDSSAMLWWKCEHHSLYGAARYRLALKDGHGTAISNASDVWKKGGSEESLCDQPYHEIYTRDGNSYGRPCEFPFLIDGTWHHDCILDEDHSGPWCATTLNYEYDRKWGICLKPENGCEDNWEKNEQFGSCYQFNTQTALSWKEAYVSCQNQGADLLSINSAAELTYLKEKEGIAKIFWIGLNQLYSARGWEWSDHKPLNFLNWDPDRPSAPTIGGSSCARMDAESGLWQSFSCEAQLPYVCRKPLNNTVELTDVWTYSDTRCDAGWLPNNGFCYLLVNESNSWDKAHAKCKAFSSDLISIHSLADVEVVVTKLHNEDIKEEVWIGLKNINIPTLFQWSDGTEVTLTYWDENEPNVPYNKTPNCVSYLGELGQWKVQSCEEKLKYVCKRKGEKLNDASSDKMCPPDEGWKRHGETCYKIYEDEVPFGTNCNLTITSRFEQEYLNDLMKKYDKSLRKYFWTGLRDVDSCGEYNWATVGGRRRAVTFSNWNFLEPASPGGCVAMSTGKSVGKWEVKDCRSFKALSICKKMSGPLGPEEASPKPDDPCPEGWQSFPASLSCYKVFHAERIVRKRNWEEAERFCQALGAHLSSFSHVDEIKEFLHFLTDQFSGQHWLWIGLNKRSPDLQGSWQWSDRTPVSTIIMPNEFQQDYDIRDCAAVKVFHRPWRRGWHFYDDREFIYLRPFACDTKLEWVCQIPKGRTPKTPDWYNPDRAGIHGPPLIIEGSEYWFVADLHLNYEEAVLYCASNHSFLATITSFVGLKAIKNKIANISGDGQKWWIRISEWPIDDHFTYSRYPWHRFPVTFGEECLYMSAKTWLIDLGKPTDCSTKLPFICEKYNVSSLEKYSPDSAAKVQCSEQWIPFQNKCFLKIKPVSLTFSQASDTCHSYGGTLPSVLSQIEQDFITSLLPDMEATLWIGLRWTAYEKINKWTDNRELTYSNFHPLLVSGRLRIPENFFEEESRYHCALILNLQKSPFTGTWNFTSCSERHFVSLCQKYSEVKSRQTLQNASETVKYLNNLYKIIPKTLTWHSAKRECLKSNMQLVSITDPYQQAFLSVQALLHNSSLWIGLFSQDDELNFGWSDGKRLHFSRWAETNGQLEDCVVLDTDGFWKTVDCNDNQPGAICYYSGNETEKEVKPVDSVKCPSPVLNTPWIPFQNCCYNFIITKNRHMATTQDEVHTKCQKLNPKSHILSIRDEKENNFVLEQLLYFNYMASWVMLGITYRNKSLMWFDKTPLSYTHWRAGRPTIKNEKFLAGLSTDGFWDIQTFKVIEEAVYFHQHSILACKIEMVDYKEEYNTTLPQFMPYEDGIYSVIQKKVTWYEALNMCSQSGGHLASVHNQNGQLFLEDIVKRDGFPLWVGLSSHDGSESSFEWSDGSTFDYIPWKGQTSPGNCVLLDPKGTWKHEKCNSVKDGAICYKPTKSKKLSRLTYSSRCPAAKENGSRWIQYKGHCYKSDQALHSFSEAKKLCSKHDHSATIVSIKDEDENKFVSRLMRENNNITMRVWLGLSQHSVDQSWSWLDGSEVTFVKWENKSKSGVGRCSMLIASNETWKKVECEHGFGRVVCKVPLGPD

SEQ ID NO: 1606 - protein, 407 aa, synthetic construct
  REGION 1..407: note = LY9 (Q9HBG7) ECD
KDSAPTVVSGILGGSVTLPLNISVDTEIENVIWIGPKNALAFARPKENVTIMVKSYLGRLDITKWSYSLCISNLTLNDAGSYKAQINQRNFEVTTEEEFTLFVYEQLQEPQVTMKSVKVSENFSCNITLMCSVKGAEKSVLYSWTPREPHASESNGGSILTVSRTPCDPDLPYICTAQNPVSQRSSLPVHVGQFCTDPGASRGGTTGETVVGVLGEPVTLPLALPACRDTEKVVWLFNTSIISKEREEAATADPLIKSRDPYKNRVWVSSQDCSLKISQLKIEDAGPYHAYVCSEASSVTSMTHVTLLIYRRLRKPKITWSLRHSEDGICRISLTCSVEDGGNTVMYTWTPLQKEAVVSQGESHLNVSWRSSENHPNLTCTASNPVSRSSHQFLSENICSGPERNTK

SEQ ID NO: 1607 - protein, 219 aa, synthetic construct
  REGION 1..219: note = LYVE1 (Q9Y5Y7) ECD
LVQGSLRAEELSIQVSCRIMGITLVSKKANQQLNFTEAKEACRLLGLSLAGKDQVETALKASFETCSYGWVGDGFVVISRISPNPKCGKNGVGVLIWKVPVSRQFAAYCYNSSDTWTNSCIPEIITTKDPIFNTQTATQTTEFIVSDSTYSVASPYSTIPAPTTTPPAPASTSIPRRKKLICVTEVFMETSTMSTETEPFVENKAAFKNEAAGFGGVPT

SEQ ID NO: 1608 - protein, 159 aa, synthetic construct
  REGION 1..159: note = M6PR (P20645) ECD
TEEKTCDLVGEKGKESEKELALVKRLKPLFNKSFESTVGQGSDTYIYIFRVCREAGNHTSGAGLVQINKSNGKETVVGRLNETHIFNGSNWIMLIYKGGDEYDNHCGKEQRRAVVMISCNRHTLADNFNPVSEERGKVQDCFYLFEMDSSLACSPEISH

SEQ ID NO: 1609 - protein, 497 aa, synthetic construct
  REGION 1..497: note = MAG (P20916) ECD
GHWGAWMPSSISAFEGTCVSIPCRFDFPDELRPAVVHGVWYFNSPYPKNYPPVVFKSRTQVVHESFQGRSRLLGDLGLRNCTLLLSNVSPELGGKYYFRGDLGGYNQYTFSEHSVLDIVNTPNIVVPPEVVAGTEVEVSCMVPDNCPELRPELSWLGHEGLGEPAVLGRLREDEGTWVQVSLLHFVPTREANGHRLGCQASFPNTTLQFEGYASMDVKYPPVIVEMNSSVEAIEGSHVSLLCGADSNPPPLLTWMRDGTVLREAVAESLLLELEEVTPAEDGVYACLAENAYGQDNRTVGLSVMYAPWKPTVNGTMVAVEGETVSILCSTQSNPDPILTIFKEKQILSTVIYESELQLELPAVSPEDDGEYWCVAENQYGQRATAFNLSVEFAPVLLLESHCAAARDTVQCLCVVKSNPEPSVAFELPSRNVTVNESEREFVYSERSGLVLTSILTLRGQAQAPPRVICTARNLYGAKSLELPFQGAHRLMWAKIGP

SEQ ID NO: 1610 - protein, 1129 aa, synthetic construct
  REGION 1..1129: note = MAMDC4 (Q6UXC1) ECD
WVPNHCRSPGQAVCNFVCDCRDCSDEAQCGYHGASPTLGAPFACDFEQDPCGWRDISTSGYSWLRDRAGAALEGPGPHSDHTLGTDLGWYMAVGTHRGKEASTAALRSPTLREAASSCKLRLWYHAASGDVAELRVELTHGAETLTLWQSTGPWGPGWQELAVTTGRIRGDFRVTFSATRNATHRGAVALDDLEFWDCGLPTPQANCPPGHHHCQNKVCVEPQQLCDGEDNCGDLSDENPLTCGRHIATDFETGLGPWNRSEGWSRNHRAGGPERPSWPRRDHSRNSAQGSFLVSVAEPGTPAILSSPEFQASGTSNCSLVFYQYLSGSEAGCLQLFLQTLGPGAPRAPVLLRRRRGELGTAWVRDRVDIQSAYPFQILLAGQTGPGGVVGLDDLILSDHCRPVSEVSTLQPLPPGPRAPAPQPLPPSSRLQDSCKQGHLACGDLCVPPEQLCDFEEQCAGGEDEQACGTTDFESPEAGGWEDASVGRLQWRRVSAQESQGSSAAAAGHFLSLQRAWGQLGAEARVLTPLLGPSGPSCELHLAYYLQSQPRGFLALVVVDNGSRELAWQALSSSAGIWKVDKVLLGARRRPFRLEFVGLVDLDGPDQQGAGVDNVTLRDCSPTVTTERDREVSCNFERDTCSWYPGHLSDTHWRWVESRGPDHDHTTGQGHFVLLDPTDPLAWGHSAHLLSRPQVPAAPTECLSFWYHLHGPQIGTLRLAMRREGEETHLWSRSGTQGNRWHEAWATLSHQPGSHAQYQLLFEGLRDGYHGTMALDDVAVRPGPCWAPNYCSFEDSDCGFSPGGQGLWRRQANASGHAAWGPPTDHTTETAQGHYMVVDTSPDALPRGQTASLTSKEHRPLAQPACLTFWYHGSLRSPGTLRVYLEERGRHQVLSLSAHGGLAWRLGSMDVQAERAWRVVFEAVAAGVAHSYVALDDLLLQDGPCPQPGSCDFESGLCGWSHLAWPGLGGYSWDWGGGATPSRYPQPPVDHTLGTEAGHFAFFETGVLGPGGRAAWLRSEPLPATPASCLRFWYHMGFPEHFYKGELKVLLHSAQGQLAVWGAGGHRRHQWLEAQVEVASAKEFQIVFEATLGGQPALGPIALDDVEYLAGQHCQQPAPSPGNTAAPGS

SEQ ID NO: 1611 - protein, 359 aa, synthetic construct
  REGION 1..359: note = MANSC1 (Q9H8J5) ECD
QNCLKKSLEDVVIDIQSSLSKGIRGNEPVYTSTQEDCINSCCSTKNISGDKACNLMIFDTRKTARQPNCYLFFCPNEEACPLKPAKGLMSYRIITDFPSLTRNLPSQELPQEDSLLHGQFSQAVTPLAHHHTDYSKPTDISWRDTLSQKFGSSDHLEKLFKMDEASAQLLAYKEKGHSQSSQFSSDQEIAHLLPENVSALPATVAVASPHTTSATPKPATLLPTNASVTPSGTSQPQLATTAPPVTTVTSQPPTTLISTVFTRAAATLQAMATTAVLTTTFQAPTDSKGSLETIPFTEISNLTLNTGNVYNPTALSMSNVESSTMNKTASWEGREASPGSSSQGSVPENQYGLPFEKWL

SEQ ID NO: 1612 - protein, 260 aa, synthetic construct
  REGION 1..260: note = MANSC4 (A6NHS7) ECD
SPTIFYRDCWIRRFPGLLINLEESQKLGAQFLKYYSESTGQKCSRSCCLRKDVSCNLAVFYHSPIHDNINCLHVHCPTLESCILEPGTSAILYNITDGIDPDLLVFEQSPTYLNTRSSSNRWDRLRILKAMNLDKQTTTINGMLPSTEAPSSTTHQDLVVNTNSTSYSKELTTDFWARFTSLNESITTKINKVSPSTDFISNPDNKTISPFFEPIDTKLSHMPVPPGLNSSKQLLNKTKGYNSRNHTSANEDEVSVTSKT

SEQ ID NO: 1613 - protein, 536 aa, synthetic construct
  REGION 1..536: note = MCAM (P43121) ECD
VPGEAEQPAPELVEVEVGSTALLKCGLSQSQGNLSHVDWFSVHKEKRTLIFRVRQGQGQSEPGEYEQRLSLQDRGATLALTQVTPQDERIFLCQGKRPRSQEYRIQLRVYKAPEEPNIQVNPLGIPVNSKEPEEVATCVGRNGYPIPQVIWYKNGRPLKEEKNRVHIQSSQTVESSGLYTLQSILKAQLVKEDKDAQFYCELNYRLPSGNHMKESREVTVPVFYPTEKVWLEVEPVGMLKEGDRVEIRCLADGNPPPHFSISKQNPSTREAEEETTNDNGVLVLEPARKEHSGRYECQGLDLDTMISLLSEPQELLVNYVSDVRVSPAAPERQEGSSLTLTCEAESSQDLEFQWLREETGQVLERGPVLQLHDLKREAGGGYRCVASVPSIPGLNRTQLVNVAIFGPPWMAFKERKVWVKENMVLNLSCEASGHPRPTISWNVNGTASEQDQDPQRVLSTLNVLVTPELLETGVECTASNDLGKNTSILFLELVNLTTLTPDSNTTTGLSTSTASPHTRANSTSTERKLPEPESRG

SEQ ID NO: 1614 - protein, 832 aa, synthetic construct
  REGION 1..832: note = MEGF10 (Q96KG7) ECD
LNLEDPNVCSHWESYSVTVQESYPHPFDQIYYTSCTDILNWFKCTRHRVSYRTAYRHGEKTMYRRKSQCCPGFYESGEMCVPHCADKCVHGRCIAPNTCQCEPGWGGTNCSSACDGDHWGPHCTSRCQCKNGALCNPITGACHCAAGFRGWRCEDRCEQGTYGNDCHQRCQCQNGATCDHVTGECRCPPGYTGAFCEDLCPPGKHGPQCEQRCPCQNGGVCHHVTGECSCPSGWMGTVCGQPCPEGRFGKNCSQECQCHNGGTCDAATGQCHCSPGYTGERCQDECPVGTYGVLCAETCQCVNGGKCYHVSGACLCEAGFAGERCEARLCPEGLYGIKCDKRCPCHLENTHSCHPMSGECACKPGWSGLYCNETCSPGFYGEACQQICSCQNGADCDSVTGKCTCAPGFKGIDCSTPCPLGTYGINCSSRCGCKNDAVCSPVDGSCTCKAGWHGVDCSIRCPSGTWGFGCNLTCQCLNGGACNTLDGTCTCAPGWRGEKCELPCQDGTYGLNCAERCDCSHADGCHPTTGHCRCLPGWSGVHCDSVCAEGRWGPNCSLPCYCKNGASCSPDDGICECAPGFRGTTCQRICSPGFYGHRCSQTCPQCVHSSGPCHHITGLCDCLPGFTGALCNEVCPSGRFGKNCAGICTCTNNGTCNPIDRSCQCYPGWIGSDCSQPCPPAHWGPNCIHTCNCHNGAFCSAYDGECKCTPGWTGLYCTQRCPLGFYGKDCALICQCQNGADCDHISGQCTCRTGFMGRHCEQKCPSGTYGYGCRQICDCLNNSTCDHITGTCYCSPGWKGARCDQAGVIIVGNLNSLSRTSTALPADSYQIG

SEQ ID NO: 1615 - protein, 829 aa, synthetic construct
  REGION 1..829: note = MEGF11 (A6BM72) ECD
LNPEDPNVCSHWESYAVTVQESYAHPFDQIYYTRCTDILNWFKCTRHRISYKTAYRRGLRTMYRRRSQCCPGYYESGDFCIPLCTEECVHGRCVSPDTCHCEPGWGGPDCSSGCDSDHWGPHCSNRCQCQNGALCNPITGACVCAAGFRGWRCEELCAPGTHGKGCQLPCQCRHGASCDPRAGECLCAPGYTGVYCEELCPPGSHGAHCELRCPCQNGGTCHHITGECACPPGWTGAVCAQPCPPGTFGQNCSQDCPCHHGGQCDHVTGQCHCTAGYMGDRCQEECPFGSFGFQCSQHCDCHNGGQCSPTTGACECEPGYKGPRCQERLCPEGLHGPGCTLPCPCDADNTISCHPVTGACTCQPGWSGHHCNESCPVGYYGDGCQLPCTCQNGADCHSITGGCTCAPGFMGEVCAVSCAAGTYGPNCSSICSCNNGGTCSPVDGSCTCKEGWQGLDCTLPCPSGTWGLNCNESCTCANGAACSPIDGSCSCTPGWLGDTCELPCPDGTFGLNCSEHCDCSHADGCDPVTGHCCCLAGWTGIRCDSTCPPGRWGPNCSVSCSCENGGSCSPEDGSCECAPGFRGPLCQRICPPGFYGHGCAQPCPLCVHSSRPCHHISGICECLPGFSGALCNQVCAGGYFGQDCAQLCSCANNGTCSPIDGSCQCFPGWIGKDCSQACPPGFWGPACFHACSCHNGASCSAEDGACHCTPGWTGLFCTQRCPAAFFGKDCGRVCQCQNGASCDHISGKCTCRTGFTGQHCEQRCAPGTFGYGCQQLCECMNNSTCDHVTGTCYCSPGFKGIRCDQAALMMEELNPYTKISPALGAERHS

SEQ ID NO: 1616 - protein, 2620 aa, synthetic construct
  REGION 1..2620: note = MEGF8 (Q7Z7M0) ECD
GDCKGQRQVLREAPGFVTDGAGNYSVNGNCEWLIEAPSPQHRILLDFLFLDTECTYDYLFVYDGDSPRGPLLASLSGSTRPPPIEASSGKMLLHLFSDANYNLLGFNASFRFSLCPGGCQSHGQCQPPGVCACEPGWGGPDCGLQECSAYCGSHGTCASPLGPCRCEPGFLGRACDLHLWENQGAGWWHNVSARDPAFSARIGAAGAFLSPPGLLAVFGGQDLNNALGDLVLYNFSANTWESWDLSPAPAARHSHVAVAWAGSLVLMGGELADGSLTNDVWAFSPLGRGHWELLAPPASSSSGPPGLAGHAAALVDDVWLYVSGGRTPHDLFSSGLFRFRLDSTSGGYWEQVIPAGGRPPAATGHSMVFHAPSRALLVHGGHRPSTARFSVRVNSTELFHVDRHVWTTLKGRDGLQGPRERAFHTASVLGNYMVVYGGNVHTHYQEEKCYEDGIFFYHLGCHQWVSGAELAPPGTPEGRAAPPSGRYSHVAAVLGGSVLLVAGGYSGRPRGDLMAYKVPPFVFQAPAPDYHLDYCSMYTDHSVCSRDPECSWCQGACQAAPPPGTPLGACPAASCLGLGRLLGDCQACLAFSSPTAPPRGPGTLGWCVHNESCLPRPEQARCRGEQISGTVGWWGPAPVFVTSLEACVTQSFLPGLHLLTFQQPPNTSQPDKVSIVRSTTITLTPSAETDVSLVYRGFIYPMLPGGPGGPGAEDVAVWTRAQRLHVLARMARGPDTENMEEVGRWVAHQEKETRRLQRPGSARLFPLPGRDHKYAVEIQGQLNGSAGPGHSELTLLWDRTGVPGGSEISFFFLEPYRSSSCTSYSSCLGCLADQGCGWCLTSATCHLRQGGAHCGDDGAGGSLLVLVPTLCPLCEEHRDCHACTQDPFCEWHQSTSRKGDAACSRRGRGRGALKSPEECPPLCSQRLTCEDCLANSSQCAWCQSTHTCFLFAAYLARYPHGGCRGWDDSVHSEPRCRSCDGFLTCHECLQSHECGWCGNEDNPTLGRCLQGDFSGPLGGGNCSLWVGEGLGLPVALPARWAYARCPDVDECRLGLARCHPRATCLNTPLSYECHCQRGYQGDGISHCNRTCLEDCGHGVCSGPPDFTCVCDLGWTSDLPPPTPAPGPPAPRCSRDCGCSFHSHCRKRGPGFCDECQDWTWGEHCERCRPGSFGNATGSRGCRPCQCNGHGDPRRGHCDNLSGLCFCQDHTEGAHCQLCSPGYYGDPRAGGSCFRECGGRALLTNVSSVALGSRRVGGLLPPGGGAARAGPGLSYCVWVVSATEELQPCAPGTLCPPLTLTFSPDSSTPCTLSYVLAFDGFPRFLDTGVVQSDRSLIAAFCGQRRDRPLTVQALSGLLVLHWEANGSSSWGFNASVGSARCGSGGPGSCPVPQECVPQDGAAGAGLCRCPQGWAGPHCRMALCPENCNAHTGAGTCNQSLGVCICAEGFGGPDCATKLDGGQLVWETLMDSRLSADTASRFLHRLGHTMVDGPDATLWMFGGLGLPQGLLGNLYRYSVSERRWTQMLAGAEDGGPGPSPRSFHAAAYVPAGRGAMYLLGGLTAGGVTRDFWVLNLTTLQWRQEKAPQTVELPAVAGHTLTARRGLSLLLVGGYSPENGFNQQLLEYQLATGTWVSGAQSGTPPTGLYGHSAVYHEATDSLYVFGGFRFHVELAAPSPELYSLHCPDRTWSLLAPSQGAKRDRMRNVRGSSRGLGQVPGEQPGSWGFREVRKKMALWAALAGTGGFLEEISPHLKEPRPRLFHASALLGDTMVVLGGRSDPDEFSSDVLLYQVNCNAWLLPDLTRSASVGPPMEESVAHAVAAVGSRLYISGGFGGVALGRLLALTLPPDPCRLLSSPEACNQSGACTWCHGACLSGDQAHRLGCGGSPCSPMPRSPEECRRLRTCSECLARHPRTLQPGDGEASTPRCKWCTNCPEGACIGRNGSCTSENDCRINQREVFWAGNCSEAACGAADCEQCTREGKCMWTRQFKRTGETRRILSVQPTYDWTCFSHSLLNVSPMPVESSPPLPCPTPCHLLPNCTSCLDSKGADGGWQHCVWSSSLQQCLSPSYLPLRCMAGGCGRLLRGPESCSLGCAQATQCALCLRRPHCGWCAWGGQDGGGRCMEGGLSGPRDGLTCGRPGASWAFLSCPPEDECANGHHDCNETQNCHDQPHGYECSCKTGYTMDNMTGLCRPVCAQGCVNGSCVEPDHCRCHFGFVGRNCSTECRCNRHSECAGVGARDHCLLCRNHTKGSHCEQCLPLFVGSAVGGGTCRPCHAFCRGNSHICISRKELQMSKGEPKKYSLDPEEIENWVTEGPSEDEAVCVNCQNNSYGEKCESCLQGYFLLDGKCTKCQCNGHADTCNEQDGTGCPCQNNTETGTCQGSSPSDRRDCYKYQCAKCRESFHGSPLGGQQCYRLISVEQECCLDPTSQTNCFHEPKRRALGPGRTVLFGVQPKFTNVDIRLTLDVTFGAVDLYVSTSYDTFVVRVAPDTGVHTVHIQPPPAPPPPPPPADGGPRGAGDPGGAGASSGPGAPAEPRVREVWPRGLITYVTVTEPSAVLVVRGVRDRLVITYPHEHHALKSSRFYLLLLGVGDPSGPGANGSADSQGLLFFRQDQAHID

SEQ ID NO: 1617 - protein, 484 aa, synthetic construct
  REGION 1..484: note = MEGF9 (Q9H1U4) ECD
AVASAASAGNVTGGGGAAGQVDASPGPGLRGEPSHPFPRATAPTAQAPRTGPPRATVHRPLAATSPAQSPETTPLWATAGPSSTTFQAPLGPSPTTPPAAERTSTTSQAPTRPAPTTLSTTTGPAPTTPVATTVPAPTTPRTPTPDLPSSSNSSVLPTPPATEAPSSPPPEYVCNCSVVGSLNVNRCNQTTGQCECRPGYQGLHCETCKEGFYLNYTSGLCQPCDCSPHGALSIPCNSSGKCQCKVGVIGSICDRCQDGYYGFSKNGCLPCQCNNRSASCDALTGACLNCQENSKGNHCEECKEGFYQSPDATKECLRCPCSAVTSTGSCSIKSSELEPECDQCKDGYIGPNCNKCENGYYNFDSICRKCQCHGHVDPVKTPKICKPESGECINCLHNTTGFWCENCLEGYVHDLEGNCIKKEVILPTPEGSTILVSNASLTTSVPTPVINSTFTPTTLQTIFSVSTSENSTSALADVSWTQFN

SEQ ID NO: 1618 - protein, 647 aa, synthetic construct
  REGION 1..647: note = MEP1A (Q16819) ECD
NGLRDPNTRWTFPIPYILADNLGLNAKGAILYAFEMFRLKSCVDFKPYEGESSYIIFQQFDGCWSEVGDQHVGQNISIGQGCAYKAIIEHEILHALGFYHEQSRTDRDDYVNIWWDQILSGYQHNFDTYDDSLITDLNTPYDYESLMHYQPFSFNKNASVPTITAKIPEFNSIIGQRLDFSAIDLERLNRMYNCTTTHTLLDHCTFEKANICGMIQGTRDDTDWAHQDSAQAGEVDHTLLGQCTGAGYFMQFSTSSGSAEEAALLESRILYPKRKQQCLQFFYKMTGSPSDRLVVWVRRDDSTGNVRKLVKVQTFQGDDDHNWKIAHVVLKEEQKFRYLFQGTKGDPQNSTGGIYLDDITLTETPCPTGVWTVRNFSQVLENTSKGDKLQSPRFYNSEGYGFGVTLYPNSRESSGYLRLAFHVCSGENDAILEWPVENRQVIITILDQEPDVRNRMSSSMVFTTSKSHTSPAINDTVIWDRPSRVGTYHTDCNCFRSIDLGWSGFISHQMLKRRSFLKNDDLIIFVDFEDITHLSQTEVPTKGKRLSPQGLILQGQEQQVSEEGSGKAMLEEALPVSLSQGQPSRQKRSVENTGPLEDHNWPQYFRDPCDPNPCQNDGICVNVKGMASCRCISGHAFFYTGERCQAV

SEQ ID NO: 1619 - protein, 630 aa, synthetic construct
  REGION 1..630: note = MEP1B (Q16820) ECD
TPENFDVDGGMDQDIFDINEGLGLDLFEGDIRLDRAQIRNSIIGEKYRWPHTIPYVLEDSLEMNAKGVILNAFERYRLKTCIDFKPWAGETNYISVFKGSGCWSSVGNRRVGKQELSIGANCDRIATVQHEFLHALGFWHEQSRSDRDDYVRIMWDRILSGREHNFNTYSDDISDSLNVPYDYTSVMHYSKTAFQNGTEPTIVTRISDFEDVIGQRMDFSDSDLLKLNQLYNCSSSLSFMDSCSFELENVCGMIQSSGDNADWQRVSQVPRGPESDHSNMGQCQGSGFFMHFDSSSVNVGATAVLESRTLYPKRGFQCLQFYLYNSGSESDQLNIYIREYSADNVDGNLTLVEEIKEIPTGSWQLYHVTLKVTKKFRVVFEGRKGSGASLGGLSIDDINLSETRCPHHIWHIRNFTQFIGSPNGTLYSPPFYSSKGYAFQIYLNLAHVTNAGIYFHLISGANDDQLQWPCPWQQATMTLLDQNPDIRQRMSNQRSITTDPFMTTDNGNYFWDRPSKVGTVALFSNGTQFRRGGGYGTSAFITHERLKSRDFIKGDDVYILLTVEDISHLNSTQIQLTPAPSVQDLCSKTTCKNDGVCTVRDGKAECRCQSGEDWWYMGERCEKRGSTRDT

SEQ ID NO: 1620 - protein, 485 aa, synthetic construct
  REGION 1..485: note = MERTK (Q12866) ECD
AITEAREEAKPYPLFPGPFPGSLQTDHTPLLSLPHASGYQPALMFSPTQPGRPHTGNVAIPQVTSVESKPLPPLAFKHTVGHIILSEHKGVKFNCSISVPNIYQDTTISWWKDGKELLGAHHAITQFYPDDEVTAIIASFSITSVQRSDNGSYICKMKINNEEIVSDPIYIEVQGLPHFTKQPESMNVTRNTAFNLTCQAVGPPEPVNIFWVQNSSRVNEQPEKSPSVLTVPGLTEMAVFSCEAHNDKGLTVSKGVQINIKAIPSPPTEVSIRNSTAHSILISWVPGFDGYSPFRNCSIQVKEADPLSNGSVMIFNTSALPHLYQIKQLQALANYSIGVSCMNEIGWSAVSPWILASTTEGAPSVAPLNVTVFLNESSDNVDIRWMKPPTKQQDGELVGYRISHVWQSAGISKELLEEVGQNGSRARISVQVHNATCTVRIAAVTRGGVGPFSDPVKIFIPAHGWVDYAPSSTPAPGNADPVLII

SEQ ID NO: 1621 - protein, 908 aa, synthetic construct
  REGION 1..908: note = MET (P08581) ECD
ECKEALAKSEMNVNMKYQLPNFTAETPIQNVILHEHHIFLGATNYIYVLNEEDLQKVAEYKTGPVLEHPDCFPCQDCSSKANLSGGVWKDNINMALVVDTYYDDQLISCGSVNRGTCQRHVFPHNHTADIQSEVHCIFSPQIEEPSQCPDCVVSALGAKVLSSVKDRFINFFVGNTINSSYFPDHPLHSISVRRLKETKDGFMFLTDQSYIDVLPEFRDSYPIKYVHAFESNNFIYFLTVQRETLDAQTFHTRIIRFCSINSGLHSYMEMPLECILTEKRKKRSTKKEVFNILQAAYVSKPGAQLARQIGASLNDDILFGVFAQSKPDSAEPMDRSAMCAFPIKYVNDFFNKIVNKNNVRCLQHFYGPNHEHCFNRTLLRNSSGCEARRDEYRTEFTTALQRVDLFMGQFSEVLLTSISTFIKGDLTIANLGTSEGRFMQVVVSRSGPSTPHVNFLLDSHPVSPEVIVEHTLNQNGYTLVITGKKITKIPLNGLGCRHFQSCSQCLSAPPFVQCGWCHDKCVRSEECLSGTWTQQICLPAIYKVFPNSAPLEGGTRLTICGWDFGFRRNNKFDLKKTRVLLGNESCTLTLSESTMNTLKCTVGPAMNKHFNMSIIISNGHGTTQYSTFSYVDPVITSISPKYGPMAGGTLLTLTGNYLNSGNSRHISIGGKTCTLKSVSNSILECYTPAQTISTEFAVKLKIDLANRETSIFSYREDPIVYEIHPTKSFISGGSTITGVGKNLNSVSVPRMVINVHEAGRNFTVACQHRSNSEIICCTTPSLQQLNLQLPLKTKAFFMLDGILSKYFDLIYVHNPVFKPFEKPVMISMGNENVLEIKGNDIDPEAVKGEVLKVGNKSCENIHLHSEAVLCTVPNDLLKLNSELNIEWKQAISSTVLGKVIVQPDQNFT

SEQ ID NO: 1622 - protein, 129 aa, synthetic construct
  REGION 1..129: note = MFAP3 (P55082) ECD
AFVLEDVDFDQMVSLEANRSSYNASFPSSFELSASSHSDDDVIIAKEGTSVSIECLLTASHYEDVHWHNSKGQQLDGRSRGGKWLVSDNFLNITNVAFDDRGLYTCFVTSPIRASYSVTLRVIFTSGDM

SEQ ID NO: 1623 - protein, 121 aa, synthetic construct
  REGION 1..121: note = MFAP3L (O75121) ECD
KSVTNSTLNGTNVVLGSVPVIIARTDHIIVKEGNSALINCSVYGIPDPQFKWYNSIGKLLKEEEDEKERGGGKWQMHDSGLLNITKVSFSDRGKYTCVASNIYGTVNNTVTLRVIFTSGDM

SEQ ID NO: 1624 - protein, 284 aa, synthetic construct
  REGION 1..284: note = MICA (Q29983) ECD
EPHSLRYNLTVLSWDGSVQSGFLTEVHLDGQPFLRCDRQKCRAKPQGQWAEDVLGNKTWDRETRDLTGNGKDLRMTLAHIKDQKEGLHSLQEIRVCEIHEDNSTRSSQHFYYDGELFLSQNLETKEWTMPQSSRAQTLAMNVRNFLKEDAMKTKTHYHAMHADCLQELRRYLKSGVVLRRTVPPMVNVTRSEASEGNITVTCRASGFYPWNITLSWRQDGVSLSHDTQQWGDVLPDGNGTYQTWVATRICQGEEQRFTCYMEHSGNHSTHPVPSGKVLVLQSHW

SEQ ID NO: 1625 - protein, 287 aa, synthetic construct
  REGION 1..287: note = MICB (Q29980) ECD
AEPHSLRYNLMVLSQDESVQSGFLAEGHLDGQPFLRYDRQKRRAKPQGQWAEDVLGAKTWDTETEDLTENGQDLRRTLTHIKDQKGGLHSLQEIRVCEIHEDSSTRGSRHFYYDGELFLSQNLETQESTVPQSSRAQTLAMNVTNFWKEDAMKTKTHYRAMQADCLQKLQRYLKSGVAIRRTVPPMVNVTCSEVSEGNITVTCRASSFYPRNITLTWRQDGVSLSHNTQQWGDVLPDGNGTYQTWVATRIRQGEEQRFTCYMEHSGNHGTHPVPSGKVLVLQSQRTD

SEQ ID NO: 1626 - protein, 208 aa, synthetic construct
  REGION 1..208: note = MILR1 (Q7Z6M3) ECD
RKAVLDCEAMKTNEFPSPCLDSKTKVVMKGQNVSMFCSHKNKSLQITYSLFRRKTHLGTQDGKGEPAIFNLSITEAHESGPYKCKAQVTSCSKYSRDFSFTIVDPVTSPVLNIMVIQTETDRHITLHCLSVNGSLPINYTFFENHVAISPAISKYDREPAEFNLTKKNPGEEEEYRCEAKNRLPNYATYSHPVTMPSTGGDSCPFCLK

SEQ ID NO: 1627 - protein, 430 aa, synthetic construct
  REGION 1..430: note = MMP14 (P50281) ECD
YAIQGLKWQHNEITFCIQNYTPKVGEYATYEAIRKAFRVWESATPLRFREVPYAYIREGHEKQADIMIFFAEGFHGDSTPFDGEGGFLAHAYFPGPNIGGDTHFDSAEPWTVRNEDLNGNDIFLVAVHELGHALGLEHSSDPSAIMAPFYQWMDTENFVLPDDDRRGIQQLYGGESGFPTKMPPQPRTTSRPSVPDKPKNPTYGPNICDGNFDTVAMLRGEMFVFKERWFWRVRNNQVMDGYPMPIGQFWRGLPASINTAYERKDGKFVFFKGDKHWVFDEASLEPGYPKHIKELGRGLPTDKIDAALFWMPNGKTYFFRGNKYYRFNEELRAVDSEYPKNIKVWEGIPESPRGSFMGSDEVFTYFYKGNKYWKFNNQKLKVEPGYPKSALRDWMGCPSGGRPDEGTEEETEVIIIEVDEEGGGAVSAAA

SEQ ID NO: 1628 - protein, 445 aa, synthetic construct
  REGION 1..445: note = MMP16 (P51512) ECD
YALTGQKWQHKHITYSIKNVTPKVGDPETRKAIRRAFDVWQNVTPLTFEEVPYSELENGKRDVDITIIFASGFHGDSSPFDGEGGFLAHAYFPGPGIGGDTHFDSDEPWTLGNPNHDGNDLFLVAVHELGHALGLEHSNDPTAIMAPFYQYMETDNFKLPNDDLQGIQKIYGPPDKIPPPTRPLPTVPPHRSIPPADPRKNDRPKPPRPPTGRPSYPGAKPNICDGNFNTLAILRREMFVFKDQWFWRVRNNRVMDGYPMQITYFWRGLPPSIDAVYENSDGNFVFFKGNKYWVFKDTTLQPGYPHDLITLGSGIPPHGIDSAIWWEDVGKTYFFKGDRYWRYSEEMKTMDPGYPKPITVWKGIPESPQGAFVHKENGFTYFYKGKEYWKFNNQILKVEPGYPRSILKDFMGCDGPTDRVKEGHSPPDDVDIVIKLDNTASTVKA

SEQ ID NO: 1629 - protein, 638 aa, synthetic construct
  REGION 1..638: note = MPEG1 (Q2M385) ECD
KSGKPSGEMDEVGVQKCKNALKLPVLEVLPGGGWDNLRNVDMGRVMELTYSNCRTTEDGQYIIPDEIFTIPQKQSNLEMNSEILESWANYQSSTSYSINTELSLFSKVNGKFSTEFQRMKTLQVKDQAITTRVQVRNLVYTVKINPTLELSSGFRKELLDISDRLENNQTRMATYLAELLVLNYGTHVTTSVDAGAALIQEDHLRASFLQDSQSSRSAVTASAGLAFQNTVNFKFEENYTSQNVLTKSYLSNRTNSRVQSIGGVPFYPGITLQAWQQGITNHLVAIDRSGLPLHFFINPNMLPDLPGPLVKKVSKTVETAVKRYYTFNTYPGCTDLNSPNFNFQANTDDGSCEGKMTNFSFGGVYQECTQLSGNRDVLLCQKLEQKNPLTGDFSCPSGYSPVHLLSQIHEEGYNHLECHRKCTLLVFCKTVCEDVFQVAKAEFRAFWCVASSQVPENSGLLFGGLFSSKSINPMTNAQSCPAGYFPLRLFENLKVCVSQDYELGSRFAVPFGGFFSCTVGNPLVDPAISRDLGAPSLKKCPGGFSQHPALISDGCQVSYCVKSGLFTGGSLPPARLPPFTRPPLMSQAATNTVIVTNSENARSWIKDSQTHQWRLGEPIELRRAMNVIHGDGGGLSGG

SEQ ID NO: 1630 - protein, 466 aa, synthetic construct
  REGION 1..466: note = MPL (P40238) ECD
QDVSLLASDSEPLKCFSRTFEDLTCFWDEEEAAPSGTYQLLYAYPREKPRACPLSSQSMPHFGTRYVCQFPDQEEVRLFFPLHLWVKNVFLNQTRTQRVLFVDSVGLPAPPSIIKAMGGSQPGELQISWEEPAPEISDFLRYELRYGPRDPKNSTGPTVIQLIATETCCPALQRPHSASALDQSPCAQPTMPWQDGPKQTSPSREASALTAEGGSCLISGLQPGNSYWLQLRSEPDGISLGGSWGSWSLPVTVDLPGDAVALGLQCFTLDLKNVTCQWQQQDHASSQGFFYHSRARCCPRDRYPIWENCEEEEKTNPGLQTPQFSRCHFKSRNDSIIHILVEVTTAPGTVHSYLGSPFWIHQAVRLPTPNLHWREISSGHLELEWQHPSSWAAQETCYQLRYTGEGHQDWKVLEPPLGARGGTLELRPRSRYRLQLRARLNGPTYQGPWSSWSDPTRVETATETAW

SEQ ID NO: 1631 - protein, 124 aa, synthetic construct
  REGION 1..124: note = MPZ (P25189) ECD
IVVYTDREVHGAVGSRVTLHCSFWSSEWVSDDISFTWRYQPEGGRDAISIFHYAKGQPYIDEVGTFKERIQWVGDPRWKDGSIVIHNLDYSDNGTFTCDVKNPPDIVGKTSQVTLYVFEKVPTR

SEQ ID NO: 1632 - protein, 127 aa, synthetic construct
  REGION 1..127: note = MPZL1 (O95297) ECD
SALEVYTPKEIFVANGTQGKLTCKFKSTSTTGGLTSVSWSFQPEGADTTVSFFHYSQGQVYLGNYPPFKDRISWAGDLDKKDASINIENMQFIHNGTYICDVKNPPDIVVQPGHIRLYVVEKENLPV

SEQ ID NO: 1633 - protein, 128 aa, synthetic construct
  REGION 1..128: note = MPZL2 (O60487) ECD
VEIYTSRVLEAVNGTDARLKCTFSSFAPVGDALTVTWNFRPLDGGPEQFVFYYHIDPFQPMSGRFKDRVSWDGNPERYDASILLWKLQFDDNGTYTCQVKNPPDVDGVIGEIRLSVVHTVRFSEIHFL

SEQ ID NO: 1634 - protein, 127 aa, synthetic construct
  REGION 1..127: note = MPZL3 (Q6UWV2) ECD
LEIRADAHVRGYVGEKIKLKCTFKSTSDVTDKLTIDWTYRPPSSSHTVSIFHYQSFQYPTTAGTFRDRISWVGNVYKGDASISISNPTIKDNGTFSCAVKNPPDVHHNIPMTELTVTERGFGTMLSS

SEQ ID NO: 1635 - protein, 280 aa, synthetic construct
  REGION 1..280: note = MR1 (Q95460) ECD
RTHSLRYFRLGVSDPIHGVPEFISVGYVDSHPITTYDSVTRQKEPRAPWMAENLAPDHWERYTQLLRGWQQMFKVELKRLQRHYNHSGSHTYQRMIGCELLEDGSTTGFLQYAYDGQDFLIFNKDTLSWLAVDNVAHTIKQAWEANQHELLYQKNWLEEECIAWLKRFLEYGKDTLQRTEPPLVRVNRKETFPGVTALFCKAHGFYPPEIYMTWMKNGEEIVQEIDYGDILPSGDGTYQAWASIELDPQSSNLYSCHVEHCGVHMVLQVPQESETIPLVM

SEQ ID NO: 1636 - protein, 1371 aa, synthetic construct
  REGION 1..1371: note = MRC1 (P22897) ECD
LLDTRQFLIYNEDHKRCVDAVSPSAVQTAACNQDAESQKFRWVSESQIMSVAFKLCLGVPSKTDWVAITLYACDSKSEFQKWECKNDTLLGIKGEDLFFNYGNRQEKNIMLYKGSGLWSRWKIYGTTDNLCSRGYEAMYTLLGNANGATCAFPFKFENKWYADCTSAGRSDGWLWCGTTTDYDTDKLFGYCPLKFEGSESLWNKDPLTSVSYQINSKSALTWHQARKSCQQQNAELLSITEIHEQTYLTGLTSSLTSGLWIGLNSLSFNSGWQWSDRSPFRYLNWLPGSPSAEPGKSCVSLNPGKNAKWENLECVQKLGYICKKGNTTLNSFVIPSESDVPTHCPSQWWPYAGHCYKIHRDEKKIQRDALTTCRKEGGDLTSIHTIEELDFIISQLGYEPNDELWIGLNDIKIQMYFEWSDGTPVTFTKWLRGEPSHENNRQEDCVVMKGKDGYWADRGCEWPLGYICKMKSRSQGPEIVEVEKGCRKGWKKHHFYCYMIGHTLSTFAEANQTCNNENAYLTTIEDRYEQAFLTSFVGLRPEKYFWTGLSDIQTKGTFQWTIEEEVRFTHWNSDMPGRKPGCVAMRTGIAGGLWDVLKCDEKAKFVCKHWAEGVTHPPKPTTTPEPKCPEDWGASSRTSLCFKLYAKGKHEKKTWFESRDFCRALGGDLASINNKEEQQTIWRLITASGSYHKLFWLGLTYGSPSEGFTWSDGSPVSYENWAYGEPNNYQNVEYCGELKGDPTMSWNDINCEHLNNWICQIQKGQTPKPEPTPAPQDNPPVTEDGWVIYKDYQYYFSKEKETMDNARAFCKRNFGDLVSIQSESEKKFLWKYVNRNDAQSAYFIGLLISLDKKFAWMDGSKVDYVSWATGEPNFANEDENCVTMYSNSGFWNDINCGYPNAFICQRHNSSINATTVMPTMPSVPSGCKEGWNFYSNKCFKIFGFMEEERKNWQEARKACIGFGGNLVSIQNEKEQAFLTYHMKDSTFSAWTGLNDVNSEHTFLWTDGRGVHYTNWGKGYPGGRRSSLSYEDADCVVIIGGASNEAGKWMDDTCDSKRGYICQTRSDPSLTNPPATIQTDGFVKYGKSSYSLMRQKFQWHEAETYCKLHNSLIASILDPYSNAFAWLQMETSNERVWIALNSNLTDNQYTWTDKWRVRYTNWAADEPKLKSACVYLDLDGYWKTAHCNESFYFLCKRSDEIPATEPPQLPGRCPESDHTAWIPFHGHCYYIESSYTRNWGQASLECLRMGSSLVSIESAAESSFLSYRVEPLKSKTNFWIGLFRNVEGTWLWINNSPVSFVNWNTGDPSGERNDCVALHASSGFWSNIHCSSYKGYICKRPKIIDAKPTHELLTTKADTRKMDPSKPSSNVA

SEQ ID NO: 1637 - protein, 1384 aa, synthetic construct
  REGION 1..1384: note = MRC2 (Q9UBG0) ECD
GAPGDAALPEPNVFLIFSHGLQGCLEAQGGQVRVTPACNTSLPAQRWKWVSRNRLFNLGTMQCLGTGWPGTNTTASLGMYECDREALNLRWHCRTLGDQLSLLLGARTSNISKPGTLERGDQTRSGQWRIYGSEEDLCALPYHEVYTIQGNSHGKPCTIPFKYDNQWFHGCTSTGREDGHLWCATTQDYGKDERWGFCPIKSNDCETFWDKDQLTDSCYQFNFQSTLSWREAWASCEQQGADLLSITEIHEQTYINGLLTGYSSTLWIGLNDLDTSGGWQWSDNSPLKYLNWESDQPDNPSEENCGVIRTESSGGWQNRDCSIALPYVCKKKPNATAEPTPPDRWANVKVECEPSWQPFQGHCYRLQAEKRSWQESKKACLRGGGDLVSIHSMAELEFITKQIKQEVEELWIGLNDLKLQMNFEWSDGSLVSFTHWHPFEPNNFRDSLEDCVTIWGPEGRWNDSPCNQSLPSICKKAGQLSQGAAEEDHGCRKGWTWHSPSCYWLGEDQVTYSEARRLCTDHGSQLVTITNRFEQAFVSSLIYNWEGEYFWTALQDLNSTGSFFWLSGDEVMYTHWNRDQPGYSRGGCVALATGSAMGLWEVKNCTSFRARYICRQSLGTPVTPELPGPDPTPSLTGSCPQGWASDTKLRYCYKVFSSERLQDKKSWVQAQGACQELGAQLLSLASYEEEHFVANMLNKIFGESEPEIHEQHWFWIGLNRRDPRGGQSWRWSDGVGFSYHNFDRSRHDDDDIRGCAVLDLASLQWVAMQCDTQLDWICKIPRGTDVREPDDSPQGRREWLRFQEAEYKFFEHHSTWAQAQRICTWFQAELTSVHSQAELDFLSHNLQKFSRAQEQHWWIGLHTSESDGRFRWTDGSIINFISWAPGKPRPVGKDKKCVYMTASREDWGDQRCLTALPYICKRSNVTKETQPPDLPTTALGGCPSDWIQFLNKCFQVQGQEPQSRVKWSEAQFSCEQQEAQLVTITNPLEQAFITASLPNVTFDLWIGLHASQRDFQWVEQEPLMYANWAPGEPSGPSPAPSGNKPTSCAVVLHSPSAHFTGRWDDRSCTEETHGFICQKGTDPSLSPSPAALPPAPGTELSYLNGTFRLLQKPLRWHDALLLCESRNASLAYVPDPYTQAFLTQAARGLRTPLWIGLAGEEGSRRYSWVSEEPLNYVGWQDGEPQQPGGCTYVDVDGAWRTTSCDTKLQGAVCGVSSGPPPPRRISYHGSCPQGLADSAWIPFREHCYSFHMELLLGHKEARQRCQRAGGAVLSILDEMENVFVWEHLQSYEGQSRGAWLGMNFNPKGGTLVWQDNTAVNYSNWGPPGLGPSMLSHNSCYWIQSNSGLWRPGACTNITMGVVCKLPRAEQSSFSPSALPENPAA

SEQ ID NO: 1638 - protein, 843 aa, synthetic construct
  REGION 1..843: note = MRVI1 (Q9Y6F6) ECD
MGMDLTCPFGISPACGAQASWSIFGADAAEVPGTRGHSQQEAAMPHIPEDEEPPGEPQAAQSPAGQGPPAAGVSCSPTPTIVLTGDATSPEGETDKNLANRVHSPHKRLSHRHLKVSTASLTSVDPAGHIIDLVNDQLPDISISEEDKKKNLALLEEAKLVSERFLTRRGRKSRSSPGDSPSAVSPNLSPSASPTSSRSNSLTVPTPPGLDVCSGPPSPLPGAPPQQKGDEADVSSPHPGEPNVPKGLADRKQNDQRKVSQGRLAPRPPPVEKSKEIAIEQKENFDPLQYPETTPKGLAPVTNSSGKMALNSPQPGPVESELGKQLLKTGWEGSPLPRSPTQDAAGVGPPASQGRGPAGEPMGPEAGSKAELPPTVSRPPLLRGLSWDSGPEEPGPRLQKVLAKLPLAEEEKRFAGKAGGKLAKAPGLKDFQIQVQPVRMQKLTKLREEHILMRNQNLVGLKLPDLSEAAEQEKGLPSELSPAIEEEESKSGLDVMPNISDVLLRKLRVHRSLPGSAPPLTEKEVENVFVQLSLAFRNDSYTLESRINQAERERNLTEENTEKELENFKASITSSASLWHHCEHRETYQKLLEDIAVLHRLAARLSSRAEVVGAVRQEKRMSKATEVMMQYVENLKRTYEKDHAELMEFKKLANQNSSRSCGPSEDGVPRTARSMSLTLGKNMPRRRVSVAVVPKFNALNLPGQTPSSSSIPSLPALSESPNGKGSLPVTSALPALLENGKTNGDPDCEASAPALTLSCLEELSQETKARMEEEAYSKGFQEGLKKTKELQDLKEEEEEQKSESPEEPEEVEETEEEEKGPRSSKLEELVHFLQVMYPKLCQH

SEQ ID NO: 1639 - protein, 603 aa, synthetic construct
  REGION 1..603: note = MSLNL (Q96KJ4) ECD
KVLSPGGLDASGANLWASANCSLLQGFWCQPASQLPRDQLSALIQRLALLQVPLQAWQLSCLANLASRCGLQDDFTLHPPNLLLFYNLSQVREADCRAFIRRAAQGDVELLSHLPDQRVALWRAAVACLVGAGLRLSASDQQLLGALVCDMDASSIGAADPHMLENLRRCPRLTAAQRIALNSLLAGGKTSLGPPGSWTLEGLQALGPLATYISPHLWAQVQEAVGLGFFRSVVASCQVGRLGQREARCFVTSFLESKTKPVSSRPRLSTGNITAATLRDDLFLVHYDCAELESCLDGCILRTNLDTLLQHLLPTECQHVVKAKLAQIYPQGLPEDQLRLITSLVYLYSRTEIGQWSITSQDTVMALLASDVALENQTEAVLQKFLEHNGTVSGALLLAIGGTRLCWMSPHQIQTIHPQELRLAGALDLSSCPQSRKDVLYTKAHETFGSSGTLAAYYRLMRPYLGGSPGGAQPPSPVPPGGAPVEELRHLAHANISMDIDTFTSLNPLELQSLDVGNVTALLGHNVGDLQKARSHPTVRAWLRSLNSSTLGQLGLDASPTSPTGPAHGTRGPPSTTHQVLHLVHTSGLPTNDAQASTSGSLW

SEQ ID NO: 1640 - protein, 933 aa, synthetic construct
  REGION 1..933: note = MST1R (Q04912) ECD
EDWQCPRTPYAASRDFDVKYVVPSFSAGGLVQAMVTYEGDRNESAVFVAIRNRLHVLGPDLKSVQSLATGPAGDPGCQTCAACGPGPHGPPGDTDTKVLVLDPALPALVSCGSSLQGRCFLHDLEPQGTAVHLAAPACLFSAHHNRPDDCPDCVASPLGTRVTVVEQGQASYFYVASSLDAAVAASFSPRSVSIRRLKADASGFAPGFVALSVLPKHLVSYSIEYVHSFHTGAFVYFLTVQPASVTDDPSALHTRLARLSATEPELGDYRELVLDCRFAPKRRRRGAPEGGQPYPVLRVAHSAPVGAQLATELSIAEGQEVLFGVFVTGKDGGPGVGPNSVVCAFPIDLLDTLIDEGVERCCESPVHPGLRRGLDFFQSPSFCPNPPGLEALSPNTSCRHFPLLVSSSFSRVDLFNGLLGPVQVTALYVTRLDNVTVAHMGTMDGRILQVELVRSLNYLLYVSNFSLGDSGQPVQRDVSRLGDHLLFASGDQVFQVPIQGPGCRHFLTCGRCLRAWHFMGCGWCGNMCGQQKECPGSWQQDHCPPKLTEFHPHSGPLRGSTRLTLCGSNFYLHPSGLVPEGTHQVTVGQSPCRPLPKDSSKLRPVPRKDFVEEFECELEPLGTQAVGPTNVSLTVTNMPPGKHFRVDGTSVLRGFSFMEPVLIAVQPLFGPRAGGTCLTLEGQSLSVGTSRAVLVNGTECLLARVSEGQLLCATPPGATVASVPLSLQVGGAQVPGSWTFQYREDPVVLSISPNCGYINSHITICGQHLTSAWHLVLSFHDGLRAVESRCERQLPEQQLCRLPEYVVRDPQGWVAGNLSARGDGAAGFTLPGFRFLPPPHPPSANLVPLKPEEHAIKFEYIGLGAVADCVGINVTVGGESCQHEFRGDMVVCPLPPSLQLGQDGAPLQVCVDGECHILGRVVRPGPDGVPQST

SEQ ID NO: 1641 - protein, 1135 aa, synthetic construct
  REGION 1..1135: note = MUC1 (P15941) ECD
SGHASSTPGGEKETSATQRSSVPSSTEKNAVSMTSSVLSSHSPGSGSSTTQGQDVTLAPATEPASGSAATWGQDVTSVPVTRPALGSTTPPAHDVTSAPDNKPAPGSTAPPAHGVTSAPDTRPAPGSTAPPAHGVTSAPDTRPAPGSTAPPAHGVTSAPDTRPAPGSTAPPAHGVTSAPDTRPAPGSTAPPAHGVTSAPDTRPAPGSTAPPAHGVTSAPDTRPAPGSTAPPAHGVTSAPDTRPAPGSTAPPAHGVTSAPDTRPAPGSTAPPAHGVTSAPDTRPAPGSTAPPAHGVTSAPDTRPAPGSTAPPAHGVTSAPDTRPAPGSTAPPAHGVTSAPDTRPAPGSTAPPAHGVTSAPDTRPAPGSTAPPAHGVTSAPDTRPAPGSTAPPAHGVTSAPDTRPAPGSTAPPAHGVTSAPDTRPAPGSTAPPAHGVTSAPDTRPAPGSTAPPAHGVTSAPDTRPAPGSTAPPAHGVTSAPDTRPAPGSTAPPAHGVTSAPDTRPAPGSTAPPAHGVTSAPDTRPAPGSTAPPAHGVTSAPDTRPAPGSTAPPAHGVTSAPDTRPAPGSTAPPAHGVTSAPDTRPAPGSTAPPAHGVTSAPDTRPAPGSTAPPAHGVTSAPDTRPAPGSTAPPAHGVTSAPDTRPAPGSTAPPAHGVTSAPDTRPAPGSTAPPAHGVTSAPDTRPAPGSTAPPAHGVTSAPDTRPAPGSTAPPAHGVTSAPDTRPAPGSTAPPAHGVTSAPDTRPAPGSTAPPAHGVTSAPDTRPAPGSTAPPAHGVTSAPDTRPAPGSTAPPAHGVTSAPDTRPAPGSTAPPAHGVTSAPDTRPAPGSTAPPAHGVTSAPDTRPAPGSTAPPAHGVTSAPDTRPAPGSTAPPAHGVTSAPDTRPAPGSTAPPAHGVTSAPDTRPAPGSTAPPAHGVTSAPDNRPALGSTAPPVHNVTSASGSASGSASTLVHNGTSARATTTPASKSTPFSIPSHHSDTPTTLASHSTKTDASSTHHSSVPPLTSSNHSTSPQLSTGVSFFFLSFHISNLQFNSSLEDPSTDYYQELQRDISEMFLQIYKQGGFLGLSNIKFRPGSVVVQLTLAFREGTINVHDVETQFNQYKTEAASRYNLTISDVSVSDVPFPFSAQSGAGVPG

SEQ ID NO: 1642 - protein, 5364 aa, synthetic construct
  REGION 1..5364: note = MUC12 (Q9UKN1) ECD
VTTVTPEGSAVHKAISQQGTLWTGEVLEKQTVEQGKSTLRRQKNHFHRSAGELRCRNALKDEGASAGWSVMFAGESVVVLVHLWMTGARVKNLGLVEFASPGDDGDGRAEGFSLGLPLSEQARAAGAREKERQETVINHSTFSGFSQITGSTVNTSIGGNTTSASTPSSSDPFTTFSDYGVSVTFITGSTATKHFLDSSTNSGHSEESTVSHSGPGATGTTLFPSHSATSVFVGEPKTSPITSASMETTALPGSTTTAGLSEKSTTFYSSPRSPDRTLSPARTTSSGVSEKSTTSHSRPGPTHTIAFPDSTTMPGVSQESTASHSIPGSTDTTLSPGTTTPSSLGPESTTFHSSPGYTKTTRLPDNTTTSGLLEASTPVHSSTGSPHTTLSPSSSTTHEGEPTTFQSWPSSKDTSPAPSGTTSAFVKLSTTYHSSPSSTPTTHFSASSTTLGHSEESTPVHSSPVATATTPPPARSATSGHVEESTAYHRSPGSTQTMHFPESSTTSGHSEESATFHGSTTHTKSSTPSTTAALAHTSYHSSLGSTETTHFRDSSTISGRSEESKASHSSPDAMATTVLPAGSTPSVLVGDSTPSPISSGSMETTALPGSTTKPGLSEKSTTFYSSPRSPDTTHLPASMTSSGVSEESTTSHSRPGSTHTTAFPGSTTMPGLSQESTASHSSPGPTDTTLSPGSTTASSLGPEYTTFHSRPGSTETTLLPDNTTASGLLEASMPVHSSTRSPHTTLSPAGSTTRQGESTTFHSWPSSKDTRPAPPTTTSAFVEPSTTSHGSPSSIPTTHISARSTTSGLVEESTTYHSSPGSTQTMHFPESDTTSGRGEESTTSHSSTTHTISSAPSTTSALVEEPTSYHSSPGSTATTHFPDSSTTSGRSEESTASHSSQDATGTIVLPARSTTSVLLGESTTSPISSGSMETTALPGSTTTPGLSERSTTFHSSPRSPATTLSPASTTSSGVSEESTTSRSRPGSTHTTAFPDSTTTPGLSRHSTTSHSSPGSTDTTLLPASTTTSGPSQESTTSHSSSGSTDTALSPGSTTALSFGQESTTFHSNPGSTHTTLFPDSTTSSGIVEASTRVHSSTGSPRTTLSPASSTSPGLQGESTAFQTHPASTHTTPSPPSTATAPVEESTTYHRSPGSTPTTHFPASSTTSGHSEKSTIFHSSPDASGTTPSSAHSTTSGRGESTTSRISPGSTEITTLPGSTTTPGLSEASTTFYSSPRSPTTTLSPASMTSLGVGEESTTSRSQPGSTHSTVSPASTTTPGLSEESTTVYSSSRGSTETTVFPHSTTTSVHGEEPTTFHSRPASTHTTLFTEDSTTSGLTEESTAFPGSPASTQTGLPATLTTADLGEESTTFPSSSGSTGTKLSPARSTTSGLVGESTPSRLSPSSTETTTLPGSPTTPSLSEKSTTFYTSPRSPDATLSPATTTSSGVSEESSTSHSQPGSTHTTAFPDSTTTSDLSQEPTTSHSSQGSTEATLSPGSTTASSLGQQSTTFHSSPGDTETTLLPDDTITSGLVEASTPTHSSTGSLHTTLTPASSTSAGLQEESTTFQSWPSSSDTTPSPPGTTAAPVEVSTTYHSRPSSTPTTHFSASSTTLGRSEESTTVHSSPGATGTALFPTRSATSVLVGEPTTSPISSGSTETTALPGSTTTAGLSEKSTTFYSSPRSPDTTLSPASTTSSGVSEESTTSHSRPGSTHTTAFPGSTTMPGVSQESTASHSSPGSTDTTLSPGSTTASSLGPESTTFHSSPGSTETTLLPDNTTASGLLEASTPVHSSTGSPHTTLSPAGSTTRQGESTTFQSWPSSKDTMPAPPTTTSAFVELSTTSHGSPSSTPTTHFSASSTTLGRSEESTTVHSSPVATATTPSPARSTTSGLVEESTAYHSSPGSTQTMHFPESSTASGRSEESRTSHSSTTHTISSPPSTTSALVEEPTSYHSSPGSTATTHFPDSSTTSGRSEESTASHSSQDATGTIVLPARSTTSVLLGESTTSPISSGSMETTALPGSTTTPGLSEKSTTFHSSPRSPATTLSPASTTSSGVSEESTTSHSRPGSTHTTAFPDSTTTPGLSRHSTTSHSSPGSTDTTLLPASTTTSGPSQESTTSHSSPGSTDTALSPGSTTALSFGQESTTFHSSPGSTHTTLFPDSTTSSGIVEASTRVHSSTGSPRTTLSPASSTSPGLQGESTAFQTHPASTHTTPSPPSTATAPVEESTTYHRSPGSTPTTHFPASSTTSGHSEKSTIFHSSPDASGTTPSSAHSTTSGRGESTTSRISPGSTEITTLPGSTTTPGLSEASTTFYSSPRSPTTTLSPASMTSLGVGEESTTSRSQPGSTHSTVSPASTTTPGLSEESTTVYSSSPGSTETTVFPRTPTTSVRGEEPTTFHSRPASTHTTLFTEDSTTSGLTEESTAFPGSPASTQTGLPATLTTADLGEESTTFPSSSGSTGTTLSPARSTTSGLVGESTPSRLSPSSTETTTLPGSPTTPSLSEKSTTFYTSPRSPDATLSPATTTSSGVSEESSTSHSQPGSTHTTAFPDSTTTPGLSRHSTTSHSSPGSTDTTLLPASTTTSGPSQESTTSHSSPGSTDTALSPGSTTALSFGQESTTFHSSPGSTHTTLFPDSTTSSGIVEASTRVHSSTGSPRTTLSPASSTSPGLQGESTTFQTHPASTHTTPSPPSTATAPVEESTTYHRSPGSTPTTHFPASSTTSGHSEKSTIFHSSPDASGTTPSSAHSTTSGRGESTTSRISPGSTEITTLPGSTTTPGLSEASTTFYSSPRSPTTTLSPASMTSLGVGEESTTSRSQPGSTHSTVSPASTTTPGLSEESTTVYSSSPGSTETTVFPRSTTTSVRGEEPTTFHSRPASTHTTLFTEDSTTSGLTEESTAFPGSPASTQTGLPATLTTADLGEESTTFPSSSGSTGTTLSPARSTTSGLVGESTPSRLSPSSTETTTLPGSPTTPSLSEKSTTFYTSPRSPDATLSPATTTSSGVSEESSTSHSQPGSTHTTAFPDSTTTSGLSQEPTASHSSQGSTEATLSPGSTTASSLGQQSTTFHSSPGDTETTLLPDDTITSGLVEASTPTHSSTGSLHTTLTPASSTSAGLQEESTTFQSWPSSSDTTPSPPGTTAAPVEVSTTYHSRPSSTPTTHFSASSTTLGRSEESTTVHSSPGATGTALFPTRSATSVLVGEPTTSPISSGSTETTALPGSTTTAGLSEKSTTFYSSPRSPDTTLSPASTTSSGVSEESTTSHSRPGSTHTTAFPGSTTMPGVSQESTASHSSPGSTDTTLSPGSTTASSLGPESTTFHSGPGSTETTLLPDNTTASGLLEASTPVHSSTGSPHTTLSPAGSTTRQGESTTFQSWPNSKDTTPAPPTTTSAFVELSTTSHGSPSSTPTTHFSASSTTLGRSEESTTVHSSPVATATTPSPARSTTSGLVEESTTYHSSPGSTQTMHFPESDTTSGRGEESTTSHSSTTHTISSAPSTTSALVEEPTSYHSSPGSTATTHFPDSSTTSGRSEESTASHSSQDATGTIVLPARSTTSVLLGESTTSPISSGSMETTALPGSTTTPGLSEKSTTFHSSPRSPATTLSPASTTSSGVSEESTTSHSRPGSTHTTAFPDSTTTPGLSRHSTTSHSSPGSTDTTLLPASTTTSGSSQESTTSHSSSGSTDTALSPGSTTALSFGQESTTFHSSPGSTHTTLFPDSTTSSGIVEASTRVHSSTGSPRTTLSPASSTSPGLQGESTAFQTHPASTHTTPSPPSTATAPVEESTTYHRSPGSTPTTHFPASSTTSGHSEKSTIFHSSPDASGTTPSSAHSTTSGRGESTTSRISPGSTEITTLPGSTTTPGLSEASTTFYSSPRSPTTTLSPASMTSLGVGEESTTSRSQPGSTHSTVSPASTTTPGLSEESTTVYSSSPGSTETTVFPRSTTTSVRREEPTTFHSRPASTHTTLFTEDSTTSGLTEESTAFPGSPASTQTGLPATLTTADLGEESTTFPSSSGSTGTKLSPARSTTSGLVGESTPSRLSPSSTETTTLPGSPTTPSLSEKSTTFYTSPRSPDATLSPATTTSSGVSEESSTSHSQPGSTHTTAFPDSTTTSGLSQEPTTSHSSQGSTEATLSPGSTTASSLGQQSTTFHSSPGDTETTLLPDDTITSGLVEASTPTHSSTGSLHTTLTPASSTSTGLQEESTTFQSWPSSSDTTPSPPSTTAVPVEVSTTYHSRPSSTPTTHFSASSTTLGRSEESTTVHSSPGATGTALFPTRSATSVLVGEPTTSPISSGSTETTALPGSTTTAGLSEKSTTFYSSPRSPDTTLSPASTTSSGVSEESTTSHSRPGSMHTTAFPSSTTMPGVSQESTASHSSPGSTDTTLSPGSTTASSLGPESTTFHSSPGSTETTLLPDNTTASGLLEASTPVHSSTGSPHTTLSPAGSTTRQGESTTFQSWPNSKDTTPAPPTTTSAFVELSTTSHGSPSSTPTTHFSASSTTLGRSEESTTVHSSPVATATTPSPARSTTSGLVEESTTYHSSPGSTQTMHFPESNTTSGRGEESTTSHSSTTHTISSAPSTTSALVEEPTSYHSSPGSTATTHFPDSSTTSGRSEESTASHSSQDATGTIVLPARSTTSVLLGESTTSPISSGSMETTALPGSTTTPGLSEKSTTFHSSPSSTPTTHFSASSTTLGRSEESTTVHSSPVATATTPSPARSTTSGLVEESTAYHSSPGSTQTMHFPESSTASGRSEESRTSHSSTTHTISSPPSTTSALVEEPTSYHSSPGSIATTHFPESSTTSGRSEESTASHSSPDTNGITPLPAHFTTSGRIAESTTFYISPGSMETTLASTATTPGLSAKSTILYSSSRSPDQTLSPASMTSSSISGEPTSLYSQAESTHTTAFPASTTTSGLSQESTTFHSKPGSTETTLSPGSITTSSFAQEFTTPHSQPGSALSTVSPASTTVPGLSEESTTFYSSPGSTETTAFSHSNTMSIHSQQSTPFPDSPGFTHTVLPATLTTTDIGQESTAFHSSSDATGTTPLPARSTASDLVGEPTTFYISPSPTYTTLFPASSSTSGLTEESTTFHTSPSFTSTIVSTESLETLAPGLCQEGQIWNGKQCVCPQGYVGYQCLSPLESFPVETPEKLNATLGMTVKVTYRNFTEKMNDASSQEYQNFSTLFKNRMDVVLKGDNLPQYRGVNIRRLLNGSIVVKNDVILEADYTLEYEELFENLAEIVKAKIMNETRTTLLDPDSCRKAILCYSEEDTFVDSSVTPGFDFQEQCTQKAAEGYTQFYYVDVLDGKLACVNKCTKGTKSQMNCNLGTCQLQRSGPRCLCPNTNTHWYWGETCEFNIAKSLVY

SEQ ID NO: 1643 - protein, 403 aa, synthetic construct
  REGION 1..403: note = MUC13 (Q9H3R2) ECD
TNQGNSADAVTTTETATSGPTVAAADTTETNFPETASTTANTPSFPTATSPAPPIISTHSSSTIPTPAPPIISTHSSSTIPIPTAADSESTTNVNSLATSDIITASSPNDGLITMVPSETQSNNEMSPTTEDNQSSGPPTGTALLETSTLNSTGPSNPCQDDPCADNSLCVKLHNTSFCLCLEGYYYNSSTCKKGKVFPGKISVTVSETFDPEEKHSMAYQDLHSEITSLFKDVFGTSVYGQTVILTVSTSLSPRSEMRADDKFVNVTIVTILAETTSDNEKTVTEKINKAIRSSSSNFLNYDLTLRCDYYGCNQTADDCLNGLACDCKSDLQRPNPQSPFCVASSLKCPDACNAQHKQCLIKKSGGAPECACVPGYQEDANGNCQKCAFGYSGLDCKDKFQL

SEQ ID NO: 1644 - protein, 213 aa, synthetic construct
  REGION 1..213: note = MUC15 (Q8N387) ECD
KENQDINTTQNIAEVFKTMENKPISLESEANLNSDKENITTSNLKASHSPPLNLPNNSHGITDFSSNSSAEHSLGSLKPTSTISTSPPLIHSFVSKVPWNAPIADEDLLPISAHPNATPALSSENFTWSLVNDTVKTPDNSSITVSILSSEPTSPSVTPLIVEPSGWLTTNSDSFTGFTPYQEKTTLQPTLKFTNNSKLFPNTSDPQKENRNT

SEQ ID NO: 1645 - protein, 4368 aa, synthetic construct
  REGION 1..4368: note = MUC17 (Q685J3) ECD
EQDLSVNRAVWDGGGCISQGDVLNRQCQQLSQHVRTGSAANTATGTTSTNVVEPRMYLSCSTNPEMTSIESSVTSDTPGVSSTRMTPTESRTTSESTSDSTTLFPSSTEDTSSPTTPEGTDVPMSTPSEESISSTMAFVSTAPLPSFEAYTSLTYKVDMSTPLTTSTQASSSPTTPESTTIPKSTNSEGSTPLTSMPASTMKVASSEAITLLTTPVEISTPVTISAQASSSPTTAEGPSLSNSAPSGGSTPLTRMPLSVMLVVSSEASTLSTTPAATNIPVITSTEASSSPTTAEGTSIPTSTYTEGSTPLTSTPASTMPVATSEMSTLSITPVDTSTLVTTSTEPSSLPTTAEATSMLTSTLSEGSTPLTNMPVSTILVASSEASTTSTIPVDSKTFVTTASEASSSPTTAEDTSIATSTPSEGSTPLTSMPVSTTPVASSEASNLSTTPVDSKTQVTTSTEASSSPPTAEVNSMPTSTPSEGSTPLTSMSVSTMPVASSEASTLSTTPVDTSTPVTTSSEASSSSTTPEGTSIPTSTPSEGSTPLTNMPVSTRLVVSSEASTTSTTPADSNTFVTTSSEASSSSTTAEGTSMPTSTYSERGTTITSMSVSTTLVASSEASTLSTTPVDSNTPVTTSTEATSSSTTAEGTSMPTSTYTEGSTPLTSMPVNTTLVASSEASTLSTTPVDTSTPVTTSTEASSSPTTADGASMPTSTPSEGSTPLTSMPVSKTLLTSSEASTLSTTPLDTSTHITTSTEASCSPTTTEGTSMPISTPSEGSPLLTSIPVSITPVTSPEASTLSTTPVDSNSPVTTSTEVSSSPTPAEGTSMPTSTYSEGRTPLTSMPVSTTLVATSAISTLSTTPVDTSTPVTNSTEARSSPTTSEGTSMPTSTPGEGSTPLTSMPDSTTPVVSSEARTLSATPVDTSTPVTTSTEATSSPTTAEGTSIPTSTPSEGTTPLTSTPVSHTLVANSEASTLSTTPVDSNTPLTTSTEASSPPPTAEGTSMPTSTPSEGSTPLTRMPVSTTMVASSETSTLSTTPADTSTPVTTYSQASSSSTTADGTSMPTSTYSEGSTPLTSVPVSTRLVVSSEASTLSTTPVDTSIPVTTSTEASSSPTTAEGTSIPTSPPSEGTTPLASMPVSTTLVVSSEANTLSTTPVDSKTQVATSTEASSPPPTAEVTSMPTSTPGERSTPLTSMPVRHTPVASSEASTLSTSPVDTSTPVTTSAETSSSPTTAEGTSLPTSTTSEGSTLLTSIPVSTTLVTSPEASTLLTTPVDTKGPVVTSNEVSSSPTPAEGTSMPTSTYSEGRTPLTSIPVNTTLVASSAISILSTTPVDNSTPVTTSTEACSSPTTSEGTSMPNSNPSEGTTPLTSIPVSTTPVVSSEASTLSATPVDTSTPGTTSAEATSSPTTAEGISIPTSTPSEGKTPLKSIPVSNTPVANSEASTLSTTPVDSNSPVVTSTAVSSSPTPAEGTSIAISTPSEGSTALTSIPVSTTTVASSEINSLSTTPAVTSTPVTTYSQASSSPTTADGTSMQTSTYSEGSTPLTSLPVSTMLVVSSEANTLSTTPIDSKTQVTASTEASSSTTAEGSSMTISTPSEGSPLLTSIPVSTTPVASPEASTLSTTPVDSNSPVITSTEVSSSPTPAEGTSMPTSTYTEGRTPLTSITVRTTPVASSAISTLSTTPVDNSTPVTTSTEARSSPTTSEGTSMPNSTPSEGTTPLTSIPVSTTPVLSSEASTLSATPIDTSTPVTTSTEATSSPTTAEGTSIPTSTLSEGMTPLTSTPVSHTLVANSEASTLSTTPVDSNSPVVTSTAVSSSPTPAEGTSIATSTPSEGSTALTSIPVSTTTVASSETNTLSTTPAVTSTPVTTYAQVSSSPTTADGSSMPTSTPREGRPPLTSIPVSTTTVASSEINTLSTTLADTRTPVTTYSQASSSPTTADGTSMPTPAYSEGSTPLTSMPLSTTLVVSSEASTLSTTPVDTSTPATTSTEGSSSPTTAGGTSIQTSTPSERTTPLAGMPVSTTLVVSSEGNTLSTTPVDSKTQVTNSTEASSSATAEGSSMTISAPSEGSPLLTSIPLSTTPVASPEASTLSTTPVDSNSPVITSTEVSSSPIPTEGTSMQTSTYSDRRTPLTSMPVSTTVVASSAISTLSTTPVDTSTPVTNSTEARSSPTTSEGTSMPTSTPSEGSTPFTSMPVSTMPVVTSEASTLSATPVDTSTPVTTSTEATSSPTTAEGTSIPTSTLSEGTTPLTSIPVSHTLVANSEVSTLSTTPVDSNTPFTTSTEASSPPPTAEGTSMPTSTSSEGNTPLTRMPVSTTMVASFETSTLSTTPADTSTPVTTYSQAGSSPTTADDTSMPTSTYSEGSTPLTSVPVSTMPVVSSEASTHSTTPVDTSTPVTTSTEASSSPTTAEGTSIPTSPPSEGTTPLASMPVSTTPVVSSEAGTLSTTPVDTSTPMTTSTEASSSPTTAEDIVVPISTASEGSTLLTSIPVSTTPVASPEASTLSTTPVDSNSPVVTSTEISSSATSAEGTSMPTSTYSEGSTPLRSMPVSTKPLASSEASTLSTTPVDTSIPVTTSTETSSSPTTAKDTSMPISTPSEVSTSLTSILVSTMPVASSEASTLSTTPVDTRTLVTTSTGTSSSPTTAEGSSMPTSTPGERSTPLTNILVSTTLLANSEASTLSTTPVDTSTPVTTSAEASSSPTTAEGTSMRISTPSDGSTPLTSILVSTLPVASSEASTVSTTAVDTSIPVTTSTEASSSPTTAEVTSMPTSTPSETSTPLTSMPVNHTPVASSEAGTLSTTPVDTSTPVTTSTKASSSPTTAEGIVVPISTASEGSTLLTSIPVSTTPVASSEASTLSTTPVDTSIPVTTSTEGSSSPTTAEGTSMPISTPSEVSTPLTSILVSTVPVAGSEASTLSTTPVDTRTPVTTSAEASSSPTTAEGTSMPISTPGERRTPLTSMSVSTMPVASSEASTLSRTPADTSTPVTTSTEASSSPTTAEGTGIPISTPSEGSTPLTSIPVSTTPVAIPEASTLSTTPVDSNSPVVTSTEVSSSPTPAEGTSMPISTYSEGSTPLTGVPVSTTPVTSSAISTLSTTPVDTSTPVTTSTEAHSSPTTSEGTSMPTSTPSEGSTPLTYMPVSTMLVVSSEDSTLSATPVDTSTPVTTSTEATSSTTAEGTSIPTSTPSEGMTPLTSVPVSNTPVASSEASILSTTPVDSNTPLTTSTEASSSPPTAEGTSMPTSTPSEGSTPLTSMPVSTTTVASSETSTLSTTPADTSTPVTTYSQASSSPPIADGTSMPTSTYSEGSTPLTNMSFSTTPVVSSEASTLSTTPVDTSTPVTTSTEASLSPTTAEGTSIPTSSPSEGTTPLASMPVSTTPVVSSEVNTLSTTPVDSNTLVTTSTEASSSPTIAEGTSLPTSTTSEGSTPLSIMPLSTTPVASSEASTLSTTPVDTSTPVTTSSPTNSSPTTAEVTSMPTSTAGEGSTPLTNMPVSTTPVASSEASTLSTTPVDSNTFVTSSSQASSSPATLQVTTMRMSTPSEGSSSLTTMLLSSTYVTSSEASTPSTPSVDRSTPVTTSTQSNSTPTPPEVITLPMSTPSEVSTPLTIMPVSTTSVTISEAGTASTLPVDTSTPVITSTQVSSSPVTPEGTTMPIWTPSEGSTPLTTMPVSTTRVTSSEGSTLSTPSVVTSTPVTTSTEAISSSATLDSTTMSVSMPMEISTLGTTILVSTTPVTRFPESSTPSIPSVYTSMSMTTASEGSSSPTTLEGTTTMPMSTTSERSTLLTTVLISPISVMSPSEASTLSTPPGDTSTPLLTSTKAGSFSIPAEVTTIRISITSERSTPLTTLLVSTTLPTSFPGASIASTPPLDTSTTFTPSTDTASTPTIPVATTISVSVITEGSTPGTTIFIPSTPVTSSTADVFPATTGAVSTPVITSTELNTPSTSSSSTTTSFSTTKEFTTPAMTTAAPLTYVTMSTAPSTPRTTSRGCTTSASTLSATSTPHTSTSVTTRPVTPSSESSRPSTITSHTIPPTFPPAHSSTPPTTSASSTTVNPEAVTTMTTRTKPSTRTTSFPTVTTTAVPTNTTIKSNPTSTPTVPRTTTCFGDGCQNTASRCKNGGTWDGLKCQCPNLYYGELCEEVVSSIDIGPPETISAQMELTVTVTSVKFTEELKNHSSQEFQEFKQTFTEQMNIVYSGIPEYVGVNITKLRLGSVVVEHDVLLRTKYTPEYKTVLDNATEVVKEKITKVTTQQIMINDICSDMMCFNTTGTQVQNITVTQYDPEEDCRKMAKEYGDYFVVEYRDQKPYCISPCEPGFSVSKNCNLGKCQMSLSGPQCLCVTTETHWYSGETCNQGTQKSLVYG

SEQ ID NO: 1646 - protein, 455 aa, synthetic construct
  REGION 1..455: note = MUC21 (Q5SSG8) ECD
NETSTSANTGSSVISSGASTATNSGSSVTSSGVSTATISGSSVTSNGVSIVTNSEFHTTSSGISTATNSEFSTVSSGISIATNSESSTTSSGASTATNSESSTPSSGASTATNSDSSTTSSGASTATNSDSSTTSSEASTATNSESSTTSSGASTATNSESSTVSSRASTATNSESSTTSSGASTATNSESRTTSNGAGTATNSESSTTSSGASTATNSESSTPSSGAGTATNSESSTTSSGAGTATNSESSTVSSGISTVTNSESSTPSSGANTATNSESSTTSSGANTATNSDSSTTSSGASTATNSESSTTSSGASTATNSESSTTSSGASTATNSGSSTTSSGTSTATNSESSTVSSGASTATTSESSTTSSGASTATNSESSTVSSGASTATNSESSTTSSGANTATNSGSSVTSAGSGTAALTGMHTTSHSASTAVSEAKPGGSLVPWE

SEQ ID NO: 1647 - protein, 1634 aa, synthetic construct
  REGION 1..1634: note = MUC22 (E2RYF6) ECD
NTTAFTKGSDTTTASITGSETTMASTMASTSALTTGSKITTDSTTGSETTSASTMASTAAFTTGSETNTASTTDSGTTIASTRTFTTGSDTTTGSTAGSETIVASTTVSGTTTTFTIASTTVPETTMASSTTSTAGSEKTMASSIISETTMASTTGSETATVSTTGSETTTTSTASSEATKVSTTGSETTTASTAGSETTTTSTSMAGSEATTTSTADSKVITASSMSSETTVAPAAGSNTTTASTTGSETTTILIKASETTTASTAGSETTTPSPTGSQTTIVSISGSEITTTSTAGSENTTVSSAGSGTTTASMAGSETTVSTAGSETTTVSITGTETTMVSAMGSETTTNSTTSSETTVTSTAGSETTTVSTVGSETTTAYTADSETTAASTTGSEMTTVFTAGSETITPSTAGSETTTVSTAGSETTTVSTTGSETTTASTAHSETTAASTMGSETTKVSTAGSETTVSTAGSETTAASTEDSETNTAFTEDSKTTTASTTGFETTAASTTGSEPTMASTMGSETTMASTIGPETTKVSTASSEVTTVFAAGSETIRASTVGSETTTVSTTGSETTTASIMGSETSTDSTTGSETTTASTEGSETTTASTEGSEATTVSTTGSETTTVSITDSETTTTCTEGSEMTAVSTTVFETTTASTEGSEITIASTSDSETTTASTEGSETTTVTTAGSETKTAYTTGSETTTASNTGLETTTVFTIGSDTTTASTEGSETTAVSATGSEMTTVSTEGSENTTVSTTGSETTTVSTTGLETTTTSTEGSEMTTVSTTGAETTTDSTEGSGTTAASTAGSETTTVSTADSENTTASTADSETTSASTTGSETTTASTTSSETTTASTEGSETTTVSTTDSETTMVSTTGSERTITSTEGSETTTVSATGSETTVSTEGSGTTTVSITGSETTKVSTTGSETTTTSTEGSEITTASITGSETTTASTEGSETTTASTEGSETTSASTTGSETTTASTTSSETTMASIMGSETTMASTIGSETTKVSTASSKMTTVFTENSETTIASTTASETTTVSTAGSETIPASTAGSETTTTTSTEGSETTTASTEGSETTTASTESSETTTATTIGSETTTASTEGSETTTTSTEGSETTTASTEGSEITTVSTTGSETTTASTEGSETTTASTEGSELTTVSTTGSETITVSAEGSETTTVTTMGSETTTASTAGSETTTVSTAGSETTTASIEGSETTTVSSTGSETTTVSTTGTETTITSTEGSETTTVTTAGSETTAVYTTGSETTTTSTEGSETTTVSTTGSETTTASTADLETTTVSTSGSGTTTASTAGSETTTVYITGSKTTTASTEGSEATTVSTTSSETTTASTTGSEMTTVFTTVSETTTVSTIGSEATTSSAAGSEATTTSTEGSETTTASTAGSETTTASTAGSETTTASTSGSETNTACTTGSETSTPSSAGSETNTAFIIGSESTIASTASLEPTATSLTGSETTTVSITASGATAASTTVSSTTFVLTKATDVSIQPITNTPMSGTRTTGTRLTASSSVTMAPGMDFTASAASHTVPGIVLNTSGLGTSTMGASSTTSAHGVRTTTGSTREPTSSTFQETGPVSMGTNTVSMSHTPTNVIKPSGYLQP

SEQ ID NO: 1648 - protein, 3211 aa, synthetic construct
  REGION 1..3211: note = MUC3A (Q02505) ECD
SPWATGTLSTATSISQVPFPRAEAASAVLSNSPHSRDLAGWPLGVPQLASPAPGHRENAPMTLTTSPHDTLISETLLNSPVSSNTSTTPTSKFAFKVETTPPTVLVYSATTECVYPTSFIITISHPTSICVTTTQVAFTSSYTSTPVTQKPVTTVTSTYSMTTTEKGTSAMTSSPSTTTARETPIVTVTPSSVSATDTTFHTTISSTTRTTERTPLPTGSIHTTTSPTPVFTTLKTAVTSTSPITSSITSTNTVTSMTTTASQPTATNTLSSPTRTILSSTPVLSTETITSGITNTTPLSTLVTTLPTTISRSTPTSETTYTTSPTSTVTDSTTKIAYSTSMTGTLSTETSLPPTSSSLPTTETATTPMTNLVTTTTEISSHSTPSFSSSTIYSTVSTSTTAISSLPPTSGTMVTSTTMTPSSLSTDIPFTTPTTITHHSVGSTGFLTTATDLTSTFTVSSSSAMSTSVIPSSPSIQNTETSSLVSMTSATTPNVRPTFVSTLSTPTSSLLTTFPATYSFSSSMSASSAGTTHTESISSPPASTSTLHTTAESTLAPTTTTSFTTSTTMEPPSTTAATTGTGQTTFTSSTATFPETTTPTPTTDMSTESLTTAMTSPPITSSVTSTNTVTSMTTTTSPPTTTNSFTSLTSMPLSSTPVPSTEVVTSGTINTIPPSILVTTLPTPNASSMTTSETTYPNSPTGPGTNSTTEITYPTTMTETSSTATSLPPTSPLVSTAKTAKTPTTNLVTTTTKTTSHSTTSFTSSTVYSTASTYTTAITSVPTTLGTMVTSTSMISSTVSTGIPTSQPTTITPSSVGISGSLPMMTDLTSVYTVSNMSARPTTVIPSSPTVQNTEISISVSMTSATTPSGGPTFTSTENTPTRSLLTSFPMTHSFSSSMSESSAGTTHTESISSPRGTTSTLHTTVESTPSPTTTTSFTTSTMMEPPSSTVSTTGRGQTTFPSSTATFPETTTLTPTTDISTVSLTTAMTSPPPVSSSITPTNTMTSMRTTTYWPTATNTLSPLTSSILSSTPVPSTEMITSHTTNTTPLSTLVTTLLTTITRSTPTSETTYPTSPTSIVSDSTTEITYSTSITGTLSTATTLPPTSSSLPTTETATMTPTTTLITTTPNTTSLSTPSFTSSTIYSTVSTSTTAISSASPTSGTMVTSTTMTPSSLSTDTPSTTPTTITYPSVGSTGFLTTATDLTSTFTVSSSSAMSTSVIPSSPSIQNTETSSLVSMTSATTPSLRPTITSTDSTLTSSLLTTFPSTYSFSSSMSASSAGTTHTETISSLPASTNTIHTTAESALAPTTTTSFTTSPTMEPPSTTVATTGTGQTTFPSSTATFLETTTLTPTTDFSTESLTTAMTSTPPITSSITPTDTMTSMRTTTSWPTATNTLSPLTSSILSSTPVPSTEVTTSHTTNTNPVSTLVTTLPITITRSTLTSETAYPSSPTSTVTESTTEITYPTTMTETSSTATSLPPTSSLVSTAETAKTPTTNLVTTTTKTTSHSTTSFTSSTIYSTASTPTTAITSVPTTLGTMVTSTSMIPSTVSTGIPTSQPTTITPSSVGISGSLPMMTDLTSVYTVSSMSARPTSVIPSSPTVQNTETSIFVSMMSATTPSGGPTFTSTENTPTRSLLTSFPVTHSFSSSMSASSVGTTHTQSISSPPAITSTLHTTAESTPSPTTTMSFTTFTKMETPSSTVATTGTGQTTFTSSTATSPKTTTLTPTSDISTGSFKTAVSSTPPITSSITSTYTVTSMTTTTPLGPTATNTLPSFTSSVSSSTPVPSTEAITSGTTNTTPLSTLVTTFSNSDTSSTPTSETTYPTSLTSALTDSTTRTTYSTNMTGTLSTVTSLRPTSSSLLTTVTATVPTTNLVTTTTKITSHSTPSFTSSIATTETPSHSTPRFTSSITTTETPSHSTPRFTSSITNTKTTSHSSPSFTSSITTTETTSHNTPSLTSSITTTKTTSHSTPSYTSLITTTTTTSHSTPSFTSSITTTETTSHNTPSLTSSITTTETTSHSTPSFTSSITTETTSHSTPSFTSLITITEITSHSTLSYTTSITTTETPSHSTLSFTSSITTTETTSHSTPSFTSSITTSEMPSHSTPSFTSSITTTENATHSTPNFTSSITTTETTSHSTPSFTSLITTTETTSHRWGTTETTSYSTPSFTSSNTITETTSHSTPSYITSITTTETPSSSTPSFSSSITTTETTSHSTPGFTSSITTTETTSHSTPSFTSSITTTETTSHDTPSFTSSITTSETPSHSTPSSTSLITTTKTTSHSTPSFTSSITTTETTSHSAHSFTSSITTTETTSHNTRSFTSSITTTETNSHSTTSFTSSITTTETTSHSTPSFSSSITTTETPLHSTPGLTSWVTTTKTTSHITPGLTSSITTTETTSHSTPGFTSSITTTETTSESTPSLSSSTIYSTVSTSTTAITSHFTTSETAVTPTPVTPSSLSTDIPTTSLRTLTPSSVGTSTSLTTTTDFPSIPTDISTLPTRTHIISSSPSIQSTETSSLVGTTSPTMSTVRMTLRITENTPISSFSTSIVVIPETPTQTPPVLTSATGTQTSPAPTTVTFGSTDSSTSTLHTLTPSTALSTIVSTSQVPIPSTHSSTLQTTPSTPSLQTSLTSTSEFTTESFTRGSTSTNAILTSFSTIIWSSTPTIIMSSSPSSASITPVFSTTIHSVPSSPYIFSTENVGSASITGFPSLSSSATTSTSSTSSSLTTALTEITPFSYISLPSTTPCPGTITITIVPASPTDPCVEMDPSTEATSPPTTPLTVFPFTTEMVTCPTSISIQTTLTTYMDTSSMMPESESSISPNASSSTGTGTVPTNTVFTSTRLPTSETWLSNSSVIPLPLPGVSTIPLTMKPSSSLPTILRTSSKSTHPSPPTTRTSETPVATTQTPTTLTSRRTTRITSQMTTQSTLTTTAGTCDNGGTWEQGQCACLPGFSGDRCQLQTRCQNGGQWDGLKCQCPSTFYGSSCEFAVEQVDLDVVETEVGMEVSVDQQFSPDLNDNTSQAYRDFNKTFWNQMQKIFADMQGFTFKGVEILSLRNGSIVVDYLVLLEMPFSPQLESEYEQVKTTLKEGLQNASQDVNSCQDSQTLCFKPDSIKVNNNSKTELTPAAICRRAAPTGYEEFYFPLVEATRLRCVTKCTSGVDNAIDCHQGQCVLETSGPTCRCYSTDTHWFSGPRCEVAVHWRA

SEQ ID NO: 1649 - protein, 1119 aa, synthetic construct
  REGION 1..1119: note = MUC3B (Q9H195) ECD
TLSTATSTSHVTFPRAEATRTALSNSPHSRYLAEWPQGVPQLASPAPGHRENAPMTLTTSPHDTLISETLLSSLVSSNTSTTPTSKFAFKVETTPPTVLVYSATTECVYPTSFIITISHSTSICVTTTQVTFTSSYTPTPVTQKPVTTVTRTYPMTTTEKGTSAMISSPSTTTARETPIVTVTPSSSVSATDTTFHTTISSTTRTTERTPLPTGSIHTTMSPTPVFTTLKTAVTSTSPITSTITSTNTVTSMTTTTSRPTATNTLSSLTSSILSSTPAPNTEVITSHTTTTTPPSTLVTTLPTAIARSTPTSETTPSFMSSIITTETTSHSTPSFSSSTIHSTVSSSTTAITSPFTTAETGVTSTPSSPSSLSTDIPTTSLRTLTPLSLSTSTSLTTTTDLPSIPTDISSLPTPIHIISSSPSIQSTETSSLVGTTSPTMSTVRATLRSTENTPISSFSTSIVVTPETPTTQAPPVLMSATGTQTSPVPTTVTFGSMDSSTSTLHTLTPSTALSKIMSTSQFPIPSTHSSTLQTTPSIPSLQTSLTSTSEFTTESFTRGSTSTNAILTSFSTIIWSSTPTIIMSSSPSSASITPVFATTIHSVPSSPYIFSTENVGSASITAFPSLSSSSTTSTSPTSSSLTTALTEITPFSYISLPSTTPCPGTITITIVPASPTDPCVEMDPSTEATSPPTTPLTVFPFTTEMVTCPSSISMQTTLATHMDTSSMTPESESSIIPNASSSTGTGTVPTNTVFTSTRLPTSETWLSNNSVIPTPLPGVSTIPLTMKPSSSLPTILRTSSKSTHPSPPTARTSQTSVATTQTPTTLTTCRTTPITSWMTTQSTLTTTAGTCDNGGTWEQGQCACLPGFSGDRCQLQTRCQNGGQWDGLKCQCPSTFYGSSCEFAVEQVDLDVVETEVGMEVSVDQQFSPDLNDNTSQAYRDFNKTFWNQMQKIFADMQGFTFKGVEILSLRNGSIVVDYLVLLEMPFSPQLESEYEQVKTTLKEGLQNASQDANSCQDSQALCFKPDSIKVNNNSKTELTPEAICRRAAPTGYEEFYFPLVEATRLRCVTKCTSGLDNAIDCHQGQCVLETSGPACRCYSTDTHWFSGPRCEVTVHWRA

SEQ ID NO: 1650 - protein, 2097 aa, synthetic construct
  REGION 1..2097: note = MUC4 (Q99102) ECD
TTEDTLITGSKTAAPVTSTGSTTATLEGQSTAASSRTSNQDISASSQNHQTKSTETTSKAQTDTLTQMMTSTLFSSPSVHNVMETVTQETAPPDEMTTSFPSSVTNTLMMTSKTITMTTSTDSTLGNTEETSTAGTESSTPVTSAVSITAGQEGQSRTTSWRTSIQDTSASSQNHWTRSTQTTRESQTSTLTHRTTSTPSFSPSVHNVTGTVSQKTSPSGETATSSLCSVTNTSMMTSEKITVTTSTGSTLGNPGETSSVPVTGSLMPVTSAALVTVDPEGQSPATFSRTSTQDTTAFSKNHQTQSVETTRVSQINTLNTLTPVTTSTVLSSPSGFNPSGTVSQETFPSGETTISSPSSVSNTFLVTSKVFRMPISRDSTLGNTEETSLSVSGTISAITSKVSTIWWSDTLSTALSPSSLPPKISTAFHTQQSEGAETTGRPHERSSFSPGVSQEIFTLHETTTWPSSFSSKGHTTWSQTELPSTSTGAATRLVTGNPSTRAAGTIPRVPSKVSAIGEPGEPTTYSSHSTTLPKTTGAGAQTQWTQETGTTGEALLSSPSYSVIQMIKTATSPSSSPMLDRHTSQQITTAPSTNHSTIHSTSTSPQESPAVSQRGHTRAPQTTQESQTTRSVSPMTDTKTVTTPGSSFTASGHSPSEIVPQDAPTISAATTFAPAPTGNGHTTQAPTTALQAAPSSHDATLGPSGGTSLSKTGALTLANSVVSTPGGPEGQWTSASASTSPDTAAAMTHTHQAESTEASGQTQTSEPASSGSRTTSAGTATPSSSGASGTTPSGSEGISTSGETTRFSSNPSRDSHTTQSTTELLSASASHGAIPVSTGMASSIVPGTFHPTLSEASTAGRPTGQSSPTSPSASPQETAAISRMAQTQRTGTSRGSDTISLASQATDTFSTVPPTPPSITSSGLTSPQTQTHTLSPSGSGKTFTTALISNATPLPVTSTSSASTGHATPLAVSSATSASTVSSDSPLKMETSGMTTPSLKTDGGRRTATSPPPTTSQTIISTIPSTAMHTRSTAAPIPILPERGVSLFPYGAGAGDLEFVRRTVDFTSPLFKPATGFPLGSSLRDSLYFTDNGQIIFPESDYQIFSYPNPLPTGFTGRDPVALVAPFWDDADFSTGRGTTFYQEYETFYGEHSLLVQQAESWIRKMTNNGGYKARWALKVTWVNAHAYPAQWTLGSNTYQAILSTDGSRSYALFLYQSGGMQWDVAQRSGNPVLMGFSSGDGYFENSPLMSQPVWERYRPDRFLNSNSGLQGLQFYRLHREERPNYRLECLQWLKSQPRWPSWGWNQVSCPCSWQQGRRDLRFQPVSIGRWGLGSRQLCSFTSWRGGVCCSYGPWGEFREGWHVQRPWQLAQELEPQSWCCRWNDKPYLCALYQQRRPHVGCATYRPPQPAWMFGDPHITTLDGVSYTFNGLGDFLLVGAQDGNSSFLLQGRTAQTGSAQATNFIAFAAQYRSSSLGPVTVQWLLEPHDAIRVLLDNQTVTFQPDHEDGGGQETFNATGVLLSRNGSEVSASFDGWATVSVIALSNILHASASLPPEYQNRTEGLLGVWNNNPEDDFRMPNGSTIPPGSPEEMLFHFGMTWQINGTGLLGKRNDQLPSNFTPVFYSQLQKNSSWAEHLISNCDGDSSCIYDTLALRNASIGLHTREVSKNYEQANATLNQYPPSINGGRVIEAYKGQTTLIQYTSNAEDANFTLRDSCTDLELFENGTLLWTPKSLEPFTLEILARSAKIGLASALQPRTVVCHCNAESQCLYNQTSRVGNSSLEVAGCKCDGGTFGRYCEGSEDACEEPCFPSVHCVPGKGCEACPPNLTGDGRHCAALGSSFLCQNQSCPVNYCYNQGHCYISQTLGCQPMCTCPPAFTDSRCFLAGNNFSPTVNLELPLRVIQLLLSEEENASMAEVNASVAYRLGTLDMRAFLRNSQVERIDSAAPASGSPIQHWMVISEFQYRPRGPVIDFLNNQLLAAVVEAFLYHVPRRSEEPRNDVVFQPISGEDVRDVTALNVSTLKAYFRCDGYKGYDLVYSPQSGFTCVSPCSRGYCDHGGQCQHLPSGPRCSCVSFSIYTAWGEHCEHLSMKLDA

SEQ ID NO: 1651 - protein, 472 aa, synthetic construct
  REGION 1..472: note = MUSK (O15146) ECD
LPKAPVITTPLETVDALVEEVATFMCAVESYPQPEISWTRNKILIKLFDTRYSIRENGQLLTILSVEDSDDGIYCCTANNGVGGAVESCGALQVKMKPKITRPPINVKIIEGLKAVLPCTTMGNPKPSVSWIKGDSPLRENSRIAVLESGSLRIHNVQKEDAGQYRCVAKNSLGTAYSKVVKLEVEVFARILRAPESHNVTFGSFVTLHCTATGIPVPTITWIENGNAVSSGSIQESVKDRVIDSRLQLFITKPGLYTCIATNKHGEKFSTAKAAATISIAEWSKPQKDNKGYCAQYRGEVCNAVLAKDALVFLNTSYADPEEAQELLVHTAWNELKVVSPVCRPAAEALLCNHIFQECSPGVVPTPIPICREYCLAVKELFCAKEWLVMEEKTHRGLYRSEMHLLSVPECSKLPSMHWDPTACARLPHLDYNKENLKTFPPMTSSKPSVDIPNLPSSSSSSFSVSPTYSMT

SEQ ID NO: 1652 - protein, 322 aa, synthetic construct
  REGION 1..322: note = MXRA8 (Q9BRK3) ECD
VLLHSGSSVPAAAGSSVVSESAVSWEAGARAVLRCQSPRMVWTQDRLHDRQRVLHWDLRGPGGGPARRLLDLYSAGEQRVYEARDRGRLELSASAFDDGNFSLLIRAVEETDAGLYTCNLHHHYCHLYESLAVRLEVTDGPPATPAYWDGEKEVLAVARGAPALLTCVNRGHVWTDRHVEEAQQVVHWDRQPPGVPHDRADRLLDLYASGERRAYGPLFLRDRVAVGADAFERGDFSLRIEPLEVADEGTYSCHLHHHYCGLHERRVFHLTVAEPHAEPPPRGSPGNGSSHSGAPGPDPTLARGHNVINVIVPESRAHFFQQ

SEQ ID NO: 1653 - protein, 399 aa, synthetic construct
  REGION 1..399: note = NAGPA (Q9UK23) ECD
DCTRVRAGNREHESWPPPPATPGAGGLAVRTFVSHFRDRAVAGHLTRAVEPLRTFSVLEPGGPGGCAARRRATVEETARAADCRVAQNGGFFRMNSGECLGNVVSDERRVSSSGGLQNAQFGIRRDGTLVTGYLSEEEVLDTENPFVQLLSGVVWLIRNGSIYINESQATECDETQETGSFSKFVNVISARTAIGHDRKGQLVLFHADGQTEQRGINLWEMAEFLLKQDVVNAINLDGGGSATFVLNGTLASYPSDHCQDNMWRCPRQVSTVVCVHEPRCQPPDCHGHGTCVDGHCQCTGHFWRGPGCDELDCGPSNCSQHGLCTETGCRCDAGWTGSNCSEECPLGWHGPGCQRPCKCEHHCPCDPKTGNCSVSRVKQCLQPPEATLRAGELSFFTRT

SEQ ID NO: 1654 - protein, 699 aa, synthetic construct
  REGION 1..699: note = NCAM1 (P13591) ECD
LQVDIVPSQGEISVGESKFFLCQVAGDAKDKDISWFSPNGEKLTPNQQRISVVWNDDSSSTLTIYNANIDDAGIYKCVVTGEDGSESEATVNVKIFQKLMFKNAPTPQEFREGEDAVIVCDVVSSLPPTIIWKHKGRDVILKKDVRFIVLSNNYLQIRGIKKTDEGTYRCEGRILARGEINFKDIQVIVNVPPTIQARQNIVNATANLGQSVTLVCDAEGFPEPTMSWTKDGEQIEQEEDDEKYIFSDDSSQLTIKKVDKNDEAEYICIAENKAGEQDATIHLKVFAKPKITYVENQTAMELEEQVTLTCEASGDPIPSITWRTSTRNISSEEKASWTRPEKQETLDGHMVVRSHARVSSLTLKSIQYTDAGEYICTASNTIGQDSQSMYLEVQYAPKLQGPVAVYTWEGNQVNITCEVFAYPSATISWFRDGQLLPSSNYSNIKIYNTPSASYLEVTPDSENDFGNYNCTAVNRIGQESLEFILVQADTPSSPSIDQVEPYSSTAQVQFDEPEATGGVPILKYKAEWRAVGEEVWHSKWYDAKEASMEGIVTIVGLKPETTYAVRLAALNGKGLGEISAASEFKTQPVQGEPSAPKLEGQMGEDGNSIKVNLIKQDDGGSPIRHYLVRYRALSSEWKPEIRLPSGSDHVMLKSLDWNAEYEVYVVAENQQGKSKAAHFVFRTSAQPTAIPANGSPTSG

SEQ ID NO: 1655 - protein, 678 aa, synthetic construct
  REGION 1..678: note = NCAM2 (O15394) ECD
LLQVTISLSKVELSVGESKFFTCTAIGEPESIDWYNPQGEKIISTQRVVVQKEGVRSRLTIYNANIEDAGIYRCQATDAKGQTQEATVVLEIYQKLTFREVVSPQEFKQGEDAEVVCRVSSSPAPAVSWLYHNEEVTTISDNRFAMLANNNLQILNINKSDEGIYRCEGRVEARGEIDFRDIIVIVNVPPAISMPQKSFNATAERGEEMTFSCRASGSPEPAISWFRNGKLIEENEKYILKGSNTELTVRNIINSDGGPYVCRATNKAGEDEKQAFLQVFVQPHIIQLKNETTYENGQVTLVCDAEGEPIPEITWKRAVDGFTFTEGDKSLDGRIEVKGQHGSSSLHIKDVKLSDSGRYDCEAASRIGGHQKSMYLDIEYAPKFISNQTIYYSWEGNPINISCDVKSNPPASIHWRRDKLVLPAKNTTNLKTYSTGRKMILEIAPTSDNDFGRYNCTATNHIGTRFQEYILALADVPSSPYGVKIIELSQTTAKVSFNKPDSHGGVPIHHYQVDVKEVASEIWKIVRSHGVQTMVVLNNLEPNTTYEIRVAAVNGKGQGDYSKIEIFQTLPVREPSPPSIHGQPSSGKSFKLSITKQDDGGAPILEYIVKYRSKDKEDQWLEKKVQGNKDHIILEHLQWTMGYEVQITAANRLGYSEPTVYEFSMPPKPNIIKDTLFN

SEQ ID NO: 1656 - protein, 237 aa, synthetic construct
  REGION 1..237: note = NCR1 (O76036) ECD
QQQTLPKPFIWAEPHFMVPKEKQVTICCQGNYGAVEYQLHFEGSLFAVDRPKPPERINKVKFYIPDMNSRMAGQYSCIYRVGELWSEPSNLLDLVVTEMYDTPTLSVHPGPEVISGEKVTFYCRLDTATSMFLLLKEGRSSHVQRGYGKVQAEFPLGPVTTAHRGTYRCFGSYNNHAWSFPSEPVKLLVTGDIENTSLAPEDPTFPADTWGTYLLTTETGLQKDHALWDHTAQNLLR

SEQ ID NO: 1657 - protein, 171 aa, synthetic construct
  REGION 1..171: note = NCR2 (O95944) ECD
QSKAQVLQSVAGQTLTVRCQYPPTGSLYEKKGWCKEASALVCIRLVTSSKPRTMAWTSRFTIWDDPDAGFFTVTMTDLREEDSGHYWCRIYRPSDNSVSKSVRFYLVVSPASASTQTSWTPRDLVSSQTQTQSCVPPTAGARQAPESPSTIPVPSQPQNSTLRPGPAAPIA

SEQ ID NO: 1658 - protein, 117 aa, synthetic construct
  REGION 1..117: note = NCR3 (O14931) ECD
LWVSQPPEIRTLEGSSAFLPCSFNASQGRLAIGSVTWFRDEVVPGKEVRNGTPEFRGRLAPLASSRFLHDHQAELHIRDVRGHDASIYVCRVEVLGLGVGTGNGTRLVVEKEHPQLG

SEQ ID NO: 1659 - protein, 238 aa, synthetic construct
  REGION 1..238: note = NCR3LG1 (Q68D85) ECD
DLKVEMMAGGTQITPLNDNVTIFCNIFYSQPLNITSMGITWFWKSLTFDKEVKVFEFFGDHQEAFRPGAIVSPWRLKSGDASLRLPGIQLEEAGEYRCEVVVTPLKAQGTVQLEVVASPASRLLLDQVGMKENEDKYMCESSGFYPEAINITWEKQTQKFPHPIEISEDVITGPTIKNMDGTFNVTSCLKLNSSQEDPGTVYQCVVRHASLHTPLRSNFTLTAARHSLSETEKTDNFS

SEQ ID NO: 1660 - protein, 636 aa, synthetic construct
  REGION 1..636: note = NCSTN (Q92542) ECD
NSVERKIYIPLNKTAPCVRLLNATHQIGCQSSISGDTGVIHVVEKEEDLQWVLTDGPNPPYMVLLESKHFTRDLMEKLKGRTSRIAGLAVSLTKPSPASGFSPSVQCPNDGFGVYSNSYGPEFAHCREIQWNSLGNGLAYEDFSFPIFLLEDENETKVIKQCYQDHNLSQNGSAPTFPLCAMQLFSHMHAVISTATCMRRSSIQSTFSINPEIVCDPLSDYNVWSMLKPINTTGTLKPDDRVVVAATRLDSRSFFWNVAPGAESAVASFVTQLAAAEALQKAPDVTTLPRNVMFVFFQGETFDYIGSSRMVYDMEKGKFPVQLENVDSFVELGQVALRTSLELWMHTDPVSQKNESVRNQVEDLLATLEKSGAGVPAVILRRPNQSQPLPPSSLQRFLRARNISGVVLADHSGAFHNKYYQSIYDTAENINVSYPEWLSPEEDLNFVTDTAKALADVATVLGRALYELAGGTNFSDTVQADPQTVTRLLYGFLIKANNSWFQSILRQDLRSYLGDGPLQHYIAVSSPTNTTYVVQYALANLTGTVVNLTREQCQDPSKVPSENKDLYEYSWVQGPLHSNETDRLPRCVRSTARLARALSPAFELSQWSSTEYSTWTESRWKDIRARIFLIASKELE

SEQ ID NO: 1661 - protein, 1072 aa, synthetic construct
  REGION 1..1072: note = NEO1 (Q92859) ECD
ARSGSAPQSPGASIRTFTPFYFLVEPVDTLSVRGSSVILNCSAYSEPSPKIEWKKDGTFLNLVSDDRRQLLPDGSLFISNVVHSKHNKPDEGYYQCVATVESLGTIISRTAKLIVAGLPRFTSQPEPSSVYAGNNAILNCEVNADLVPFVRWEQNRQPLLLDDRVIKLPSGMLVISNATEGDGGLYRCVVESGGPPKYSDEVELKVLPDPEVISDLVFLKQPSPLVRVIGQDVVLPCVASGLPTPTIKWMKNEEALDTESSERLVLLAGGSLEISDVTEDDAGTYFCIADNGNETIEAQAELTVQAQPEFLKQPTNIYAHESMDIVFECEVTGKPTPTVKWVKNGDMVIPSDYFKIVKEHNLQVLGLVKSDEGFYQCIAENDVGNAQAGAQLIILEHAPATTGPLPSAPRDVVASLVSTRFIKLTWRTPASDPHGDNLTYSVFYTKEGIARERVENTSHPGEMQVTIQNLMPATVYIFRVMAQNKHGSGESSAPLRVETQPEVQLPGPAPNLRAYAASPTSITVTWETPVSGNGEIQNYKLYYMEKGTDKEQDVDVSSHSYTINGLKKYTEYSFRVVAYNKHGPGVSTPDVAVRTLSDVPSAAPQNLSLEVRNSKSIMIHWQPPAPATQNGQITGYKIRYRKASRKSDVTETLVSGTQLSQLIEGLDRGTEYNFRVAALTINGTGPATDWLSAETFESDLDETRVPEVPSSLHVRPLVTSIVVSWTPPENQNIVVRGYAIGYGIGSPHAQTIKVDYKQRYYTIENLDPSSHYVITLKAFNNVGEGIPLYESAVTRPHTDTSEVDLFVINAPYTPVPDPTPMMPPVGVQASILSHDTIRITWADNSLPKHQKITDSRYYTVRWKTNIPANTKYKNANATTLSYLVTGLKPNTLYEFSVMVTKGRRSSTWSMTAHGTTFELVPTSPPKDVTVVSKEGKPKTIIVNWQPPSEANGKITGYIIYYSTDVNAEIHDWVIEPVVGNRLTHQIQELTLDTPYYFKIQARNSKGMGPMSEAVQFRTPKADSSDKMPNDQASGSGGKGSRLPDLGSDYKPPMSGSNSPHGSPTSPLDSNML

SEQ ID NO: 1662 - protein, 322 aa, synthetic construct
  REGION 1..322: note = NETO1 (Q8TDF5) ECD
TKKGTEKQTTSETQKSVQCGTWTKHAEGGIFTSPNYPSKYPPDRECIYIIEAAPRQCIELYFDEKYSIEPSWECKFDHIEVRDGPFGFSPIIGRFCGQQNPPVIKSSGRFLWIKFFADGELESMGFSARYNFTPDPDFKDLGALKPLPACEFEMGGSEGIVESIQIMKEGKATASEAVDCKWYIRAPPRSKIYLRFLDYEMQNSNECKRNFVAVYDGSSSVEDLKAKFCSTVANDVMLRTGLGVIRMWADEGSRNSRFQMLFTSFQEPPCEGNTFFCHSNMCINNTLVCNGLQNCVYPWDENHCKEKRKTSLLDQLTNTSGT

SEQ ID NO: 1663 - protein, 325 aa, synthetic construct
  REGION 1..325: note = NETO2 (Q8NC67) ECD
IAVAQKTQDGQNIGIKHIPATQCGIWVRTSNGGHFASPNYPDSYPPNKECIYILEAAPRQRIELTFDEHYYIEPSFECRFDHLEVRDGPFGFSPLIDRYCGVKSPPLIRSTGRFMWIKFSSDEELEGLGFRAKYSFIPDPDFTYLGGILNPIPDCQFELSGADGIVRSSQVEQEEKTKPGQAVDCIWTIKATPKAKIYLRFLDYQMEHSNECKRNFVAVYDGSSSIENLKAKFCSTVANDVMLKTGIGVIRMWADEGSRLSRFRMLFTSFVEPPCTSSTFFCHSNMCINNSLVCNGVQNCAYPWDENHCKEKKKAGVFEQITKTH

SEQ ID NO: 1664 - protein, 121 aa, synthetic construct
  REGION 1..121: note = NFAM1 (Q8NET5) ECD
QSVTHTGLPIMASLANTAISFSCRITYPYTPQFKVFTVSYFHEDLQGQRSPKKPTNCHPGLGTENQSHTLDCQVTLVLPGASATGTYYCSVHWPHSTVRGSGTFILVRDAGYREPPQSPQK

SEQ ID NO: 1665 - protein, 1193 aa, synthetic construct
  REGION 1..1193: note = NFASC (O94856) ECD
IEIPMDPSIQNELTQPPTITKQSAKDHIVDPRDNILIECEAKGNPAPSFHWTRNSRFFNIAKDPRVSMRRRSGTLVIDFRSGGRPEEYEGEYQCFARNKFGTALSNRIRLQVSKSPLWPKENLDPVVVQEGAPLTLQCNPPPGLPSPVIFWMSSSMEPITQDKRVSQGHNGDLYFSNVMLQDMQTDYSCNARFHFTHTIQQKNPFTLKVLTTRGVAERTPSFMYPQGTASSQMVLRGMDLLLECIASGVPTPDIAWYKKGGDLPSDKAKFENFNKALRITNVSEEDSGEYFCLASNKMGSIRHTISVRVKAAPYWLDEPKNLILAPGEDGRLVCRANGNPKPTVQWMVNGEPLQSAPPNPNREVAGDTIIFRDTQISSRAVYQCNTSNEHGYLLANAFVSVLDVPPRMLSPRNQLIRVILYNRTRLDCPFFGSPIPTLRWFKNGQGSNLDGGNYHVYENGSLEIKMIRKEDQGIYTCVATNILGKAENQVRLEVKDPTRIYRMPEDQVARRGTTVQLECRVKHDPSLKLTVSWLKDDEPLYIGNRMKKEDDSLTIFGVAERDQGSYTCVASTELDQDLAKAYLTVLADQATPTNRLAALPKGRPDRPRDLELTDLAERSVRLTWIPGDANNSPITDYVVQFEEDQFQPGVWHDHSKYPGSVNSAVLRLSPYVNYQFRVIAINEVGSSHPSLPSERYRTSGAPPESNPGDVKGEGTRKNNMEITWTPMNATSAFGPNLRYIVKWRRRETREAWNNVTVWGSRYVVGQTPVYVPYEIRVQAENDFGKGPEPESVIGYSGEDYPRAAPTEVKVRVMNSTAISLQWNRVYSDTVQGQLREYRAYYWRESSLLKNLWVSQKRQQASFPGDRLRGVVSRLFPYSNYKLEMVVVNGRGDGPRSETKEFTTPEGVPSAPRRFRVRQPNLETINLEWDHPEHPNGIMIGYTLKYVAFNGTKVGKQIVENFSPNQTKFTVQRTDPVSRYRFTLSARTQVGSGEAVTEESPAPPNEATPTAAPPTLPPTTVGATGAVSSTDATAIAATTEATTVPIIPTVAPTTIATTTTVATTTTTTAAATTTTESPPTTTSGTKIHESAPDEQSIWNVTVLPNSKWANITWKHNFGPGTDFVVEYIDSNHTKKTVPVKAQAQPIQLTDLYPGMTYTLRVYSRDNEGISSTVITFMTSTAYTNNQADIATQGW

SEQ ID NO: 1666 - protein, 222 aa, synthetic construct
  REGION 1..222: note = NGFR (P08138) ECD
KEACPTGLYTHSGECCKACNLGEGVAQPCGANQTVCEPCLDSVTFSDVVSATEPCKPCTECVGLQSMSAPCVEADDAVCRCAYGYYQDETTGRCEACRVCEAGSGLVFSCQDKQNTVCEECPDGTYSDEANHVDPCLPCTVCEDTERQLRECTRWADAECEEIPGRWITRSTPPEGSDSTAPSTQEPEAPPEQDLIASTVAGVVTTVMGSSQPVVTRGTTDN

SEQ ID NO: 1667 - protein, 672 aa, synthetic construct
  REGION 1..672: note = NLGN1 (Q8N2Q7) ECD
QKLDDVDPLVATNFGKIRGIKKELNNEILGPVIQFLGVPYAAPPTGERRFQPPEPPSPWSDIRNATQFAPVCPQNIIDGRLPEVMLPVWFTNNLDVVSSYVQDQSEDCLYLNIYVPTEDVKRISKECARKPGKKICRKGGPLTKKQTDDLGDNDGAEDEDIRDSGGPKPVMVYIHGGSYMEGTGNLYDGSVLASYGNVIVITVNYRLGVLGFLSTGDQAAKGNYGLLDLIQALRWTSENIGFFGGDPLRITVFGSGAGGSCVNLLTLSHYSEGNRWSNSTKGLFQRAIAQSGTALSSWAVSFQPAKYARMLATKVGCNVSDTVELVECLQKKPYKELVDQDIQPARYHIAFGPVIDGDVIPDDPQILMEQGEFLNYDIMLGVNQGEGLKFVENIVDSDDGISASDFDFAVSNFVDNLYGYPEGKDVLRETIKFMYTDWADRHNPETRRKTLLALFTDHQWVAPAVATADLHSNFGSPTYFYAFYHHCQTDQVPAWADAAHGDEVPYVLGIPMIGPTELFPCNFSKNDVMLSAVVMTYWTNFAKTGDPNQPVPQDTKFIHTKPNRFEEVAWTRYSQKDQLYLHIGLKPRVKEHYRANKVNLWLELVPHLHNLNDISQYTSTTTKVPSTDITFRPTRKNSVPVTSAFPTAKQDDPKQQPSPFSVDQRDYSTELS

SEQ ID NO: 1668 - protein, 663 aa, synthetic construct
  REGION 1..663: note = NLGN2 (Q8NFZ4) ECD
QRGGGGPGGGAPGGPGLGLGSLGEERFPVVNTAYGRVRGVRRELNNEILGPVVQFLGVPYATPPLGARRFQPPEAPASWPGVRNATTLPPACPQNLHGALPAIMLPVWFTDNLEAAATYVQNQSEDCLYLNLYVPTEDGPLTKKRDEATLNPPDTDIRDPGKKPVMLFLHGGSYMEGTGNMFDGSVLAAYGNVIVATLNYRLGVLGFLSTGDQAAKGNYGLLDQIQALRWLSENIAHFGGDPERITIFGSGAGASCVNLLILSHHSEGLFQKAIAQSGTAISSWSVNYQPLKYTRLLAAKVGCDREDSAEAVECLRRKPSRELVDQDVQPARYHIAFGPVVDGDVVPDDPEILMQQGEFLNYDMLIGVNQGEGLKFVEDSAESEDGVSASAFDFTVSNFVDNLYGYPEGKDVLRETIKFMYTDWADRDNGEMRRKTLLALFTDHQWVAPAVATAKLHADYQSPVYFYTFYHHCQAEGRPEWADAAHGDELPYVFGVPMVGATDLFPCNFSKNDVMLSAVVMTYWTNFAKTGDPNQPVPQDTKFIHTKPNRFEEVVWSKFNSKEKQYLHIGLKPRVRDNYRANKVAFWLELVPHLHNLHTELFTTTTRLPPYATRWPPRPPAGAPGTRRPPPPATLPPEPEPEPGPRAYDRFPGDSRDYSTELS

SEQ ID NO: 1669 - protein, 672 aa, synthetic construct
  REGION 1..672: note = NLGN3 (Q9NZ94) ECD
QAPAPTVNTHFGKLRGARVPLPSEILGPVDQYLGVPYAAPPIGEKRFLPPEPPPSWSGIRNATHFPPVCPQNIHTAVPEVMLPVWFTANLDIVATYIQEPNEDCLYLNVYVPTEDVKRISKECARKPNKKICRKGGSGAKKQGEDLADNDGDEDEDIRDSGAKPVMVYIHGGSYMEGTGNMIDGSILASYGNVIVITLNYRVGVLGFLSTGDQAAKGNYGLLDQIQALRWVSENIAFFGGDPRRITVFGSGIGASCVSLLTLSHHSEGLFQRAIIQSGSALSSWAVNYQPVKYTSLLADKVGCNVLDTVDMVDCLRQKSAKELVEQDIQPARYHVAFGPVIDGDVIPDDPEILMEQGEFLNYDIMLGVNQGEGLKFVEGVVDPEDGVSGTDFDYSVSNFVDNLYGYPEGKDTLRETIKFMYTDWADRDNPETRRKTLVALFTDHQWVEPSVVTADLHARYGSPTYFYAFYHHCQSLMKPAWSDAAHGDEVPYVFGVPMVGPTDLFPCNFSKNDVMLSAVVMTYWTNFAKTGDPNKPVPQDTKFIHTKANRFEEVAWSKYNPRDQLYLHIGLKPRVRDHYRATKVAFWKHLVPHLYNLHDMFHYTSTTTKVPPPDTTHSSHITRRPNGKTWSTKRPAISPAYSNENAQGSWNGDQDAGPLLVENPRDYSTELS

SEQ ID NO: 1670 - protein, 635 aa, synthetic construct
  REGION 1..635: note = NLGN4X (Q8N0W4) ECD
QAQYPVVNTNYGKIRGLRTPLPNEILGPVEQYLGVPYASPPTGERRFQPPEPPSSWTGIRNTTQFAAVCPQHLDERSLLHDMLPIWFTANLDTLMTYVQDQNEDCLYLNIYVPTEDDIHDQNSKKPVMVYIHGGSYMEGTGNMIDGSILASYGNVIVITINYRLGILGFLSTGDQAAKGNYGLLDQIQALRWIEENVGAFGGDPKRVTIFGSGAGASCVSLLTLSHYSEGLFQKAIIQSGTALSSWAVNYQPAKYTRILADKVGCNMLDTTDMVECLRNKNYKELIQQTITPATYHIAFGPVIDGDVIPDDPQILMEQGEFLNYDIMLGVNQGEGLKFVDGIVDNEDGVTPNDFDFSVSNFVDNLYGYPEGKDTLRETIKFMYTDWADKENPETRRKTLVALFTDHQWVAPAVATADLHAQYGSPTYFYAFYHHCQSEMKPSWADSAHGDEVPYVFGIPMIGPTELFSCNFSKNDVMLSAVVMTYWTNFAKTGDPNQPVPQDTKFIHTKPNRFEEVAWSKYNPKDQLYLHIGLKPRVRDHYRATKVAFWLELVPHLHNLNEIFQYVSTTTKVPPPDMTSFPYGTRRSPAKIWPTTKRPAITPANNPKHSKDPHKTGPEDTTVLIETKRDYSTELS

SEQ ID NO: 1671 - protein, 633 aa, synthetic construct
  REGION 1..633: note = NLGN4Y (Q8NFZ3) ECD
QYPVVNTNYGKIQGLRTPLPSEILGPVEQYLGVPYASPPTGERRFQPPESPSSWTGIRNATQFSAVCPQHLDERFLLHDMLPIWFTTSLDTLMTYVQDQNEDCLYLNIYVPMEDDIHEQNSKKPVMVYIHGGSYMEGTGNMIDGSILASYGNVIVITINYRLGILGFLSTGDQAAKGNYGLLDQIQALRWIEENVGAFGGDPKRVTIFGSGAGASCVSLLTLSHYSEGLFQKAIIQSGTALSSWAVNYQPAKYTRILADKVGCNMLDTTDMVECLKNKNYKELIQQTITPATYHIAFGPVIDGDVIPDDPQILMEQGEFLNYDIMLGVNQGEGLKFVDGIVDNEDGVTPNDFDFSVSNFVDNLYGYPEGKDTLRETIKFMYTDWADKENPETRRKTLVALFTDHQWVAPAVATADLHAQYGSPTYFYAFYHHCQSEMKPSWADSAHGDEVPYVFGIPMIGPTELFSCNFSKNDVMLSAVVMTYWTNFAKTGDPNQPVPQDTKFIHTKPNRFEEVAWSKYNPKDQLYLHIGLKPRVRDHYRATKVAFWLELVPHLHNLNEIFQYVSTTTKVPPPDMTSFPYGTRRSPAKIWPTTKRPAITPANNPKHSKDPHKTGPEDTTVLIETKRDYSTELS

SEQ ID NO: 1672 - protein, 1717 aa, synthetic construct
  REGION 1..1717: note = NOTCH1 (P46531) ECD
ARGPRCSQPGETCLNGGKCEAANGTEACVCGGAFVGPRCQDPNPCLSTPCKNAGTCHVVDRRGVADYACSCALGFSGPLCLTPLDNACLTNPCRNGGTCDLLTLTEYKCRCPPGWSGKSCQQADPCASNPCANGGQCLPFEASYICHCPPSFHGPTCRQDVNECGQKPGLCRHGGTCHNEVGSYRCVCRATHTGPNCERPYVPCSPSPCQNGGTCRPTGDVTHECACLPGFTGQNCEENIDDCPGNNCKNGGACVDGVNTYNCRCPPEWTGQYCTEDVDECQLMPNACQNGGTCHNTHGGYNCVCVNGWTGEDCSENIDDCASAACFHGATCHDRVASFYCECPHGRTGLLCHLNDACISNPCNEGSNCDTNPVNGKAICTCPSGYTGPACSQDVDECSLGANPCEHAGKCINTLGSFECQCLQGYTGPRCEIDVNECVSNPCQNDATCLDQIGEFQCICMPGYEGVHCEVNTDECASSPCLHNGRCLDKINEFQCECPTGFTGHLCQYDVDECASTPCKNGAKCLDGPNTYTCVCTEGYTGTHCEVDIDECDPDPCHYGSCKDGVATFTCLCRPGYTGHHCETNINECSSQPCRHGGTCQDRDNAYLCFCLKGTTGPNCEINLDDCASSPCDSGTCLDKIDGYECACEPGYTGSMCNINIDECAGNPCHNGGTCEDGINGFTCRCPEGYHDPTCLSEVNECNSNPCVHGACRDSLNGYKCDCDPGWSGTNCDINNNECESNPCVNGGTCKDMTSGYVCTCREGFSGPNCQTNINECASNPCLNQGTCIDDVAGYKCNCLLPYTGATCEVVLAPCAPSPCRNGGECRQSEDYESFSCVCPTGWQGQTCEVDINECVLSPCRHGASCQNTHGGYRCHCQAGYSGRNCETDIDDCRPNPCHNGGSCTDGINTAFCDCLPGFRGTFCEEDINECASDPCRNGANCTDCVDSYTCTCPAGFSGIHCENNTPDCTESSCFNGGTCVDGINSFTCLCPPGFTGSYCQHDVNECDSQPCLHGGTCQDGCGSYRCTCPQGYTGPNCQNLVHWCDSSPCKNGGKCWQTHTQYRCECPSGWTGLYCDVPSVSCEVAAQRQGVDVARLCQHGGLCVDAGNTHHCRCQAGYTGSYCEDLVDECSPSPCQNGATCTDYLGGYSCKCVAGYHGVNCSEEIDECLSHPCQNGGTCLDLPNTYKCSCPRGTQGVHCEINVDDCNPPVDPVSRSPKCFNNGTCVDQVGGYSCTCPPGFVGERCEGDVNECLSNPCDARGTQNCVQRVNDFHCECRAGHTGRRCESVINGCKGKPCKNGGTCAVASNTARGFICKCPAGFEGATCENDARTCGSLRCLNGGTCISGPRSPTCLCLGPFTGPECQFPASSPCLGGNPCYNQGTCEPTSESPFYRCLCPAKFNGLLCHILDYSFGGGAGRDIPPPLIEEACELPECQEDAGNKVCSLQCNNHACGWDGGDCSLNFNDPWKNCTQSLQCWKYFSDGHCDSQCNSAGCLFDGFDCQRAEGQCNPLYDQYCKDHFSDGHCDQGCNSAECEWDGLDCAEHVPERLAAGTLVVVVLMPPEQLRNSSFHFLRELSRVLHTNVVFKRDAHGQQMIFPYYGREEELRKHPIKRAAEGWAAPDALLGQVKASLLPGGSEGGRRRRELDPMDVRGSIVYLEIDNRQCVQASSQCFQSATDVAAFLGALASLGSLNIPYKIEAVQSETVEPPPPAQLH

SEQ ID NO: 1673 - protein, 1652 aa, synthetic construct
  REGION 1..1652: note = NOTCH2 (Q04721) ECD
LQCRDGYEPCVNEGMCVTYHNGTGYCKCPEGFLGEYCQHRDPCEKNRCQNGGTCVAQAMLGKATCRCASGFTGEDCQYSTSHPCFVSRPCLNGGTCHMLSRDTYECTCQVGFTGKECQWTDACLSHPCANGSTCTTVANQFSCKCLTGFTGQKCETDVNECDIPGHCQHGGTCLNLPGSYQCQCPQGFTGQYCDSLYVPCAPSPCVNGGTCRQTGDFTFECNCLPGFEGSTCERNIDDCPNHRCQNGGVCVDGVNTYNCRCPPQWTGQFCTEDVDECLLQPNACQNGGTCANRNGGYGCVCVNGWSGDDCSENIDDCAFASCTPGSTCIDRVASFSCMCPEGKAGLLCHLDDACISNPCHKGALCDTNPLNGQYICTCPQGYKGADCTEDVDECAMANSNPCEHAGKCVNTDGAFHCECLKGYAGPRCEMDINECHSDPCQNDATCLDKIGGFTCLCMPGFKGVHCELEINECQSNPCVNNGQCVDKVNRFQCLCPPGFTGPVCQIDIDDCSSTPCLNGAKCIDHPNGYECQCATGFTGVLCEENIDNCDPDPCHHGQCQDGIDSYTCICNPGYMGAICSDQIDECYSSPCLNDGRCIDLVNGYQCNCQPGTSGVNCEINFDDCASNPCIHGICMDGINRYSCVCSPGFTGQRCNIDIDECASNPCRKGATCINGVNGFRCICPEGPHHPSCYSQVNECLSNPCIHGNCTGGLSGYKCLCDAGWVGINCEVDKNECLSNPCQNGGTCDNLVNGYRCTCKKGFKGYNCQVNIDECASNPCLNQGTCFDDISGYTCHCVLPYTGKNCQTVLAPCSPNPCENAAVCKESPNFESYTCLCAPGWQGQRCTIDIDECISKPCMNHGLCHNTQGSYMCECPPGFSGMDCEEDIDDCLANPCQNGGSCMDGVNTFSCLCLPGFTGDKCQTDMNECLSEPCKNGGTCSDYVNSYTCKCQAGFDGVHCENNINECTESSCFNGGTCVDGINSFSCLCPVGFTGSFCLHEINECSSHPCLNEGTCVDGLGTYRCSCPLGYTGKNCQTLVNLCSRSPCKNKGTCVQKKAESQCLCPSGWAGAYCDVPNVSCDIAASRRGVLVEHLCQHSGVCINAGNTHYCQCPLGYTGSYCEEQLDECASNPCQHGATCSDFIGGYRCECVPGYQGVNCEYEVDECQNQPCQNGGTCIDLVNHFKCSCPPGTRGLLCEENIDDCARGPHCLNGGQCMDRIGGYSCRCLPGFAGERCEGDINECLSNPCSSEGSLDCIQLTNDYLCVCRSAFTGRHCETFVDVCPQMPCLNGGTCAVASNMPDGFICRCPPGFSGARCQSSCGQVKCRKGEQCVHTASGPRCFCPSPRDCESGCASSPCQHGGSCHPQRQPPYYSCQCAPPFSGSRCELYTAPPSTPPATCLSQYCADKARDGVCDEACNSHACQWDGGDCSLTMENPWANCSSPLPCWDYINNQCDELCNTVECLFDNFECQGNSKTCKYDKYCADHFKDNHCDQGCNSEECGWDGLDCAADQPENLAEGTLVIVVLMPPEQLLQDARSFLRALGTLLHTNLRIKRDSQGELMVYPYYGEKSAAMKKQRMTRRSLPGEQEQEVAGSKVFLEIDNRQCVQDSDHCFKNTDAAAALLASHAIQGTLSYPLVSVVSESLTPERTQ

SEQ ID NO: 1674 - protein, 1604 aa, synthetic construct
  REGION 1..1604: note = NOTCH3 (Q9UM47) ECD
APPCLDGSPCANGGRCTQLPSREAACLCPPGWVGERCQLEDPCHSGPCAGRGVCQSSVVAGTARFSCRCPRGFRGPDCSLPDPCLSSPCAHGARCSVGPDGRFLCSCPPGYQGRSCRSDVDECRVGEPCRHGGTCLNTPGSFRCQCPAGYTGPLCENPAVPCAPSPCRNGGTCRQSGDLTYDCACLPGFEGQNCEVNVDDCPGHRCLNGGTCVDGVNTYNCQCPPEWTGQFCTEDVDECQLQPNACHNGGTCFNTLGGHSCVCVNGWTGESCSQNIDDCATAVCFHGATCHDRVASFYCACPMGKTGLLCHLDDACVSNPCHEDAICDTNPVNGRAICTCPPGFTGGACDQDVDECSIGANPCEHLGRCVNTQGSFLCQCGRGYTGPRCETDVNECLSGPCRNQATCLDRIGQFTCICMAGFTGTYCEVDIDECQSSPCVNGGVCKDRVNGFSCTCPSGFSGSTCQLDVDECASTPCRNGAKCVDQPDGYECRCAEGFEGTLCDRNVDDCSPDPCHHGRCVDGIASFSCACAPGYTGTRCESQVDECRSQPCRHGGKCLDLVDKYLCRCPSGTTGVNCEVNIDDCASNPCTFGVCRDGINRYDCVCQPGFTGPLCNVEINECASSPCGEGGSCVDGENGFRCLCPPGSLPPLCLPPSHPCAHEPCSHGICYDAPGGFRCVCEPGWSGPRCSQSLARDACESQPCRAGGTCSSDGMGFHCTCPPGVQGRQCELLSPCTPNPCEHGGRCESAPGQLPVCSCPQGWQGPRCQQDVDECAGPAPCGPHGICTNLAGSFSCTCHGGYTGPSCDQDINDCDPNPCLNGGSCQDGVGSFSCSCLPGFAGPRCARDVDECLSNPCGPGTCTDHVASFTCTCPPGYGGFHCEQDLPDCSPSSCFNGGTCVDGVNSFSCLCRPGYTGAHCQHEADPCLSRPCLHGGVCSAAHPGFRCTCLESFTGPQCQTLVDWCSRQPCQNGGRCVQTGAYCLCPPGWSGRLCDIRSLPCREAAAQIGVRLEQLCQAGGQCVDEDSSHYCVCPEGRTGSHCEQEVDPCLAQPCQHGGTCRGYMGGYMCECLPGYNGDNCEDDVDECASQPCQHGGSCIDLVARYLCSCPPGTLGVLCEINEDDCGPGPPLDSGPRCLHNGTCVDLVGGFRCTCPPGYTGLRCEADINECRSGACHAAHTRDCLQDPGGGFRCLCHAGFSGPRCQTVLSPCESQPCQHGGQCRPSPGPGGGLTFTCHCAQPFWGPRCERVARSCRELQCPVGVPCQQTPRGPRCACPPGLSGPSCRSFPGSPPGASNASCAAAPCLHGGSCRPAPLAPFFRCACAQGWTGPRCEAPAAAPEVSEEPRCPRAACQAKRGDQRCDRECNSPGCGWDGGDCSLSVGDPWRQCEALQCWRLFNNSRCDPACSSPACLYDNFDCHAGGRERTCNPVYEKYCADHFADGRCDQGCNTEECGWDGLDCASEVPALLARGVLVLTVLLPPEELLRSSADFLQRLSAILRTSLRFRLDAHGQAMVFPYHRPSPGSEPRARRELAPEVIGSVVMLEIDNRLCLQSPENDHCFPDAQSAADYLGALSAVERLDFPYPLRDVRGEPLEPPEPSVPL

SEQ ID NO: 1675 - protein, 1424 aa, synthetic construct
  REGION 1..1424: note = NOTCH4 (Q99466) ECD
RGLLCGSFPEPCANGGTCLSLSLGQGTCQCAPGFLGETCQFPDPCQNAQLCQNGGSCQALLPAPLGLPSSPSPLTPSFLCTCLPGFTGERCQAKLEDPCPPSFCSKRGRCHIQASGRPQCSCMPGWTGEQCQLRDFCSANPCVNGGVCLATYPQIQCHCPPGFEGHACERDVNECFQDPGPCPKGTSCHNTLGSFQCLCPVGQEGPRCELRAGPCPPRGCSNGGTCQLMPEKDSTFHLCLCPPGFIGPDCEVNPDNCVSHQCQNGGTCQDGLDTYTCLCPETWTGWDCSEDVDECETQGPPHCRNGGTCQNSAGSFHCVCVSGWGGTSCEENLDDCIAATCAPGSTCIDRVGSFSCLCPPGRTGLLCHLEDMCLSQPCHGDAQCSTNPLTGSTLCLCQPGYSGPTCHQDLDECLMAQQGPSPCEHGGSCLNTPGSFNCLCPPGYTGSRCEADHNECLSQPCHPGSTCLDLLATFHCLCPPGLEGQLCEVETNECASAPCLNHADCHDLLNGFQCICLPGFSGTRCEEDIDECRSSPCANGGQCQDQPGAFHCKCLPGFEGPRCQTEVDECLSDPCPVGASCLDLPGAFFCLCPSGFTGQLCEVPLCAPNLCQPKQICKDQKDKANCLCPDGSPGCAPPEDNCTCHHGHCQRSSCVCDVGWTGPECEAELGGCISAPCAHGGTCYPQPSGYNCTCPTGYTGPTCSEEMTACHSGPCLNGGSCNPSPGGYYCTCPPSHTGPQCQTSTDYCVSAPCFNGGTCVNRPGTFSCLCAMGFQGPRCEGKLRPSCADSPCRNRATCQDSPQGPRCLCPTGYTGGSCQTLMDLCAQKPCPRNSHCLQTGPSFHCLCLQGWTGPLCNLPLSSCQKAALSQGIDVSSLCHNGGLCVDSGPSYFCHCPPGFQGSLCQDHVNPCESRPCQNGATCMAQPSGYLCQCAPGYDGQNCSKELDACQSQPCHNHGTCTPKPGGFHCACPPGFVGLRCEGDVDECLDQPCHPTGTAACHSLANAFYCQCLPGHTGQWCEVEIDPCHSQPCFHGGTCEATAGSPLGFICHCPKGFEGPTCSHRAPSCGFHHCHHGGLCLPSPKPGFPPRCACLSGYGGPDCLTPPAPKGCGPPSPCLYNGSCSETTGLGGPGFRCSCPHSSPGPRCQKPGAKGCEGRSGDGACDAGCSGPGGNWDGGDCSLGVPDPWKGCPSHSRCWLLFRDGQCHPQCDSEECLFDGYDCETPPACTPAYDQYCHDHFHNGHCEKGCNTAECGWDGGDCRPEDGDPEWGPSLALLVVLSPPALDQQLFALARVLSLTLRVGLWVRKDRDGRDMVYPYPGARAEEKLGGTRDPTYQERAAPQTQPLGKETDSLSAGFVVVMGVDLSRCGPDHPASRCPWDPGLLLRFLAAMAAVGALEPLLPGPLLAVHPHAGTAPPANQLPW

SEQ ID NO: 1676 - protein, 1033 aa, synthetic construct
  REGION 1..1033: note = NPHS1 (O60500) ECD
QLAIPASVPRGFWALPENLTVVEGASVELRCGVSTPGSAVQWAKDGLLLGPDPRIPGFPRYRLEGDPARGEFHLHIEACDLSDDAEYECQVGRSEMGPELVSPRVILSILVPPKLLLLTPEAGTMVTWVAGQEYVVNCVSGDAKPAPDITILLSGQTISDISANVNEGSQQKLFTVEATARVTPRSSDNRQLLVCEASSPALEAPIKASFTVNVLFPPGPPVIEWPGLDEGHVRAGQSLELPCVARGGNPLATLQWLKNGQPVSTAWGTEHTQAVARSVLVMTVRPEDHGAQLSCEAHNSVSAGTQEHGITLQVTFPPSAIIILGSASQTENKNVTLSCVSKSSRPRVLLRWWLGWRQLLPMEETVMDGLHGGHISMSNLTFLARREDNGLTLTCEAFSEAFTKETFKKSLILNVKYPAQKLWIEGPPEGQKLRAGTRVRLVCLAIGGNPEPSLMWYKDSRTVTESRLPQESRRVHLGSVEKSGSTFSRELVLVTGPSDNQAKFTCKAGQLSASTQLAVQFPPTNVTILANASALRPGDALNLTCVSVSSNPPVNLSWDKEGERLEGVAAPPRRAPFKGSAAARSVLLQVSSRDHGQRVTCRAHSAELRETVSSFYRLNVLYRPEFLGEQVLVVTAVEQGEALLPVSVSANPAPEAFNWTFRGYRLSPAGGPRHRILSSGALHLWNVTRADDGLYQLHCQNSEGTAEARLRLDVHYAPTIRALQDPTEVNVGGSVDIVCTVDANPILPGMFNWERLGEDEEDQSLDDMEKISRGPTGRLRIHHAKLAQAGAYQCIVDNGVAPPARRLLRLVVRFAPQVEHPTPLTKVAAAGDSTSSATLHCRARGVPNIVFTWTKNGVPLDLQDPRYTEHTYHQGGVHSSLLTIANVSAAQDYALFTCTATNALGSDQTNIQLVSISRPDPPSGLKVVSLTPHSVGLEWKPGFDGGLPQRFCIRYEALGTPGFHYVDVVPPQATTFTLTGLQPSTRYRVWLLASNALGDSGLADKGTQLPITTPGLHQPSGEPEDQLPTEPPS

SEQ ID NO: 1677 - protein, 441 aa, synthetic construct
  REGION 1..441: note = NPR1 (P16066) ECD
GNLTVAVVLPLANTSYPWSWARVGPAVELALAQVKARPDLLPGWTVRTVLGSSENALGVCSDTAAPLAAVDLKWEHNPAVFLGPGCVYAAAPVGRFTAHWRVPLLTAGAPALGFGVKDEYALTTRAGPSYAKLGDFVAALHRRLGWERQALMLYAYRPGDEEHCFFLVEGLFMRVRDRLNITVDHLEFAEDDLSHYTRLLRTMPRKGRVIYICSSPDAFRTLMLLALEAGLCGEDYVFFHLDIFGQSLQGGQGPAPRRPWERGDGQDVSARQAFQAAKIITYKDPDNPEYLEFLKQLKHLAYEQFNFTMEDGLVNTIPASFHDGLLLYIQAVTETLAHGGTVTDGENITQRMWNRSFQGVTGYLKIDSSGDRETDFSLWDMDPENGAFRVVLNYNGTSQELVAVSGRKLNWPLGYPPPDIPKCGFDNEDPACNQDHLSTLE

SEQ ID NO: 1678 - protein, 436 aa, synthetic construct
  REGION 1..436: note = NPR2 (P20594) ECD
RNLTLAVVLPEHNLSYAWAWPRVGPAVALAVEALGRALPVDLRFVSSELEGACSEYLAPLSAVDLKLYHDPDLLLGPGCVYPAASVARFASHWRLPLLTAGAVASGFSAKNDHYRTLVRTGPSAPKLGEFVVTLHGHFNWTARAALLYLDARTDDRPHYFTIEGVFEALQGSNLSVQHQVYAREPGGPEQATHFIRANGRIVYICGPLEMLHEILLQAQRENLTNGDYVFFYLDVFGESLRAGPTRATGRPWQDNRTREQAQALREAFQTVLVITYREPPNPEYQEFQNRLLIRAREDFGVELGPSLMNLIAGCFYDGILLYAEVLNETIQEGGTREDGLRIVEKMQGRRYHGVTGLVVMDKNNDRETDFVLWAMGDLDSGDFQPAAHYSGAEKQIWWTGRPIPWVKGAPPSDNPPCAFDLDDPSCDKTPLSTLAI

SEQ ID NO: 1679 - protein, 455 aa, synthetic construct
  REGION 1..455: note = NPR3 (P17342) ECD
GGVGGGGGGAGIGGGRQEREALPPQKIEVLVLLPQDDSYLFSLTRVRPAIEYALRSVEGNGTGRRLLPPGTRFQVAYEDSDCGNRALFSLVDRVAAARGAKPDLILGPVCEYAAAPVARLASHWDLPMLSAGALAAGFQHKDSEYSHLTRVAPAYAKMGEMMLALFRHHHWSRAALVYSDDKLERNCYFTLEGVHEVFQEEGLHTSIYSFDETKDLDLEDIVRNIQASERVVIMCASSDTIRSIMLVAHRHGMTSGDYAFFNIELFNSSSYGDGSWKRGDKHDFEAKQAYSSLQTVTLLRTVKPEFEKFSMEVKSSVEKQGLNMEDYVNMFVEGFHDAILLYVLALHEVLRAGYSKKDGGKIIQQTWNRTFEGIAGQVSIDANGDRYGDFSVIAMTDVEAGTQEVIGDYFGKEGRFEMRPNVKYPWGPLKLRIDENRIVEHTNSSPCKSSGGLEE

SEQ ID NO: 1680 - protein, 311 aa, synthetic construct
  REGION 1..311: note = NPTN (Q9Y639) ECD
QNAGFVKSPMSETKLTGDAFELYCDVVGSPTPEIQWWYAEVNRAESFRQLWDGARKRRVTVNTAYGSNGVSVLRITRLTLEDSGTYECRASNDPKRNDLRQNPSITWIRAQATISVLQKPRIVTSEEVIIRDSPVLPVTLQCNLTSSSHTLTYSYWTKNGVELSATRKNASNMEYRINKPRAEDSGEYHCVYHFVSAPKANATIEVKAAPDITGHKRSENKNEGQDATMYCKSVGYPHPDWIWRKKENGMPMDIVNTSGRFFIINKENYTELNIVNLQITEDPGEYECNATNAIGSASVVTVLRVRSHLAP

SEQ ID NO: 1681 - protein, 1143 aa, synthetic construct
  REGION 1..1143: note = NRCAM (Q92823) ECD
QMISALEVPLDPKLLEDLVQPPTITQQSPKDYIIDPRENIVIQCEAKGKPPPSFSWTRNGTHFDIDKDPLVTMKPGTGTLIINIMSEGKAETYEGVYQCTARNERGAAVSNNIVVRPSRSPLWTKEKLEPITLQSGQSLVLPCRPPIGLPPPIIFWMDNSFQRLPQSERVSQGLNGDLYFSNVLPEDTREDYICYARFNHTQTIQQKQPISVKVISVDELNDTIAANLSDTEFYGAKSSRERPPTFLTPEGNASNKEELRGNVLSLECIAEGLPTPIIYWAKEDGMLPKNRTVYKNFEKTLQIIHVSEADSGNYQCIAKNALGAIHHTISVRVKAAPYWITAPQNLVLSPGEDGTLICRANGNPKPRISWLTNGVPIEIAPDDPSRKIDGDTIIFSNVQERSSAVYQCNASNEYGYLLANAFVNVLAEPPRILTPANTLYQVIANRPALLDCAFFGSPLPTIEWFKGAKGSALHEDIYVLHENGTLEIPVAQKDSTGTYTCVARNKLGMAKNEVHLEIKDPTWIVKQPEYAVVQRGSMVSFECKVKHDHTLSLTVLWLKDNRELPSDERFTVDKDHLVVADVSDDDSGTYTCVANTTLDSVSASAVLSVVAPTPTPAPVYDVPNPPFDLELTDQLDKSVQLSWTPGDDNNSPITKFIIEYEDAMHKPGLWHHQTEVSGTQTTAQLKLSPYVNYSFRVMAVNSIGKSLPSEASEQYLTKASEPDKNPTAVEGLGSEPDNLVITWKPLNGFESNGPGLQYKVSWRQKDGDDEWTSVVVANVSKYIVSGTPTFVPYLIKVQALNDMGFAPEPAVVMGHSGEDLPMVAPGNVRVNVVNSTLAEVHWDPVPLKSIRGHLQGYRIYYWKTQSSSKRNRRHIEKKILTFQGSKTHGMLPGLEPFSHYTLNVRVVNGKGEGPASPDRVFNTPEGVPSAPSSLKIVNPTLDSLTLEWDPPSHPNGILTEYTLKYQPINSTHELGPLVDLKIPANKTRWTLKNLNFSTRYKFYFYAQTSAGSGSQITEEAVTTVDEAGILPPDVGAGKVQAVNPRISNLTAAAAETYANISWEYEGPEHVNFYVEYGVAGSKEEWRKEIVNGSRSFFGLKGLMPGTAYKVRVGAVGDSGFVSSEDVFETGPAMASRQVDIATQ

SEQ ID NO: 1682 - protein, 835 aa, synthetic construct
  REGION 1..835: note = NRP1 (O14786) ECD
FRNDKCGDTIKIESPGYLTSPGYPHSYHPSEKCEWLIQAPDPYQRIMINFNPHFDLEDRDCKYDYVEVFDGENENGHFRGKFCGKIAPPPVVSSGPFLFIKFVSDYETHGAGFSIRYEIFKRGPECSQNYTTPSGVIKSPGFPEKYPNSLECTYIVFVPKMSEIILEFESFDLEPDSNPPGGMFCRYDRLEIWDGFPDVGPHIGRYCGQKTPGRIRSSSGILSMVFYTDSAIAKEGFSANYSVLQSSVSEDFKCMEALGMESGEIHSDQITASSQYSTNWSAERSRLNYPENGWTPGEDSYREWIQVDLGLLRFVTAVGTQGAISKETKKKYYVKTYKIDVSSNGEDWITIKEGNKPVLFQGNTNPTDVVVAVFPKPLITRFVRIKPATWETGISMRFEVYGCKITDYPCSGMLGMVSGLISDSQITSSNQGDRNWMPENIRLVTSRSGWALPPAPHSYINEWLQIDLGEEKIVRGIIIQGGKHRENKVFMRKFKIGYSNNGSDWKMIMDDSKRKAKSFEGNNNYDTPELRTFPALSTRFIRIYPERATHGGLGLRMELLGCEVEAPTAGPTTPNGNLVDECDDDQANCHSGTGDDFQLTGGTTVLATEKPTVIDSTIQSEFPTYGFNCEFGWGSHKTFCHWEHDNHVQLKWSVLTSKTGPIQDHTGDGNFIYSQADENQKGKVARLVSPVVYSQNSAHCMTFWYHMSGSHVGTLRVKLRYQKPEEYDQLVWMAIGHQGDHWKEGRVLLHKSLKLYQVIFEGEIGKGNLGGIAVDDISINNHISQEDCAKPADLDKKNPEIKIDETGSTPGYEGEGEGDKNISRKPGNVLKTLDP

SEQ ID NO: 1683 - protein, 844 aa, synthetic construct
  REGION 1..844: note = NRP2 (O60462) ECD
RGQPDPPCGGRLNSKDAGYITSPGYPQDYPSHQNCEWIVYAPEPNQKIVLNFNPHFEIEKHDCKYDFIEIRDGDSESADLLGKHCGNIAPPTIISSGSMLYIKFTSDYARQGAGFSLRYEIFKTGSEDCSKNFTSPNGTIESPGFPEKYPHNLDCTFTILAKPKMEIILQFLIFDLEHDPLQVGEGDCKYDWLDIWDGIPHVGPLIGKYCGTKTPSELRSSTGILSLTFHTDMAVAKDGFSARYYLVHQEPLENFQCNVPLGMESGRIANEQISASSTYSDGRWTPQQSRLHGDDNGWTPNLDSNKEYLQVDLRFLTMLTAIATQGAISRETQNGYYVKSYKLEVSTNGEDWMVYRHGKNHKVFQANNDATEVVLNKLHAPLLTRFVRIRPQTWHSGIALRLELFGCRVTDAPCSNMLGMLSGLIADSQISASSTQEYLWSPSAARLVSSRSGWFPRIPQAQPGEEWLQVDLGTPKTVKGVIIQGARGGDSITAVEARAFVRKFKVSYSLNGKDWEYIQDPRTQQPKLFEGNMHYDTPDIRRFDPIPAQYVRVYPERWSPAGIGMRLEVLGCDWTDSKPTVETLGPTVKSEETTTPYPTEEEATECGENCSFEDDKDLQLPSGFNCNFDFLEEPCGWMYDHAKWLRTTWASSSSPNDRTFPDDRNFLRLQSDSQREGQYARLISPPVHLPRSPVCMEFQYQATGGRGVALQVVREASQESKLLWVIREDQGGEWKHGRIILPSYDMEYQIVFEGVIGKGRSGEIAIDDIRISTDVPLENCMEPISAFAGENFKVDIPEIHEREGYEDEIDDEYEVDWSNSSSATSGSGAPSTDKEKSWLYTLDP

SEQ ID NO: 1684 - protein, 632 aa, synthetic construct
  REGION 1..632: note = NRROS (Q86YC3) ECD
WRNRSGTATAASQGVCKLVGGAADCRGQSLASVPSSLPPHARMLTLDANPLKTLWNHSLQPYPLLESLSLHSCHLERISRGAFQEQGHLRSLVLGDNCLSENYEETAAALHALPGLRRLDLSGNALTEDMAALMLQNLSSLRSVSLAGNTIMRLDDSVFEGLERLRELDLQRNYIFEIEGGAFDGLAELRHLNLAFNNLPCIVDFGLTRLRVLNVSYNVLEWFLATGGEAAFELETLDLSHNQLLFFPLLPQYSKLRTLLLRDNNMGFYRDLYNTSSPREMVAQFLLVDGNVTNITTVSLWEEFSSSDLADLRFLDMSQNQFQYLPDGFLRKMPSLSHLNLHQNCLMTLHIREHEPPGALTELDLSHNQLSELHLAPGLASCLGSLRLFNLSSNQLLGVPPGLFANARNITTLDMSHNQISLCPLPAASDRVGPPSCVDFRNMASLRSLSLEGCGLGALPDCPFQGTSLTYLDLSSNWGVLNGSLAPLQDVAPMLQVLSLRNMGLHSSFMALDFSGFGNLRDLDLSGNCLTTFPRFGGSLALETLDLRRNSLTALPQKAVSEQLSRGLRTIYLSQNPYDCCGVDGWGALQHGQTVADWAMVTCNLSSKIIRVTELPGGVPRDCKWERLDLGL

SEQ ID NO: 1685 - protein, 346 aa, synthetic construct
  REGION 1..346: note = NRXN1 (P58400) ECD
ASSLGAHHIHHFHGSSKHHSVPIAIYRSPASLRGGHAGTTYIFSKGGGQITYKWPPNDRPSTRADRLAIGFSTVQKEAVLVRVDSSSGLGDYLELHIHQGKIGVKFNVGTDDIAIEESNAIINDGKYHVVRFTRSGGNATLQVDSWPVIERYPAGNNDNERLAIARQRIPYRLGRVVDEWLLDKGRQLTIFNSQATIIIGGKEQGQPFQGQLSGLYYNGLKVLNMAAENDANIAIVGNVRLVGEVPSSMTTESTATAMQSEMSTSIMETTTTLATSTARRGKPPTKEPISQTTDDILVASAECPSDDEDIDPCEPSSGGLANPTRAGGREPYPGSAEVIRESSSTT

SEQ ID NO: 1686 - protein, 1371 aa, synthetic construct
  REGION 1..1371: note = NRXN1 (Q9ULB1) ECD
LEFPGAEGQWTRFPKWNACCESEMSFQLKTRSARGLVLYFDDEGFCDFLELILTRGGRLQLSFSIFCAEPATLLADTPVNDGAWHSVRIRRQFRNTTLFIDQVEAKWVEVKSKRRDMTVFSGLFVGGLPPELRAAALKLTLASVREREPFKGWIRDVRVNSSQVLPVDSGEVKLDDEPPNSGGGSPCEAGEEGEGGVCLNGGVCSVVDDQAVCDCSRTGFRGKDCSQEDNNVEGLAHLMMGDQGKSKGKEEYIATFKGSEYFCYDLSQNPIQSSSDEITLSFKTLQRNGLMLHTGKSADYVNLALKNGAVSLVINLGSGAFEALVEPVNGKFNDNAWHDVKVTRNLRQHSGIGHAMVTISVDGILTTTGYTQEDYTMLGSDDFFYVGGSPSTADLPGSPVSNNFMGCLKEVVYKNNDVRLELSRLAKQGDPKMKIHGVVAFKCENVATLDPITFETPESFISLPKWNAKKTGSISFDFRTTEPNGLILFSHGKPRHQKDAKHPQMIKVDFFAIEMLDGHLYLLLDMGSGTIKIKALLKKVNDGEWYHVDFQRDGRSGTISVNTLRTPYTAPGESEILDLDDELYLGGLPENKAGLVFPTEVWTALLNYGYVGCIRDLFIDGQSKDIRQMAEVQSTAGVKPSCSKETAKPCLSNPCKNNGMCRDGWNRYVCDCSGTGYLGRSCEREATVLSYDGSMFMKIQLPVVMHTEAEDVSLRFRSQRAYGILMATTSRDSADTLRLELDAGRVKLTVNLDCIRINCNSSKGPETLFAGYNLNDNEWHTVRVVRRGKSLKLTVDDQQAMTGQMAGDHTRLEFHNIETGIITERRYLSSVPSNFIGHLQSLTFNGMAYIDLCKNGDIDYCELNARFGFRNIIADPVTFKTKSSYVALATLQAYTSMHLFFQFKTTSLDGLILYNSGDGNDFIVVELVKGYLHYVFDLGNGANLIKGSSNKPLNDNQWHNVMISRDTSNLHTVKIDTKITTQITAGARNLDLKSDLYIGGVAKETYKSLPKLVHAKEGFQGCLASVDLNGRLPDLISDALFCNGQIERGCEGPSTTCQEDSCSNQGVCLQQWDGFSCDCSMTSFSGPLCNDPGTTYIFSKGGGQITYKWPPNDRPSTRADRLAIGFSTVQKEAVLVRVDSSSGLGDYLELHIHQGKIGVKFNVGTDDIAIEESNAIINDGKYHVVRFTRSGGNATLQVDSWPVIERYPAGRQLTIFNSQATIIIGGKEQGQPFQGQLSGLYYNGLKVLNMAAENDANIAIVGNVRLVGEVPSSMTTESTATAMQSEMSTSIMETTTTLATSTARRGKPPTKEPISQTTDDILVASAECPSDDEDIDPCEPSSGGLANPTRAGGREPYPGSAEVIRESSSTT

SEQ ID NO: 1687 - protein, 540 aa, synthetic construct
  REGION 1..540: note = NRXN2 (P58401) ECD
ARVSSSLSTTHHVHHFHSKHGTVPIAINRMPFLTRGGHAGTTYIFGKGGALITYTWPPNDRPSTRMDRLAVGFSTHQRSAVLVRVDSASGLGDYLQLHIDQGTVGVIFNVGTDDITIDEPNAIVSDGKYHVVRFTRSGGNATLQVDSWPVNERYPAGNFDNERLAIARQRIPYRLGRVVDEWLLDKGRQLTIFNSQAAIKIGGRDQGRPFQGQVSGLYYNGLKVLALAAESDPNVRTEGHLRLVGEGPSVLLSAETTATTLLADMATTIMETTTTMATTTTRRGRSPTLRDSTTQNTDDLLVASAECPSDDEDLEECEPSTGGELILPIITEDSLDPPPVATRSPFVPPPPTFYPFLTGVGATQDTLPPPAARRPPSGGPCQAERDDSDCEEPIEASGFASGEVFDSSLPPTDDEDFYTTFPLVTDRTTLLSPRKPAPRPNLRTDGATGAPGVLFAPSAPAPNLPAGKMNHRDPLQPLLENPPLGPGAPTSFEPRRPPPLRPGVTSAPGFPHLPTANPTGPGERGPPGAVEVIRESSSTT

SEQ ID NO: 1688 - protein, 1608 aa, synthetic construct
  REGION 1..1608: note = NRXN2 (Q9P2S2) ECD
LEFGGGPGQWARYARWAGAASSGELSFSLRTNATRALLLYLDDGGDCDFLELLLVDGRLRLRFTLSCAEPATLQLDTPVADDRWHMVLLTRDARRTALAVDGEARAAEVRSKRREMQVASDLFVGGIPPDVRLSALTLSTVKYEPPFRGLLANLKLGERPPALLGSQGLRGATADPLCAPARNPCANGGLCTVLAPGEVGCDCSHTGFGGKFCSEEEHPMEGPAHLTLNSEVGSLLFSEGGAGRGGAGDVHQPTKGKEEFVATFKGNEFFCYDLSHNPIQSSTDEITLAFRTLQRNGLMLHTGKSADYVNLSLKSGAVWLVINLGSGAFEALVEPVNGKFNDNAWHDVRVTRNLRQHAGIGHAMVNKLHYLVTISVDGILTTTGYTQEDYTMLGSDDFFYIGGSPNTADLPGSPVSNNFMGCLKDVVYKNNDFKLELSRLAKEGDPKMKLQGDLSFRCEDVAALDPVTFESPEAFVALPRWSAKRTGSISLDFRTTEPNGLLLFSQGRRAGGGAGSHSSAQRADYFAMELLDGHLYLLLDMGSGGIKLRASSRKVNDGEWCHVDFQRDGRKGSISVNSRSTPFLATGDSEILDLESELYLGGLPEGGRVDLPLPPEVWTAALRAGYVGCVRDLFIDGRSRDLRGLAEAQGAVGVAPFCSRETLKQCASAPCRNGGVCREGWNRFICDCIGTGFLGRVCEREATVLSYDGSMYMKIMLPNAMHTEAEDVSLRFMSQRAYGLMMATTSRESADTLRLELDGGQMKLTVNLDCLRVGCAPSKGPETLFAGHKLNDNEWHTVRVVRRGKSLQLSVDNVTVEGQMAGAHMRLEFHNIETGIMTERRFISVVPSNFIGHLSGLVFNGQPYMDQCKDGDITYCELNARFGLRAIVADPVTFKSRSSYLALATLQAYASMHLFFQFKTTAPDGLLLFNSGNGNDFIVIELVKGYIHYVFDLGNGPSLMKGNSDKPVNDNQWHNVVVSRDPGNVHTLKIDSRTVTQHSNGARNLDLKGELYIGGLSKNMFSNLPKLVASRDGFQGCLASVDLNGRLPDLIADALHRIGQVERGCDGPSTTCTEESCANQGVCLQQWDGFTCDCTMTSYGGPVCNDPGTTYIFGKGGALITYTWPPNDRPSTRMDRLAVGFSTHQRSAVLVRVDSASGLGDYLQLHIDQGTVGVIFNVGTDDITIDEPNAIVSDGKYHVVRFTRSGGNATLQVDSWPVNERYPAGNFDNERLAIARQRIPYRLGRVVDEWLLDKGRQLTIFNSQAAIKIGGRDQGRPFQGQVSGLYYNGLKVLALAAESDPNVRTEGHLRLVGEGPSVLLSAETTATTLLADMATTIMETTTTMATTTTRRGRSPTLRDSTTQNTDDLLVASAECPSDDEDLEECEPSTGGELILPIITEDSLDPPPVATRSPFVPPPPTFYPFLTGVGATQDTLPPPAARRPPSGGPCQAERDDSDCEEPIEASGFASGEVFDSSLPPTDDEDFYTTFPLVTDRTTLLSPRKPAPRPNLRTDGATGAPGVLFAPSAPAPNLPAGKMNHRDPLQPLLENPPLGPGAPTSFEPRRPPPLRPGVTSAPGFPHLPTANPTGPGERGPPGAVEVIRESSSTT

SEQ ID NO: 1689 - protein, 527 aa, synthetic construct
  REGION 1..527: note = NRXN3 (Q9HDB5) ECD
SSNVASSSSTSSSPGSHSQHEHHFHGSKHHSVPISIYRSPVSLRGGHAGATYIFGKSGGLILYTWPANDRPSTRSDRLAVGFSTTVKDGILVRIDSAPGLGDFLQLHIEQGKIGVVFNIGTVDISIKEERTPVNDGKYHVVRFTRNGGNATLQVDNWPVNEHYPTGRQLTIFNTQAQIAIGGKDKGRLFQGQLSGLYYDGLKVLNMAAENNPNIKINGSVRLVGEVPSILGTTQTTSMPPEMSTTVMETTTTMATTTTRKNRSTASIQPTSDDLVSSAECSSDDEDFVECEPSTGGELVIPLLVEDPLATPPIATRAPSITLPPTFRPLLTIIETTKDSLSMTSEAGLPCLSDQGSDGCDDDGLVISGYGSGETFDSNLPPTDDEDFYTTFSLVTDKSLSTSIFEGGYKAHAPKWESKDFRPNKVSETSRTTTTSLSPELIRFTASSSSGMVPKLPAGKMNNRDLKPQPDIVLLPLPTAYELDSTKLKSPLITSPMFRNVPTANPTEPGIRRVPGASEVIRESSSTT

SEQ ID NO: 1690 - protein, 1541 aa, synthetic construct
  REGION 1..1541: note = NRXN3 (Q9Y4C0) ECD
LEFMGLPNQWARYLRWDASTRSDLSFQFKTNVSTGLLLYLDDGGVCDFLCLSLVDGRVQLRFSMDCAETAVLSNKQVNDSSWHFLMVSRDRLRTVLMLDGEGQSGELQPQRPYMDVVSDLFLGGVPTDIRPSALTLDGVQAMPGFKGLILDLKYGNSEPRLLGSRGVQMDAEGPCGERPCENGGICFLLDGHPTCDCSTTGYGGKLCSEDVSQDPGLSHLMMSEQAREENVATFRGSEYLCYDLSQNPIQSSSDEITLSFKTWQRNGLILHTGKSADYVNLALKDGAVSLVINLGSGAFEAIVEPVNGKFNDNAWHDVKVTRNLRQVTISVDGILTTTGYTQEDYTMLGSDDFFYVGGSPSTADLPGSPVSNNFMGCLKEVVYKNNDIRLELSRLARIADTKMKIYGEVVFKCENVATLDPINFETPEAYISLPKWNTKRMGSISFDFRTTEPNGLILFTHGKPQERKDARSQKNTKVDFFAVELLDGNLYLLLDMGSGTIKVKATQKKANDGEWYHVDIQRDGRSGTISVNSRRTPFTASGESEILDLEGDMYLGGLPENRAGLILPTELWTAMLNYGYVGCIRDLFIDGRSKNIRQLAEMQNAAGVKSSCSRMSAKQCDSYPCKNNAVCKDGWNRFICDCTGTGYWGRTCEREASILSYDGSMYMKIIMPMVMHTEAEDVSFRFMSQRAYGLLVATTSRDSADTLRLELDGGRVKLMVNLDCIRINCNSSKGPETLYAGQKLNDNEWHTVRVVRRGKSLKLTVDDDVAEGTMVGDHTRLEFHNIETGIMTEKRYISVVPSSFIGHLQSLMFNGLLYIDLCKNGDIDYCELKARFGLRNIIADPVTFKTKSSYLSLATLQAYTSMHLFFQFKTTSPDGFILFNSGDGNDFIAVELVKGYIHYVFDLGNGPNVIKGNSDRPLNDNQWHNVVITRDNSNTHSLKVDTKVVTQVINGAKNLDLKGDLYMAGLAQGMYSNLPKLVASRDGFQGCLASVDLNGRLPDLINDALHRSGQIERGCEGPSTTCQEDSCANQGVCMQQWEGFTCDCSMTSYSGNQCNDPGATYIFGKSGGLILYTWPANDRPSTRSDRLAVGFSTTVKDGILVRIDSAPGLGDFLQLHIEQGKIGVVFNIGTVDISIKEERTPVNDGKYHVVRFTRNGGNATLQVDNWPVNEHYPTGRQLTIFNTQAQIAIGGKDKGRLFQGQLSGLYYDGLKVLNMAAENNPNIKINGSVRLVGEVPSILGTTQTTSMPPEMSTTVMETTTTMATTTTRKNRSTASIQPTSDDLVSSAECSSDDEDFVECEPSTTGGELVIPLLVEDPLATPPIATRAPSITLPPTFRPLLTIIETTKDSLSMTSEAGLPCLSDQGSDGCDDDGLVISGYGSGETFDSNLPPTDDEDFYTTFSLVTDKSLSTSIFEGGYKAHAPKWESKDFRPNKVSETSRTTTTSLSPELIRFTASSSSGMVPKLPAGKMNNRDLKPQPDIVLLPLPTAYELDSTKLKSPLITSPMFRNVPTANPTEPGIRRVPGASEVIRESSSTT

SEQ ID NO: 1691 - protein, 391 aa, synthetic construct
  REGION 1..391: note = NTRK1 (P04629) ECD
AAPCPDACCPHGSSGLRCTRDGALDSLHHLPGAENLTELYIENQQHLQHLELRDLRGLGELRNLTIVKSGLRFVAPDAFHFTPRLSRLNLSFNALESLSWKTVQGLSLQELVLSGNPLHCSCALRWLQRWEEEGLGGVPEQKLQCHGQGPLAHMPNASCGVPTLKVQVPNASVDVGDDVLLRCQVEGRGLEQAGWILTELEQSATVMKSGGLPSLGLTLANVTSDLNRKNVTCWAENDVGRAEVSVQVNVSFPASVQLHTAVEMHHWCIPFSVDGQPAPSLRWLFNGSVLNETSFIFTEFLEPAANETVRHGCLRLNQPTHVNNGNYTLLAANPFGQASASIMAAFMDNPFEFNPEDPIPVSFSPVDTNSTSGDPVEKKDETPFGVSVAVG

SEQ ID NO: 1692 - protein, 399 aa, synthetic construct
  REGION 1..399: note = NTRK2 (Q16620) ECD
CPTSCKCSASRIWCSDPSPGIVAFPRLEPNSVDPENITEIFIANQKRLEIINEDDVEAYVGLRNLTIVDSGLKFVAHKAFLKNSNLQHINFTRNKLTSLSRKHFRHLDLSELILVGNPFTCSCDIMWIKTLQEAKSSPDTQDLYCLNESSKNIPLANLQIPNCGLPSANLAAPNLTVEEGKSITLSCSVAGDPVPNMYWDVGNLVSKHMNETSHTQGSLRITNISSDDSGKQISCVAENLVGEDQDSVNLTVHFAPTITFLESPTSDHHWCIPFTVKGNPKPALQWFYNGAILNESKYICTKIHVTNHTEYHGCLQLDNPTHMNNGDYTLIAKNEYGKDEKQISAHFMGWPGIDDGANPNYPDVIYEDYGTAANDIGDTTNRSNEIPSTDVTDKTGREH

SEQ ID NO: 1693 - protein, 398 aa, synthetic construct
  REGION 1..398: note = NTRK3 (Q16288) ECD
CPANCVCSKTEINCRRPDDGNLFPLLEGQDSGNSNGNASINITDISRNITSIHIENWRSLHTLNAVDMELYTGLQKLTIKNSGLRSIQPRAFAKNPHLRYINLSSNRLTTLSWQLFQTLSLRELQLEQNFFNCSCDIRWMQLWQEQGEAKLNSQNLYCINADGSQLPLFRMNISQCDLPEISVSHVNLTVREGDNAVITCNGSGSPLPDVDWIVTGLQSINTHQTNLNWTNVHAINLTLVNVTSEDNGFTLTCIAENVVGMSNASVALTVYYPPRVVSLEEPELRLEHCIEFVVRGNPPPTLHWLHNGQPLRESKIIHVEYYQEGEISEGCLLFNKPTHYNNGNYTLIAKNPLGTANQTINGHFLKEPFPESTDNFILFDEVSPTPPITVTHKPEEDT

SEQ ID NO: 1694 - protein, 1782 aa, synthetic construct
  REGION 1..1782: note = NUP210 (Q8TEM1) ECD
KLNIPKVLLPFTRATRVNFTLEASEGCYRWLSTRPEVASIEPLGLDEQQCSQKAVVQARLTQPARLTSIIFAEDITTGQVLRCDAIVDLIHDIQIVSTTRELYLEDSPLELKIQALDSEGNTFSTLAGLVFEWTIVKDSEADRFSDSHNALRILTFLESTYIPPSYISEMEKAAKQGDTILVSGMKTGSSKLKARIQEAVYKNVRPAEVRLLILENILLNPAYDVYLMVGTSIHYKVQKIRQGKITELSMPSDQYELQLQNSIPGPEGDPARPVAVLAQDTSMVTALQLGQSSLVLGHRSIRMQGASRLPNSTIYVVEPGYLGFTVHPGDRWVLETGRLYEITIEVFDKFSNKVYVSDNIRIETVLPAEFFEVLSSSQNGSYHRIRALKRGQTAIDAALTSVVDQDGGVHILQVPVWNQQEVEIHIPITLYPSILTFPWQPKTGAYQYTIRAHGGSGNFSWSSSSHLVATVTVKGVMTTGSDIGFSVIQAHDVQNPLHFGEMKVYVIEPHSMEFAPCQVEARVGQALELPLRISGLMPGGASEVVTLSDCSHFDLAVEVENQGVFQPLPGRLPPGSEHCSGIRVKAEAQGSTTLLVSYRHGHVHLSAKITIAAYLPLKAVDPSSVALVTLGSSKEMLFEGGPRPWILEPSKFFQNVTAEDTDSIGLALFAPHSSRNYQQHWILVTCQALGEQVIALSVGNKPSLTNPFPAVEPAVVKFVCAPPSRLTLAPVYTSPQLDMSCPLLQQNKQVVPVSSHRNPRLDLAAYDQEGRRFDNFSSLSIQWESTRPVLASIEPELPMQLVSQDDESGQKKLHGLQAILVHEASGTTAITATATGYQESHLSSARTKQPHDPLVPLSASIELILVEDVRVSPEEVTIYNHPGIQAELRIREGSGYFFLNTSTADVVKVAYQEARGVAMVHPLLPGSSTIMIHDLCLVFPAPAKAVVYVSDIQELYIRVVDKVEIGKTVKAYVRVLDLHKKPFLAKYFPFMDLKLRAASPIITLVALDEALDNYTITFLIRGVAIGQTSLTASVTNKAGQRINSAPQQIEVFPPFRLMPRKVTLLIGATMQVTSEGGPQPQSNILFSISNESVALVSAAGLVQGLAIGNGTVSGLVQAVDAETGKVVIISQDLVQVEVLLLRAVRIRAPIMRMRTGTQMPIYVTGITNHQNPFSFGNAVPGLTFHWSVTKRDVLDLRGRHHEASIRLPSQYNFAMNVLGRVKGRTGLRVVVKAVDPTSGQLYGLARELSDEIQVQVFEKLQLLNPEIEAEQILMSPNSYIKLQTNRDGAASLSYRVLDGPEKVPVVHVDEKGFLASGSMIGTSTIEVIAQEPFGANQTIIVAVKVSPVSYLRVSMSPVLHTQNKEALVAVPLGMTVTFTVHFHDNSGDVFHAHSSVLNFATNRDDFVQIGKGPTNNTCVVRTVSVGLTLLRVWDAEHPGLSDFMPLPVLQAISPELSGAMVVGDVLCLATVLTSLEGLSGTWSSSANSILHIDPKTGVAVARAVGSVTVYYEVAGHLRTYKEVVVSVPQRIMARHLHPIQTSFQEATASKVIVAVGDRSSNLRGECTPTQREVIQALHPETLISCQSQFKPAVFDFPSQDVFTVEPQFDTALGQYFCSITMHRLTDKQRKHLSMKKTALVVSASLSSSHFSTEQVGAEVPFSPGLFADQAEILLSNHYTSSEIRVFGAPEVLENLEVKSGSPAVLAFAKEKSFGWPSFITYTVGVLDPAAGSQGPLSTTLTFSSPVTNQAIAIPVTVAFVVDRRGPGPYGASLFQHFLDSYQ

SEQ ID NO: 1695 - protein, 1777 aa, synthetic construct
  REGION 1..1777: note = NUP210L (Q5VU65) ECD
ANKLNVPQVLLPFGREPGRVPFLLEAQRGCYTWHSTHHDAVTVEPLYENGTLCSQKAVLIAESTQPIRLSSIILAREIVTDHELRCDVKVDVINSIEIVSRARELYVDDSPLELMVRALDAEGNTFSSLAGMMFEWSIAQDNESAREELSSKIRILKYSEAEYAPPIYIAEMEKEEKQGDVILVSGIRTGAAVVKVRIHEPFYKKVAAALIRLLVLENIFLIPSHDIYLLVGTYIKYQVAKMVQGRVTEVKFPLEHYILELQDHRVALNGSHSEKVAILDDKTAMVTASQLGQTNLVFVHKNVHMRSVSGLPNCTIYVVEPGFLGFTVQPGNRWSLEVGQVYVITVDVFDKSSTKVYISDNLRITYDFPKEYFEEQLTTVNGSYHIVKALKDGVVVINASLTSIIYQNKDIQPIKFLIKHQQEVKIYFPIMLTPKFLAFPHHPMGMLYRYKVQVEGGSGNFTWTSSNETVVIVTTKGVVTAGQVRGNSTVLARDVQNPFRYGEIKIHVLKLNKMELLPFHADVEIGQIIEIPIAMYHINKETKEAMAFTDCSHLSLDLNMDKQGVFTLLKEGIQRPGPMHCSSTHIAAKSLGHTLVTVSVNECDKYLESSATFAAYEPLKALNPVEVALVTWQSVKEMVFEGGPRPWILEPSRFFLELNAEKTEKIGIAQVWLPSKRKQNQYIYRIQCLDLGEQVLTFRIGNHPGVLNPSPAVEVLQVRFICAHPASMSVTPVYKVPAGAQPCPLPQHNKWLIPVSRLRDTVLELAVFDQHRRKFDNFSSLMLEWKSSNETLAHFEDYKSVEMVAKDDGSGQTRLHGHQILKVHQIKGTVLIGVNFVGYSEKKSPKEISNLPRSVDVELLLVDDVTVVPENATIYNHPDVKETFSLVEGSGYFLVNSSEQGVVTITYMEAESSVELVPLHPGFFTLEVYDLCLAFLGPATAHLRVSDIQELELDLIDKVEIDKTVLVTVRVLGSSKRPFQNKYFRNMELKLQLASAIVTLTPMEQQDEYSENYILRATTIGQTTLVAIAKDKMGRKYTSTPRHIEVFPPFRLLPEKMTLIPMNMMQVMSEGGPQPQSIVHFSISNQTVAVVNRRGQVTGKIVGTAVVHGTIQTVNEDTGKVIVFSQDEVQIEVVQLRAVRILAAATRLITATKMPVYVMGVTSTQTPFSFSNANPGLTFHWSMSKRDVLDLVPRHSEVFLQLPVEHNFAMVVHTKAAGRTSIKVTVHCMNSSSGQFEGNLLELSDEVQILVFEKLQLFYPECQPEQILMPINSQLKLHTNREGAAFVSSRVLKCFPNSSVIEEDGEGLLKAGSIAGTAVLEVTSIEPFGVNQTTITGVQVAPVTYLRVSSQPKLYTAQGRTLSAFPLGMSLTFTVQFYNSIGEKFHTHNTQLYLALNRDDLLHIGPGNKNYTYMAQAVNRGLTLVGLWDRRHPGMADYIPVAVEHAIEPDTKLTFVGDIICFSTHLVSQHGEPGIWMISANNILQTDIVTGVGVARSPGTAMIFHDIPGVVKTYREVVVNASSRLMLSYDLKTYLTNTLNSTVFKLFITTGRNGVNLKGFCTPNQALAITKVLLPATLMLCHVQFSNTLLDIPASKVFQVHSDFSMEKGVYVCIIKVRPQSEELLQALSVADTSVYGWATLVSERSKNGMQRILIPFIPAFYINQSELVLSHKQDIGEIRVLGVDRVLRKLEVISSSPVLVVAGHSHSPLTPGLAIYSVRVVNFTSFQQMASPVFINISCVLTSQSEAVVVRAMKDKLGADHCEDSAILKRFTGSYQ

SEQ ID NO: 1696 - protein, 713 aa, synthetic construct
  REGION 1..713: note = OSMR (Q99650) ECD
ERLPLTPVSLKVSTNSTRQSLHLQWTVHNLPYHQELKMVFQIQISRIETSNVIWVGNYSTTVKWNQVLHWSWESELPLECATHFVRIKSLVDDAKFPEPNFWSNWSSWEEVSVQDSTGQDILFVFPKDKLVEEGTNVTICYVSRNIQNNVSCYLEGKQIHGEQLDPHVTAFNLNSVPFIRNKGTNIYCEASQGNVSEGMKGIVLFVSKVLEEPKDFSCETEDFKTLHCTWDPGTDTALGWSKQPSQSYTLFESFSGEKKLCTHKNWCNWQITQDSQETYNFTLIAENYLRKRSVNILFNLTHRVYLMNPFSVNFENVNATNAIMTWKVHSIRNNFTYLCQIELHGEGKMMQYNVSIKVNGEYFLSELEPATEYMARVRCADASHFWKWSEWSGQNFTTLEAAPSEAPDVWRIVSLEPGNHTVTLFWKPLSKLHANGKILFYNVVVENLDKPSSSELHSIPAPANSTKLILDRCSYQICVIANNSVGASPASVIVISADPENKEVEEERIAGTEGGFSLSWKPQPGDVIGYVVDWCDHTQDVLGDFQWKNVGPNTTSTVISTDAFRPGVRYDFRIYGLSTKRIACLLEKKTGYSQELAPSDNPHVLVDTLTSHSFTLSWKDYSTESQPGFIQGYHVYLKSKARQCHPRFEKAVLSDGSECCKYKIDNPEEKALIVDNLKPESFYEFFITPFTSAGEGPSATFTKVTTPDEHSSM

SEQ ID NO: 1697 - protein, 253 aa, synthetic construct
  REGION 1..253: note = OSTM1 (Q86WC4) ECD
ALPFGSSPHRVFHDLLSEQQLLEVEDLSLSLLQGGGLGPLSLPPDLPDLDPECRELLLDFANSSAELTGCLVRSARPVRLCQTCYPLFQQVVSKMDNISRAAGNTSESQSCARSLLMADRMQIVVILSEFFNTTWQEANCANCLTNNSEELSNSTVYFLNLFNHTLTCFEHNLQGNAHSLLQTKNYSEVCKNCREAYKTLSSLYSEMQKMNELENKAEPGTHLCIDVEDAMNITRKLWSRTFNCSVPCSDTVP

SEQ ID NO: 1698 - protein, 833 aa, synthetic construct
  REGION 1..833: note = PAM (P19021) ECD
FKETTRPFSNECLGTTRPVVPIDSSDFALDIRMPGVTPKQSDTYFCMSMRIPVDEEAFVIDFKPRASMDTVHHMLLFGCNMPSSTGSYWFCDEGTCTDKANILYAWARNAPPTRLPKGVGFRVGGETGSKYFVLQVHYGDISAFRDNNKDCSGVSLHLTRLPQPLIAGMYLMMSVDTVIPAGEKVVNSDISCHYKNYPMHVFAYRVHTHHLGKVVSGYRVRNGQWTLIGRQSPQLPQAFYPVGHPVDVSFGDLLAARCVFTGEGRTEATHIGGTSSDEMCNLYIMYYMEAKHAVSFMTCTQNVAPDMFRTIPPEANIPIPVKSDMVMMHEHHKETEYKDKIPLLQQPKREEEEVLDQGDFYSLLSKLLGEREDVVHVHKYNPTEKAESESDLVAEIANVVQKKDLGRSDAREGAEHERGNAILVRDRIHKFHRLVSTLRPPESRVFSLQQPPPGEGTWEPEHTGDFHMEEALDWPGVYLLPGQVSGVALDPKNNLVIFHRGDHVWDGNSFDSKFVYQQIGLGPIEEDTILVIDPNNAAVLQSSGKNLFYLPHGLSIDKDGNYWVTDVALHQVFKLDPNNKEGPVLILGRSMQPGSDQNHFCQPTDVAVDPGTGAIYVSDGYCNSRIVQFSPSGKFITQWGEESSGSSPLPGQFTVPHSLALVPLLGQLCVADRENGRIQCFKTDTKEFVREIKHSSFGRNVFAISYIPGLLFAVNGKPHFGDQEPVQGFVMNFSNGEIIDIFKPVRKHFDMPHDIVASEDGTVYIGDAHTNTVWKFTLTEKLEHRSVKKAGIEVQEIKEAEAVVETKMENKPTSSELQKMQEKQKLIKEPGSG

SEQ ID NO: 1699 - protein, 238 aa, synthetic construct
  REGION 1..238: note = PARM1 (Q6UWI2) ECD
LPTSAPLSVSLPTNIVPPTTIWTSSPQNTDADTASPSNGTHNNSVLPVTASAPTSLLPKNISIESREEEITSPGSNWEGTNTDPSPSGFSSTSGGVHLTTTLEEHSSGTPEAGVAATLSQSAAEPPTLISPQAPASSPSSLSTSPPEVFSASVTTNHSSTVTSTQPTGAPTAPESPTEESSSDHTPTSHATAEPVPQEKTPPTTVSGKVMCELIDMETTTTFPRVIMQEVEHALSSGS

SEQ ID NO: 1700 - protein, 795 aa, synthetic construct [sequence omitted]

SEQ ID NO: 1701 - protein, 697 aa, synthetic construct
  REGION 1..697: note = PCDH10 (Q9P2E7) ECD
QLHYTVQEEQEHGTFVGNIAEDLGLDITKLSARGFQTVPNSRTPYLDLNLETGVLYVNEKIDREQICKQSPSCVLHLEVFLENPLELFQVEIEVLDINDNPPSFPEPDLTVEISESATPGTRFPLESAFDPDVGTNSLRDYEITPNSYFSLDVQTQGDGNRFAELVLEKPLDREQQAVHRYVLTAVDGGGGGGVGEGGGGGGGAGLPPQQQRTGTALLTIRVLDSNDNVPAFDQPVYTVSLPENSPPGTLVIQLNATDPDEGQNGEVVYSFSSHISPRARELFGLSPRTGRLEVSGELDYEESPVYQVYVQAKDLGPNAVPAHCKVLVRVLDANDNAPEISFSTVKEAVSEGAAPGTVVALFSVTDRDSEENGQVQCELLGDVPFRLKSSFKNYYTIVTEAPLDREAGDSYTLTVVARDRGEPALSTSKSIQVQVSDVNDNAPRFSQPVYDVYVTENNVPGAYIYAVSATDRDEGANAQLAYSILECQIQGMSVFTYVSINSENGYLYALRSFDYEQLKDFSFQVEARDAGSPQALAGNATVNILIVDQNDNAPAIVAPLPGRNGTPAREVLPRSAEPGYLLTRVAAVDADDGENARLTYSIVRGNEMNLFRMDWRTGELRTARRVPAKRDPQRPYELVIEVRDHGQPPLSSTATLVVQLVDGAVEPQGGGGSGGGGSGEHQRPSRSGGGETSLDLT

SEQ ID NO: 1702 - protein, 789 aa, synthetic construct
  REGION 1..789: note = PCDH11X (Q9BZA7) ECD
QEKNYTIREEMPENVLIGDLLKDLNLSLIPNKSLTTAMQFKLVYKTGDVPLIRIEEDTGEIFTTGARIDREKLCAGIPRDEHCFYEVEVAILPDEIFRLVKIRFLIEDINDNAPLFPATVINISIPENSAINSKYTLPAAVDPDVGINGVQNYELIKSQNIFGLDVIETPEGDKMPQLIVQKELDREEKDTYVMKVKVEDGGFPQRSSTAILQVSVTDTNDNHPVFKETEIEVSIPENAPVGTSVTQLHATDADIGENAKIHFSFSNLVSNIARRLFHLNATTGLITIKEPLDREETPNHKLLVLASDGGLMPARAMVLVNVTDVNDNVPSIDIRYIVNPVNDTVVLSENIPLNTKIALITVTDKDADHNGRVTCFTDHEIPFRLRPVFSNQFLLETAAYLDYESTKEYAIKLLAADAGKPPLNQSAMLFIKVKDENDNAPVFTQSFVTVSIPENNSPGIQLTKVSAMDADSGPNAKINYLLGPDAPPEFSLDCRTGMLTVVKKLDREKEDKYLFTILAKDNGVPPLTSNVTVFVSIIDQNDNSPVFTHNEYNFYVPENLPRHGTVGLITVTDPDYGDNSAVTLSILDENDDFTIDSQTGVIRPNISFDREKQESYTFYVKAEDGGRVSRSSSAKVTINVVDVNDNKPVFIVPPSNCSYELVLPSTNPGTVVFQVIAVDNDTGMNAEVRYSIVGGNTRDLFAIDQETGNITLMEKCDVTDLGLHRVLVKANDLGQPDSLFSVVIVNLFVNESVTNATLINELVRKSTEAPVTPNTEIADVSSPTSDYVK

SEQ ID NO: 1703 - protein, 816 aa, synthetic construct
  REGION 1..816: note = PCDH11Y (Q9BZA8) ECD
TNCHKCLLSGTYIFAVLLVCVVFHSGAQEKNYTIREEIPENVLIGNLLKDLNLSLIPNKSLTTTMQFKLVYKTGDVPLIRIEEDTGEIFTTGARIDREKLCAGIPRDEHCFYEVEVAILPDEIFRLVKIRFLIEDINDNAPLFPATVINISIPENSAINSKYTLPAAVDPDVGINGVQNYELIKSQNIFGLDVIETPEGDKMPQLIVQKELDREEKDTYVMKVKVEDGGFPQRSSTAILQVSVTDTNDNHPVFKETEIEVSIPENAPVGTSVTQLHATDADIGENAKIHFSFSNLVSNIARRLFHLNATTGLITIKEPLDREETPNHKLLVLASDGGLMPARAMVLVNVTDVNDNVPSIDIRYIVNPVNDTVVLSENIPLNTKIALITVTDKDADHNGRVTCFTDHEIPFRLRPVFSNQFLLENAAYLDYESTKEYAIKLLAADAGKPPLNQSAMLFIKVKDENDNAPVFTQSFVTVSIPENNSPGIQLMKVSATDADSGPNAEINYLLGPDAPPEFSLDRRTGMLTVVKKLDREKEDKYLFTILAKDNGVPPLTSNVTVFVSIIDQNDNSPVFTHNEYKFYVPENLPRHGTVGLITVTDPDYGDNSAVTLSILDENDDFTIDSQTGVIRPNISFDREKQESYTFYVKAEDGGRVSRSSSAKVTINVVDVNDNKPVFIVPPYNYSYELVLPSTNPGTVVFQVIAVDNDTGMNAEVRYSIVGGNTRDLFAIDQETGNITLMEKCDVTDLGLHRVLVKANDLGQPDSLFSVVIVNLFVNESVTNATLINELVRKSIEAPVTPNTEIADVSSPTSDYVK

SEQ ID NO: 1704 - protein, 694 aa, synthetic construct
  REGION 1..694: note = PCDH12 (Q9NPG4) ECD
QEVTTLTVKYQVSEEVPSGTVIGKLSQELGREERRRQAGAAFQVLQLPQALPIQVDSEEGLLSTGRRLDREQLCRQWDPCLVSFDVLATGDLALIHVEIQVLDINDHQPRFPKGEQELEISESASLRTRIPLDRALDPDTGPNTLHTYTLSPSEHFALDVIVGPDETKHAELIVVKELDREIHSFFDLVLTAYDNGNPPKSGTSLVKVNVLDSNDNSPAFAESSLALEIQEDAAPGTLLIKLTATDPDQGPNGEVEFFLSKHMPPEVLDTFSIDAKTGQVILRRPLDYEKNPAYEVDVQARDLGPNPIPAHCKVLIKVLDVNDNIPSIHVTWASQPSLVSEALPKDSFIALVMADDLDSGHNGLVHCWLSQELGHFRLKRTNGNTYMLLTNATLDREQWPKYTLTLLAQDQGLQPLSAKKQLSIQISDINDNAPVFEKSRYEVSTRENNLPSLHLITIKAHDADLGINGKVSYRIQDSPVAHLVAIDSNTGEVTAQRSLNYEEMAGFEFQVIAEDSGQPMLASSVSVWVSLLDANDNAPEVVQPVLSDGKASLSVLVNASTGHLLVPIETPNGLGPAGTDTPPLATHSSRPFLLTTIVARDADSGANGEPLYSIRSGNEAHLFILNPHTGQLFVNVTNASSLIGSEWELEIVVEDQGSPPLQTRALLRVMFVTSVDHLRDSARKPGALSMSMLT

SEQ ID NO: 1705 - protein, 1350 aa, synthetic construct
  REGION 1..1350: note = PCDH15 (Q96QU1) ECD
QYDDDCKLARGGPPATIVAIDEESRNGTILVDNMLIKGTAGGPDPTIELSLKDNVDYWVLMDPVKQMLFLNSTGRVLDRDPPMNIHSIVVQVQCINKKVGTIIYHEVRIVVRDRNDNSPTFKHESYYATVNELTPVGTTIFTGFSGDNGATDIDDGPNGQIEYVIQYNPDDPTSNDTFEIPLMLTGNIVLRKRLNYEDKTRYFVIIQANDRAQNLNERRTTTTTLTVDVLDGDDLGPMFLPCVLVPNTRDCRPLTYQAAIPELRTPEELNPIIVTPPIQAIDQDRNIQPPSDRPGILYSILVGTPEDYPRFFHMHPRTAELSLLEPVNRDFHQKFDLVIKAEQDNGHPLPAFAGLHIEILDENNQSPYFTMPSYQGYILESAPVGATISDSLNLTSPLRIVALDKDIEDTKDPELHLFLNDYTSVFTVTQTGITRYLTLLQPVDREEQQTYTFSITAFDGVQESEPVIVNIQVMDANDNTPTFPEISYDVYVYTDMRPGDSVIQLTAVDADEGSNGEITYEILVGAQGDFIINKTTGLITIAPGVEMIVGRTYALTVQAADNAPPAERRNSICTVYIEVLPPNNQSPPRFPQLMYSLEISEAMRVGAVLLNLQATDREGDSITYAIENGDPQRVFNLSETTGILTLGKALDRESTDRYILIITASDGRPDGTSTATVNIVVTDVNDNAPVFDPYLPRNLSVVEEEANAFVGQVKATDPDAGINGQVHYSLGNFNNLFRITSNGSIYTAVKLNREVRDYYELVVVATDGAVHPRHSTLTLAIKVLDIDDNSPVFTNSTYTVLVEENLPAGTTILQIEAKDVDLGANVSYRIRSPEVKHFFALHPFTGELSLLRSLDYEAFPDQEASITFLVEAFDIYGTMPPGIATVTVIVKDMNDYPPVFSKRIYKGMVAPDAVKGTPITTVYAEDADPPGLPASRVRYRVDDVQFPYPASIFEVEEDSGRVITRVNLNEEPTTIFKLVVVAFDDGEPVMSSSATVKILVLHPGEIPRFTQEEYRPPPVSELATKGTMVGVISAAAINQSIVYSIVSGNEEDTFGINNITGVIYVNGPLDYETRTSYVLRVQADSLEVVLANLRVPSKSNTAKVYIEIQDENNHPPVFQKKFYIGGVSEDARMFTSVLRVKATDKDTGNYSVMAYRLIIPPIKEGKEGFVVETYTGLIKTAMLFHNMRRSYFKFQVIATDDYGKGLSGKADVLVSVVNQLDMQVIVSNVPPTLVEKKIEDLTEILDRYVQEQIPGAKVVVESIGARRHGDAFSLEDYTKCDLTVYAIDPQTNRAIDRNELFKFLDGKLLDINKDFQPYYGEGGRILEIRTPEAVTSIKKRGESLGYTEGA

SEQ ID NO: 1706 - protein, 690 aa, synthetic construct
  REGION 1..690: note = PCDH17 (O14917) ECD
LKNLNYSVPEEQGAGTVIGNIGRDARLQPGLPPAERGGGGRSKSGSYRVLENSAPHLLDVDADSGLLYTKQRIDRESLCRHNAKCQLSLEVFANDKEICMIKVEIQDINDNAPSFSSDQIEMDISENAAPGTRFPLTSAHDPDAGENGLRTYLLTRDDHGLFGLDVKSRGDGTKFPELVIQKALDREQQNHHTLVLTALDGGEPPRSATVQINVKVIDSNDNSPVFEAPSYLVELPENAPLGTVVIDLNATDADEGPNGEVLYSFSSYVPDRVRELFSIDPKTGLIRVKGNLDYEENGMLEIDVQARDLGPNPIPAHCKVTVKLIDRNDNAPSIGFVSVRQGALSEAAPPGTVIALVRVTDRDSGKNGQLQCRVLGGGGTGGGGGLGGPGGSVPFKLEENYDNFYTVVTDRPLDRETQDEYNVTIVARDGGSPPLNSTKSFAIKILDENDNPPRFTKGLYVLQVHENNIPGEYLGSVLAQDPDLGQNGTVSYSILPSHIGDVSIYTYVSVNPTNGAIYALRSFNFEQTKAFEFKVLAKDSGAPAHLESNATVRVTVLDVNDNAPVIVLPTLQNDTAELQVPRNAGLGYLVSTVRALDSDFGESGRLTYEIVDGNDDHLFEIDPSSGEIRTLHPFWEDVTPVVELVVKVTDHGKPTLSAVAKLIIRSVSGSLPEGVPRVNGEQHHWDMSLP

SEQ ID NO: 1707 - protein, 672 aa, synthetic construct
  REGION 1..672: note = PCDH18 (Q9HCL0) ECD
KNLKYRIYEEQRVGSVIARLSEDVADVLLKLPNPSTVRFRAMQRGNSPLLVVNEDNGEISIGATIDREQLCQKNLNCSIEFDVITLPTEHLQLFHIEVEVLDINDNSPQFSRSLIPIEISESAAVGTRIPLDSAFDPDVGENSLHTYSLSANDFFNIEVRTRTDGAKYAELIVVRELDRELKSSYELQLTASDMGVPQRSGSSILKISISDSNDNSPAFEQQSYIIQLLENSPVGTLLLDLNATDPDEGANGKIVYSFSSHVSPKIMETFKIDSERGHLTLFKQVDYEITKSYEIDVQAQDLGPNSIPAHCKIIIKVVDVNDNKPEININLMSPGKEEISYIFEGDPIDTFVALVRVQDKDSGLNGEIVCKLHGHGHFKLQKTYENNYLILTNATLDREKRSEYSLTVIAEDRGTPSLSTVKHFTVQINDINDNPPHFQRSRYEFVISENNSPGAYITTVTATDPDLGENGQVTYTILESFILGSSITTYVTIDPSNGAIYALRIFDHEEVSQITFVVEARDGGSPKQLVSNTTVVLTIIDENDNVPVVIGPALRNNTAEITIPKGAESGFHVTRIRAIDRDSGVNAELSCAIVAGNEENIFIIDPRSCDIHTNVSMDSVPYTEWELSVIIQDKGNPQLHTKVLLKCMIFEYAESVTSTAMTSVSQASLDVS

SEQ ID NO: 1708 - protein, 657 aa, synthetic construct
  REGION 1..657: note = PCDH19 (Q8TAB3) ECD
LINLKYSVEEEQRAGTVIANVAKDAREAGFALDPRQASAFRVVSNSAPHLVDINPSSGLLVTKQKIDRDLLCRQSPKCIISLEVMSSSMEICVIKVEIKDLNDNAPSFPAAQIELEISEAASPGTRIPLDSAYDPDSGSFGVQTYELTPNELFGLEIKTRGDGSRFAELVVEKSLDRETQSHYSFRITALDGGDPPRLGTVGLSIKVTDSNDNNPVFSESTYAVSVPENSPPNTPVIRLNASDPDEGTNGQVVYSFYGYVNDRTRELFQIDPHSGLVTVTGALDYEEGHVYELDVQAKDLGPNSIPAHCKVTVSVLDTNDNPPVINLLSVNSELVEVSESAPPGYVIALVRVSDRDSGLNGRVQCRLLGNVPFRLQEYESFSTILVDGRLDREQHDQYNLTIQARDGGVPMLQSAKSFTVLITDENDNHPHFSKPYYQVIVQENNTPGAYLLSVSARDPDLGLNGSVSYQIVPSQVRDMPVFTYVSINPNSGDIYALRSFNHEQTKAFEFKVLAKDGGLPSLQSNATVRVIILDVNDNTPVITAPPLINGTAEVYIPRNSGIGYLVTVVKAEDYDEGENGRVTYDMTEGDRGFFEIDQVNGEVRTTRTFGESSKSSYELIVVAHDHGKTSLSASALVLIYLSPALDAQESMGSVNLS

SEQ ID NO: 1709 - protein, 830 aa, synthetic construct
  REGION 1..830: note = PCDH20 (Q8N6Y1) ECD
SYSRATELLYSLNEGLPAGVLIGSLAEDLRLLPRSAGRPDPQSQLPERTGAEWNPPLSFSLASRGLSGQYVTLDNRSGELHTSAQEIDREALCVEGGGGTAWSGSVSISSSPSDSCLLLLDVLVLPQEYFRFVKVKIAIRDINDNAPQFPVSQISVWVPENAPVNTRLAIEHPAVDPDVGINGVQTYRLLDYHGMFTLDVEENENGERTPYLIVMGALDRETQDQYVSIIIAEDGGSPPLLGSATLTIGISDINDNCPLFTDSQINVTVYGNATVGTPIAAVQAVDKDLGTNAQITYSYSQKVPQASKDLFHLDENTGVIKLFSKIGGSVLESHKLTILANGPGCIPAVITALVSIIKVIFRPPEIVPRYIANEIDGVVYLKELEPVNTPIAFFTIRDPEGKYKVNCYLDGEGPFRLSPYKPYNNEYLLETTKPMDYELQQFYEVAVVAWNSEGFHVKRVIKVQLLDDNDNAPIFLQPLIELTIEENNSPNAFLTKLYATDADSEERGQVSYFLGPDAPSYFSLDSVTGILTVSTQLDREEKEKYRYTVRAVDCGKPPRESVATVALTVLDKNDNSPRFINKDFSFFVPENFPGYGEIGVISVTDADAGRNGWVALSVVNQSDIFVIDTGKGMLRAKVSLDREQQSSYTLWVEAVDGGEPALSSTAKITILLLDINDNPPLVLFPQSNMSYLLVLPSTLPGSPVTEVYAVDKDTGMNAVIAYSIIGRRGPRPESFRIDPKTGNITLEEALLQTDYGLHRLLVKVSDHGYPEPLHSTVMVNLFVNDTVSNESYIESLLRKEPEINIEEKEPQISIEPTHRKVESVSCMPTL

SEQ ID NO: 1710 - protein, 851 aa, synthetic construct
  REGION 1..851: note = PCDH7 (O60245) ECD
AAKQLLRYRLAEEGPADVRIGNVASDLGIVTGSGEVTFSLESGSEYLKIDNLTGELSTSERRIDREKLPQCQMIFDENECFLDFEVSVIGPSQSWVDLFEGQVIVLDINDNTPTFPSPVLTLTVEENRPVGTLYLLPTATDRDFGRNGIERYELLQEPGGGGSGGESRRAGAADSAPYPGGGGNGASGGGSGGSKRRLDASEGGGGTNPGGRSSVFELQVADTPDGEKQPQLIVKGALDREQRDSYELTLRVRDGGDPPRSSQAILRVLITDVNDNSPRFEKSVYEADLAENSAPGTPILQLRAADLDVGVNGQIEYVFGAATESVRRLLRLDETSGWLSVLHRIDREEVNQLRFTVMARDRGQPPKTDKATVVLNIKDENDNVPSIEIRKIGRIPLKDGVANVAEDVLVDTPIALVQVSDRDQGENGVVTCTVVGDVPFQLKPASDTEGDQNKKKYFLHTSTPLDYEATREFNVVIVAVDSGSPSLSSNNSLIVKVGDTNDNPPMFGQSVVEVYFPENNIPGERVATVLATDADSGKNAEIAYSLDSSVMGIFAIDPDSGDILVNTVLDREQTDRYEFKVNAKDKGIPVLQGSTTVIVQVADKNDNDPKFMQDVFTFYVKENLQPNSPVGMVTVMDADKGRNAEMSLYIEENNNIFSIENDTGTIYSTMSFDREHQTTYTFRVKAVDGGDPPRSATATVSLFVMDENDNAPTVTLPKNISYTLLPPSSNVRTVVATVLATDSDDGINADLNYSIVGGNPFKLFEIDPTSGVVSLVGKLTQKHYGLHRLVVQVNDSGQPSQSTTTLVHVFVNESVSNATAIDSQIARSLHIPLTQDIAGDPSYEISKQRLS

SEQ ID NO: 1711 - protein, 720 aa, synthetic construct
  REGION 1..720: note = PCDH8 (O95206) ECD
KTVRYSTFEEDAPGTVIGTLAEDLHMKVSGDTSFRLMKQFNSSLLRVREGDGQLTVGDAGLDRERLCGQAPQCVLAFDVVSFSQEQFRLVHVEVEVRDVNDHAPRFPRAQIPVEVSEGAAVGTRIPLEVPVDEDVGANGLQTVRLAEPHSPFRVELQTRADGAQCADLVLLQELDRESQAAYSLELVAQDGGRPPRSATAALSVRVLDANDHSPAFPQGAVAEVELAEDAPVGSLLLDLDAADPDEGPNGDVVFAFGARTPPEARRLFRLDPRSGRLTLAGPVDYERQDTYELDVRAQDRGPGPRAATCKVIVRIRDVNDNAPDIAITPLAAPGAPATSPFAAAAAAAALGGADASSPAGAGTPEAGATSLVPEGAARESLVALVSTSDRDSGANGQVRCALYGHEHFRLQPAYAGSYLVVTAASLDRERIAEYNLTLVAEDRGAPPLRTVRPYTVRVGDENDNAPLFTRPVYEVSVRENNPPGAYLATVAARDRDLGRNGQVTYRLLEAEVGRAGGAVSTYVSVDPATGAIYALRSFDYETLRQLDVRIQASDGGSPQLSSSALVQVRVLDQNDHAPVLVHPAPANGSLEVAVPGRTAKDTVVARVQARDADEGANGELAFELQQQEPREAFAIGRRTGEILLTGDLSQEPPGRVFRALLVISDGGRPPLTTTATVSFVVTAGGGRGPAAPASAGSPERSRPPGSRLGVSGSVLQWDTP

SEQ ID NO: 1712 - protein, 791 aa, synthetic construct
  REGION 1..791: note = PCDH9 (Q9HC56) ECD
QELIYTIREELPENVPIGNIPKDLNISHINAATGTSASLVYRLVSKAGDAPLVKVSSSTGEIFTTSNRIDREKLCAGASYAEENECFFELEVVILPNDFFRLIKIKIIVKDTNDNAPMFPSPVINISIPENTLINSRFPIPSATDPDTGFNGVQHYELLNGQSVFGLDIVETPEGEKWPQLIVQQNLDREQKDTYVMKIKVEDGGTPQKSSTAILQVTVSDVNDNRPVFKEGQVEVHIPENAPVGTSVIQLHATDADIGSNAEIRYIFGAQVAPATKRLFALNNTTGLITVQRSLDREETAIHKVTVLASDGSSTPARATVTINVTDVNDNPPNIDLRYIISPINGTVYLSEKDPVNTKIALITVSDKDTDVNGKVICFIEREVPFHLKAVYDNQYLLETSSLLDYEGTKEFSFKIVASDSGKPSLNQTALVRVKLEDENDNPPIFNQPVIELSVSENNRRGLYLTTISATDEDSGKNADIVYQLGPNASFFDLDRKTGVLTASRVFDREEQERFIFTVTARDNGTPPLQSQAAVIVTVLDENDNSPKFTHNHFQFFVSENLPKYSTVGVITVTDADAGENKAVTLSILNDNDNFVLDPYSGVIKSNVSFDREQQSSYTFDVKATDGGQPPRSSTAKVTINVMDVNDNSPVVISPPSNTSFKLVPLSAIPGSVVAEVFAVDVDTGMNAELKYTIVSGNNKGLFRIDPVTGNITLEEKPAPTDVGLHRLVVNISDLGYPKSLHTLVLVFLYVNDTAGNASYIYDLIRRTMETPLDRNIGDSSQPYQNEDYLT

SEQ ID NO: 1713 - protein, 668 aa, synthetic construct
  REGION 1..668: note = PCDHA1 (Q9Y5I3) ECD
QLHYSIPEEAKHGTFVGRVAQDLGLELAELVPRLFRVASKTHRDLLEVNLQNGILFVNSRIDREELCQWSAECSIHLELIADRPLQVFHVEVKVKDINDNPPVFRGREQIIFIPESRLLNSRFPIEGAADADIGANALLTYTLSPSDYFSLDVEASDELSKSLWLELRKYLDREETPELHLLLTATDGGKPELQGTVELLITVLDVNDNAPLFDQAVYRVHLLETTANGTLVTTLNASDADEGVNGEVVFSFDSGISRDIQEKFKVDSSSGEIRLIDKLDYEETKSYEIQVKAVDKGSPPMSNHCKVLVKVLDVNDNAPELAVTSLYLPIREDAPLSTVIALITVSDRDSGANGQVTCSLMPHVPFKLVSTFKNYYSLVLDSALDRESLSVYELVVTARDGGSPSLWATARVSVEVADVNDNAPAFAQPEYTVFVKENNPPGCHIFTVSARDADAQENALVSYSLVERRVGERALSNYVSVHAESGKVYALQPLDHEELELLQFQVSARDAGVPPLGSNVTLQVFVLDENDNAPALLAPRVGGTIGAVSELVPRLVGAGHVVAKVRAVDADSGYNAWLSYELQPAAGGARIPFRVGLYTGEISTTRVLDEADLSRYRLLVLVKDHGEPALTATATVLVSLVESGQAPKASSRASVGVAGPEAALVDVN

SEQ ID NO: 1714 - protein, 667 aa, synthetic construct
  REGION 1..667: note = PCDHA10 (Q9Y5I2) ECD
QLHYSVYEEARHGTFVGRIAQDLGLELAELVQRLFRVASKRHGDLLEVNLQNGILFVNSRIDREELCGRSVECSIHLEVIVDRPLQVFHVDVEVKDINDNPPRFSVTEQKLSIPESRLLDSRFPLEGASDADVGENALLTYKLSPNEYFVLDIINKKDKDKFPVLVLRKLLDREENPQLKLLLTATDGGKPEFTGSVSLLILVLDANDNAPIFDRPVYEVKMYENQVNQTLVIRLNASDSDEGINKEMMYSFSSLVPPTIRRKFWINERTGEIKVNDAIDFEDSNTYEIHVDVTDKGNPPMVGHCTVLVELLDENDNSPEVIVTSLSLPVKEDAQVGTVIALISVSDHDSGANGQVTCSLTPHVPFKLVSTYKNYYSLVLDSALDRERVSAYELVVTARDGGSPPLWATASVSVEVADVNDNAPAFAQSEYTVFVKENNPPGCHIFTVSAWDADAQENALVSYSLVERRLGERSLSSYVSVHAESGKVYALQPLDHEELELLQFQVSARDGGVPPLGSNLTLQVFVLDENDNAPALLASPAGSAGGAVSELVLRSVVAGHVVAKVRAVDADSGYNAWLSYELQSAAVGARIPFRVGLYTGEISTTRALDETDSPRQRLLVLVKDHGEPSLTATATVLVSLVEGSQAPKASSRASVGVAPEVALVDVN

SEQ ID NO: 1715 - protein, 667 aa, synthetic construct
  REGION 1..667: note = PCDHA11 (Q9Y5I1) ECD
QLHYSVSEEAKHGTFVGRIAQDLGLELAELVQRLFRVASKTHGDLLEVNLQNGILFVNSRIDREELCGQSAECSIHLEVIVDRPLQVFHVNVEVKDINDNPPVFSLREQKLLIAESKQSDSRFPLEGASDADIEENALLTYRLSKNEYFSLDSPTNGKQIKRLSLILKKSLDREKTPELNLLLTATDGGKPELTGTVRLLVQVLDVNDNDPEFDKSEYKVSLMENAAKETLVLKLNATDRDEGVNGEVTYSLMSIKPNGRHLFTLDQNNGEVRVNGTLDYEENKFYKIEVQATDKGTPPMAGHCTVWVEILDTNDNSPEVAVTSLSLPVREDAQPSTVIALISVSDRDSGVNGQVTCSLTPHVPFKLVSTFKNYYSLVLDSALDRENVWAYELVVTARDGGSPSLWATARVSVEVADVNDNAPAFAQPEYTVFVKENNPPGCHIFTVSARDADAQENALVSYSLVERRLGDRALSSYVSVHAESGKVYALQPLDHEELELLQFQVSARDAGVPPLSSNVTLQVFVLDENDNAPALLATQAGSAGGAVNKLVPRSVGAGHVVAKVRAVDADSGYNAWLSYELQPAAGGSRIPFRVGLYTGEISTTRALDEADSPRHRLLVLVKDHGEPALTATATVLVSLVESGQAPKASSRTLAGAASPEAALVDVN

SEQ ID NO: 1716 - protein, 668 aa, synthetic construct
  REGION 1..668: note = PCDHA12 (Q9UN75) ECD
QLHYSVYEEAKHGTFVGRIAQDLGLELAELVPRLFRVASKRHGDLLEVNLQNGILFVNSRIDREKLCGRSAECSIHLEVIVDRPLQVFHVDVEVKDINDNPPVFREREQKVPVSESAPLDSHFPLEGASDADIGVNSLLTYALSLNENFELKIKTKKDKSILPELVLRKLLDREQTPKLNLLLMVIDGGKPELTGSVQIQITVLDVNDNGPAFDKPSYKVVLSENVQNDTRVIQLNASDPDEGLNGEISYGIKMILPVSEKCMFSINPDTGEIRIYGELDFEENNAYEIQVNAIDKGIPSMAGHSMVLVEVLDVNDNVPEVMVTSLSLPVQEDAQVGTVIALISVSDRDSGANGQVICSLTPHVPFKLVSTYKNYYSLVLDSALDRESVSAYELVVTARDGGSPSLWATARVSVEVADVNDNAPAFAQPEYTVFVKENNPPGCHIFTVSAWDADAQKNALVSYSLVERRVGEHALSSYVSVHAESGKVYALQPLDHEELELLQFQVSARDAGVPPLGSNVTLQVFVLDENDNAPALLATPAGSAGGAVSELVPRSVGAGHVVAKVRAVDADSGYNAWLSYELQPAAVGAHIPFHVGLYTGEISTTRILDEADAPRHRLLVLVKDHGEPALTSTATVLVSLVENGQAPKTSSRASVGAVDPEAALVDIN

SEQ ID NO: 1717 - protein, 668 aa, synthetic construct
  REGION 1..668: note = PCDHA13 (Q9Y5I0) ECD
QLHYSVPEEAKHGTFVGRIAQDLGLELAELVPRLFRVASKRHGDLLEVNLQNGILFVNSRIDREELCGRSAECSIHLEVIVDRPLQVFHVEVKVRDINDNPPIFPESKKRIIIAESRPPETRFPLDGASDADIGVNSALTYRLDPNDYFTLDAQNSLEQMSSLSLVLRKTLDREEIQEHSLLLTASDGGKPELTGTVQLLITILDVNDNAPEFYQSVYKVTVLENAFNGTLVIKLNATDPDDGTNGDIVYSFRRPVWPAVVYAFTINPNNGEIRTKGKLDFEEKKLYEISVEAVDKGNIPMAGHCTLLVEVLDVNDNAPEVTITSLSLPIREDTQPSAIIALISVSDRDSGSNGQVTCTLTPHVPFKLVSTYKNYYSLVLDSALDRESVSAYELVVTARDGGSPSLWATASVSVGVADVNDNAPAFAQPEYTVFVKENNPPGCHIFTVSAQDADAQENALVSYSLVERRVGERALSSYVSVHAESGKVYALQPLDHEELELLQFQVSARDSGVPPLGSNVTLQVFVLDENDNAPALLTPGAGSAGGTVSELMPRSVGAGHVVAKVRAVDADSGYNAWLSYELQLAAVGARIPFRVGLYTGEISTTRPLDEVDAPHHRLLVLVKDHGEPALTATATVLLSLVESGQAPQASSRASAGAVGPEAALVDVN

SEQ ID NO: 1718 - protein, 675 aa, synthetic construct
  REGION 1..675: note = PCDHA2 (Q9Y5H9) ECD
AWEVGSGQLRYSVPEEAKHGTFVGRIAQDLGLELEELVPRLFRVASKRHGDLLEVNLQNGILFVNSRIDREELCGRSAECSIHVEVIVDRPLQVFHVEVEVKDINDNPPIFPMTVKTIRFPESRLLDSRFPLEGASDADIGVNALLSYKLSSSEFFFLDIQANDELSESLSLVLGKSLDREETAEVNLLLVATDGGKPELTGTVQILIKVLDVNDNEPTFAQSVYKVKLLENTANGTLVVKLNASDADEGPNSEIVYSLGSDVSSTIQTKFTIDPISGEIRTKGKLDYEEAKSYEIQVTATDKGTPSMSGHCKISLKLVDINDNTPEVSITSLSLPISENASLGTVIALITVSDRDSGTNGHVTCSLTPHVPFKLVSTFKNYYSLVLDSALDRESVSAYELVVTARDGGSPSLWATTSVSIEVADVNDNAPAFAQPEYTVFVKENNPPGCHIFTVSAWDADAQENALVSYSLVERRVGERALSSYVSVHAESGKVYALQPLDHEEVELLQFQVSARDAGVPPLGSNVTLQVFVLDENDNAPALLAPRAGTAAGAVSELVPWSVGAGHVVAKVRAVDADSGYNAWLSYELQLGTGSARIPFRVGLYTGEISTTRALDEADSPRHRLLVLVKDHGEPALTATATVLVSLVESGQAPKASSRAWVGAAGSEATLVDVN

SEQ ID NO: 1719 - protein, 668 aa, synthetic construct
  REGION 1..668: note = PCDHA3 (Q9Y5H8) ECD
QLHYSVSEEAKHGTFVGRIAQDLGLELAELVPRLFRVASKRHGDLLEVNLQNGILFVNSRIDREELCGRSAECSIHLEVIVDRPLQVFHVEVEVKDINDNAPVFPMAVKNLFISESRQPGSRFSLEGASDADIGTNSLLTYSLDSTEYFTLDVKRNDEEIKSLGLVLKKNLNREDTPKHYLLITAIDGGKPELTGTTQLKITVLDVNDNAPAFERTIYKVRLLENAPNGTLVVTVNATDLDEGVNKDIAYSFNTDMSADILSKFHLDPVNGQISVKGNIDFEESKSYEIQVEATDKGNPPMSDHCTVLLEIVDINDNVPELVIQSLSLPVLEDSPLSTVIALISVSDRDSGVNGQVTCSLTPHVPFKLVSTFKNYYSLVLDSPLDRESVSAYELVVTARDGGSPSLWATASVSVEVADVNDNAPAFSQSEYTVFVKENNPPGCHIFTVSARDADAQENALVSYSLVERRVGERALSSYVSVHAESGKVYALQPLDHEELELLQFQVSARDAGVPPLGSNVTLQVFVLDENDNAPALLMPRVGGIGGAVSELVPRSVGAGHVVAKVRAVDADSGYNAWLSYELQPGTGGARIPFRVGLYTGEISTTRALDEVDAPRHRLLVLVKDHGEPSLTATATVLVSLVESGQAPKASSQASAGATGPEAALVDVN

SEQ ID NO: 1720 - protein, 668 aa, synthetic construct
  REGION 1..668: note = PCDHA4 (Q9UN74) ECD
QLHYSVSEEAKHGTFVGRIAQDLGLELAELVPRLFRVASKGRGGLLEVNLQNGILFVNSRIDREELCRRSAECSIHLEVIVDRPLQVFHVDVEVRDINDNPPVFPATQKNLSIAESRPLDSRFPLEGASDADIGENALLTYRLSPNEYFSLEKPPDDELVKGLGLILRKSLDREEAPEIFLVLTATDGGKPELTGTVQLLITVLDANDNAPAFDRTIYKVRLLENVPNGTLVIKLNASDLDEGLNGDIVYSFSNDISPNVKSKFHIDPITGQIIVKGYIDFEESKSYEIIVEGIDKGQLPLSGHCRVIVEVEDNNDNVPDLEFKSLSLPIREDAPLGTVIALISVSDKDMGVNGLVTCSLTSHVPFKLVSTFKNYYSLVLDSALDRESVSAYELVVTARDGGSPSLWATASVSVEVADVNDNAPAFAQPEYTVFVKENNPPGCHIFTVSAWDADAQENALVSYSLVERRVGERALSSYVSVHAESGKVYALQPLDHEELELLQFQVTARDAGVPPLGSNVTLQVFVLDENDNAPALLAPRAGGTGGAVSELVPWSVGVGHVVAKVRAVDADSGYNAWLSYELQPGTGGARIPFRVGLYTGEISTTRALDETDAPRHRLLVLVKDHGEPALTATATVLVSLVESGQAPKASSRALVGAVGPDAALVDVN

SEQ ID NO: 1721 - protein, 668 aa, synthetic construct
  REGION 1..668: note = PCDHA5 (Q9Y5H7) ECD
QLHYSIPEEAKHGTFVGRIAQDLGLELAELVPRLFRVASKGRGDLLEVNLQNGILFVNSRIDREELCRRRAECSIHLEVIVDRPLQVFHVEVAVKDINDNPPRFSRQEQRLFILESRMPDSRFPLEGASDLDIGANAQLRYRLNPNEYFDLDVKTNEEETNFLELVLRKSLDREETQEHRLLVIATDGGKPELTGTVQLLINVLDANDNAPEFDKSIYNVRLLENAPSGTLVIKLNASDADEGINKEIVYFFSNLVLDDVKSKFIINSNTGEIKVNGELDYEDYNSYEINIDAMDKSTFPLSGHCKVVVKLLDVNDNTPEMAITTLFLPVKEDAPLSTVIALISVSDRDSGANGQVTCSLMPHVPFKLVSTFKNYYSLVLDSALDRESVSVYELVVTARDGGSPSLWATASVSVEVADVNDNAPAFAQPQYTVFVKENNPPGCHIFTVSARDADAQENALVSYSLVERRVGERPLSSYVSVHAESGKVYALQPLDHEEVELLQFQVSARDAGVPPLGSNVTLQVFVLDENDNAPALLVPRVGGTGGAVSELVPRSVGAGHVVAKVRAVDPDSGYNAWLSYELQPAPGSARIPFRVGLYTGEISTTRSLDETEAPRHRLLVLVKDHGEPPLTATATVLVSLVESGQAPKASSRASAGAVGPEAALVDVN

SEQ ID NO: 1722 - protein, 668 aa, synthetic construct
  REGION 1..668: note = PCDHA6 (Q9UN73) ECD
QLHYSVPEEAKHGTFVGRIAQDLGLELAELVPRLFRMASKDREDLLEVNLQNGILFVNSRIDREELCGRSAECSIHLEVIVDRPLQVFHVDVEVRDINDNPPLFPVEEQRVLIYESRLPDSVFPLEGASDADVGSNSILTYKLSSSEYFGLDVKINSDDNKQIGLLLKKSLDREEAPAHNLFLTATDGGKPELTGTVQLLVTVLDVNDNAPTFEQSEYEVRIFENADNGTTVIRLNASDRDEGANGAISYSFNSLVAAMVIDHFSIDRNTGEIVIRGNLDFEQENLYKILIDATDKGHPPMAGHCTVLVRILDKNDNVPEIALTSLSLPVREDAQFGTVIALISVNDLDSGANGQVNCSLTPHVPFKLVSTFKNYYSLVLDSALDRESVSAYELVVTARDGGSPSLWATASLSVEVADMNDNAPAFAQPEYTVFVKENNPPGCHIFTVSARDADAQENALVSYSLVERRVGERALSSYISVHAESGKVYALQPLDHEELELLQFQVSARDAGVPPLGSNVTLQVFVLDENDNAPALLAPRVGGTGGAVSELVPRSLGAGQVVAKVRAVDADSGYNAWLSYELQPPASSARFPFRVGLYTGEISTTRVLDEADSPRHRLLVLVKDHGEPALTATATVLVSLVESGQAPKASSRASVGAAGPEAALVDVN

SEQ ID NO: 1723 - protein, 668 aa, synthetic construct
  REGION 1..668: note = PCDHA7 (Q9UN72) ECD
QLHYSVPEEAKHGNFVGRIAQDLGLELAELVPRLFRAVCKFRGDLLEVNLQNGILFVNSRIDREELCGRSAECSIHLEVIVERPLQVFHVDVEVKDINDNPPVFPATQRNLFIAESRPLDSRFPLEGASDADIGENALLTYRLSPNEYFFLDVPTSNQQVKPLGLVLRKLLDREETPELHLLLTATDGGKPELTGTVQLLITVLDNNDNAPVFDRTLYTVKLPENVSIGTLVIHPNASDLDEGLNGDIIYSFSSDVSPDIKSKFHMDPLSGAITVIGHMDFEESRAHKIPVEAVDKGFPPLAGHCTVLVEVVDVNDNAPQLTLTSLSLPIPEDAQPGTVITLISVFDRDFGVNGQVTCSLTPRVPFKLVSTFKNYYSLVLDSALDRESVSAYELVVTARDGGSPSLWATASVSVEVADVNDNAPAFAQPEYTVFVKENNPPGCHIFTVSAGDADAQKNALVSYSLVELRVGERALSSYVSVHAESGKVYALQPLDHEELELLQFQVSARDAGVPPLGSNVTLQVFVLDENDNAPALLAPRVGGTGGAVRELVPRSVGAGHVVAKVRAVDADSGYNAWLSYELQPVAAGASIPFRVGLYTGEISTTRALDETDAPRHRLLVLVKDHGEPSLTATATVLVSLVESGQAPKASSRASLGIAGPETELVDVN

SEQ ID NO: 1724 - protein, 668 aa, synthetic construct
  REGION 1..668: note = PCDHA8 (Q9Y5H6) ECD
QLHYSVPEEAKHGTFVGRIAQDLGLELAELVPRLFRVASKRHRDLLEVSLQNGILFVNSRIDREELCGRSAECSIHLEVIVDRPLQVFHVDVEVKDVNDNPPVFRVKDQKLFVSESRMPDSRFPLEGASDADVGANSVLTYRLSSHDYFMLDVNSKNDENKLVELVLRKSLDREDAPAHHLFLTATDGGKPELTGTVQLLVTVLDVNDNAPTFEQSEYEVRIFENADNGTTVIKLNASDPDEGANGAISYSFNSLVETMVIDHFSIDRNTGEIVIRGNLDFEQENLYKILIDATDKGHPPMAGHCTVLVRILDKNDNVPEIALTSLSLPVREDAQFGTVIALISVNDLDSGANGQVTCSLMPHVPFKLVSTFKNYYSLVLDSALDRERVSAYELVVTARDGGSPSLWATASLSVEVADVNDNAPAFAQPEYTVFVKENNPPGCHIFTVSARDADAQENALVSYSLVERRVGERSLSSYISVHTESGKVYALQPLDHEELELLQFQVSARDAGVPPLGSNVTLQVFVLDENDNAPALLEPRVGGTGGAASKLVPRSVGAGHVVAKVRAVDADSGYNAWLSYELQPAASSPRIPFRVGLYTGEISTTRVLDEADSPRHRLLVLVKDHGEPALTATATVLVSLVESGQAPKASSRQSAGVLGPEAALVDVN

SEQ ID NO: 1725 - protein, 668 aa, synthetic construct
  REGION 1..668: note = PCDHA9 (Q9Y5H5) ECD
QLHYSVPEEAEHGTFVGRIAQDLGLELAELVPRLFQLDSKGRGDLLEVNLQNGILFVNSRIDREELCGRSAECSIHLEVIVDRPLQVFHVDVEVKDINDNPPVFPATQKNLFIAESRPLDSRFPLEGASDADIGENALLTYRLSPNEYFFLDVPTSNQQVKPLGLVLRKLLDREETPELHLLLTATDGGKPELTGTVQLLITVLDNNDNAPVFDRTLYTVKLPENVSIGTLVIHPNASDLDEGLNGDIIYSFSSDVSPDIKSKFHMDPLSGAITVIGHMDFEESRAHKIPVEAVDKGFPPLAGHCTLLVEVVDVNDNAPQLTIKTLSVPVKEDAQLGTVIALISVIDLDADANGQVTCSLTPHVPFKLVSTYKNYYSLVLDRALDRESVSAYELVVTARDGGSPSLWATARVSVEVADVNDNAPAFAQSEYTVFVKENNPPGCHIFTVSARDADAQENALVSYSLVERRLGERSLSSYVSVHAESGKVYALQPLDHEELELLQFQVSARDAGVPPLGSNVTLQVFVLDENDNAPALLTPRMRGTDGAVSEMVLRSVGAGVVVGKVRAVDADSGYNAWLSYELQPETASASIPFRVGLYTGEISTTRALDETDAPRQRLLVLVKDHGEPALTATATVLVSLVESGQAPKSSSRASVGATGPEVTLVDVN

SEQ ID NO: 1726 - protein, 665 aa, synthetic construct
  REGION 1..665: note = PCDHAC1 (Q9H158) ECD
AGQLEYSVPEETERGVAVGNLSADLRLPAAAMSSRNFRFLSSHRELYFGVDLPSGNLVVREPADREQLCRAKAACVLTYDLVLEDPLELHKIRIHVLDTNDNSPLFPAGDVQLHIPEFLTPGARFTLPNAQDDDEGSNGILSYSLSPSQHFRLDMGSRVDGSEYPELVLEKALDREQRATHLLVLTARDGGLPARSGDAQVTIIVVDTNDNAPVFERSVYRTKVPETAPNGTVLFRVQALDPDEGSNGEVQYSLSNSTQAELRHRFHVHPKSGEVQVAASLGPPETLLEAYIEARDEGVFGLASTAKLLVEVTDVNDHAPELDFLTLSNPVPEDAAPGTVIALFSVKDEDLDSNGRVICGMSSAGPFQLTASFDNYYSLLIDGPLDREQISEYQVLITASDSGSPPLSTRRTITVSVADVNDNTPNFPQPQQELFVAENNGPGASLGRVFAQDPDLGKNGLVSYELLDVISEGPSASSLLAVESSSGAITAKTSFDFEQLRGFHFQVEGRDGGIPPRSATVTINLFVVDRNDNYPVILFPLPRNGSVPVEIVPRSARTGHLVTKVVAEDADSGSNAWLSYHISRASDSSLFRISANIGELRTARLVLPTDAVKQRVVVVVRDHGDPPLSSSVTLGVLLSNSVPQLLPDFEDVWEPGGQLSAQNLY

SEQ ID NO: 1727 - protein, 666 aa, synthetic construct
  REGION 1..666: note = PCDHAC2 (Q9Y5I4) ECD
QLRYSVPEEQAPGALVGNVARALGLELRRLGPGCLRINHLGAPSPRYLELDLTSGALFVNERIDREALCEQRPRCLLSLEVLAHNPVAVSAVEVEILDINDNSPRFPRPNYQLQVSESVAPGARFHIESAQDPDVGANSVQTYELSPSEHFELDLKPLQENSKVLELVLRKGLDREQAALHHLVLTAVDGGIPARSGTAQISVRVLDTNDNSPAFDQSTYRVQLREDSPPGTLVVKLNASDPDEGSNGELRYSLSSYTSDRERQLFSIDASTGEVRVIGGLDYEEASSYQIYVQATDRGPVPMAGHCKVLVDIVDVNDNAPEVVLTDLYSPVPENATPNTIVAVLSVNDQDSGPNRKVSLGLEATLPFRLNGFGNSYTLVVSGPLDRERVAVYNITVTATDGGIPQLTSLRTLKVEISDINDNPPSFLEDSYSIYIQENNLPGVLLCTVQATDPDEKENAEVTYSLLEREIQGLPVTSYVSINSASGSLYAVNSFDYEKFREFFVTVEAQDKGSPPLSSTVTANVYVVDMNDHAPHILYPTSTNSSAAFEMVPRTAPAGYLVTKVIAMDSDSGQNAWLFYHLAQTSDLDLFKVELHTGEIRTTRKMGDESGSTFNLTVVVRDNGEPSLSASVAITVAVVDRVSKILPDTQRHVKSPRTYSEITLYL

SEQ ID NO: 1728 - protein, 663 aa, synthetic construct
  REGION 1..663: note = PCDHB1 (Q9Y5F3) ECD
TTIRYSVAEEMESGSFVANVAKDLGLEVGKLAARGARLVSEGNKMHFRLHRKTGDLFVKEKLDRESLCGKADPCVLHFEVVLVEPLQSFRAEVRVFDINDNAPVFLNKEPLLKIPESTPLGSRFPLQSAQDLDVGLNGLQNYTLSANGYFHLHTRFCSHGPKYAELVLNKPLDREEQPEVNLTITAVDGGSPPKSGTAHIHVVVLDVNDHVPQFSRLVYRAQVSENSPNGSLVATVTAVDLDEGTNKAITYSLAQNPEAILKTFQIDPQNGEVRLRGPLDFEAIETYDIDIQATDGGGLSAHSKVLVEVVDVNDNPPEVMVSSVSSPLPEDSPPQTVVALFTIRDRDIRVGGKVTCFLREDLPFVIKPTFGNSYSLVTDRSLDREEVSGYNITIVAMDTGPPSLSAETMIEVLISDVNDNPPIFREDSYILTVRENNSPAVFIGKVHAEDLDLGENAQITYSLLPPKNGDLSVFAYISINSGNGKLYALRTMDYEAIQDFQFVVKATDGGFLSLSSQVTVRVVVLDDNDNRPMILYPLQNGTLPCNDLVPRSAEAGYLVTKVVAVDGDSGQNSWLSYHLLKATDLGLFSVQRQNGEIHTLRQISERDPMMQKLIILVQDHGQPALSTTVSLNILLVDGFSEPYLQFQDPTKHSRKVNPSTKYL

SEQ ID NO: 1729 - protein, 666 aa, synthetic construct
  REGION 1..666: note = PCDHB10 (Q9UN67) ECD
GSGFGRYSVTEETEKGSFVVNLAKDLGLAEGELAARGTRVVSDDNKQYLLLDSHTGNLLTNEKLDREKLCGPKEPCMLYFQILMDDPFQIYRAELRVRDINDHAPVFQDKETVLKISENTAEGTAFRLERAQDPDGGLNGIQNYTISPNSFFHINISGGDEGMIYPELVLDKALDREEQGELSLTLTALDGGSPSRSGTSTVRIVVLDVNDNAPQFAQALYETQAPENSPIGFLIVKVWAEDVDSGVNAEVSYSFFDASENIRTTFQINPFSGEIFLRELLDYELVNSYKINIQAMDGGGLSARCRVLVEVLDTNDNPPELIVSSFSNSVAENSPETPLAVFKINDRDSGENGKMVCYIQENLPFLLKPSVENFYILITEGALDREIRAEYNITITVTDLGTPRLKTEHNITVLVSDVNDNAPAFTQTSYTLFVRENNSPALHIGSVSATDRDSGTNAQVTYSLLPPQDPHLPLASLVSINADNGHLFALRSLDYEALQAFEFRVGATDRGSPALSREALVRVLVLDANDNSPFVLYPLQNGSAPCTELVPRAAEPGYLVTKVVAVDGDSGQNAWLSYQLLKATEPGLFGVWAHNGEVRTARLLSERDAAKHRLVVLVKDNGEPPRSATATLHLLLVDGFSQPYLPLPEAAPAQAQAEADLLTVYL

SEQ ID NO: 1730 - protein, 664 aa, synthetic construct
  REGION 1..664: note = PCDHB11 (Q9Y5F2) ECD
GSETWSFSVAEEMQSGSFVGNLAKDLGLKVRELSSRGARVVSNDKKQRLQLDINTGDLLLSETLDREELCGSIEPCVLHLQVLMQNPTQFLQIELQVRDINDHSPIFSEKQMLLEIPENSPVGAVFLLESAKDLDVGINAVKSYTISPNSHFHIKMRVIPDNRKYPELVLDKALDYEELPELSFILSALDGGSPPRSGTALVRVVVVDINDNSPEFEQAFYEVKIRENSILGSLILIVSAWDLDSGTNGEICYTFSHASEDIRKTFEINQKSGEITLRAPLDFETIESYSIIIQATDGGGLFGKSTVIIHVIDVNDNAPEITVSSITSPIPENTPETVVMVFSIQDIDSGDNGRIVCSIPEDLPFVLKSSVENYYTLETERPLDRESTAEYNITITVTDLGIPRLKTEHNTTVLVSDVNDNAPTFTQTSYTLFVRENNSPALHIGSVSATDRDSGTNAQVNYSLLPPQDLHLPLASLVSINTDNGHLFALRSLDYEALQAFDFRVGATDRGSPALSSEALVRVLVLDANDNSPFVLYPLQNGSAPCTELVPRAAEPGYLVTKVVAVDGDSGQNAWLSYQLLKATEPGLFGVWAHNGEVRTARLLSERDAAKHRLVVLVKDNGEPPRSATATLQVLLVDGFSQPYLPLPEAAPAQAQADSLTVYL

SEQ ID NO: 1731 - protein, 664 aa, synthetic construct
  REGION 1..664: note = PCDHB12 (Q9Y5F1) ECD
GSETGNFLVMEELQSGSFVGNLAKTLGLEVSELSSRGARVVSNDNKECLQLDTNTGDLLLREMLDREELCGSNEPCVLYFQVLMKNPTQFLQIELQVRDINDHSPVFLEKEMLLEIPENSPVGAVFLLESAKDLDVGINAVKSYTINPNSHFHVKIRVNPDNRKYPELVLDKALDYEERPELSFILTALDGGSPPRSGTALVRVVVVDINDNSPEFEQAFYEVKILENSILGSLVVTVSAWDLDSGTNSELSYTFSHASEDIRKTFEINQKSGDITLTAPLDFEAIESYSIIIQATDGGGLFGKSTVRIQVMDVNDNAPEITVSSITSPIPENTPETVVMVFRIRDRDSGDNGKMVCSIPEDIPFVLKSSVNNYYTLETERPLDRESRAEYNITITVTDLGTPRLKTEHNITVLVSDVNDNAPAFTQTSYALFVRENNSPALHIGSISATDRDSGTNAQVNYSLLPSQDPHLPLASLVSINADNGHLFALRSLDYEALQGFQFRVGATDHGSPALSSEALVRVLVLDANDNSPFVLYPLQNGSAPCTELVPWAAEPGYLVTKVVAVDGDSGQNAWLSYQLLKATEPGLFGVWAHNGEVRTARLLSERDAAKHRLVVLVKDNGEPPRSATATLHVLLVDGFSQPYLPLPEAAPAQAQADSLTVYL

SEQ ID NO: 1732 - protein, 662 aa, synthetic construct
  REGION 1..662: note = PCDHB13 (Q9Y5F0) ECD
AEPRSYSVVEETEGSSFVTNLAKDLGLEQREFSRRGVRVVSRGNKLHLQLNQETADLLLNEKLDREDLCGHTEPCVLRFQVLLESPFEFFQAELQVIDINDHSPVFLDKQMLVKVSESSPPGTTFPLKNAEDLDVGQNNIENYIISPNSYFRVLTRKRSDGRKYPELVLDKALDREEEAELRLTLTALDGGSPPRSGTAQVYIEVLDVNDNAPEFEQPFYRVQISEDSPVGFLVVKVSATDVDTGVNGEISYSLFQASEEIGKTFKINPLTGEIELKKQLDFEKLQSYEVNIEARDAGTFSGKCTVLIQVIDVNDHAPEVTMSAFTSPIPENAPETVVALFSVSDLDSGENGKISCSIQEDLPFLLKSAENFYTLLTERPLDRESRAEYNITITVTDLGTPMLITQLNMTVLIADVNDNAPAFTQTSYTLFVRENNSPALHIRSVSATDRDSGTNAQVTYSLLPPQDPHLPLTSLVSINADNGHLFALRSLDYEALQGFQFRVGASDHGSPALSSEALVRVVVLDANDNSPFVLYPLQNGSAPCTELVPRAAEPGYLVTKVVAVDGDSGQNAWLSYQLLKATELGLFGVWAHNGEVRTARLLSERDAAKHRLVVLVKDNGEPPRSATATLHVLLVDGFSQPYLPLPEAAPTQAQADLLTVYL

SEQ ID NO: 1733 - protein, 660 aa, synthetic construct
  REGION 1..660: note = PCDHB14 (Q9Y5E9) ECD
GTESAHYSVAEETEIGSFVANLARDLGLGVEELSSREARVVSDDNKKYLHLDLLTGNLLLNEKLDRDELCGSTEPCVLHFQVVLENPLQFFRFELCVKDINDHSPTFLDKEILIKISEGTTVGATFLMESAQDLDVGSNSLQNYTISPNSHFYIKIPDSSDRKIYPELVLDRALDYEQEAELRLTLTAVDGGSPPKSGTTLVLIKVLDINDNAPEFPQSLYEVQVPEDRPLGSWIATISAKDLDAGNYGKISYTFFHASEDIRKTFEINPISGEVNLRSPLDFEVIQSYTINIQATDGGGLSGKCTLLVKVMDINDNPPEVTISSITKRIPENASETLVALFSILDQDSGDNGRMICSIQDNLPFFLKPTFKNFFTLVSEKALDRESQAEYNITITVTDLGTPRLKTEYNITVLLSDVNDNAPTFTQTSYTLFVRENNSPALHIGSVSATDRDSGTNAQVNYSLLPPQDRHLPLASLVSINADNGHLFALRSLDYEALQEFEFRVGATDRGSPALSSEALVRVLVLDANDNSPFVLYPLQNGSAPCTELVPRAAEPGYLVTKVVAVDGDSGQNAWLSYQLLKATEPGLFGVWAHNGEVRTARLLSERDAAKHRLVVLVKDNGEPPRSATATLHVLLVDGFSQPYLPLPEAAPAQAQADSL

SEQ ID NO: 1734 - protein, 664 aa, synthetic construct
  REGION 1..664: note = PCDHB15 (Q9Y5E8) ECD
GWEPRRYSVMEETERGSFVANLANDLGLGVGELAERGARVVSEDNEQGLQLDLQTGQLILNEKLDREKLCGPTEPCIMHFQVLLKKPLEVFRAELLVTDINDHSPEFPEREMTLKIPETSSLGTVFPLKKARDLDVGSNNVQNYNISPNSHFHVSTRTRGDGRKYPELVLDTELDREEQAELRLTLTAVDGGSPPRSGTVQILILVLDANDNAPEFVQALYEVQVPENSPVGSLVVKVSARDLDTGTNGEISYSLYYSSQEIDKPFELSSLSGEIRLIKKLDFETMSSYDLDIEASDGGGLSGKCSVSVKVLDVNDNFPELSISSLTSPIPENSPETEVALFRIRDRDSGENGKMICSIQDDVPFKLKPSVENFYRLVTEGALDRETRAEYNITITITDLGTPRLKTEQSITVLVSDVNDNAPAFTQTSYTLFVRENNSPALHIGSVSATDRDSGTNAQVTYSLLPPRDPHLPLTSLVSINTDNGHLFALQSLDYEALQAFEFRVGATDRGFPALSSEALVRVLVLDANDNSPFVLYPLQNGSAPCTELVPRAAEPGYLVTKVVAVDGDSGQNAWLSYQLLKATEPGLFGVWAHNGEVRTARLLSERDVAKHRLVVLVKDNGEPPRSATATLQVLLVDGFSQPYLPLPEAAPAQAQADSLTVYL

SEQ ID NO: 1735 - protein, 662 aa, synthetic construct
  REGION 1..662: note = PCDHB16 (Q9NRJ7) ECD
ELGSYSVVEETERGSFVANLGKDLGLGLTEMSTRKARIISQGNKQHLQLKAQTGDLLINEKLDREELCGPTEPCILHFQVLMENPLEIFQAELRVIDINDHSPMFTEKEMILKIPENSPLGTEFPLNHALDLDVGSNNVQNYKISPSSHFRVLIHEFRDGRKYPELVLDKELDREEEPQLRLTLTALDGGSPPRSGTAQVRIEVVDINDNAPEFEQPIYKVQIPENSPLGSLVATVSARDLDGGANGKISYTLFQPSEDISKTLEVNPMTGEVRLRKQVDFEMVTSYEVRIKATDGGGLSGKCTLLLQVVDVNDNPPQVTMSALTSPIPENSPEIVVAVFSVSDPDSGNNGKTISSIQEDLPFLLKPSVKNFYTLVTERALDREARAEYNITLTVTDMGTPRLKTEHNITVQISDVNDNAPTFTQTSYTLFVRENNSPALHIGSVSATDRDSGTNAQVTYSLLPPQDPHLPLASLVSINADNGHLFALRSLDYEALREFEFRVSATDRGSPALSSEALVRVLVLDANDNSPFVLYPLQNGSAPCTELVPRAAEPGYLVTKVVAVDGDSGQNAWLSYQLLKATEPGLFGVWAHNGEVRTARLLSERDAAKQRLVVLVKDNGEPPRSATATLHVLLVDGFSQPFLPLPEAAPGQTQANSLTVYL

SEQ ID NO: 1736 - protein, 662 aa, synthetic construct
  REGION 1..662: note = PCDHB2 (Q9Y5E7) ECD
QPRHYSVAEETESGSFVANLLKDLGLEIGELAVRGARVVSKGKKMHLQFDRQTGDLLLNEKLDREELCGPTEPCVLPFQVLLENPLQFFQAELRIRDVNDHSPVFLDKEILLKIPESITPGTTFLIERAQDLDVGTNSLQNYTISPNFHFHLNLQDSLDGIILPQLVLNRALDREEQPEIRLTLTALDGGSPPRSGTALVRIEVVDINDNVPEFAKLLYEVQIPEDSPVGSQVAIVSARDLDIGTNGEISYAFSQASEDIRKTFRLSAKSGELLLRQKLDFESIQTYTVNIQATDGGGLSGTCVVFVQVMDLNDNPPELTMSTLINQIPENLQDTLIAVFSVSDPDSGDNGRMVCSIQDDLPFFLKPSVENFYTLVISTALDRETRSEYNITITVTDFGTPRLKTEHNITVLVSDVNDNAPAFTQTSYTLFVRENNSPALHIGSVSATDRDSGTNAQVTYSLLPPQDPHLPLASLVSINADNGHLFALQSLDYEALQAFEFRVGAADRGSPALSSEALVRVLVLDANDNSPFVLYPLQNGSAPCTELVPRAAEPGYLVTKVVAVDGDSGQNAWLSYQLLKATEPGLFGVWAHNGEVRTARLLRERDAAKQRLVVLVKDNGEPPRSATATLHVLLVDGFSQPYLLLPEAAPAQAQADLLTVYL

SEQ ID NO: 1737 - protein, 664 aa, synthetic construct
  REGION 1..664: note = PCDHB3 (Q9Y5E6) ECD
GSESRRYSVAEEKEKGFLIANLAKDLGLRVEELAARGAQVVSKGNKQHFQLSHQTGDLLLNEKLDREELCGPTEPCILHFQILLQNPLQFVTNELRIIDVNDHSPVFFENEMHLKILESTLPGTVIPLGNAEDLDVGRNSLQNYTITPNSHFHVLTRSRRDGRKYPELVLDKALDPEEQPELSLTLTALDGGSPPRSGTAQINIQVLDINDNAPEFAQPLYEVAVLENTPVNSVIVTVSASDLDTGSFGTISYAFFHASEEIRKTFQLNPITGDMQLVKYLNFEAINSYEVDIEAKDGGGLSGKSTVIVQVVDVNDNPPELTLSSVNSPIPENSGETVLAVFSVSDLDSGDNGRVMCSIENNLPFFLKPSVENFYTLVSEGALDRETRSEYNITITITDLGTPRLKTKYNITVLVSDVNDNAPAFTQISYTLFVRENNSPALHIGSVSATDRDSGTNAQVTYSLLPPQDPHLPLSSLVSINADNGHLFALRSLDYEALQAFEFRVGATDRGSPALSSEALVRVLVLDANDNSPFVLYPLQNGSAPCTELVPRAAEPGYLVTKVVAVDGDSGQNAWLSYQLLKATEPGLFGVWAHNGEVRTARLLSERDAAKHRLVVLVKDNGEPPRSATATLHVLLVDGFSQPYLPLPEAAPAQAQADLLTVYL

SEQ ID NO: 1738 - protein, 662 aa, synthetic construct
  REGION 1..662: note = PCDHB4 (Q9Y5E5) ECD
EPIRYSVLEETESGSFVAHLAKDLGLGIGELASRSARVLSDDDKQRLQLDRQTGDLLLREKLDREELCGPIEPCVLHFQVFLEMPVQFFQGELLIQDINDHSPIFPEREVLLKILENSQPGTLFPLLIAEDLDVGSNGLQKYTISPNSHFHILTRNHSEGKKYPDLVQDKPLDREEQPEFSLTLVALDGGSPPRSGTVMVRILIMDINDNAPEFVHTPYGVQVLENSPLDSPIVRVLARDIDAGNFGSVSYGLFQASDEIKQTFSINEVTGEILLKKKLDFEKIKSYHVEIEATDGGGLSGKGTVVIEVVDVNDNPPELIISSLTSSIPENAPETVVSIFRIRDRDSGENGKMICSIPDNLPFILKPTLKNFYTLVTERPLDRETSAEYNITIAVTDLGTPRLKTQQNITVQVSDVNDNAPAFTQTSYTLFVRENNSPALHIGSVSATDRDSGTNAQVTYSLLPPQDPHLPLASLVSINADNGHLFALRSLDYEALQAFEFRVGASDRGSPALSSEALVRVLVLDTNDNSPFVLYPLQNGSAPCTELVPRAAEPGYLVTKVVAVDGDSGQNAWLSYQLLKATEPGLFGVWAHNGEVRTARLLSERDAAKHRLVVLVKDNGEPPRSATATLHVLLVDGFSQPYLPLPEAAPAQAQADSLTVYL

SEQ ID NO: 1739 - protein, 659 aa, synthetic construct
  REGION 1..659: note = PCDHB5 (Q9Y5E4) ECD
VRYSIPEETESGYSVANLAKDLGLGVGELATRGARMHYKGNKELLQLDIKTGNLLLYEKLDREVMCGATEPCILHFQLLLENPVQFFQTDLQLTDINDHAPEFPEKEMLLKIPESTQPGTVFPLKIAQDFDIGSNTVQNYTISPNSHFHVATHNRGDGRKYPELVLDKALDREERPELSLTLTALDGGAPPRSGTTTIRIVVLDNNDNAPEFLQSFYEVQVPENSPLNSLVVVVSARDLDAGAYGSVAYALFQGDEVTQPFVIDEKTAEIRLKRALDFEATPYYNVEIVATDGGGLSGKCTVAIEVVDVNDNAPELTMSTLSSPTPENAPETVVAVFSVSDPDSGDNGRMICSIQNDLPFLLKPTLKNFYTLVTQRTLDRESQAEYNITITVTDMGTPRLKTEHNITVLVSDVNDNAPAFTQTSYTLFVRENNSPALHIGSVSATDRDSGTNAQVTYSLLPPQNPHLRLASLVSINADNGHLFALRSLDYEALQAFEFRVGATDRGSPALSSEALVRVLVLDANDNSPFVLYPLQNGSAPCTELVPRAAEPGYLVTKVVAVDGDSGQNAWLSYQLLKATEPGLFSMWAHNGEVRTARLLSERDAAKHRLVVLVKDNGEPPRSATATLHVLLVDGFSQPYLPLPEAAPAQAQADSLTVYL

SEQ ID NO: 1740 - protein, 661 aa, synthetic construct
  REGION 1..661: note = PCDHB6 (Q9Y5E3) ECD
ESIQYSVLEETESGTFVANLTKDLGLRVGELASRGARVVFKGNRQHLQFDPQTHDLLLNEKLDREELCGSTEPCVLPFQVLLENPLQFFQASLRVRDINDHAPEFPAREMLLKISEITMPGKIFPLKMAHDLDTGSNGLQRYTISSNPHFHVLTRNRSEGRKFPELVLDKPLDREEQPQLRLTLIALDGGSPPRSGTSEIQIQVLDINDNVPEFAQELYEAQVPENNPLGSLVITVSARDLDAGSFGKVSYALFQVDDVNQPFEINAITGEIRLRKALDFEEIQSYDVDVEATDGGGLSGKCSLVVRVLDVNDNAPELTMSFFISLIPENLPEITVAVFSVSDADSGHNQQVICSIENNLPFLLRPSVENFYTLVTEGALDRESRAEYNITITVTDLGTPRLKTQQSITVQVSDVNDNVPAFTQTSYTLFVRENNSPALHIGSVSATDRDSGINAQVTYSLLPPQDPHLPLSSLVSINADNGHLFALRSLDYEALQSFEFRVGATDRGSPALSSEALVRLLVLDANDNSPFVLYPLQNGSAPCTELVPRAAEPGYLVTKVVAVDGDSGQNAWLSYQLLKATELGLFGVWAHNGEVRTARLLSERDAAKHRLVVLVKDNGEPPRSATATLHVLLVDGFSQPYLPLPEAAPAQAQADSLTVYL

SEQ ID NO: 1741 - protein, 662 aa, synthetic construct
  REGION 1..662: note = PCDHB7 (Q9Y5E2) ECD
GAEPLRYFVAEETERGTFLTNLAKDLGLGVGELRARGTRIVSDQNMQILLLSSLTGDLLLNEKLDREELCGPREPCVLPFQLLLEKPFQIFRAELWVRDINDHAPVFLDREISLKILESTTPGAAFLLESAQDSDVGTNSLSNYTISPNAYFHINVHDSGEGNIYPELVLNQVLDREEIPEFSLTLTALDGGSPPRSGTALVRILVLDVNDNAPDFVRSLYKVQVPENSPVGSMVVSVSARDLDTGSNGEIAYAFSYATERILKTFQINPTSGSLHLKAQLDYEAIQTYTLTIQAKDGGGLSGKCTVVVDVTDINDNRPELLLSSLTSPIAENSPETVVAVFRIRDRDSGNNGKTVCSIQDDVPFILKPSVENFYTLVTEKPLDRERNTEYNITITVTDLGTPRLKTEHNITVLVSDVNDNAPAFTQTSYTLFVRENNSPALPIGSVSATDRDSGTNAQVIYSLLPSQDPHLPLASLVSINADNGHLFALRSLDYEALQAFEFRVGATDRGSPALSSEALVRVLVLDANDNSPFVLYPLQNSSAPCTEPLPRAAEPGYLVTKVVAVDGDSGQNAWLSYQLLKATEPGLFGVWAHNGEVRTARLLSERDAAKQRLVVLVKDNGEPPRSATATLHVLLVDGFSQPYLRLPEAAPDQANSLTVYL

SEQ ID NO: 1742 - protein, 662 aa, synthetic construct
  REGION 1..662: note = PCDHB8 (Q9UN66) ECD
EPRSYSVVEETEGSSFVTNLAKDLGLEQREFSRRGVRVVSRGNKLHLQLNQETADLLLNEKLDREDLCGHTEPCVLRFQVLLESPFEFFQAELQVIDINDHSPVFLDKQMLVKVSESSPPGTAFPLKNAEDLDIGQNNIENYIISPNSYFRVLTRKRSDGRKYPELVLDKALDREEEAELRLTLTALDGGSPPRSGTAQVYIEVVDVNDNAPEFEQPFYRVQISEDSPISFLVVKVSATDVDTGVNGEISYSLFQASDEISKTFKVDFLTGEIRLKKQLDFEKFQSYEVNIEARDAGGFSGKCTVLIQVIDVNDHAPEVTMSAFTSPIPENAPETVVALFSVSDLDSGENGKISCSIQEDLPFLLKSSVGNFYTLLTETPLDRESRAEYNVTITVTDLGTPRLTTHLNMTVLVSDVNDNAPAFTQTSYTLFVRENNSPALHIGSVSATDRDSGTNAQVTYSLLPPQDPHLPLASLVSINTDNGHLFALRSLDYEALQAFEFRVGASDRGSPALSSEALVRVLVLDANDNSPFVLYPLQNGSAPCTELVPRAAEPGYLVTKVVAVDGDSGQNAWLSYQLLKATEPGLFGVWAHNGEVRTARLLSERDAAKQRLVVLVKDNGEPPCSATATLHVLLVDGFSQPYLPLPEAAPAQGQADSLTVYL

SEQ ID NO: 1743 - protein, 664 aa, synthetic construct
  REGION 1..664: note = PCDHB9 (Q9Y5E1) ECD
GSGFGRYSVTEETEKGSFVVNLAKDLGLAEGELAARGTRVVSDDNKQYLLLDSHTGNLLTNEKLDREKLCGPKEPCMLYFQILMDDPFQIYRAELRVRDINDHSPVFRHKEMVLKISENTAEGTAFRLERAQDPDEGHNSIQNYTISSNSFFHIKISGSDEGMIYPELVLDKALDREEQEELSLTLTALDGGSPSRSGTSTIRIVVLDVNDNAPQFAQALYETQAPENSPVGSLIVKVSAGDADSGVNAEVSYSFFDASEDILTTFQINPFSGEIFLRELLDYELVNSYKINIQAMDGGGLSARCTVLIKVLDSNDNPPELIISSLSNSVAENSPGIVLAVFKIKDRDSGENGKTICYVQDNLPFFLKPSVDNFYILMTEGALDRESKAEYNITITVTDLGTPRLKTEHSITLQVSDVNDNAPAFTQTSYTLFVRENNSPALHIGSVSATDRDSGTNAQVTYSLLPPQDPHLPLASLVSINADNGHLFALRSLDYEALQAFDFRVGASDRGSPALSSEALVRVLVLDANDNSPFVLYPLQNGSAPCTELVPRAAEPGYLVTKVVAVDGDSGQNAWLSYQLLKATEPGLFGVWAHNGEVRTARLLSERDAAKHRLVVLVKDNGEPPRSATATLHVLLVDGFSQPYLPLPEAAPAQAQADLLTVYL

SEQ ID NO: 1744 - protein, 664 aa, synthetic construct
  REGION 1..664: note = PCDHGA1 (Q9Y5H4) ECD
GNIHYSVPEETDKGSFVGNIAKDLGLQPQELADGGVRIVSRGRMPLFALNPRSGSLITARRIDREELCAQSMPCLVSFNILVEDKMKLFPVEVEIIDINDNTPQFQLEELEFKMNEITTPGTRVSLPFGQDLDVGMNSLQSYQLSSNPHFSLDVQQGADGPQHPEMVLQSPLDREEEAVHHLILTASDGGEPVRSGTLRIYIQVVDANDNPPAFTQAQYHINVPENVPLGTQLLMVNATDPDEGANGEVTYSFHNVDHRVAQIFRLDSYTGEISNKEPLDFEEYKMYSMEVQAQDGAGLMAKVKVLIKVLDVNDNAPEVTITSVTTAVPENFPPGTIIALISVHDQDSGDNGYTTCFIPGNLPFKLEKLVDNYYRLVTERTLDRELISGYNITITAIDQGTPALSTETHISLLVTDINDNSPVFHQDSYSAYIPENNPRGASIFSVRAHDLDSNENAQITYSLIEDTIQGAPLSAYLSINSDTGVLYALRSFDYEQFRDMQLKVMARDSGDPPLSSNVSLSLFLLDQNDNAPEILYPALPTDGSTGVELAPLSAEPGYLVTKVVAVDRDSGQNAWLSYRLLKASEPGLFSVGLHTGEVRTARALLDRDALKQSLVVAVQDHGQPPLSATVTLTVAVADRISDILADLGSLEPSAKPNDSDLTLY

SEQ ID NO: 1745 - protein, 664 aa, synthetic construct
  REGION 1..664: note = PCDHGA10 (Q9Y5H3) ECD
RQISYSIPEELEKGSFVGNISKDLGLAPRELAERGVRIVSRGRTQLFSLNPRSGSLITAGRIDREELCAQSARCVVSFNILVEDRVKLFGIEIEVTDINDNAPKFQAENLDVKINENVAAGMRFPLPEAIDPDVGVNSLQSYQLSPNKHFSLRVQSRANGVKYPELVLEHSLDREEEAIHHLVLTASDGGDPLRSGTVLVSVTVFDANDNAPVFTLPEYRVSVPENLPVGTQLLTVTATDRDEGANGEVTYSFRKLPDTQLLKFQLNKYTGEIKISENLDYEETGFYEIEIQAEDGGAYLATAKVLITVEDVNDNSPELTITSLFSPVTEDSPLGTVVALLNVHDLDSEQNGQVTCSILAYLPFKLEKSIDSYYRLVIHRALDREQVSSYNITVTATDGGSPPLSTEAHFMLQVADINDNPPTFSQVSYFTYIPENNARGASIFSVTALDPDSKENAQIIYSLAEDTIQGVPLSSYISINSDTGVLYALRSFDYEQFHELQMQVTASDSGDPPLSSNVSLSLFVLDQNDNAPEILYPALPTDGSTGVELAPRSAEPGYLVTKVVAVDRDSGQNAWLSYRLLKASEPGLFAVGEHTGEVRTARALLDRDALKQSLVVAVQDHGQPPLSATVTLTVAVADSIPQVLADLGSFESPANSETSDLTLY

SEQ ID NO: 1746 - protein, 664 aa, synthetic construct
  REGION 1..664: note = PCDHGA11 (Q9Y5H2) ECD
RQIRYSVPEETEKGSFVGNISKDLGLEPRELAKRGVRIVSRGKTQLFAVNPRSGSLITAGRIDREELCETVSSCFLNMELLVEDTLKIYGVEVEIIDINDNAPSFQEDEVEIKVSEHAIPGARFALPNARDPDVGVNSLQSYQLSPNNYFSLQLRGRTDGAKNPELVLEGSLDREKEAAHLLLLTALDGGDPIRKGAVPIRVVVLDVNDHIPMFTQSVYRVSVPENISSGTRVLMVNATDPDEGINGEVMYSFRNMESKASEIFQLDSQTGEVQVRGSLDFEKYRFYEMEIQGQDGGGLFTTTTMLITVVDVNDNAPEITITSSINSILENSPPGTVIALLNVQDQDSGENGQVSCFIPNHLPFKLEKTYGNYYKLITSRVLDRELVQSYNITLTATDQGSPPLSAETHVWLNVADDNDNPPVFPHSSYSAYIPENNPRGASIFSVTALDPDSKQNALVTYSLTDDTVQGVPLSSYVSINSNTGVLYALQSFDYEQFRDLELRVIARDSGDPPLSSNVSLSLFVLDQNDNAPEILYPALPTDGSTGVELAPRSAEPGYLVTKVVAVDKDSGQNAWLSYRLLKASEPGLFAVGEHTGEVRTARALLDRDALKQSLVVAVQDHGQPPLSATVTLTVAVADSIPEVLADLGSLESLANSETSDLSLY

SEQ ID NO: 1747 - protein, 663 aa, synthetic construct
  REGION 1..663: note = PCDHGA12 (O60330) ECD
QIRYSVPEELEKGSRVGDISRDLGLEPRELAERGVRIIPRGRTQLFALNPRSGSLVTAGRIDREELCMGAIKCQLNLDILMEDKVKIYGVEVEVRDINDNAPYFRESELEIKISENAATEMRFPLPHAWDPDIGKNSLQSYELSPNTHFSLIVQNGADGSKYPELVLKRALDREEKAAHHLVLTASDGGDPVRTGTARIRVMVLDANDNAPAFAQPEYRASVPENLALGTQLLVVNATDPDEGVNAEVRYSFRYVDDKAAQVFKLDCNSGTISTIGELDHEESGFYQMEVQAMDNAGYSARAKVLITVLDVNDNAPEVVLTSLASSVPENSPRGTLIALLNVNDQDSEENGQVICFIQGNLPFKLEKSYGNYYSLVTDIVLDREQVPSYNITVTATDRGTPPLSTETHISLNVADTNDNPPVFPQASYSAYIPENNPRGVSLVSVTAHDPDCEENAQITYSLAENTIQGASLSSYVSINSDTGVLYALSSFDYEQFRDLQVKVMARDNGHPPLSSNVSLSLFVLDQNDNAPEILYPALPTDGSTGVELAPRSAEPGYLVTKVVAVDRDSGQNAWLSYRLLKASEPGLFSVGLHTGEVRTARALLDRDALKQSLVVAVQDHGQPPLSATVTLTVAVADSIPQVLADLGSLESPANSETSDLTLY

SEQ ID NO: 1748 - protein, 664 aa, synthetic construct
  REGION 1..664: note = PCDHGA2 (Q9Y5H1) ECD
GQIRYSVREEIDRGSFVGNIAKDLGLEPLALAEQGVRIVSRGRSQLFALNPRSGSLVTANRIDREELCAQSAPCLLNFNILLEDKLTIYSVEVEITDINDNAPRFGVEELELKISETTTPGFRIPLKNAHDADVGENALQKYALNPNDHFSLDVRRGADGNKYPELVLERSLDREEEAVHHLVLVASDGGDPVLSGTSRICVKVLDANDNAPVFTQPEYRISIPENTLVGTRILTVTATDADEGYYAQVVYFLEKSPGETSEVFELKSTSGELTIIKDLDYEDATFHEIDIEAQDGPGLLTRAKVIVTVLDVNDNAPEFYMTSATSSVSEDSLPGTIIGLFNVHDRDSGQNAFTTCSLPEDLPFKLEKSVDNYYRLVTTRALDREQFSFYNITLTAKDGGNPSLSTDAHILLQVADINDNAPAFSRTSYSTYIPENNPRGASVFSVTAHDPDSNDNAHVTYSFAEDTVQGAPLSSYISINSDTGVLYALRSFDYEQLRDLQVWVIARDSGNPPLSSNVSLSLFVLDQNDNAPEILYPAFPTDGSTGVELAPRSAEPGYLVTKVVAVDRDSGQNAWLSYHLLKASEPGLFSVGLHTGEVRTARALLDRDALKQSLVVAIQDHGQPPLSATVTLTVAVADRIPDILADLGSLEPSAIPNDSDLTLY

SEQ ID NO: 1749 - protein, 663 aa, synthetic construct
  REGION 1..663: note = PCDHGA3 (Q9Y5H0) ECD
QIRYSVSEELDKGSFVGNIANDLGLEPRELAERGVRIVSRGRTQLFSLNPQSGSLVTAERIDREELCAQIPLCLVKINILVEDKLKIFEVEIEIKDINDNAPNFPTEELEIKIGELTVPGTRFPIKTAFDPDVGINSLQNYKLSPNDYFSLAVNSVSEGAKYPELVLERALDREKKEIHQLVLVASDGGDPVHSGNLHIQVIVLDANDNPPMFTQPEYRVSVWENVPVGTRLLTVNATDPDEGFNAQVSYILDKMPGKIAEIFHLNSVSGEVSILKSLDYEDAMFYEIKIEAQDGPGLLSRAKILVTVLDVNDNAPEITITSLTSSVPEEGTVGREIALIDVHDRDSGQNGQVEVFVLGNLPFKLEKSIDQYYRLVTATSLDREQISEYNISLRASDGGSPPLSTETHITLHVIDINDNPPTFPHLSYSAYIPENNPRGASIFSVTAQDPDSNNNARITYALTEDTLQGAPLSSFVSINSNTGVLYALRSFDYEQFRDLKLLVTASDSGNPPLSSNVSLNLFVLDQNDNAPEILYPALPTDGSTGVELAPRSAEPGYLVTKVVAVDRDSGQNAWLSYRLLKASEPGLFSVGLHTGEVRTARALLDRDALKQSLVVAVQDHGQPPLSATVTLTVAVADRIPDILADLGSLEPSAKPNDSDLTLY

SEQ ID NO: 1750 - protein, 664 aa, synthetic construct
  REGION 1..664: note = PCDHGA4 (Q9Y5G9) ECD
EQILYSVFEEQEEGSVVGNIAKDLGLAPRELAERGVRIVSRGRTQLFALNPRSGTLVTAGRIDREELCDRSPNCVTNLEILLEDTVKILRVEVEIIDVNDNPPSFGTEQREIKVAENENPGARFPLPEAFDPDVGVNSLQGYQLNSNGYFSLDVQSGADGIKYPELVLERALDREEEAVHHLVLTAFDGGDPVRSGTARILIILVDTNDNAPVFTQPEYHVSVRENVPVGTRLLTVKATDPDEGANGDVTYSFRKVRDKISQLFQLNSLSGDITILGGLDYEDSGFYDIDVEAHDGPGLRARSKVLVTVLDENDNAPEVTVTSLTSSVQESSSPGTVIALFNVHDSDSGGNGLVTCSIPDNLPFTLEKTYGNYYRLLTHRTLDREEVSEYNITVTATDQGTPPLSTETHISLQVMDINDNPPTFPHASYSAYIPENNPRGASILSMTAQDPDSGDNARITYSLAEDTFQGAPLSSYVSINSNTGILYALCSFDYEQFRDLQLLMTASDSGDPPLSSNVSLSLFVLDQNDNVPEILYPTFPTDGSTGVELAPRSADSGYLVTKVVAVDRDSGQNAWLSYSLLKSSEPGLFAVGLHTGEVRTARALLDRDALKQRLVVVVQDHGQPPLSATVTLTVAVADSIPDVLADLGSLKPSADPDDSGLTLY

SEQ ID NO: 1751 - protein, 663 aa, synthetic construct
  REGION 1..663: note = PCDHGA5 (Q9Y5G8) ECD
QIRYSMPEELDKGSFVGNIAKDLGLEPQELAERGVRIVSRGRTQLFALNPRSGSLVTAGRIDREELCAQSPLCVVNFNILVENKMKIYGVEVEIIDINDNFPRFRDEELKVKVNENAAAGTRLVLPFARDADVGVNSLRSYQLSSNLHFSLDVVSGTDGQKYPELVLEQPLDREKETVHDLLLTALDGGDPVLSGTTHIRVTVLDANDNAPLFTPSEYSVSVPENIPVGTRLLMLTATDPDEGINGKLTYSFRNEEEKISETFQLDSNLGEISTLQSLDYEESRFYLMEVVAQDGGALVASAKVVVTVQDVNDNAPEVILTSLTSSISEDCLPGTVIALFSVHDGDSGENGEIACSIPRNLPFKLEKSVDNYYHLLTTRDLDREETSDYNITLTVMDHGTPPLSTESHIPLKVADVNDNPPNFPQASYSTSVTENNPRGVSIFSVTAHDPDSGDNARVTYSLAEDTFQGAPLSSYVSINSDTGVLYALRSFDYEQLRDLQLWVTASDSGNPPLSSNVSLSLFVLDQNDNTPEILYPALPTDGSTGVELAPRSAEPGYLVTKVVAVDKDSGQNAWLSYRLLKASEPGLFAVGLHTGEVRTARALLDRDALKQSLVVAVEDHGQPPLSATFTVTVAVADRIPDILADLGSIKTPIDPEDLDLTLY

SEQ ID NO: 1752 - protein, 663 aa, synthetic construct
  REGION 1..663: note = PCDHGA6 (Q9Y5G7) ECD
QIRYSIPEELEKGSFVGNIVKDLGLEPQELAEHGVRIVSRGRMQLFSLNPRNGSLVTAGRIDREELCAQSPRCLVSFNILVEDKLNLYPVEVEIVDINDNTPRFLKEELEVKILENAAPSSRFPLMEVYDPDVGMNSLQGFKLSGNSHFSVDVQSEAHGPKYPELVLEGTLDREGEAVYRLVLTAMDGGDPVRSSVAQILVTVLDVNDNTPMFTQPVYRVSVPENLPVGTPVLAVTATDQDEGVHGEVTYSFVKITEKISQIFCLNVLTGEISTSANLDYEDSSFYELGVEARDGPGLRDRAKVLITILDVNDNVPEVVVTSGSRTIAESAPPGTVIALFQVFDRDSGLNGLVTCSIPRSLPFELEKSVGNYYRLVTNAALDREEVFLYNITVTATDKGTPPLSTETIISLNVADTNDNPPTFPHSSYSVYVLENNPRGASIFSVNALDPDVDQNAQVSYSLAEDTLQGAPLSSYVSINSDTGILYALRSFDYEQLRDLQLWVTASDSGDPPLSSNVSLSLFVLDQNDNAPEILYPALPTDGSTGVELAPRSAEPGYLVTKVVAVDRDSGQNAWLSYRLLKASEPGLFSVGLHTGEVRTARALLDRDALKQSLVVAVQDHGQPPLSATVTLTVAVADRIPDILADLGSLEPSAKPNDSDLTLY

SEQ ID NO: 1753 - protein, 664 aa, synthetic construct
  REGION 1..664: note = PCDHGA7 (Q9Y5G6) ECD
GRILYSVSEETDKGSFVGDIAKDLGLEPRELAERGVRIISRGRTQLFALNQRSGSLVTAGRIDREEICAQSARCLVNFNILMEDKMNLYPIDVEIIDINDNVPRFLTEEINVKIMENTAPGVRFPLSEAGDPDVGTNSLQSYQLSPNRHFSLAVQSGDDETKYPELVLERVLDREEERVHHLVLTASDGGDPPRSSTAHIQVTVVDVNDHTPVFSLPQYQVTVPENVPVGTRLLTVHAIDLDEGVNGEVTYSFRKITPKLPKMFHLNSLTGEISTLEGLDYEETAFYEMEVQAQDGPGSLTKAKVLITVLDVNDNAPEVTMTSLSSSIPEDTPLGTVIALFYLQDRDSGKNGEVTCTIPENLPFKLEKSIDNYYRLVTTKNLDRETLSLYNITLKATDGGTPPLSRETHIFMQVADTNDNPPTFPHSSYSVYIAENNPRGASIFLVTAQDHDSEDNAQITYSLAEDTIQGAPVSSYVSINSDTGVLYALQSFDYEQLRELQLRVTAHDSGDPPLSSNMSLSLFVLDQNDNPPEILYPALPTDGSTGMELAPRSAEPGYLVTKVVAVDKDSGQNAWLSYLLLKASEPGLFAVGLYTGEVRTARALLDRDALKQSLVVAVQDHGQPPLSATVTLTVAVADSIPEVLADLGSLEPSDGPYNYDLTLY

SEQ ID NO: 1754 - protein, 663 aa, synthetic construct
  REGION 1..663: note = PCDHGA8 (Q9Y5G5) ECD
QIRYSVPEETDKGSFVGNISKDLGLDPRKLAKHGVRIVSRGRTQLFALNPRSGSLITAGRIDREELCAQSPRCLININTLVEDKGKLFGVEIEIIDINDNNPKFQVEDLEVKINEIAVPGARYPLPEAVDPDVGVNSLQSYQLSPNHHFSLDVQTGDNGAINPELVLERALDREEEAAHHLVLTASDGGKPPRSSTVRIHVTVLDTNDNAPVFPHPIYRVKVLENMPPGTRLLTVTASDPDEGINGKVAYKFRKINEKQTPLFQLNENTGEISIAKSLDYEECSFYEMEIQAEDVGALLGRTKLLISVEDVNDNRPEVIITSLFSPVLENSLPGTVIAFLSVHDQDSGKNGQVVCYTRDNLPFKLEKSIGNYYRLVTRKYLDRENVSIYNITVMASDLGTPPLSTETQIALHVADINDNPPTFPHASYSAYILENNLRGASIFSLTAHDPDSQENAQVTYSVTEDTLQGAPLSSYISINSDTGVLYALQSFDYEQIRDLQLLVTASDSGDPPLSSNMSLSLFVLDQNDNAPEILYPALPTDGSTGVELAPRSAERGYLVTKVVAVDRDSGQNAWLSYRLLKASEPGLFSVGLHTGEVRTARALLDRDALKQSLVVAVQDHGQPPLSATVTLTVAVADSIPEVLTELGSLKPSVDPNDSSLTLY

SEQ ID NO: 1755 - protein, 664 aa, synthetic construct
  REGION 1..664: note = PCDHGA9 (Q9Y5G4) ECD
SQIRYSVPEETEKGYIVGNISKDLALEPRELAERRVRIVSRGRTQLFSLNPRSGTLVTAGRIDREELCAQSPRCLVNFKVLVEDRVKLYGIEIEVTDINDSAPKFQAESLEVKINEIAVPGARYPLPEAIDPDVGVNSLQSYQLSPNHHFSLNVQTGDNGAINPELVLERALDREEATAHHLVLTASDGGEPRRSSTVRIHVTVLDTNDNAPVFAQRIYRVKVLENVPPGTWLLTATASDLDEGINGKVAYKFWKINEKQSLLFQLNENTGEISTAKSLDYEECSFYEMEIQAEDGGGLKGWTKVLISVEDVNDNRPEVTITSLFSPVREDAPQGTVILLFNAHDRDSGKNGQVVCSIQENLSFTLENSEEDYYRLLTAQILDREKASEYNITVTATDRGTPPLSTEIHITLQVTDINDNPPAFSQASYSVYLPENNARGTSIFSVIAYDPDSNENSRVIYSLAEDTIQGSPLSTYVSINSDTGVLYALCSFDYEQFRDLQMQVTASDSGSPPLSSNVSLRLFVLDQNDNAPEILYPALPTDGSTGVELAPRSAEPGYLVTKVVAVDRDSGQNAWLSYRLFKASEPGLFSVGLHTGEVRTARALLDRDALKQSLVVAVQDHGQPPLSATVTLTVAIADSIPDILADLGSLQIPADLEASDLTLY

SEQ ID NO: 1756 - protein, 659 aa, synthetic construct
  REGION 1..659: note = PCDHGB1 (Q9Y5G3) ECD
QQIRYTIPEELANGSRVGKLAKDLGLSVRELPTRKLRVSAEDYFNVSLESGDLLVNGRIDREKICGRKLECALEFETVAENPMNVFHVVVVIQDINDNAPRFVAKGIDLEICESALPGVKFSLDSAQDADVEGNSLKLYTINPNQYFSLSTKESPDGSKYPVLLLEKPLDREHQSSHRLILTAMDGGDPPLSGTTHIWIRVTDANDNAPVFSQEVYRVSLQENVPWGTSVLRVMATDQDEGINAEITYAFLNSPISTSLFNLNPNTGDITTNGTLDFEETSRYVLSVEAKDGGVHTAHCNVQIEIVDENDNAPEVTFMSFSNQIPEDSDLGTVIALIKVRDKDSGQNGMVTCYTQEEVPFKLESTSKNYYKLVIAGALNREQTADYNVTIIATDKGKPALSSRTSITLHISDINDNAPVFHQASYVVHVSENNPPGASIAQVSASDPDLGPNGRVSYSILASDLEPRELLSYVSVSPQSGVVFAQRAFDHEQLRAFELTLQARDQGSPALSANVSLRVLVGDLNDNAPRVLYPALGPDGSALFDMVPRAAEPGYLVTKVVAVDADSGHNAWLSYHVLQASEPGLFSLGLRTGEVRTARALGDRDAARQRLLVAVRDGGQPPLSATATLHLIFADSLQEVLPDLSDRPEPSDPQTELQFY

SEQ ID NO: 1757 - protein, 661 aa, synthetic construct
  REGION 1..661: note = PCDHGB2 (Q9Y5G2) ECD
VQIRYSIPEELAKNSVVGNLAKDLGLSVRDLPARKLRVSAEKEYFTVNPESGDLLVSDRIDREQICGKQPLCVLDFDTVAENPLNIFYIAVIVQDINDNTPLFKQTKINLKIGESTKPGTTFPLDPALDSDVGPNSLQRYHLNDNEYFDLAEKQTPDGRKYPELILKHSLDREEHSLHQLVLTAVDGGDPPQSGTTQIRIKVTDANDNPPVFSQDVYRVTLREDVPPGFFVLQVTATDRDEGINAEITYSFHNVDEQVKHFFNLNEKTGEITTKDDLDFEIASSYTLSIEAKDPGDLAAHCSIQVEILDDNDCAPEVIVTSVSTPLPEDSPPGTVIALIKTRDRDSGENGEVYCQVLGNAKFILKSSSKNYYKLVTDGALDREEIPEYNLTITATDGGKPPLSSSIIVTLHISDVNDNAPVFQQTSYMVHVAENNPPGASIAQISASDPDLGPSGQVSYSIVASDLKPREILSYVSVSAQSGVVFAQRAFDHEQLRAFELTLQARDQGSPALSANVSLRVLVGDLNDNAPRVLYPALGPDGSALFDMVPRAAEPGYLVTKVVAVDADSGHNAWLSYHVLQASEPGLFSLGLRTGEVRTARALGDRDAARQRLLVAVRDGGQPPLSATATLHLIFADSLQEVLPDLSDRREPSDPQAKLQFY

SEQ ID NO: 1758 - protein, 661 aa, synthetic construct
  REGION 1..661: note = PCDHGB3 (Q9Y5G1) ECD
EPIRYAIPEELDRGSLVGNLAKDLGFGVGDLPTRNLRVIAEKKFFTVSPENGNLLVSDRIDREEICGKKSTCVLEFEMVAEKPLNFFHVTVLIQDINDNPPTFSQNITELEISELALTGATFALESAQDPDVGVNSLQQYYLSPDPHFSLIQKENLDGSRYPELVLKAPLDREEQPHHHLVLTAVDGGEPSRSCTTQIRVIVADANDNPPVFTQDMYRVNVAENLPAGSSVLKVMAIDMDEGINAEIIYAFINIGKEVRQLFKLDSKTGELTTIGELDFEERDSYTIGVEAKDGGHHTAYCKVQIDISDENDNAPEITLASESQHIQEDAELGTAVALIKTHDLDSGFNGEILCQLKGNFPFKIVQDTKNTYRLVTDGALDREQIPEYNVTITATDKGNPPLSSSKTITLHILDVNDNVPVFHQASYTVHVAENNPPGASIAHVRASDPDLGPNGLVSYYIVASDLEPRELSSYVSVSARSGVVFAQRAFDHEQLRAFELTLQARDQGSPTLSANVSLRVLVDDRNDNAPLVLYPALGPEGSALFDMVPRSAEPGYLVTKVVAVDADSGYNAWLSYHIVQASEPGLFSLGLRTGEVRTARTLGDREAARQRLLVTVRDGGQQPLSATVMLHLIFADSLQEIQPDLSDRPTPSDPQAELQFH

SEQ ID NO: 1759 - protein, 659 aa, synthetic construct
  REGION 1..659: note = PCDHGB4 (Q9UN71) ECD
EQIRYRIPEEMPKGSVVGNLATDLGFSVQELPTRKLRVSSEKPYFTVSAESGELLVSSRLDREEICGKKPACALEFEAVAENPLNFYHVNVEIEDINDHTPKFTQNSFELQISESAQPGTRFILGSAHDADIGSNTLQNYQLSPSDHFSLINKEKSDGSKYPEMVLKTPLDREKQKSYHLTLTALDFGAPPLSSTAQIHVLVTDANDNAPVFSQDVYRVSLSENVYPGTTVLQVTATDQDEGVNAEITFSFSEASQITQFDLNSNTGEITVLNTLDFEEVKEYSIVLEARDGGGMIAQCTVEVEVIDENDNAPEVIFQSLPNLIMEDAELGTHIALLKVRDKDSRHNGEVTCKLEGDVPFKILTSSRNTYKLVTDAVLDREQNPEYNITVTATDRGKPPLSSSSSITLHIGDVNDNAPVFSQSSYIVHVAENNPPGASISQVRASDPDLGPNGQVSYCIMASDLEQRELSSYVSISAESGVVFAQRAFDHEQLRAFELTLQARDQGSPALSANVSLRVLVDDRNDNAPRVLYPALGPDGSALFDMVPHAAEPGYLVTKVVAVDADSGHNAWLSYHVLQASEPGLFSLGLRTGEVRTARALGDRDAVRQRLLVAVRDGGQPPLSATATLHLVFADSLQEVLPDITDRPDPSDLQAELQFY

SEQ ID NO: 1760 - protein, 657 aa, synthetic construct
  REGION 1..657: note = PCDHGB5 (Q9Y5G0) ECD
EQIRYRIPEEMPKGSVVGNLATDLGFSVQELPTRKLRVSSEKPYFTVSAESGELLVSSRLDREEICGKKPACALEFEAVAENPLNFYHVNVEIEDINDHTPKFTQNSFELQISESAQPGTRFILEVAEDADIGLNSLQKYKLSLNPSFSLIIKEKQDGSKYPELALEKTLDREQQSYHRLVLTALDGGHPPLSGTTELRIQVTDANDNPPVFNRDVYRVSLRENVPPGTTVLQVSATDQDEGINSEITYSFYRTGQIFSLNSKSGEITTQKKLDFEETKEYSMVVEGRDGGGLVAQCTVEINIQDENDNSPEVTFHSLLEMILENAVPGTLIALIKIHDQDSGENGEVNCQLQGEVPFKIISSSKNSYKLVTDGTLDREQTPEYNVTITATDRGKPPLSSSISVILHIRDVNDNAPVFHQASYLVSVPENNPPGASIAQVCASDLDLGLNGQVSYSIMASDLEPLALASYVSMSAQSGVVFAQRAFDYEQLRTFELTLQARDQGSPALSANVSLRVLVGDRNDNAPRVLYPALGPDGSALFDMVPRAAEPGYLVTKVVAVDADSGHNAWLSYHVLQASEPGLFSLGLRTGEVRTARALGDRDAARQRLLVAVRDGGQPPLSATATLHLVFADSLQEVLPDITDRPVPSDPQAELQFY

SEQ ID NO: 1761 - protein, 661 aa, synthetic construct
  REGION 1..661: note = PCDHGB6 (Q9Y5F9) ECD
EPIRYSIPEELAKGSVVGNLAKDLGLSVLDVSARKLRVSAEKLHFSVDAESGDLLVKNRIDREQICKERRRCELQLEAVVENPLNIFHVIVVIEDVNDHAPQFDKKEIHLEIFESASAGTRLSLDPATDPDININSIKDYKINSNPYFSLMVRVNSDGGKYPELSLEKLLDREEQRSHSLILTALDGGDPPRSATAHIEISVKDTNDNPPVFSRDEYRISLSENLPPGSPVLQVTATDQDEGVNAEINYYFRSTAQSTKHMFSLDEKTGMIKNNQSFDFEDVERYTMEVEAKDGGGLSTQCKVIIEILDENDNSPEIIITSLSDQILENSPPGMVVALFKTRDLDFGGNGEVRCNIETDIPFKIYSSSNNYYKLVTDGALDREQTPEYNVTIVATDRGKPPLSSSRSITLYVADINDNAPVFDQTSYVVHVAENNPPGASIAQVSASDPDLGLNGHISYSIVASDLEPLAVSSYVSVSAQSGVVFAQRAFDHEQLRAFALTLQARDHGSPTLSANVSLRVLVGDRNDNAPRVLYPALGPDGSAFFDMVPRSAEPGYLVTKVVAVDADSGHNAWLSYHVLQASEPGLFSLGLRTGEVRTARALGDRDAARQRLLVAVRDGGQPPLSATATLHLVFADNLQEILPDLSDRPVLSDPQAELQFY

SEQ ID NO: 1762 - protein, 661 aa, synthetic construct
  REGION 1..661: note = PCDHGB7 (Q9Y5F8) ECD
EPIRYSIPEELAKGSVVGNLAKDLGLSVLDVSARELRVSAEKLHFSVDAQSGDLLVKDRIDREQICKERRRCELQLEAVVENPLNIFHVIVVIEDVNDHAPQFRKDEINLEISESVSLGMGTILESAEDPDISMNSLSKYQLSPNEYFSLVEKDNPDGGKYPELVLQKTLDRETQSAHHLVLTALDGGDPPRSGTAQIRILVIDANDNPPVFSQDVYRVSLREDVPPGTSILRVKATDQDEGINSEITYSFFGVADKAQHVFSLDYTTGNILTQQPLDFEEVERYTINIEAKDRGSLSTRCKVIVEVVDENDNSPEIIITSLSDQIMEDSPPGVVVALFKTRDQDSGENGEVRCSLSRGVPFKIHSSSNNYYKLVTDEALDREQTPEYNVTIAATDRGKPPLSSSKTITLHITDVNDNAPVFGQSAYLVHVPENNQPGASIAQVSASDPDFGLNGRVSYSLIASDLESRTLSSYVSVSAQSGVVFAQRAFDHEQLRTFELTLQARDQGSPALSANVSLRVLVGDRNDNAPRVLYPALGPDGSALFDTVPRAAQPGYLVTKVVAVDADSGHNAWLSYHVVQASEPGLFSLGLRTGEVRMVRALGDKDSVRQRLLVAVRDGGQPPLSATATLHLVFADSLQEVLPDFSDHPTPSDSQAEMQFY

SEQ ID NO: 1763 - protein, 662 aa, synthetic construct
  REGION 1..662: note = PCDHGC3 (Q9UN70) ECD
VIHYEIPEEREKGFAVGNVVANLGLDLGSLSARRFRVVSGASRRFFEVNRETGEMFVNDRLDREELCGTLPSCTVTLELVVENPLELFSVEVVIQDINDNNPAFPTQEMKLEISEAVAPGTRFPLESAHDPDVGSNSLQTYELSRNEYFALRVQTREDSTKYAELVLERALDREREPSLQLVLTALDGGTPALSASLPIHIKVLDANDNAPVFNQSLYRARVLEDAPSGTRVVQVLATDLDEGPNGEIIYSFGSHNRAGVRQLFALDLVTGMLTIKGRLDFEDTKLHEIYIQAKDKGANPEGAHCKVLVEVVDVNDNAPEITVTSVYSPVPEDAPLGTVIALLSVTDLDAGENGLVTCEVPPGLPFSLTSSLKNYFTLKTSADLDRETVPEYNLSITARDAGTPSLSALTIVRVQVSDINDNPPQSSQSSYDVYIEENNLPGAPILNLSVWDPDAPQNARLSFFLLEQGAETGLVGRYFTINRDNGIVSSLVPLDYEDRREFELTAHISDGGTPVLATNISVNIFVTDRNDNAPQVLYPRPGGSSVEMLPRGTSAGHLVSRVVGWDADAGHNAWLSYSLLGSPNQSLFAIGLHTGQISTARPVQDTDSPRQTLTVLIKDNGEPSLSTTATLTVSVTEDSPEARAEFPSGSAPREQKKNLTFY

SEQ ID NO: 1764 - protein, 663 aa, synthetic construct
  REGION 1..663: note = PCDHGC4 (Q9Y5F7) ECD
QIRYPVPEESQEGTFVGNVAQDFLLDTDSLSARRLQVAGEVNQRHFRVDLDSGALLIKNPIDREALCGLSASCIVPLEFVTEGPLEMYRAEVEIVDVNDHAPRFPRQQLDLEIGEAAPPGQRFPLEKAQDADVGSNSISSYRLSSNEHFALDVKKRSDGSLVPELLLEKPLDREKQSDYRLVLTAVDGGNPPRSGTAELRVSVLDVNDNAPAFQQSSYRISVLESAPAGMVLIQLNASDPDLGPSGNVTFYFSGHTPDRVRNLFSLHPTTGKLTLLGPLDFESENYYEFDVRARDGGSPAMEQHCSLRVDLLDVNDNAPYITVTSELGTLPESAEPGTVVALISVQDPDSGSNGDVSLRIPDHLPFALKSAFRNQFSLVTAGPLDREAKSSYDIMVTASDAGNPPLSTHRTIFLNISDVNDNPPSFFQRSHEVFVPENNRPGDLLCSLAASDPDSGLNALISYSLLEPRNRDVSASSFISLNPQTGAVHATRSFDYEQTQTLQFEVQARDRGNPPLSSTVTVRLFVLDLNDNAPAVLRPRARPGSLCPQALPPSVGAGHLITKVTAVDLDSGYNAWVSYQLLEAPDPSLFAVSRYAGEVRTAVPIPADLPPQKLVIVVKDSGSPPLSTSVTLLVSLEEDTHPVVPDLRESSAPREGESRLTLY

SEQ ID NO: 1765 - protein, 664 aa, synthetic construct
  REGION 1..664: note = PCDHGC5 (Q9Y5F6) ECD
QLRYSVVEESEPGTLVGNVAQDLGLKMTDLLSRRLQLGSEENGRYFSLSLMSGALAVNQKIDRESLCGASTSCLLPVQVVTEHPLELIRVEVEILDLNDNSPSFATPEREMRISESAASGARFPLDSAQDPDVGTNTVSFYTLSPNSHFSLNVKTLKDGKPFPELVLEQQLDREAQARHQLVLTAVDGGTPARSGTTLISVIVLDINDNAPTFQSSVLRVGIPENAPIGTLLLRLNATDPDEGTNGQLDYSFGDHTSEAVRNLFGLDPSSGAIHVLGPIDFEESRFYEIHARARDQGQPAMEGHCVIQVDVGDVNDNAPEVLLASLANPVLESTPVGTVVGLFNVRDRDSGRNGEVSLDISPDLPFQIKPSENHYSLLTSQPLDREATSHYIIELLASDAGSPSLHKHLTIRLNISDVNDNAPRFNQQLYTAYILENRPPGSLLCTVAASDPDTGDNARLTYSIVGNQVQGAPASSFVYVNPEDGRIFAQRTFDYELLQMLQIVVGVRDSGSPPLHANTSLHVFVLDENDNAPAVLHPRPDWEHSAPQRLPRSAPPGSLVTKVTAVDADAGHNAWLSYSLLPQSTAPGLFLVSTHTGEVRTARALLEDDSDTQQVVVLVRDNGDPSLSSTATVLLVLEDEDPEEMPKSSDFLIHPPERSDLTLY

SEQ ID NO: 1766 - protein, 1629 aa, synthetic construct
  REGION 1..1629: note = PCSK5 (Q92824) ECD
DYDFSRAQSTYFNDPKWPSMWYMHCSDNTHPCQSDMNIEGAWKRGYTGKNIVVTILDDGIERTHPDLMQNYDALASCDVNGNDLDPMPRYDASNENKHGTRCAGEVAAAANNSHCTVGIAFNAKIGGVRMLDGDVTDMVEAKSVSFNPQHVHIYSASWGPDDDGKTVDGPAPLTRQAFENGVRMGRRGLGSVFVWASGNGGRSKDHCSCDGYTNSIYTISISSTAESGKKPWYLEECSSTLATTYSSGESYDKKIITTDLRQRCTDNHTGTSASAPMAAGIIALALEANPFLTWRDVQHVIVRTSRAGHLNANDWKTNAAGFKVSHLYGFGLMDAEAMVMEAEKWTTVPRQHVCVESTDRQIKTIRPNSAVRSIYKASGCSDNPNRHVNYLEHVVVRITITHPRRGDLAIYLTSPSGTRSQLLANRLFDHSMEGFKNWEFMTIHCWGERAAGDWVLEVYDTPSQLRNFKTPGKLKEWSLVLYGTSVQPYSPTNEFPKVERFRYSRVEDPTDDYGTEDYAGPCDPECSEVGCDGPGPDHCNDCLHYYYKLKNNTRICVSSCPPGHYHADKKRCRKCAPNCESCFGSHGDQCMSCKYGYFLNEETNSCVTHCPDGSYQDTKKNLCRKCSENCKTCTEFHNCTECRDGLSLQGSRCSVSCEDGRYFNGQDCQPCHRFCATCAGAGADGCINCTEGYFMEDGRCVQSCSISYYFDHSSENGYKSCKKCDISCLTCNGPGFKNCTSCPSGYLLDLGMCQMGAICKDGEYVDEHGHCQTCEASCAKCQGPTQEDCTTCPMTRIFDDGRCVSNCPSWKFEFENQCHPCHHTCQRCQGSGPTHCTSCGADNYGREHFLYQGECGDSCPEGHYATEGNTCLPCPDNCELCHSVHVCTRCMKGYFIAPTNHTCQKLECGQGEVQDPDYEECVPCEEGCLGCSLDDPGTCTSCAMGYYRFDHHCYKTCPEKTYSEEVECKACDSNCGSCDQNGCYWCEEGFFLLGGSCVRKCGPGFYGDQEMGECESCHRACETCTGPGHDECSSCQEGLQLLRGMCVHATKTQEEGKFWNDILRKLQPCHSSCKTCNGSATLCTSCPKGAYLLAQACVSSCPQGTWPSVRSGSCENCTEACAICSGADLCKKCQMQPGHPLFLHEGRCYSKCPEGSYAEDGICERCSSPCRTCEGNATNCHSCEGGHVLHHGVCQENCPERHVAVKGVCKHCPEMCQDCIHEKTCKECTPEFFLHDDMCHQSCPRGFYADSRHCVPCHKDCLECSGPKADDCELCLESSWVLYDGLCLEECPAGTYYEKETKECRDCHKSCLTCSSSGTCTTCQKGLIMNPRGSCMANEKCSPSEYWDEDAPGCKPCHVKCFHCMGPAEDQCQTCPMNSLLLNTTCVKDCPEGYYADEDSNRCAHCHSSCRTCEGRHSRQCHSCRPGWFQLGKECLLQCREGYYADNSTGRCERCNRSCKGCQGPRPTDCLSCDRFFFLLRSKGECHRSCPDHYYVEQSTQTCERCHPTCDQCKGKGALNCLSCVWSYHLMGGICTSDCLVGEYRVGEGEKFNCEKCHESCMECKGPGAKNCTLCPANLVLHMDDSHCLHCCNTSDPPSAQECCDCQDTTDECILRTSKVRPATEHFKT

SEQ ID NO: 1767 - protein, 147 aa, synthetic construct
  REGION 1..147: note = PDCD1 (Q15116) ECD
FLDSPDRPWNPPTFSPALLVVTEGDNATFTCSFSNTSESFVLNWYRMSPSNQTDKLAAFPEDRSQPGQDCRFRVTQLPNGRDFHMSVVRARRNDSGTYLCGAISLAPKAQIKESLRAELRVTERRAEVPTAHPSPSPRPAGQFQTLV

SEQ ID NO: 1768 - protein, 201 aa, synthetic construct
  REGION 1..201: note = PDCD1LG2 (Q9BQ51) ECD
LFTVTVPKELYIIEHGSNVTLECNFDTGSHVNLGAITASLQKVENDTSPHRERATLLEEQLPLGKASFHIPQVQVRDEGQYQCIIIYGVAWDYKYLTLKVKASYRKINTHILKVPETDEVELTCQATGYPLAEVSWPNVSVPANTSHSRTPEGLYQVTSVLRLKPPPGRNFSCVFWNTHVRELTLASIDLQSQMEPRTHPT

SEQ ID NO: 1769 - protein, 505 aa, synthetic construct
  REGION 1..505: note = PDGFRA (P16234) ECD
QLSLPSILPNENEKVVQLNSSFSLRCFGESEVSWQYPMSEEESSDVEIRNEENNSGLFVTVLEVSSASAAHTGLYTCYYNHTQTEENELEGRHIYIYVPDPDVAFVPLGMTDYLVIVEDDDSAIIPCRTTDPETPVTLHNSEGVVPASYDSRQGFNGTFTVGPYICEATVKGKKFQTIPFNVYALKATSELDLEMEALKTVYKSGETIVVTCAVFNNEVVDLQWTYPGEVKGKGITMLEEIKVPSIKLVYTLTVPEATVKDSGDYECAARQATREVKEMKKVTISVHEKGFIEIKPTFSQLEAVNLHEVKHFVVEVRAYPPPRISWLKNNLTLIENLTEITTDVEKIQEIRYRSKLKLIRAKEEDSGHYTIVAQNEDAVKSYTFELLTQVPSSILDLVDDHHGSTGGQTVRCTAEGTPLPDIEWMICKDIKKCNNETSWTILANNVSNIITEIHSRDRSTVEGRVTFAKVEETIAVRCLAKNLLGAENRELKLVAPTLRSELTVA

SEQ ID NO: 1770 - protein, 500 aa, synthetic construct
  REGION 1..500: note = PDGFRB (P09619) ECD
LVVTPPGPELVLNVSSTFVLTCSGSAPVVWERMSQEPPQEMAKAQDGTFSSVLTLTNLTGLDTGEYFCTHNDSRGLETDERKRLYIFVPDPTVGFLPNDAEELFIFLTEITEITIPCRVTDPQLVVTLHEKKGDVALPVPYDHQRGFSGIFEDRSYICKTTIGDREVDSDAYYVYRLQVSSINVSVNAVQTVVRQGENITLMCIVIGNEVVNFEWTYPRKESGRLVEPVTDFLLDMPYHIRSILHIPSAELEDSGTYTCNVTESVNDHQDEKAINITVVESGYVRLLGEVGTLQFAELHRSRTLQVVFEAYPPPTVLWFKDNRTLGDSSAGEIALSTRNVSETRYVSELTLVRVKVAEAGHYTMRAFHEDAEVQLSFQLQINVPVRVLELSESHPDSGEQTVRCRGRGMPQPNIIWSACRDLKRCPRELPPTLLGNSSEEESQLETNVTYWEEEQEFEVVSTLRLQHVDRPLSVRCTLRNAVGQDTQEVIVVPHSLPFKV

SEQ ID NO: 1771 - protein, 735 aa, synthetic construct
  REGION 1..735: note = PEAR1 (Q5VY43) ECD
LNPSDPNTCSFWESFTTTTKESHSRPFSLLPSEPCERPWEGPHTCPQPTVVYRTVYRQVVKTDHRQRLQCCHGFYESRGFCVPLCAQECVHGRCVAPNQCQCVPGWRGDDCSSECAPGMWGPQCDKPCSCGNNSSCDPKSGVCSCPSGLQPPNCLQPCTPGYYGPACQFRCQCHGAPCDPQTGACFCPAERTGPSCDVSCSQGTSGFFCPSTHSCQNGGVFQTPQGSCSCPPGWMGTICSLPCPEGFHGPNCSQECRCHNGGLCDRFTGQCRCAPGYTGDRCREECPVGRFGQDCAETCDCAPDARCFPANGACLCEHGFTGDRCTDRLCPDGFYGLSCQAPCTCDREHSLSCHPMNGECSCLPGWAGLHCNESCPQDTHGPGCQEHCLCLHGGVCQATSGLCQCAPGYTGPHCASLCPPDTYGVNCSARCSCENAIACSPIDGECVCKEGWQRGNCSVPCPPGTWGFSCNASCQCAHEAVCSPQTGACTCTPGWHGAHCQLPCPKGQFGEGCASRCDCDHSDGCDPVHGRCQCQAGWMGARCHLSCPEGLWGVNCSNTCTCKNGGTCLPENGNCVCAPGFRGPSCQRSCQPGRYGKRCVPCKCANHSFCHPSNGTCYCLAGWTGPDCSQPCPPGHWGENCAQTCQCHHGGTCHPQDGSCICPLGWTGHHCLEGCPLGTFGANCSQPCQCGPGEKCHPETGACVCPPGHSGAPCRIGIQEPFTVMPTTPVAYNSL

SEQ ID NO: 1772 - protein, 574 aa, synthetic construct
  REGION 1..574: note = PECAM1 (P16284) ECD
QENSFTINSVDMKSLPDWTVQNGKNLTLQCFADVSTTSHVKPQHQMLFYKDDVLFYNISSMKSTESYFIPEVRIYDSGTYKCTVIVNNKEKTTAEYQVLVEGVPSPRVTLDKKEAIQGGIVRVNCSVPEEKAPIHFTIEKLELNEKMVKLKREKNSRDQNFVILEFPVEEQDRVLSFRCQARIISGIHMQTSESTKSELVTVTESFSTPKFHISPTGMIMEGAQLHIKCTIQVTHLAQEFPEIIIQKDKAIVAHNRHGNKAVYSVMAMVEHSGNYTCKVESSRISKVSSIVVNITELFSKPELESSFTHLDQGERLNLSCSIPGAPPANFTIQKEDTIVSQTQDFTKIASKSDSGTYICTAGIDKVVKKSNTVQIVVCEMLSQPRISYDAQFEVIKGQTIEVRCESISGTLPISYQLLKTSKVLENSTKNSNDPAVFKDNPTEDVEYQCVADNCHSHAKMLSEVLRVKVIAPVDEVQISILSSKVVESGEDIVLQCAVNEGSGPITYKFYREKEGKPFYQMTSNATQAFWTKQKASKEQEGEYYCTAFNRANHASSVPRSKILTVRVILAPWKK

SEQ ID NO: 1773 - protein, 400 aa, synthetic construct
  REGION 1..400: note = PI16 (Q6UXB8) ECD
LTDEEKRLMVELHNLYRAQVSPTASDMLHMRWDEELAAFAKAYARQCVWGHNKERGRRGENLFAITDEGMDVPLAMEEWHHEREHYNLSAATCSPGQMCGHYTQVVWAKTERIGCGSHFCEKLQGVEETNIELLVCNYEPPGNVKGKRPYQEGTPCSQCPSGYHCKNSLCEPIGSPEDAQDLPYLVTEAPSFRATEASDSRKMGTPSSLATGIPAFLVTEVSGSLATKALPAVETQAPTSLATKDPPSMATEAPPCVTTEVPSILAAHSLPSLDEEPVTFPKSTHVPIPKSADKVTDKTKVPSRSPENSLDPKMSLTGARELLPHAQEEAEAEAELPPSSEVLASVFPAQDKPGELQATLDHTGHTSSKSLPNFPNTSATANATGGRALALQSSLPGAEG

SEQ ID NO: 1774 - protein, 620 aa, synthetic construct
  REGION 1..620: note = PIGR (P01833) ECD
KSPIFGPEEVNSVEGNSVSITCYYPPTSVNRHTRKYWCRQGARGGCITLISSEGYVSSKYAGRANLTNFPENGTFVVNIAQLSQDDSGRYKCGLGINSRGLSFDVSLEVSQGPGLLNDTKVYTVDLGRTVTINCPFKTENAQKRKSLYKQIGLYPVLVIDSSGYVNPNYTGRIRLDIQGTGQLLFSVVINQLRLSDAGQYLCQAGDDSNSNKKNADLQVLKPEPELVYEDLRGSVTFHCALGPEVANVAKFLCRQSSGENCDVVVNTLGKRAPAFEGRILLNPQDKDGSFSVVITGLRKEDAGRYLCGAHSDGQLQEGSPIQAWQLFVNEESTIPRSPTVVKGVAGGSVAVLCPYNRKESKSIKYWCLWEGAQNGRCPLLVDSEGWVKAQYEGRLSLLEEPGNGTFTVILNQLTSRDAGFYWCLTNGDTLWRTTVEIKIIEGEPNLKVPGNVTAVLGETLKVPCHFPCKFSSYEKYWCKWNNTGCQALPSQDEGPSKAFVNCDENSRLVSLTLNLVTRADEGWYWCGVKQGHFYGETAAVYVAVEERKAAGSRDVSLAKADAAPDEKVLDSGFREIENKAIQDPRLFAEEKAVADTRDQADGSRASVDSGSSEEQGGSSR

SEQ ID NO: 1775 - protein, 506 aa, synthetic construct
  REGION 1..506: note = PIGT (Q969N2) ECD
LAEPPRDSLREELVITPLPSGDVAATFQFRTRWDSELQREGVSHYRLFPKALGQLISKYSLRELHLSFTQGFWRTRYWGPPFLQAPSGAELWVWFQDTVTDVDKSWKELSNVLSGIFCASLNFIDSTNTVTPTASFKPLGLANDTDHYFLRYAVLPREVVCTENLTPWKKLLPCSSKAGLSVLLKADRLFHTSYHSQAVHIRPVCRNARCTSISWELRQTLSVVFDAFITGQGKKDWSLFRMFSRTLTEPCPLASESRVYVDITTYNQDNETLEVHPPPTTTYQDVILGTRKTYAIYDLLDTAMINNSRNLNIQLKWKRPPENEAPPVPFLHAQRYVSGYGLQKGELSTLLYNTHPYRAFPVLLLDTVPWYLRLYVHTLTITSKGKENKPSYIHYQPAQDRLQPHLLEMLIQLPANSVTKVSIQFERALLKWTEYTPDPNHGFYVSPSVLSALVPSMVAAKPVDWEESPLFNSLFPVSDGSNYFVRLYTEPLLVNLPTPDFSMPYN

SEQ ID NO: 1776 - protein, 147 aa, synthetic construct
  REGION 1..147: note = PIK3IP1 (Q96FE7) ECD
SGGCFWDNGHLYREDQTSPAPGLRCLNWLDAQSGLASAPVSGAGNHSYCRNPDEDPRGPWCYVSGEAGVPEKRPCEDLRCPETTSQALPAFTTEIQEASEGPGADEVQVFAPANALPARSEAAAVQPVIGISQRVRMNSKEKKDLGT

SEQ ID NO: 1777 - protein, 178 aa, synthetic construct
  REGION 1..178: note = PILRA (Q9UKJ1) ECD
QPSGSTGSGPSYLYGVTQPKHLSASMGGSVEIPFSFYYPWELATAPDVRISWRRGHFHRQSFYSTRPPSIHKDYVNRLFLNWTEGQKSGFLRISNLQKQDQSVYFCRVELDTRSSGRQQWQSIEGTKLSITQAVTTTTQRPSSMTTTWRLSSTTTTTGLRVTQGKRRSDSWHISLETA

SEQ ID NO: 1778 - protein, 172 aa, synthetic construct
  REGION 1..172: note = PILRB (Q9UKJ0) ECD
QPGGSTGSGPSYLYGVTQPKHLSASMGGSVEIPFSFYYPWELAIVPNVRISWRRGHFHGQSFYSTRPPSIHKDYVNRLFLNWTEGQESGFLRISNLRKEDQSVYFCRVELDTRRSGRQQLQSIKGTKLTITQAVTTTTTWRPSSTTTIAGLRVTESKGHSESWHLSLDTAIR

SEQ ID NO: 1779 - protein, 3835 aa, synthetic construct
  REGION 1..3835: note = PKHD1 (P08F94) ECD
HIEPEEGSLAGGTWITVIFDGLELGVLYPNNGSQLEIHLVNVNMVVPALRSVPCDVFPVFLDLPVVTCRTRSVLSEAHEGLYFLEAYFGGQLVSSPNPGPRDSCTFKFSKAQTPIVHQVYPPSGVPGKLIHVYGWIITGRLETFDFDAEYIDSPVILEAQGDKWVTPCSLINRQMGSCYPIQEDHGLGTLQCHVEGDYIGSQNVSFSVFNKGKSMVHKKAWLISAKQDLFLYQTHSEILSVFPETGSLGGRTNITITGDFFDNSAQVTIAGIPCDIRHVSPRKIECTTRAPGKDVRLTTPQPGNRGLLFEVGDAVEGLELTEATPGYRWQIVPNASSPFGFWSQEGQPFRARLSGFFVAPETNNYTFWIQADSQASLHFSWSEEPRTKVKVASISVGTADWFDSWEQNRDEGTWQQKTPKLELLGGAMYYLEAEHHGIAPSRGMRIGVQIHNTWLNPDVVTTYLREKHQIRVRAQRLPEVQVLNVSGRGNFFLTWDNVSSQPIPANATAHLIQTTIEELLAVKCKLEPLWSNILLRLGFERGPEVSNSDGDLTSGTEPFCGRFSLRQPRHLVLTPPAAQKGYRLDQYTHLCLAYKGHMNKILKMIVSFTIGFQNMVKNTTCDWSLTRTSPESWQFDCTDLWETCVRCFGDLQPPPANSPVLVHQINLLPLAQETGLFYVDEIIIADTNVTVSQADSGTARPGGNLVESVSVVGSPPVYSVTSWLAGCGTELPLITARSVPTEGTEEGSGLVLVTTQRRQRTSPPLGGHFRIQLPNTVISDVPVQISAHHLHQLLQNNADDFTSRYLNASDFTVKEDLYTCYEHVWTLSWSTQIGDLPNFIRVSDENLTGVNPAAATRVVYDGGVFLGPIFGDMLATANQHTQVVVRVNDVPAHCPGSCSFQYLQGSTPCVHSVWYSIDGDINLMIYITGTGFSGDSQFLQVTVNKTSCKVIFSNQTNVVCQTDLLPVGMHRILMLVRPSGLAISATGEDLFLNVKPRLDMVEPSRAADIGGLWATIRGSSLEGVSLILFGSYSCAINVATSNSSRIQCKVPPRGKDGRIVNVTVIRGDYSAVLPRAFTYVSSLNPVIVTLSRNISNIAGGETLVIGVARLMNYTDLDVEVHVQDALAPVHTQSAWGLEVALPPLPAGLHRISVSINGVSIHSQGVDLHIQYLTEVFSIEPCCGSLLGGTILSISGIGFSRDPALVWVLVGNRSCDIVNLTEASIWCETLPAPQIPDAGAPTVPAAVEVWAGNRFFARGPSPSLVGKGFTFMYEAAATPVVTAMQGEITNSSLSLHVGGSNLSNSVILLGNLNCDVETQSFQGNVSLSGCSIPLHSLEAGIYPLQVRQKQMGFANMSVVLQQFAVMPRIMAIFPSQGSACGGTILTVRGLLLNSRRRSVRVDLSGPFTCVILSLGDHTILCQVSLEGDPLPGASFSLNVTVLVNGLTSECQGNCTLFIREEASPVMDALSTNTSGSLTTVLIRGQRLATTADEPMVFVDDQLPCNVTFFNASHVVCQTRDLAPGPHYLSVFYTRNGYACSGNVSRHFYIMPQVFHYFPKNFSLHGGSLLTIEGTGLRGQNTTSVYIDQQTCLTVNIGAELIRCIVPTGNGSVALEIEVDGLWYHIGVIGYNKAFTPELISISQSDDILTFAVAQISGAANIDIFIGMSPCVGVSGNHTVLQCVVPSLPAGEYHVRGYDCIRGWASSALVFTSRVIITAVTENFGCLGGRLVHVFGAGFSPGNVSAAVCGAPCRVLANATVSAFSCLVLPLDVSLAFLCGLKREEDSCEAARHTYVQCDLTVAMATEQLLESWPYLYICEESSQCLFVPDHWAESMFPSFSGLFISPKLERDEVLIYNSSCNITMETEAEMECETPNQPITVKITEIRKRWGQNTQGNFSLQFCRRWSRTHSWFPERLPQDGDNVTVENGQLLLLDTNTSILNLLHIKGGKLIFMAPGPIELRAHAILVSDGGELRIGSEDKPFQGRAQITLYGSSYSTPFFPYGVKFLAVRNGTLSLHGSLPEVIVTCLRATAHALDTVLALEDAVDWNPGDEVVIISGTGVKGAKPMEEIVTVETVQDTDLYLKSPLRYSHNFTENWVAGEHHILKATVALLSRSITIQGNLTNEREKLLVSCQEANAPEGNLQHCLYSMSEKMLGSRDMGARVIVQSFPEEPSQVQLKGVQFQVLGQAFHKHLSSLTLVGAMRESFIQGCTVRNSFSRGLSMCGTLGLKVDSNVFYNILGHALLVGTCTEMRYISWEAIHGRKDDWSGHGNIIRNNVIIQVSGAEGLSNPEMLTPSGIYICSPTNVIEGNRVCGAGYGYFFHLMTNQTSQAPLLSFTQNIAHSCTRYGLFVYPKFQPPWDNVTGTTLFQSFTVWESAGGAQIFRSSNLRLKNFKVYSCRDFGIDVLESDANTSVTDSLLLGHFAHKGSLCMSSGIKTPKRWELMVSNTTFVNFDLINCVAIRTCSDCSQGQGGFTVKTSQLKFTNSSNLVAFPFPHAAILEDLDGSLSGKNRSHILASMETLSASCLVNSSFGRVVHGSACGGGVLFHRMSIGLANTPEVSYDLTMTDSRNKTTTVNYVRDTLSNPRGWMALLLDQETYSLQSENLWINRSLQYSATFDNFAPGNYLLLVHTDLPPYPDILLRCGSRVGLSFPFLPSPGQNQGCDWFFNSQLRQLTYLVSGEGQVQVILRVKEGMPPTISASTSAPESALKWSLPETWQGVEEGWGGYNNTIPGPGDDVLILPNRTVLVDTDLPFFKGLYVMGTLDFPVDRSNVLSVACMVIAGGELKVGTLENPLEKEQKLLILLRASEGVFCDRMNGIHIDPGTIGVYGKVHLYSAYPKNSWTHLGADIASGNERIIVEDAVDWRPHDKIVLSSSSYEPHEAEVLTVKEVKGHHVRIYERLKHRHIGSVHVTEDGRHIRLAAEVGLLTRNIQIQPDVSCRGRLFVGSFRKSSREEFSGVLQLLNVEIQNFGSPLYSSVEFSNVSAGSWIISSTLHQSCGGGIHAAASHGVLLNDNIVFGTAGHGIDLEGQAYTVTNNLVVLMTQPAWSTIWVAGIKVNQVKDINLHGNVVAGSERLGFHIRGHKCSSCELLWSDNVAHSSLHGLHLYKESGLDNCTRISGFLAFKNFDYGAMLHVENSVEIENITLVDNTIGLLAVVYVFSAPQNSVKKVQIVLRNSVIVATSSSFDCIQDKVKPHSANLTSTDRAPSNPRGGRIGILWPVFTSEPNQWPQEPWHKVRNDHSISGIMKLQDVTFSSFVKSCYSDDLDVCILPNAENSGIMHPITAERTRMLKIKDKNKFYFPSLQPRKDLGKVVCPELDCASPRKYLFKDLDGRALGLPPPVSVFPKTEAEWTASFFNAGTFREEQKCTYQFLMQGFICKQTDQVVLILDSADAIWAIQKLYPVVSVTSGFVDVFSSVNANIPCSTSGSVSTFYSILPIRQITKVCFMDQTPQVLRFFLLGNKSTSKLLLAVFYHELQSPHVFLGESFIPPTLVQSASLLLNESIGANYFNIMDNLLYVVLQGEEPIEIRSGVSIHLALTVMVSVLEKGWEIVILERLTNFLQIGQNQIRFIHEMPGHEETLKAIADSRAKRKRNCPTVTCTSHYRRVGQRRPLMMEMNSHRASPPMTVETISKVIVIEIGDSPTVRSTGMISSLSSNKLQNLAHRVITAQQTGVLENVLNMTIGALLVTQSKGVIGYGNTSSFKTGNLIYIRPYALSILVQPSDGEVGNELPVQPQLVFLDEQNRRVESLGPPSEPWTISASLEGASDSVLKGCTQAETQDGYVSFYNLAVLISGSNWHFIFTVTSPPGVNFTARSKPFAVLPVTRKEKST

SEQ ID NO: 1780 - protein, 4190 aa, synthetic construct
  REGION 1..4190: note = PKHD1L1 (Q86WI1) ECD
DPSTDGSQIIPKVTEIIPKYGSINGATRLTIRGEGFSQANQFNYGVDNAELGNSVQLISSFQSITCDVEKDASHSTQITCYTRAMPEDSYTVRVSVDGVPVTENNTCKGHINSWECTFNAKSFRTPTIRSITPLSGTPGTLITIQGRIFTDVYGSNIALSSNGKNVRILRVYIGGMPCELLIPQSDNLYGLKLDHPNGDMGSMVCKTTGTFIGHHNVSFILDNDYGRSFPQKMAYFVSSLNKIAMFQTYAEVTMIFPSQGSIRGGTTLTISGRFFDQTDFPVRVLVGGEPCDILNVTENSICCKTPPKPHILKTVYPGGRGLKLEVWNNSRPIRLEEILEYNEKTPGYMGASWVDSASYIWLMEQDTFVARFSGFLVAPDSDVYRFYIKGDDRYAIYFSQTGLPEDKVRIAYHSANANSYFSSPTQRSDDIHLQKGKEYYIEILLQEYRLSAFVDVGLYQYRNVYTEQQTGDAVNEEQVIKSQSTILQEVQVITLENWETTNAINEVQKIKVTSPCVEANSCSLYQYRLIYNMEKTVFLPADASEFILQSALNDLWSIKPDTVQVIRTQNPQSYVYMVTFISTRGDFDLLGYEVVEGNNVTLDITEQTKGKPNLETFTLNWDGIASKPLTLWSSEAEFQGAVEEMVSTKCPPQIANFEEGFVVKYFRDYETDFNLEHINRGQKTAETDAYCGRYSLKNPAVLFDSADVKPNRRPYGDILLFPYNQLCLAYKGFLANYIGLKFQYQDNSKITRSTDTQFTYNFAYGNNWTYTCIDLLDLVRTKYTGTNVSLQRISLHKASESQSFYVDVVYIGHTSTISTLDEMPKRRLPALANKGIFLEHFQVNQTKTNGPTMTNQYSVTMTSYNCSYNIPMMAVSFGQIITHETENEFVYRGNNWPGESKIHIQRIQAASPPLSGSFDIQAYGHILKGLPAAVSAADLQFALQSLEGMGRISVTREGTCAGYAWNIKWRSTCGKQNLLQINDSNIIGEKANMTVTRIKEGGLFRQHVLGDLLRTPSQQPQVEVYVNGIPAKCSGDCGFTWDSNITPLVLAISPSQGSYEEGTILTIVGSGFSPSSAVTVSVGPVGCSLLSVDEKELKCQILNGSAGHAPVAVSMADVGLAQNVGGEEFYFVYQSQISHIWPDSGSIAGGTLLTLSGFGFNENSKVLVGNETCNVIEGDLNRITCRTPKKTEGTVDISVTTNGFQATARDAFSYNCLQTPIITDFSPKVRTILGEVNLTIKGYNFGNELTQNMAVYVGGKTCQILHWNFTDIRCLLPKLSPGKHDIYVEVRNWGFASTRDKLNSSIQYVLEVTSMFPQRGSLFGGTEITIRGFGFSTIPAENTVLLGSIPCNVTSSSENVIKCILHSTGNIFRITNNGKDSVHGLGYAWSPPVLNVSVGDTVAWHWQTHPFLRGIGYRIFSVSSPGSVIYDGKGFTSGRQKSTSGSFSYQFTSPGIHYYSSGYVDEAHSIFLQGVINVLPAETRHIPLHLFVGRSEATYAYGGPENLHLGSSVAGCLATEPLCSLNNTRVKNSKRLLFEVSSCFSPSISNITPSTGTVNELITIIGHGFSNLPWANKVTIGSYPCVVEESSEDSITCHIDPQNSMDVGIRETVTLTVYNLGTAINTLSNEFDRRFVLLPNIDLVLPNAGSTTGMTSVTIKGSGFAVSSAGVKVLMGHFPCKVLSVNYTAIECETSPAAQQLVDVDLLIHGVPAQCQGNCTFSYLESITPYITGVFPNSVIGSVKVLIEGEGLGTVLEDIAVFIGNQQFRAIEVNENNITALVTPLPVGHHSVSVVVGSKGLALGNLTVSSPPVASLSPTSGSIGGGTTLVITGNGFYPGNTTVTIGDEPCQIISINPNEVYCRTPAGTTGMVDVKIFVNTIAYPPLLFTYALEDTPFLRGIIPSRGPPGTEIEITGSNFGFEILEISVMINNIQCNVTMANDSVVQCIVGDHAGGTFPVMMHHKTKGSAMSTVVFEYPLNIQNINPSQGSFGGGQTMTVTGTGFNPQNSIILVCGSECAIDRLRSDYTTLLCEIPSNNGTGAEQACEVSVVNGKDLSQSMTPFTYAVSLTPLITAVSPKRGSTAGGTRLTVVGSGFSENMEDVHITIAEAKCDVEYSNKTHIICMTDAHTLSGWAPVCVHIRGVGMAKLDNADFLYVDAWSSNFSWGGKSPPEEGSLVVITKGQTILLDQSTPILKMLLIQGGTLIFDEADIELQAENILITDGGVLQIGTETSPFQHKAVITLHGHLRSPELPVYGAKTLAVREGILDLHGVPVPVTWTRLAHTAKAGERILILQEAVTWKPGDNIVIASTGHRHSQGENEKMTIASVSADGINITLSNPLNYTHLGITVTLPDGTLFEARAEVGILTRNILIRGSDNVEWNNKIPACPDGFDTGEFATQTCLQGKFGEEIGSDQFGGCVMFHAPVPGANMVTGRIEYVEVFHAGQAFRLGRYPIHWHLLGDLQFKSYVRGCAIHQAYNRAVTIHNTHHLLVERNIIYDIKGGAFFIEDGIEHGNILQYNLAVFVQQSTSLLNDDVTPAAFWVTNPNNTIRHNAVAGGTHFGFWYRMNNHPDGPSYDRNICQKRVPLGEFFNNTVHSQGWFGMWIFEEYFPMQTGSCTSTVPAPAIFNSLTTWNCQKGAEWVNGGALQFHNFVMVNNYEAGIETKRILAPYVGGWGETNGAVIKNAKIVGHLDELGMGSAFCTAKGLVLPFSEGLTVSSVHFMNFDRPNCVALGVTSISGVCNDRCGGWSAKFVDVQYSHTPNKAGFRWEHEMVMIDVDGSLTGHKGHTVIPHSSLLDPSHCTQEAEWSIGFPGSVCDASVSFHRLAFNQPSPVSLLEKDVVLSDSFGTSIIPFQKKRLTHMSGWMALIPNANHINWYFKGVDHITNISYTSTFYGFKEEDYVIISHNFTQNPDMFNIIDMRNGSSNPLNWNTSKNGDWHLEANTSTLYYLVSGRNDLHQSQLISGNLDPDVKDVVINFQAYCCILQDCFPVHPPSRKPIPKKRPATYNLWSNDSFWQSSRENNYTVPHPGANVIIPEGTWIVADIDMPSMERLIIWGVLELEDKYNVGAAESSYREVVLNATYISLQGGRLIGGWEDNPFKGDLKIVLRGNHTTQDWALPEGPNQGAKVLGVFGELDLHGIPHSIYKTKLSETAFAGSKVLSLMDAVDWQEGEEIVITTTSYDFHQTETRSIVKILHDHKILILNDSLSYTHFAEKYHVPGTGESYTLAADVGILSRNIKIVGEDYPGWSEDSFGARVLVGSFTENMMTFKGNARISNVEFYHSGQEGFRDSTDPRYAVTFLNLGQIQEHGSSYIRGCAFHHGFSPAIGVFGTDGLDIDDNIIHFTVGEGIRIWGNANRVRGNLIALSVWPGTYQNRKDLSSTLWHAAIEINRGTNTVLQNNVVAGFGRAGYRIDGEPCPGQFNPVEKWFDNEAHGGLYGIYMNQDGLPGCSLIQGFTIWTCWDYGIYFQTTESVHIYNVTLVDNGMAIFPMIYMPAAISHKISSKNVQIKSSLIVGSSPGFNCSDVLTNDDPNIELTAAHRSPRSPSGGRSGICWPTFASAHNMAPRKPHAGIMSYNAISGLLDISGSTFVGFKNVCSGETNVIFITNPLNEDLQHPIHVKNIKLVDTTEQSKIFIHRPDISKVNPSDCVDMVCDAKRKSFLRDIDGSFLGNAGSVIPQAEYEWDGNSQVGIGDYRIPKAMLTFLNGSRIPVTEKAPHKGIIRDSTCKYLPEWQSYQCFGMEYAMMVIESLDPDTETRRLSPVAIMGNGYVDLINGPQDHGWCAGYTCQRRLSLFHSIVALNKSYEVYFTGTSPQNLRLMLLNVDHNKAVLVGIFFSTLQRLDVYVNNLLVCPKTTIWNAQQKHCELNNHLYKDQFLPNLDSTVLGENYFDGTYQMLYLLVKGTIPVEIHTATVIFVSFQLSVATEDDFYTSHNLVKNLALFLKIPSDKIRISKIRGKSLRRKRSMGFIIEIEIGDPPIQFISNGTTGQMQLSELQEIAGSLGQAVILGNISSILGFNISSMSITNPLPSPSDSGWIKVTAQPVERSAFPVHHVAFVSSLLVITQPVAAQPGQPFPQQPSVKATDSDGNCVSVGITALTLRAILKDSNNNQVNGLSGNTTIPFSSCWANYTDLTPLRTGKNYKIEFILDNVVGVESRTFSLLAESVSSSGSSSSSNSKASTVGTYAQ

SEQ ID NO: 1781 - protein, 1377 aa, synthetic construct [sequence omitted]

SEQ ID NO: 1782 - protein, 1396 aa, synthetic construct
  REGION 1..1396: note = PLB1 (Q6P1J6) ECD
QIHTSPRKSTLEGQLWPETLKNSPFPCNPNKLGVNMPSKSVHSLKPSDIKFVAAIGNLEIPPDPGTGDLEKQDWTERPQQVCMGVMTVLSDIIRYFSPSVPMPVCHTGKRVIPHDGAEDLWIQAQELVRNMKENLQLDFQFDWKLINVFFSNASQCYLCPSAQQNGLAAGGVDELMGVLDYLQQEVPRAFVNLVDLSEVAEVSRQYHGTWLSPAPEPCNCSEETTRLAKVVMQWSYQEAWNSLLASSRYSEQESFTVVFQPFFYETTPSLHSEDPRLQDSTTLAWHLWNRMMEPAGEKDEPLSVKHGRPMKCPSQESPYLFSYRNSNYLTRLQKPQDKLEVREGAEIRCPDKDPSDTVPTSVHRLKPADINVIGALGDSLTAGNGAGSTPGNVLDVLTQYRGLSWSVGGDENIGTVTTLANILREFNPSLKGFSVGTGKETSPNAFLNQAVAGGRAEDLPVQARRLVDLMKNDTRIHFQEDWKIITLFIGGNDLCDFCNDLVHYSPQNFTDNIGKALDILHAEVPRAFVNLVTVLEIVNLRELYQEKKVYCPRMILRSLCPCVLKFDDNSTELATLIEFNKKFQEKTHQLIESGRYDTREDFTVVVQPFFENVDMPKTSEGLPDNSFFAPDCFHFSSKSHSRAASALWNNMLEPVGQKTTRHKFENKINITCPNQVQPFLRTYKNSMQGHGTWLPCRDRAPSALHPTSVHALRPADIQVVAALGDSLTAGNGIGSKPDDLPDVTTQYRGLSYSAGGDGSLENVTTLPNILREFNRNLTGYAVGTGDANDTNAFLNQAVPGAKAEDLMSQVQTLMQKMKDDHRVNFHEDWKVITVLIGGSDLCDYCTDSNLYSAANFVHHLRNALDVLHREVPRVLVNLVDFLNPTIMRQVFLGNPDKCPVQQASVLCNCVLTLRENSQELARLEAFSRAYRSSMRELVGSGRYDTQEDFSVVLQPFFQNIQLPVLADGLPDTSFFAPDCIHPNQKFHSQLARALWTNMLEPLGSKTETLDLRAEMPITCPTQNEPFLRTPRNSNYTYPIKPAIENWGSDFLCTEWKASNSVPTSVHQLRPADIKVVAALGDSLTTAVGARPNNSSDLPTSWRGLSWSIGGDGNLETHTTLPNILKKFNPYLLGFSTSTWEGTAGLNVAAEGARARDMPAQAWDLVERMKNSPDINLEKDWKLVTLFIGVNDLCHYCENPEAHLATEYVQHIQQALDILSEELPRAFVNVVEVMELASLYQGQGGKCAMLAAQNNCTCLRHSQSSLEKQELKKVNWNLQHGISSFSYWHQYTQREDFAVVVQPFFQNTLTPLNERGDTDLTFFSEDCFHFSDRGHAEMAIALWNNMLEPVGRKTTSNNFTHSRAKLKCPSPESPYLYTLRNSRLLPDQAEEAPEVLY

SEQ ID NO: 1783 - protein, 408 aa, synthetic construct
  REGION 1..408: note = PLXDC1 (Q8IUK5) ECD
LSPQPGAGHDEGPGSGWAAKGTVRGWNRRARESPGHVSEPDRTQLSQDLGGGTLAMDTLPDNRTRVVEDNHSYYVSRLYGPSEPHSRELWVDVAEANRSQVKIHTILSNTHRQASRVVLSFDFPFYGHPLRQITIATGGFIFMGDVIHRMLTATQYVAPLMANFNPGYSDNSTVVYFDNGTVFVVQWDHVYLQGWEDKGSFTFQAALHHDGRIVFAYKEIPMSVPEISSSQHPVKTGLSDAFMILNPSPDVPESRRRSIFEYHRIELDPSKVTSMSAVEFTPLPTCLQHRSCDACMSSDLTFNCSWCHVLQRCSSGFDRYRQEWMDYGCAQEAEGRMCEDFQDEDHDSASPDTSFSPYDGDLTTTSSSLFIDSLTTEDDTKLNPYAGGDGLQNNLSPKTKGTPVHLGT

SEQ ID NO: 1784 - protein, 424 aa, synthetic construct
  REGION 1..424: note = PLXDC2 (Q6UX71) ECD
KPGDQILDWQYGVTQAFPHTEEEVEVDSHAYSHRWKRNLDFLKAVDTNRASVGQDSPEPRSFTDLLLDDGQDNNTQIEEDTDHNYYISRIYGPSDSASRDLWVNIDQMEKDKVKIHGILSNTHRQAARVNLSFDFPFYGHFLREITVATGGFIYTGEVVHRMLTATQYIAPLMANFDPSVSRNSTVRYFDNGTALVVQWDHVHLQDNYNLGSFTFQATLLMDGRIIFGYKEIPVLVTQISSTNHPVKVGLSDAFVVVHRIQQIPNVRRRTIYEYHRVELQMSKITNISAVEMTPLPTCLQFNRCGPCVSSQIGFNCSWCSKLQRCSSGFDRHRQDWVDSGCPEESKEKMCENTEPVETSSRTTTTVGATTTQFRVLTTTRRAVTSQFPTSLPTEDDTKIALHLKDNGASTDDSAAEKKGGTLHA

SEQ ID NO: 1785 - protein, 1218 aa, synthetic construct
  REGION 1..1218: note = PLXNA1 (Q9UIW2) ECD
EAGLPRAGGGSQPPFRTFSASDWGLTHLVVHEQTGEVYVGAVNRIYKLSGNLTLLRAHVTGPVEDNEKCYPPPSVQSCPHGLGSTDNVNKLLLLDYAANRLLACGSASQGICQFLRLDDLFKLGEPHHRKEHYLSSVQEAGSMAGVLIAGPPGQGQAKLFVGTPIDGKSEYFPTLSSRRLMANEEDADMFGFVYQDEFVSSQLKIPSDTLSKFPAFDIYYVYSFRSEQFVYYLTLQLDTQLTSPDAAGEHFFTSKIVRLCVDDPKFYSYVEFPIGCEQAGVEYRLVQDAYLSRPGRALAHQLGLAEDEDVLFTVFAQGQKNRVKPPKESALCLFTLRAIKEKIKERIQSCYRGEGKLSLPWLLNKELGCINSPLQIDDDFCGQDFNQPLGGTVTIEGTPLFVDKDDGLTAVAAYDYRGRTVVFAGTRSGRIRKILVDLSNPGGRPALAYESVVAQEGSPILRDLVLSPNHQYLYAMTEKQVTRVPVESCVQYTSCELCLGSRDPHCGWCVLHSICSRRDACERADEPQRFAADLLQCVQLTVQPRNVSVTMSQVPLVLQAWNVPDLSAGVNCSFEDFTESESVLEDGRIHCRSPSAREVAPITRGQGDQRVVKLYLKSKETGKKFASVDFVFYNCSVHQSCLSCVNGSFPCHWCKYRHVCTHNVADCAFLEGRVNVSEDCPQILPSTQIYVPVGVVKPITLAARNLPQPQSGQRGYECLFHIPGSPARVTALRFNSSSLQCQNSSYSYEGNDVSDLPVNLSVVWNGNFVIDNPQNIQAHLYKCPALRESCGLCLKADPRFECGWCVAERRCSLRHHCAADTPASWMHARHGSSRCTDPKILKLSPETGPRQGGTRLTITGENLGLRFEDVRLGVRVGKVLCSPVESEYISAEQIVCEIGDASSVRAHDALVEVCVRDCSPHYRALSPKRFTFVTPTFYRVSPSRGPLSGGTWIGIEGSHLNAGSDVAVSVGGRPCSFSWRNSREIRCLTPPGQSPGSAPIIININRAQLTNPEVKYNYTEDPTILRIDPEWSINSGGTLLTVTGTNLATVREPRIRAKYGGIERENGCLVYNDTTMVCRAPSVANPVRSPPELGERPDELGFVMDNVRSLLVLNSTSFLYYPDPVLEPLSPTGLLELKPSSPLILKGRNLLPPAPGNSRLNYTVLIGSTPCTLTVSETQLLCEAPNLTGQHKVTVRAGGFEFSPGTLQVYSDSLLTLP

SEQ ID NO: 1786 - protein, 1203 aa, synthetic construct
  REGION 1..1203: note = PLXNA2 (O75051) ECD
MPQFSTFHSENRDWTFNHLTVHQGTGAVYVGAINRVYKLTGNLTIQVAHKTGPEEDNKSCYPPLIVQPCSEVLTLTNNVNKLLIIDYSENRLLACGSLYQGVCKLLRLDDLFILVEPSHKKEHYLSSVNKTGTMYGVIVRSEGEDGKLFIGTAVDGKQDYFPTLSSRKLPRDPESSAMLDYELHSDFVSSLIKIPSDTLALVSHFDIFYIYGFASGGFVYFLTVQPETPEGVAINSAGDLFYTSRIVRLCKDDPKFHSYVSLPFGCTRAGVEYRLLQAAYLAKPGDSLAQAFNITSQDDVLFAIFSKGQKQYHHPPDDSALCAFPIRAINLQIKERLQSCYQGEGNLELNWLLGKDVQCTKAPVPIDDNFCGLDINQPLGGSTPVEGLTLYTTSRDRMTSVASYVYNGYSVVFVGTKSGKLKKIRADGPPHGGVQYEMVSVLKDGSPILRDMAFSIDQRYLYVMSERQVTRVPVESCEQYTTCGECLSSGDPHCGWCALHNMCSRRDKCQQAWEPNRFAASISQCVSLAVHPSSISVSEHSRLLSLVVSDAPDLSAGIACAFGNLTEVEGQVSGSQVICISPGPKDVPVIPLDQDWFGLELQLRSKETGKIFVSTEFKFYNCSAHQLCLSCVNSAFRCHWCKYRNLCTHDPTTCSFQEGRINISEDCPQLVPTEEILIPVGEVKPITLKARNLPQPQSGQRGYECVLNIQGAIHRVPALRFNSSSVQCQNSSYQYDGMDISNLAVDFAVVWNGNFIIDNPQDLKVHLYKCAAQRESCGLCLKADRKFECGWCSGERRCTLHQHCTSPSSPWLDWSSHNVKCSNPQITEILTVSGPPEGGTRVTIHGVNLGLDFSEIAHHVQVAGVPCTPLPGEYIIAEQIVCEMGHALVGTTSGPVRLCIGECKPEFMTKSHQQYTFVNPSVLSLNPIRGPESGGTMVTITGHYLGAGSSVAVYLGNQTCEFYGRSMSEIVCVSPPSSNGLGPVPVSVSVDRAHVDSNLQFEYIDDPRVQRIEPEWSIASGHTPLTITGFNLDVIQEPRIRVKFNGKESVNVCKVVNTTTLTCLAPSLTTDYRPGLDTVERPDEFGFVFNNVQSLLIYNDTKFIYYPNPTFELLSPTGVLDQKPGSPIILKGKNLCPPASGGAKLNYTVLIGETPCAVTVSETQLLCEPPNLTGQHKVMVHVGGMVFSPGSVSVISDSLLTLP

SEQ ID NO: 1787 - protein, 1201 aa, synthetic construct
  REGION 1..1201: note = PLXNA3 (P51805) ECD
NRPFRAFVVTDTTLTHLAVHRVTGEVFVGAVNRVFKLAPNLTELRAHVTGPVEDNARCYPPPSMRVCAHRLAPVDNINKLLLIDYAARRLVACGSIWQGICQFLRLDDLFKLGEPHHRKEHYLSGAQEPDSMAGVIVEQGQGPSKLFVGTAVDGKSEYFPTLSSRKLISDEDSADMFSLVYQDEFVSSQIKIPSDTLSLYPAFDIYYIYGFVSASFVYFLTLQLDTQQTLLDTAGEKFFTSKIVRMCAGDSEFYSYVEFPIGCSWRGVEYRLVQSAHLAKPGLLLAQALGVPADEDVLFTIFSQGQKNRASPPRQTILCLFTLSNINAHIRRRIQSCYRGEGTLALPWLLNKELPCINTPMQINGNFCGLVLNQPLGGLHVIEGLPLLADSTDGMASVAAYTYRQHSVVFIGTRSGSLKKVRVDGFQDAHLYETVPVVDGSPILRDLLFSPDHRHIYLLSEKQVSQLPVETCEQYQSCAACLGSGDPHCGWCVLRHRCCREGACLGASAPHGFAEELSKCVQVRVRPNNVSVTSPGVQLTVTLHNVPDLSAGVSCAFEAAAENEAVLLPSGELLCPSPSLQELRALTRGHGATRTVRLQLLSKETGVRFAGADFVFYNCSVLQSCMSCVGSPYPCHWCKYRHTCTSRPHECSFQEGRVHSPEGCPEILPSGDLLIPVGVMQPLTLRAKNLPQPQSGQKNYECVVRVQGRQQRVPAVRFNSSSVQCQNASYSYEGDEHGDTELDFSVVWDGDFPIDKPPSFRALLYKCWAQRPSCGLCLKADPRFNCGWCISEHRCQLRTHCPAPKTNWMHLSQKGTRCSHPRITQIHPLVGPKEGGTRVTIVGDNLGLLSREVGLRVAGVRCNSIPAEYISAERIVCEMEESLVPSPPPGPVELCVGDCSADFRTQSEQVYSFVTPTFDQVSPSRGPASGGTRLTISGSSLDAGSRVTVTVRDSECQFVRRDAKAIVCISPLSTLGPSQAPITLAIDRANISSPGLIYTYTQDPTVTRLEPTWSIINGSTAITVSGTHLLTVQEPRVRAKYRGIETTNTCQVINDTAMLCKAPGIFLGRPQPRAQGEHPDEFGFLLDHVQTARSLNRSSFTYYPDPSFEPLGPSGVLDVKPGSHVVLKGKNLIPAAAGSSRLNYTVLIGGQPCSLTVSDTQLLCDSPSQTGRQPVMVLVGGLEFWLGTLHISAERALTLPA

SEQ ID NO: 1788 - protein, 1214 aa, synthetic construct
  REGION 1..1214: note = PLXNA4 (Q9HCM2) ECD
TLLTRQPAPLSQKQRSFVTFRGEPAEGFNHLVVDERTGHIYLGAVNRIYKLSSDLKVLVTHETGPDEDNPKCYPPRIVQTCNEPLTTTNNVNKMLLIDYKENRLIACGSLYQGICKLLRLEDLFKLGEPYHKKEHYLSGVNESGSVFGVIVSYSNLDDKLFIATAVDGKPEYFPTISSRKLTKNSEADGMFAYVFHDEFVASMIKIPSDTFTIIPDFDIYYVYGFSSGNFVYFLTLQPEMVSPPGSTTKEQVYTSKLVRLCKEDTAFNSYVEVPIGCERSGVEYRLLQAAYLSKAGAVLGRTLGVHPDDDLLFTVFSKGQKRKMKSLDESALCIFILKQINDRIKERLQSCYRGEGTLDLAWLKVKDIPCSSALLTIDDNFCGLDMNAPLGVSDMVRGIPVFTEDRDRMTSVIAYVYKNHSLAFVGTKSGKLKKIRVDGPRGNALQYETVQVVDPGPVLRDMAFSKDHEQLYIMSERQLTRVPVESCGQYQSCGECLGSGDPHCGWCVLHNTCTRKERCERSKEPRRFASEMKQCVRLTVHPNNISVSQYNVLLVLETYNVPELSAGVNCTFEDLSEMDGLVVGNQIQCYSPAAKEVPRIITENGDHHVVQLQLKSKETGMTFASTSFVFYNCSVHNSCLSCVESPYRCHWCKYRHVCTHDPKTCSFQEGRVKLPEDCPQLLRVDKILVPVEVIKPITLKAKNLPQPQSGQRGYECILNIQGSEQRVPALRFNSSSVQCQNTSYSYEGMEINNLPVELTVVWNGHFNIDNPAQNKVHLYKCGAMRESCGLCLKADPDFACGWCQGPGQCTLRQHCPAQESQWLELSGAKSKCTNPRITEIIPVTGPREGGTKVTIRGENLGLEFRDIASHVKVAGVECSPLVDGYIPAEQIVCEMGEAKPSQHAGFVEICVAVCRPEFMARSSQLYYFMTLTLSDLKPSRGPMSGGTQVTITGTNLNAGSNVVVMFGKQPCLFHRRSPSYIVCNTTSSDEVLEMKVSVQVDRAKIHQDLVFQYVEDPTIVRIEPEWSIVSGNTPIAVWGTHLDLIQNPQIRAKHGGKEHINICEVLNATEMTCQAPALALGPDHQSDLTERPEEFGFILDNVQSLLILNKTNFTYYPNPVFEAFGPSGILELKPGTPIILKGKNLIPPVAGGNVKLNYTVLVGEKPCTVTVSDVQLLCESPNLIGRHKVMARVGGMEYSPGMVYIAPDSPLSLP

SEQ ID NO: 1789 - protein, 1471 aa, synthetic construct
  REGION 1..1471: note = PLXNB1 (O43157) ECD
LQPLPPTAFTPNGTYLQHLARDPTSGTLYLGATNFLFQLSPGLQLEATVSTGPVLDSRDCLPPVMPDECPQAQPTNNPNQLLLVSPGALVVCGSVHQGVCEQRRLGQLEQLLLRPERPGDTQYVAANDPAVSTVGLVAQGLAGEPLLFVGRGYTSRGVGGGIPPITTRALWPPDPQAAFSYEETAKLAVGRLSEYSHHFVSAFARGASAYFLFLRRDLQAQSRAFRAYVSRVCLRDQHYYSYVELPLACEGGRYGLIQAAAVATSREVAHGEVLFAAFSSAAPPTVGRPPSAAAGASGASALCAFPLDEVDRLANRTRDACYTREGRAEDGTEVAYIEYDVNSDCAQLPVDTLDAYPCGSDHTPSPMASRVPLEATPILEWPGIQLTAVAVTMEDGHTIAFLGDSQGQLHRVYLGPGSDGHPYSTQSIQQGSAVSRDLTFDGTFEHLYVMTQSTLLKVPVASCAQHLDCASCLAHRDPYCGWCVLLGRCSRRSECSRGQGPEQWLWSFQPELGCLQVAAMSPANISREETREVFLSVPDLPPLWPGESYSCHFGEHQSPALLTGSGVMCPSPDPSEAPVLPRGADYVSVSVELRFGAVVIAKTSLSFYDCVAVTELRPSAQCQACVSSRWGCNWCVWQHLCTHKASCDAGPMVASHQSPLVSPDPPARGGPSPSPPTAPKALATPAPDTLPVEPGAPSTATASDISPGASPSLLSPWGPWAGSGSISSPGSTGSPLHEEPSPPSPQNGPGTAVPAPTDFRPSATPEDLLASPLSPSEVAAVPPADPGPEALHPTVPLDLPPATVPATTFPGAMGSVKPALDWLTREGGELPEADEWTGGDAPAFSTSTLLSGDGDSAELEGPPAPLILPSSLDYQYDTPGLWELEEATLGASSCPCVESVQGSTLMPVHVEREIRLLGRNLHLFQDGPGDNECVMELEGLEVVVEARVECEPPPDTQCHVTCQQHQLSYEALQPELRVGLFLRRAGRLRVDSAEGLHVVLYDCSVGHGDCSRCQTAMPQYGCVWCEGERPRCVTREACGEAEAVATQCPAPLIHSVEPLTGPVDGGTRVTIRGSNLGQHVQDVLGMVTVAGVPCAVDAQEYEVSSSLVCITGASGEEVAGATAVEVPGRGRGVSEHDFAYQDPKVHSIFPARGPRAGGTRLTLNGSKLLTGRLEDIRVVVGDQPCHLLPEQQSEQLRCETSPRPTPATLPVAVWFGATERRLQRGQFKYTLDPNITSAGPTKSFLSGGREICVRGQNLDVVQTPRIRVTVVSRMLQPSQGLGRRRRVVPETACSLGPSCSSQQFEEPCHVNSSQLITCRTPALPGLPEDPWVRVEFILDNLVFDFATLNPTPFSYEADPTLQPLNPEDPTMPFRHKPGSVFSVEGENLDLAMSKEEVVAMIGDGPCVVKTLTRHHLYCEPPVEQPLPRHHALREAPDSLPEFTVQMGNLRFSLGHVQYDGESPGAFPVAAQ

SEQ ID NO: 1790 - protein, 1178 aa, synthetic construct
  REGION 1..1178: note = PLXNB2 (O15031) ECD
LRPRKLDFFRSEKELNHLAVDEASGVVYLGAVNALYQLDAKLQLEQQVATGPALDNKKCTPPIEASQCHEAEMTDNVNQLLLLDPPRKRLVECGSLFKGICALRALSNISLRLFYEDGSGEKSFVASNDEGVATVGLVSSTGPGGDRVLFVGKGNGPHDNGIIVSTRLLDRTDSREAFEAYTDHATYKAGYLSTNTQQFVAAFEDGPYVFFVFNQQDKHPARNRTLLARMCREDPNYYSYLEMDLQCRDPDIHAAAFGTCLAASVAAPGSGRVLYAVFSRDSRSSGGPGAGLCLFPLDKVHAKMEANRNACYTGTREARDIFYKPFHGDIQCGGHAPGSSKSFPCGSEHLPYPLGSRDGLRGTAVLQRGGLNLTAVTVAAENNHTVAFLGTSDGRILKVYLTPDGTSSEYDSILVEINKRVKRDLVLSGDLGSLYAMTQDKVFRLPVQECLSYPTCTQCRDSQDPYCGWCVVEGRCTRKAECPRAEEASHWLWSRSKSCVAVTSAQPQNMSRRAQGEVQLTVSPLPALSEEDELLCLFGESPPHPARVEGEAVICNSPSSIPVTPPGQDHVAVTIQLLLRRGNIFLTSYQYPFYDCRQAMSLEENLPCISCVSNRWTCQWDLRYHECREASPNPEDGIVRAHMEDSCPQFLGPSPLVIPMNHETDVNFQGKNLDTVKGSSLHVGSDLLKFMEPVTMQESGTFAFRTPKLSHDANETLPLHLYVKSYGKNIDSKLHVTLYNCSFGRSDCSLCRAANPDYRCAWCGGQSRCVYEALCNTTSECPPPVITRIQPETGPLGGGIRITILGSNLGVQAGDIQRISVAGRNCSFQPERYSVSTRIVCVIEAAETPFTGGVEVDVFGKLGRSPPNVQFTFQQPKPLSVEPQQGPQAGGTTLTIHGTHLDTGSQEDVRVTLNGVPCKVTKFGAQLQCVTGPQATRGQMLLEVSYGGSPVPNPGIFFTYRENPVLRAFEPLRSFASGGRSINVTGQGFSLIQRFAMVVIAEPLQSWQPPREAESLQPMTVVGTDYVFHNDTKVVFLSPAVPEEPEAYNLTVLIEMDGHRALLRTEAGAFEYVPDPTFENFTGGVKKQVNKLIHARGTNLNKAMTLQEAEAFVGAERCTMKTLTETDLYCEPPEVQPPPKRRQKRDTTHNLPEFIVKFGSREWVLGRVEYDTRVSDVP

SEQ ID NO: 1791 - protein, 1211 aa, synthetic construct
  REGION 1..1211: note = PLXNB3 (Q9ULL4) ECD
HRFSAPNTTLNHLALAPGRGTLYVGAVNRLFQLSPELQLEAVAVTGPVIDSPDCVPFRDPAECPQAQLTDNANQLLLVSSRAQELVACGQVRQGVCETRRLGDVAEVLYQAEDPGDGQFVAANTPGVATVGLVVPLPGRDLLLVARGLAGKLSAGVPPLAIRQLAGSQPFSSEGLGRLVVGDFSDYNNSYVGAFADARSAYFVFRRRGARAQAEYRSYVARVCLGDTNLYSYVEVPLACQGQGLIQAAFLAPGTLLGVFAAGPRGTQAALCAFPMVELGASMEQARRLCYTAGGRGPSGAEEATVEYGVTSRCVTLPLDSPESYPCGDEHTPSPIAGRQPLEVQPLLKLGQPVSAVAALQADGHMIAFLGDTQGQLYKVFLHGSQGQVYHSQQVGPPGSAISPDLLLDSSGSHLYVLTAHQVDRIPVAACPQFPDCASCLQAQDPLCGWCVLQGRCTRKGQCGRAGQLNQWLWSYEEDSHCLHIQSLLPGHHPRQEQGQVTLSVPRLPILDADEYFHCAFGDYDSLAHVEGPHVACVTPPQDQVPLNPPGTDHVTVPLALMFEDVTVAATNFSFYDCSAVQALEAAAPCRACVGSIWRCHWCPQSSHCVYGEHCPEGERTIYSAQEVDIQVRGPGACPQVEGLAGPHLVPVGWESHLALRVRNLQHFRGLPASFHCWLELPGELRGLPATLEETAGDSGLIHCQAHQFYPSMSQRELPVPIYVTQGEAQRLDNTHALYVILYDCAMGHPDCSHCQAANRSLGCLWCADGQPACRYGPLCPPGAVELLCPAPSIDAVEPLTGPPEGGLALTILGSNLGRAFADVQYAVSVASRPCNPEPSLYRTSARIVCVTSPAPNGTTGPVRVAIKSQPPGISSQHFTYQDPVLLSLSPRWGPQAGGTQLTIRGQHLQTGGNTSAFVGGQPCPILEPVCPEAIVCRTRPQAAPGEAAVLVVFGHAQRTLLASPFRYTANPQLVAAEPSASFRGGGRLIRVRGTGLDVVQRPLLSVWLEADAEVQASRAQPQDPQPRRSCGAPAADPQACIQLGGGLLQCSTVCSVNSSSLLLCRSPAVPDRAHPQRVFFTLDNVQVDFASASGGQGFLYQPNPRLAPLSREGPARPYRLKPGHVLDVEGEGLNLGISKEEVRVHIGRGECLVKTLTRTHLYCEPPAHAPQPANGSGLPQFVVQMGNVQLALGPVQYEAEPPLSAFPVEAQ

SEQ ID NO: 1792 - protein, 910 aa, synthetic construct
  REGION 1..910: note = PLXNC1 (O60486) ECD
ADEPVWRSEQAIGAIAASQEDGVFVASGSCLDQLDYSLEHSLSRLYRDQAGNCTEPVSLAPPARPRPGSSFSKLLLPYREGAAGLGGLLLTGWTFDRGACEVRPLGNLSRNSLRNGTEVVSCHPQGSTAGVVYRAGRNNRWYLAVAATYVLPEPETASRCNPAASDHDTAIALKDTEGRSLATQELGRLKLCEGAGSLHFVDAFLWNGSIYFPYYPYNYTSGAATGWPSMARIAQSTEVLFQGQASLDCGHGHPDGRRLLLSSSLVEALDVWAGVFSAAAGEGQERRSPTTTALCLFRMSEIQARAKRVSWDFKTAESHCKEGDQPERVQPIASSTLIHSDLTSVYGTVVMNRTVLFLGTGDGQLLKVILGENLTSNCPEVIYEIKEETPVFYKLVPDPVKNIYIYLTAGKEVRRIRVANCNKHKSCSECLTATDPHCGWCHSLQRCTFQGDCVHSENLENWLDISSGAKKCPKIQIIRSSKEKTTVTMVGSFSPRHSKCMVKNVDSSRELCQNKSQPNRTCTCSIPTRATYKDVSVVNVMFSFGSWNLSDRFNFTNCSSLKECPACVETGCAWCKSARRCIHPFTACDPSDYERNQEQCPVAVEKTSGGGRPKENKGNRTNQALQVFYIKSIEPQKVSTLGKSNVIVTGANFTRASNITMILKGTSTCDKDVIQVSHVLNDTHMKFSLPSSRKEMKDVCIQFDGGNCSSVGSLSYIALPHCSLIFPATTWISGGQNITMMGRNFDVIDNLIISHELKGNINVSEYCVATYCGFLAPSLKSSKVRTNVTVKLRVQDTYLDCGTLQYREDPRFTGYRVESEVDTELEVKIQKENDNFNISKKDIEITLFHGENGQLNCSFENITRNQDLTTILCKIKGIKTASTIANSSKKVRVKLGNLELYVEQESVPST

SEQ ID NO: 1793 - protein, 1225 aa, synthetic construct
  REGION 1..1225: note = PLXND1 (Q9Y4D7) ECD
LEIQRRFPSPTPTNNFALDGAAGTVYLAAVNRLYQLSGANLSLEAEAAVGPVPDSPLCHAPQLPQASCEHPRRLTDNYNKILQLDPGQGLVVVCGSIYQGFCQLRRRGNISAVAVRFPPAAPPAEPVTVFPSMLNVAANHPNASTVGLVLPPAAGAGGSRLLVGATYTGYGSSFFPRNRSLEDHRFENTPEIAIRSLDTRGDLAKLFTFDLNPSDDNILKIKQGAKEQHKLGFVSAFLHPSDPPPGAQSYAYLALNSEARAGDKESQARSLLARICLPHGAGGDAKKLTESYIQLGLQCAGGAGRGDLYSRLVSVFPARERLFAVFERPQGSPAARAAPAALCAFRFADVRAAIRAARTACFVEPAPDVVAVLDSVVQGTGPACERKLNIQLQPEQLDCGAAHLQHPLSILQPLKATPVFRAPGLTSVAVASVNNYTAVFLGTVNGRLLKINLNESMQVVSRRVVTVAYGEPVHHVMQFDPADSGYLYLMTSHQMARVKVAACNVHSTCGDCVGAADAYCGWCALETRCTLQQDCTNSSQQHFWTSASEGPSRCPAMTVLPSEIDVRQEYPGMILQISGSLPSLSGMEMACDYGNNIRTVARVPGPAFGHQIAYCNLLPRDQFPPFPPNQDHVTVEMSVRVNGRNIVKANFTIYDCSRTAQVYPHTACTSCLSAQWPCFWCSQQHSCVSNQSRCEASPNPTSPQDCPRTLLSPLAPVPTGGSQNILVPLANTAFFQGAALECSFGLEEIFEAVWVNESVVRCDQVVLHTTRKSQVFPLSLQLKGRPARFLDSPEPMTVMVYNCAMGSPDCSQCLGREDLGHLCMWSDGCRLRGPLQPMAGTCPAPEIHAIEPLSGPLDGGTLLTIRGRNLGRRLSDVAHGVWIGGVACEPLPDRYTVSEEIVCVTGPAPGPLSGVVTVNASKEGKSRDRFSYVLPLVHSLEPTMGPKAGGTRITIHGNDLHVGSELQVLVNDTDPCTELMRTDTSIACTMPEGALPAPVPVCVRFERRGCVHGNLTFWYMQNPVITAISPRRSPVSGGRTITVAGERFHMVQNVSMAVHHIGREPTLCKVLNSTLITCPSPGALSNASAPVDFFINGRAYADEVAVAEELLDPEEAQRGSRFRLDYLPNPQFSTAKREKWIKHHPGEPLTLVIHKEQDSLGLQSHEYRVKIGQVSCDIQIVSDRIIHCSVNESLGAAVGQLPITIQVGNFNQTIATLQLGGSETA

SEQ ID NO: 1794 - protein, 443 aa, synthetic construct
  REGION 1..443: note = PMEL (P40967) ECD
KVPRNQDWLGVSRQLRTKAWNRQLYPEWTEAQRLDCWRGGQVSLKVSNDGPTLIGANASFSIALNFPGSQKVLPDGQVIWVNNTIINGSQVWGGQPVYPQETDDACIFPDGGPCPSGSWSQKRSFVYVWKTWGQYWQVLGGPVSGLSIGTGRAMLGTHTMEVTVYHRRGSRSYVPLAHSSSAFTITDQVPFSVSVSQLRALDGGNKHFLRNQPLTFALQLHDPSGYLAEADLSYTWDFGDSSGTLISRALVVTHTYLEPGPVTAQVVLQAAIPLTSCGSSPVPGTTDGHRPTAEAPNTTAGQVPTTEVVGTTPGQAPTAEPSGTTSVQVPTTEVISTAPVQMPTAESTGMTPEKVPVSEVMGTTLAEMSTPEATGMTPAEVSIVVLSGTTAAQVTTTEWVETTARELPIPEPEGPDASSIMSTESITGSLGPLLDGTATLRLV

SEQ ID NO: 1795 - protein, 439 aa, synthetic construct
  REGION 1..439: note = PODXL (O00592) ECD
SPSPSPSPSQNATQTTTDSSNKTAPTPASSVTIMATDTAQQSTVPTSKANEILASVKATTLGVSSDSPGTTTLAQQVSGPVNTTVARGGGSGNPTTTIESPKSTKSADTTTVATSTATAKPNTTSSQNGAEDTTNSGGKSSHSVTTDLTSTKAEHLTTPHPTSPLSPRQPTSTHPVATPTSSGHDHLMKISSSSSTVAIPGYTFTSPGMTTTLLETVFHHVSQAGLELLTSGDLPTLASQSAGITASSVISQRTQQTSSQMPASSTAPSSQETVQPTSPATALRTPTLPETMSSSPTAASTTHRYPKTPSPTVAHESNWAKCEDLETQTQSEKQLVLNLTGNTLCAGGASDEKLISLICRAVKATFNPAQDKCGIRLASVPGSQTVVVKEITIHTKLPAKDVYERLKDKWDELKEAGVSDMKLGDQGPPEEAEDRFSMP

SEQ ID NO: 1796 - protein, 468 aa, synthetic construct
  REGION 1..468: note = PODXL2 (Q9NZ53) ECD
GSDEPGPEGLTSTSLLDLLLPTGLEPLDSEEPSETMGLGAGLGAPGSGFPSEENEESRILQPPQYFWEEEEELNDSSLDLGPTADYVFPDLTEKAGSIEDTSQAQELPNLPSPLPKMNLVEPPWHMPPREEEEEEEEEEEREKEEVEKQEEEEEEELLPVNGSQEEAKPQVRDFSLTSSSQTPGATKSRHEDSGDQASSGVEVESSMGPSLLLPSVTPTTVTPGDQDSTSQEAEATVLPAAGLGVEFEAPQEASEEATAGAAGLSGQHEEVPALPSFPQTTAPSGAEHPDEDPLGSRTSASSPLAPGDMELTPSSATLGQEDLNQQLLEGQAAEAQSRIPWDSTQVICKDWSNLAGKNYIILNMTENIDCEVFRQHRGPQLLALVEEVLPRHGSGHHGAWHISLSKPSEKEQHLLMTLVGEQGVVPTQDVLSMLGDIRRSLEEIGIQNYSTTSSCQARASQVRSDYGT

SEQ ID NO: 1797 - protein, 57 aa, synthetic construct
  REGION 1..57: note = PRIMA1 (Q86XR5) ECD
EPQKSCSKVTDSCRHVCQCRPPPPLPPPPPPPPPPRLLSAPAPNSTSCPTEESWWSG

SEQ ID NO: 1798 - protein, 210 aa, synthetic construct
  REGION 1..210: note = PRLR (P16471) ECD
QLPPGKPEIFKCRSPNKETFTCWWRPGTDGGLPTNYSLTYHREGETLMHECPDYITGGPNSCHFGKQYTSMWRTYIMMVNATNQMGSSFSDELYVDVTYIVQPDPPLELAVEVKQPEDRKPYLWIKWSPPTLIDLKTGWFTLLYEIRLKPEKAAEWEIHFAGQQTEFKILSLHPGQKYLVQVRCKPDHGYWSAWSPATFIQIPSDFTMND

SEQ ID NO: 1799 - protein, 193 aa, synthetic construct
  REGION 1..193: note = PROCR (Q9UNN8) ECD
SQDASDGLQRLHMLQISYFRDPYHVWYQGNASLGGHLTHVLEGPDTNTTIIQLQPLQEPESWARTQSGLQSYLLQFHGLVRLVHQERTLAFPLTIRCFLGCELPPEGSRAHVFFEVAVNGSSFVSFRPERALWQADTQVTSGVVTFTLQQLNAYNRTRYELREFLEDTCVQYVQKHISAENTKGSQTSRSYTS

SEQ ID NO: 1800 - protein, 290 aa, synthetic construct
  REGION 1..290: note = PRSS8 (Q16651) ECD
AEGAEAPCGVAPQARITGGSSAVAGQWPWQVSITYEGVHVCGGSLVSEQWVLSAAHCFPSEHHKEAYEVKLGAHQLDSYSEDAKVSTLKDIIPHPSYLQEGSQGDIALLQLSRPITFSRYIRPICLPAANASFPNGLHCTVTGWGHVAPSVSLLTPKPLQQLEVPLISRETCNCLYNIDAKPEEPHFVQEDMVCAGYVEGGKDACQGDSGGPLSCPVEGLWYLTGIVSWGDACGARNRPGVYTLASSYASWIQSKVTELQPRVVPQTQESQPDSNLCGSHLAFSSAPAQG

SEQ ID NO: 1801 - protein, 914 aa, synthetic construct
  REGION 1..914: note = PRTG (Q2VWP7) ECD
FSELSFVKEPQDVTVTRKDPVVLDCQAHGEVPIKVTWLKNGAKMSENKRIEVLSNGSLYISEVEGRRGEQSDEGFYQCLAMNKYGAILSQKAHLALSTISAFEVQPISTEVHEGGVARFACKISSHPPAVITWEFNRTTLPMTMDRITALPTGVLQIYDVSQRDSGNYRCIAATVAHRRKSMEASLTVIPAKESKSFHTPTIIAGPQNITTSLHQTVVLECMATGNPKPIISWSRLDHKSIDVFNTRVLGNGNLMISDVRLQHAGVYVCRATTPGTRNFTVAMATLTVLAPPSFVEWPESLTRPRAGTARFVCQAEGIPSPKMSWLKNGRKIHSNGRIKMYNSKLVINQIIPEDDAIYQCMAENSQGSILSRARLTVVMSEDRPSAPYNVHAETMSSSAILLAWERPLYNSDKVIAYSVHYMKAEGLNNEEYQVVIGNDTTHYIIDDLEPASNYTFYIVAYMPMGASQMSDHVTQNTLEDVPLRPPEISLTSRSPTDILISWLPIPAKYRRGQVVLYRLSFRLSTENSIQVLELPGTTHEYLLEGLKPDSVYLVRITAATRVGLGESSVWTSHRTPKATSVKAPKSPELHLEPLNCTTISVRWQQDVEDTAAIQGYKLYYKEEGQQENGPIFLDTKDLLYTLSGLDPRRKYHVRLLAYNNIDDGYQADQTVSTPGCVSVRDRMVPPPPPPHHLYAKANTSSSIFLHWRRPAFTAAQIINYTIRCNPVGLQNASLVLYLQTSETHMLVQGLEPNTKYEFAVRLHVDQLSSPWSPVVYHSTLPEAPAGPPVGVKVTLIEDDTALVSWKPPDGPETVVTRYTILYASRKAWIAGEWQVLHREGAITMALLENLVAGNVYIVKISASNEVGEGPFSNSVELAVLPKETSESNQRPKRLDSADAKVYSGYYHLDQKSMT

SEQ ID NO: 1802 - protein, 123 aa, synthetic construct
  REGION 1..123: note = PTCRA (Q6ISU1) ECD
TPFPSLAPPIMLLVDGKQQMVVVCLVLDVAPPGLDSPIWFSAGNGSALDAFTYGPSPATDGTWTNLAHLSLPSEELASWEPLVCHTGPGAEGHSRSTQPMHLSGEASTARTCPQEPLRGTPGG

SEQ ID NO: 1803 - protein, 807 aa, synthetic construct [sequence omitted]

SEQ ID NO: 1804 - protein, 674 aa, synthetic construct
  REGION 1..674: note = PTK7 (Q13308) ECD
AIVFIKQPSSQDALQGRRALLRCEVEAPGPVHVYWLLDGAPVQDTERRFAQGSSLSFAAVDRLQDSGTFQCVARDDVTGEEARSANASFNIKWIEAGPVVLKHPASEAEIQPQTQVTLRCHIDGHPRPTYQWFRDGTPLSDGQSNHTVSSKERNLTLRPAGPEHSGLYSCCAHSAFGQACSSQNFTLSIADESFARVVLAPQDVVVARYEEAMFHCQFSAQPPPSLQWLFEDETPITNRSRPPHLRRATVFANGSLLLTQVRPRNAGIYRCIGQGQRGPPIILEATLHLAEIEDMPLFEPRVFTAGSEERVTCLPPKGLPEPSVWWEHAGVRLPTHGRVYQKGHELVLANIAESDAGVYTCHAANLAGQRRQDVNITVATVPSWLKKPQDSQLEEGKPGYLDCLTQATPKPTVVWYRNQMLISEDSRFEVFKNGTLRINSVEVYDGTWYRCMSSTPAGSIEAQARVQVLEKLKFTPPPQPQQCMEFDKEATVPCSATGREKPTIKWERADGSSLPEWVTDNAGTLHFARVTRDDAGNYTCIASNGPQGQIRAHVQLTVAVFITFKVEPERTTVYQGHTALLQCEAQGDPKPLIQWKGKDRILDPTKLGPRMHIFQNGSLVIHDVAPEDSGRYTCIAGNSCNIKHTEAPLYVVDKPVPEESEGPGSPPPYKMIQT

SEQ ID NO: 1805 - protein, 132 aa, synthetic construct
  REGION 1..132: note = PTPRA (P18433) ECD
NNATTVAPSVGITRLINSSTAEPVKEEAKTSNPTSSLTSLSVAPTFSPNITLGPTYLTTVNSSDSDNGTTRTASTNSIGITISPNGTWLPDNQFTDARTEPWEGNSSTAATTPETFPPSGNSDSKDRRDETP

SEQ ID NO: 1806 - protein, 1599 aa, synthetic construct
  REGION 1..1599: note = PTPRB (P23467) ECD
EPERCNFTLAESKASSHSVSIQWRILGSPCNFSLIYSSDTLGAALCPTFRIDNTTYGCNLQDLQAGTIYNFRIISLDEERTVVLQTDPLPPARFGVSKEKTTSTSLHVWWTPSSGKVTSYEVQLFDENNQKIQGVQIQESTSWNEYTFFNLTAGSKYNIAITAVSGGKRSFSVYTNGSTVPSPVKDIGISTKANSLLISWSHGSGNVERYRLMLMDKGILVHGGVVDKHATSYAFHGLTPGYLYNLTVMTEAAGLQNYRWKLVRTAPMEVSNLKVTNDGSLTSLKVKWQRPPGNVDSYNITLSHKGTIKESRVLAPWITETHFKELVPGRLYQVTVSCVSGELSAQKMAVGRTFPDKVANLEANNNGRMRSLVVSWSPPAGDWEQYRILLFNDSVVLLNITVGKEETQYVMDDTGLVPGRQYEVEVIVESGNLKNSERCQGRTVPLAVLQLRVKHANETSLSIMWQTPVAEWEKYIISLADRDLLLIHKSLSKDAKEFTFTDLVPGRKYMATVTSISGDLKNSSSVKGRTVPAQVTDLHVANQGMTSSLFTNWTQAQGDVEFYQVLLIHENVVIKNESISSETSRYSFHSLKSGSLYSVVVTTVSGGISSRQVVVEGRTVPSSVSGVTVNNSGRNDYLSVSWLLAPGDVDNYEVTLSHDGKVVQSLVIAKSVRECSFSSLTPGRLYTVTITTRSGKYENHSFSQERTVPDKVQGVSVSNSARSDYLRVSWVHATGDFDHYEVTIKNKNNFIQTKSIPKSENECVFVQLVPGRLYSVTVTTKSGQYEANEQGNGRTIPEPVKDLTLRNRSTEDLHVTWSGANGDVDQYEIQLLFNDMKVFPPFHLVNTATEYRFTSLTPGRQYKILVLTISGDVQQSAFIEGFTVPSAVKNIHISPNGATDSLTVNWTPGGGDVDSYTVSAFRHSQKVDSQTIPKHVFEHTFHRLEAGEQYQIMIASVSGSLKNQINVVGRTVPASVQGVIADNAYSSYSLIVSWQKAAGVAERYDILLLTENGILLRNTSEPATTKQHKFEDLTPGKKYKIQILTVSGGLFSKEAQTEGRTVPAAVTDLRITENSTRHLSFRWTASEGELSWYNIFLYNPDGNLQERAQVDPLVQSFSFQNLLQGRMYKMVIVTHSGELSNESFIFGRTVPASVSHLRGSNRNTTDSLWFNWSPASGDFDFYELILYNPNGTKKENWKDKDLTEWRFQGLVPGRKYVLWVVTHSGDLSNKVTAESRTAPSPPSLMSFADIANTSLAITWKGPPDWTDYNDFELQWLPRDALTVFNPYNNRKSEGRIVYGLRPGRSYQFNVKTVSGDSWKTYSKPIFGSVRTKPDKIQNLHCRPQNSTAIACSWIPPDSDFDGYSIECRKMDTQEVEFSRKLEKEKSLLNIMMLVPHKRYLVSIKVQSAGMTSEVVEDSTITMIDRPPPPPPHIRVNEKDVLISKSSINFTVNCSWFSDTNGAVKYFTVVVREADGSDELKPEQQHPLPSYLEYRHNASIRVYQTNYFASKCAENPNSNSKSFNIKLGAEMESLGGKCDPTQQKFCDGPLKPHTAYRISIRAFTQLFDEDLKEFTKPLYSDTFFSLPITTESEPLFGAIE

SEQ ID NO: 1807 - protein, 552 aa, synthetic construct
  REGION 1..552: note = PTPRC (P08575) ECD
QSPTPSPTGLTTAKMPSVPLSSDPLPTHTTAFSPASTFERENDFSETTTSLSPDNTSTQVSPDSLDNASAFNTTGVSSVQTPHLPTHADSQTPSAGTDTQTFSGSAANAKLNPTPGSNAISDVPGERSTASTFPTDPVSPLTTTLSLAHHSSAALPARTSNTTITANTSDAYLNASETTTLSPSGSAVISTTTIATTPSKPTCDEKYANITVDYLYNKETKLFTAKLNVNENVECGNNTCTNNEVHNLTECKNASVSISHNSCTAPDKTLILDVPPGVEKFQLHDCTQVEKADTTICLKWKNIETFTCDTQNITYRFQCGNMIFDNKEIKLENLEPEHEYKCDSEILYNNHKFTNASKIIKTDFGSPGEPQIIFCRSEAAHQGVITWNPPQRSFHNFTLCYIKETEKDCLNLDKNLIKYDLQNLKPYTKYVLSLHAYIIAKVQRNGSAAMCHFTTKSAPPSQVWNMTVSMTSDNSMHVKCRPPRDRNGPHERYHLEVEAGNTLVRNESHKNCDFRVKDLQYSTDYTFKAYFHNGDYPGEPFILHHSTSYNSK

SEQ ID NO: 1808 - protein, 1245 aa, synthetic construct
  REGION 1..1245: note = PTPRD (P23468) ECD
ETPPRFTRTPVDQTGVSGGVASFICQATGDPRPKIVWNKKGKKVSNQRFEVIEFDDGSGSVLRIQPLRTPRDEAIYECVASNNVGEISVSTRLTVLREDQIPRGFPTIDMGPQLKVVERTRTATMLCAASGNPDPEITWFKDFLPVDTSNNNGRIKQLRSESIGGTPIRGALQIEQSEESDQGKYECVATNSAGTRYSAPANLYVRELREVRRVPPRFSIPPTNHEIMPGGSVNITCVAVGSPMPYVKWMLGAEDLTPEDDMPIGRNVLELNDVRQSANYTCVAMSTLGVIEAIAQITVKALPKPPGTPVVTESTATSITLTWDSGNPEPVSYYIIQHKPKNSEELYKEIDGVATTRYSVAGLSPYSDYEFRVVAVNNIGRGPPSEPVLTQTSEQAPSSAPRDVQARMLSSTTILVQWKEPEEPNGQIQGYRVYYTMDPTQHVNNWMKHNVADSQITTIGNLVPQKTYSVKVLAFTSIGDGPLSSDIQVITQTGVPGQPLNFKAEPESETSILLSWTPPRSDTIANYELVYKDGEHGEEQRITIEPGTSYRLQGLKPNSLYYFRLAARSPQGLGASTAEISARTMQSKPSAPPQDISCTSPSSTSILVSWQPPPVEKQNGIITEYSIKYTAVDGEDDKPHEILGIPSDTTKYLLEQLEKWTEYRITVTAHTDVGPGPESLSVLIRTNEDVPSGPPRKVEVEAVNSTSVKVSWRSPVPNKQHGQIRGYQVHYVRMENGEPKGQPMLKDVMLADAQWEFDDTTEHDMIISGLQPETSYSLTVTAYTTKGDGARSKPKLVSTTGAVPGKPRLVINHTQMNTALIQWHPPVDTFGPLQGYRLKFGRKDMEPLTTLEFSEKEDHFTATDIHKGASYVFRLSARNKVGFGEEMVKEISIPEEVPTGFPQNLHSEGTTSTSVQLSWQPPVLAERNGIITKYTLLYRDINIPLLPMEQLIVPADTTMTLTGLKPDTTYDVKVRAHTSKGPGPYSPSVQFRTLPVDQVFAKNFHVKAVMKTSVLLSWEIPENYNSAMPFKILYDDGKMVEEVDGRATQKLIVNLKPEKSYSFVLTNRGNSAGGLQHRVTAKTAPDVLRTKPAFIGKTNLDGMITVQLPEVPANENIKGYYIIIVPLKKSRGKFIKPWESPDEMELDELLKEISRKRRSIRYGREVELKPYIAAHFDVLPTEFTLGDDKHYGGFTNKQLQSGQEYVFFVLAVMEHAESKMYATSPYSDPVVSMDLDPQPITDEEE

SEQ ID NO: 1809 - protein, 1234 aa, synthetic construct
  REGION 1..1234: note = PTPRF (P10586) ECD
DSKPVFIKVPEDQTGLSGGVASFVCQATGEPKPRITWMKKGKKVSSQRFEVIEFDDGAGSVLRIQPLRVQRDEAIYECTATNSLGEINTSAKLSVLEEEQLPPGFPSIDMGPQLKVVEKARTATMLCAAGGNPDPEISWFKDFLPVDPATSNGRIKQLRSGALQIESSEESDQGKYECVATNSAGTRYSAPANLYVRVRRVAPRFSIPPSSQEVMPGGSVNLTCVAVGAPMPYVKWMMGAEELTKEDEMPVGRNVLELSNVVRSANYTCVAISSLGMIEATAQVTVKALPKPPIDLVVTETTATSVTLTWDSGNSEPVTYYGIQYRAAGTEGPFQEVDGVATTRYSIGGLSPFSEYAFRVLAVNSIGRGPPSEAVRARTGEQAPSSPPRRVQARMLSASTMLVQWEPPEEPNGLVRGYRVYYTPDSRRPPNAWHKHNTDAGLLTTVGSLLPGITYSLRVLAFTAVGDGPPSPTIQVKTQQGVPAQPADFQAEVESDTRIQLSWLLPPQERIIMYELVYWAAEDEDQQHKVTFDPTSSYTLEDLKPDTLYRFQLAARSDMGVGVFTPTIEARTAQSTPSAPPQKVMCVSMGSTTVRVSWVPPPADSRNGVITQYSVAYEAVDGEDRGRHVVDGISREHSSWDLVGLEKWTEYRVWVRAHTDVGPGPESSPVLVRTDEDVPSGPPRKVEVEPLNSTAVHVYWKLPVPSKQHGQIRGYQVTYVRLENGEPRGLPIIQDVMLAEAQWRPEESEDYETTISGLTPETTYSVTVAAYTTKGDGARSKPKIVTTTGAVPGRPTMMISTTAMNTALLQWHPPKELPGELLGYRLQYCRADEARPNTIDFGKDDQHFTVTGLHKGTTYIFRLAAKNRAGLGEEFEKEIRTPEDLPSGFPQNLHVTGLTTSTTELAWDPPVLAERNGRIISYTVVFRDINSQQELQNITTDTRFTLTGLKPDTTYDIKVRAWTSKGSGPLSPSIQSRTMPVEQVFAKNFRVAAAMKTSVLLSWEVPDSYKSAVPFKILYNGQSVEVDGHSMRKLIADLQPNTEYSFVLMNRGSSAGGLQHLVSIRTAPDLLPHKPLPASAYIEDGRFDLSMPHVQDPSLVRWFYIVVVPIDRVGGSMLTPRWSTPEELELDELLEAIEQGGEEQRRRRRQAERLKPYVAAQLDVLPETFTLGDKKNYRGFYNRPLSPDLSYQCFVLASLKEPMDQKRYASSPYSDEIVVQVTPAQQQEEPEMLW

SEQ ID NO: 1810 - protein, 717 aa, synthetic construct
  REGION 1..717: note = PTPRG (P23470) ECD
VLHYVVCFPALTEGYVGALHENRHGSAVQIRRRKASGDPYWAYSGAYGPEHWVTSSVSCGGRHQSPIDILDQYARVGEEYQELQLDGFDNESSNKTWMKNTGKTVAILLKDDYFVSGAGLPGRFKAEKVEFHWGHSNGSAGSEHSINGRRFPVEMQIFFYNPDDFDSFQTAISENRIIGAMAIFFQVSPRDNSALDPIIHGLKGVVHHEKETFLDPFVLRDLLPASLGSYYRYTGSLTTPPCSEIVEWIVFRRPVPISYHQLEAFYSIFTTEQQDHVKSVEYLRNNFRPQQRLHDRVVSKSAVRDSWNHDMTDFLENPLGTEASKVCSSPPIHMKVQPLNQTALQVSWSQPETIYHPPIMNYMISYSWTKNEDEKEKTFTKDSDKDLKATISHVSPDSLYLFRVQAVCRNDMRSDFSQTMLFQANTTRIFQGTRIVKTGVPTASPASSADMAPISSGSSTWTSSGIPFSFVSMATGMGPSSSGSQATVASVVTSTLLAGLGFGGGGISSFPSTVWPTRLPTAASASKQAARPVLATTEALASPGPDGDSSPTKDGEGTEEGEKDEKSESEDGEREHEEDGEKDSEKKEKSGVTHAAEERNQTEPSPTPSSPNRTAEGGHQTIPGHEQDHTAVPTDQTGGRRDAGPGLDPDMVTSTQVPPTATEEQYAGSDPKRPEMPSKKPMSRGDRFSEDSRFITVNPAEKNTSGMISRPAPGRME

SEQ ID NO: 1811 - protein, 727 aa, synthetic construct
  REGION 1..727: note = PTPRH (Q9HD43) ECD
PAPNPGRNLTVETQTTSSISLSWEVPDGLDSQNSNYWVQCTGDGGTTETRNTTATNVTVDGLGPGSLYTCSVWVEKDGVNSSVGTVTTATAPNPVRNLRVEAQTNSSIALTWEVPDGPDPQNSTYGVEYTGDGGRAGTRSTAHTNITVDGLEPGCLYAFSMWVGKNGINSSRETRNATTAHNPVRNLRVEAQTTSSISLSWEVPDGTDPQNSTYCVQCTGDGGRTETRNTTDTRVTVDGLGPGSLYTCSVWVEKDGVNSSVEIVTSATAPNPVRNLTVEAQTNSSIALTWEVPDGPDPQNSTYGVEYTGDGGRAGTRSTAHTNITVDRLEPGCLYVFSVWVGKNGINSSRETRNATTAPNPVRNLHMETQTNSSIALCWEVPDGPYPQDYTYWVEYTGDGGGTETRNTTNTSVTAERLEPGTLYTFSVWAEKNGARGSRQNVSISTVPNAVTSLSKQDWTNSTIALRWTAPQGPGQSSYSYWVSWVREGMTDPRTQSTSGTDITLKELEAGSLYHLTVWAERNEVRGYNSTLTAATAPNEVTDLQNETQTKNSVMLWWKAPGDPHSQLYVYWVQWASKGHPRRGQDPQANWVNQTSRTNETWYKVEALEPGTLYNFTVWAERNDVASSTQSLCASTYPDTVTITSCVSTSAGYGVNLIWSCPQGGYEAFELEVGGQRGSQDRSSCGEAVSVLGLGPARSYPATITTIWDGMKVVSHSVVCHTESAGV

SEQ ID NO: 1812 - protein, 940 aa, synthetic construct
  REGION 1..940: note = PTPRJ (Q12913) ECD
AGGTPSPIPDPSVATVATGENGITQISSTAESFHKQNGTGTPQVETNTSEDGESSGANDSLRTPEQGSNGTDGASQKTPSSTGPSPVFDIKAVSISPTNVILTWKSNDTAASEYKYVVKHKMENEKTITVVHQPWCNITGLRPATSYVFSITPGIGNETWGDPRVIKVITEPIPVSDLRVALTGVRKAALSWSNGNGTASCRVLLESIGSHEELTQDSRLQVNISGLKPGVQYNINPYLLQSNKTKGDPLGTEGGLDASNTERSRAGSPTAPVHDESLVGPVDPSSGQQSRDTEVLLVGLEPGTRYNATVYSQAANGTEGQPQAIEFRTNAIQVFDVTAVNISATSLTLIWKVSDNESSSNYTYKIHVAGETDSSNLNVSEPRAVIPGLRSSTFYNITVCPVLGDIEGTPGFLQVHTPPVPVSDFRVTVVSTTEIGLAWSSHDAESFQMHITQEGAGNSRVEITTNQSIIIGGLFPGTKYCFEIVPKGPNGTEGASRTVCNRTVPSAVFDIHVVYVTTTEMWLDWKSPDGASEYVYHLVIESKHGSNHTSTYDKAITLQGLIPGTLYNITISPEVDHVWGDPNSTAQYTRPSNVSNIDVSTNTTAATLSWQNFDDASPTYSYCLLIEKAGNSSNATQVVTDIGITDATVTELIPGSSYTVEIFAQVGDGIKSLEPGRKSFCTDPASMASFDCEVVPKEPALVLKWTCPPGANAGFELEVSSGAWNNATHLESCSSENGTEYRTEVTYLNFSTSYNISITTVSCGKMAAPTRNTCTTGITDPPPPDGSPNITSVSHNSVKVKFSGFEASHGPIKAYAVILTTGEAGHPSADVLKYTYEDFKKGASDTYVTYLIRTEEKGRSQSLSEVLKYEIDVGNESTTLGYYNGKLEPLGSYRACVAGFTNITFHPQNKGLIDGAESYVSFSRYSDAVSLPQDPGVICG

SEQ ID NO: 1813 - protein, 726 aa, synthetic construct
  REGION 1..726: note = PTPRK (Q15262) ECD
AQGQFSAGGCTFDDGPGACDYHQDLYDDFEWVHVSAQEPHYLPPEMPQGSYMIVDSSDHDPGEKARLQLPTMKENDTHCIDFSYLLYSQKGLNPGTLNILVRVNKGPLANPIWNVTGFTGRDWLRAELAVSTFWPNEYQVIFEAEVSGGRSGYIAIDDIQVLSYPCDKSPHFLRLGDVEVNAGQNATFQCIATGRDAVHNKLWLQRRNGEDIPVAQTKNINHRRFAASFRLQEVTKTDQDLYRCVTQSERGSGVSNFAQLIVREPPRPIAPPQLLGVGPTYLLIQLNANSIIGDGPIILKEVEYRMTSGSWTETHAVNAPTYKLWHLDPDTEYEIRVLLTRPGEGGTGLPGPPLITRTKCAEPMRTPKTLKIAEIQARRIAVDWESLGYNITRCHTFNVTICYHYFRGHNESKADCLDMDPKAPQHVVNHLPPYTNVSLKMILTNPEGRKESEETIIQTDEDVPGPVPVKSLQGTSFENKIFLNWKEPLDPNGIITQYEISYSSIRSFDPAVPVAGPPQTVSNLWNSTHHVFMHLHPGTTYQFFIRASTVKGFGPATAINVTTNISAPTLPDYEGVDASLNETATTITVLLRPAQAKGAPISAYQIVVEELHPHRTKREAGAMECYQVPVTYQNAMSGGAPYYFAAELPPGNLPEPAPFTVGDNRTYQGFWNPPLAPRKGYNIYFQAMSSVEKETKTQCVRIATKAATEEPEVIPDPAKQTDRVVK

SEQ ID NO: 1814 - protein, 722 aa, synthetic construct
  REGION 1..722: note = PTPRM (P28827) ECD
ETFSGGCLFDEPYSTCGYSQSEGDDFNWEQVNTLTKPTSDPWMPSGSFMLVNASGRPEGQRAHLLLPQLKENDTHCIDFHYFVSSKSNSPPGLLNVYVKVNNGPLGNPIWNISGDPTRTWNRAELAISTFWPNFYQVIFEVITSGHQGYLAIDEVKVLGHPCTRTPHFLRIQNVEVNAGQFATFQCSAIGRTVAGDRLWLQGIDVRDAPLKEIKVTSSRRFIASFNVVNTTKRDAGKYRCMIRTEGGVGISNYAELVVKEPPVPIAPPQLASVGATYLWIQLNANSINGDGPIVAREVEYCTASGSWNDRQPVDSTSYKIGHLDPDTEYEISVLLTRPGEGGTGSPGPALRTRTKCADPMRGPRKLEVVEVKSRQITIRWEPFGYNVTRCHSYNLTVHYCYQVGGQEQVREEVSWDTENSHPQHTITNLSPYTNVSVKLILMNPEGRKESQELIVQTDEDLPGAVPTESIQGSTFEEKIFLQWREPTQTYGVITLYEITYKAVSSFDPEIDLSNQSGRVSKLGNETHFLFFGLYPGTTYSFTIRASTAKGFGPPATNQFTTKISAPSMPAYELETPLNQTDNTVTVMLKPAHSRGAPVSVYQIVVEEERPRRTKKTTEILKCYPVPIHFQNASLLNSQYYFAAEFPADSLQAAQPFTIGDNKTYNGYWNTPLLPYKSYRIYFQAASRANGETKIDCVQVATKGAATPKPVPEPEKQTDHTVK

SEQ ID NO: 1815 - protein, 541 aa, synthetic construct
  REGION 1..541: note = PTPRN (Q16849) ECD
VSAHGCLFDRRLCSHLEVCIQDGLFGQCQVGVGQARPLLQVTSPVLQRLQGVLRQLMSQGLSWHDDLTQYVISQEMERIPRLRPPEPRPRDRSGLAPKRPGPAGELLLQDIPTGSAPAAQHRLPQPPVGKGGAGASSSLSPLQAELLPPLLEHLLLPPQPPHPSLSYEPALLQPYLFHQFGSRDGSRVSEGSPGMVSVGPLPKAEAPALFSRTASKGIFGDHPGHSYGDLPGPSPAQLFQDSGLLYLAQELPAPSRARVPRLPEQGSSSRAEDSPEGYEKEGLGDRGEKPASPAVQPDAALQRLAAVLAGYGVELRQLTPEQLSTLLTLLQLLPKGAGRNPGGVVNVGADIKKTMEGPVEGRDTAELPARTSPMPGHPTASPTSSEVQQVPSPVSSEPPKAARPPVTPVLLEKKSPLGQSQPTVAGQPSARPAAEEYGYIVTDQKPLSLAAGVKLLEILAEHVHMSSGSFINISVVGPALTFRIRHNEQNLSLADVTQQAGLVKSELEAQTGLQILQTGVGQREEAAAVLPQTAHSTSPMR

SEQ ID NO: 1816 - protein, 594 aa, synthetic construct
  REGION 1..594: note = PTPRN2 (Q92932) ECD
AAPSSVPRGRQLPGRLGCLLEEGLCGASEACVNDGVFGRCQKVPAMDFYRYEVSPVALQRLRVALQKLSGTGFTWQDDYTQYVMDQELADLPKTYLRRPEASSPARPSKHSVGSERRYSREGGAALANALRRHLPFLEALSQAPASDVLARTHTAQDRPPAEGDDRFSESILTYVAHTSALTYPPGSRTQLREDLLPRTLGQLQPDELSPKVDSGVDRHHLMAALSAYAAQRPPAPPGEGSLEPQYLLRAPSRMPRPLLAPAAPQKWPSPLGDSEDPSSTGDGARIHTLLKDLQRQPAEVRGLSGLELDGMAELMAGLMQGVDHGVARGSPGRAALGESGEQADGPKATLRGDSFPDDGVQDDDDRLYQEVHRLSATLGGLLQDHGSRLLPGALPFARPLDMERKKSEHPESSLSSEEETAGVENVKSQTYSKDLLGQQPHSEPGAAAFGELQNQMPGPSKEEQSLPAGAQEALSDGLQLEVQPSEEEARGYIVTDRDPLRPEEGRRLVEDVARLLQVPSSAFADVEVLGPAVTFKVSANVQNVTTEDVEKATVDNKDKLEETSGLKILQTGVGSKSKLKFLPPQAEQEDSTKF

SEQ ID NO: 1817 - protein, 793 aa, synthetic construct
  REGION 1..793: note = PTPRO (Q16827) ECD
FHVTVQDDNNIVVSLEASDVISPASVYVVKITGESKNYFFEFEEFNSTLPPPVIFKASYHGLYYIITLVVVNGNVVTKPSRSITVLTKPLPVTSVSIYDYKPSPETGVLFEIHYPEKYNVFTRVNISYWEGKDFRTMLYKDFFKGKTVFNHWLPGMCYSNITFQLVSEATFNKSTLVEYSGVSHEPKQHRTAPYPPQNISVRIVNLNKNNWEEQSGNFPEESFMRSQDTIGKEKLFHFTEETPEIPSGNISSGWPDFNSSDYETTSQPYWWDSASAAPESEDEFVSVLPMEYENNSTLSETEKSTSGSFSFFPVQMILTWLPPKPPTAFDGFHIHIEREENFTEYLMVDEEAHEFVAELKEPGKYKLSVTTFSSSGSCETRKSQSAKSLSFYISPSGEWIEELTEKPQHVSVHVLSSTTALMSWTSSQENYNSTIVSVVSLTCQKQKESQRLEKQYCTQVNSSKPIIENLVPGAQYQVVIYLRKGPLIGPPSDPVTFAIVPTGIKDLMLYPLGPTAVVLSWTRPYLGVFRKYVVEMFYFNPATMTSEWTTYYEIAATVSLTASVRIANLLPAWYYNFRVTMVTWGDPELSCCDSSTISFITAPVAPEITSVEYFNSLLYISWTYGDDTTDLSHSRMLHWMVVAEGKKKIKKSVTRNVMTAILSLPPGDIYNLSVTACTERGSNTSMLRLVKLEPAPPKSLFAVNKTQTSVTLLWVEEGVADFFEVFCQQVGSSQKTKLQEPVAVSSHVVTISSLLPATAYNCSVTSFSHDSPSVPTFIAVSTMVTEMNPNVVV

SEQ ID NO: 1818 - protein, 1912 aa, synthetic construct
  REGION 1..1912: note = PTPRQ (Q9UMZ3) ECD
ERYQVDLVPDSGFVTIRDLGGGEYQVDVSNVVPGTRYDITISSISTTYTSPVTRIVTTNVTKPGPPVFLAGERVGSAGILLSWNTPPNPNGRIISYIVKYKEVCPWMQTVYTQVRSKPDSLEVLLTNLNPGTTYEIKVAAENSAGIGVFSDPFLFQTAESAPGKVVNLTVEAYNASAVKLIWYLPRQPNGKITSFKISVKHARSGIVVKDVSIRVEDILTGKLPECNENSESFLWSTASPSPTLGRVTPPSRTTHSSSTLTQNEISSVWKEPISFVVTHLRPYTTYLFEVSAVTTEAGYIDSTIVRTPESVPEGPPQNCVTGNITGKSFSILWDPPTIVTGKFSYRVELYGPSGRILDNSTKDLKFAFTNLTPFTMYDVYIAAETSAGTGPKSNISVFTPPDVPGAVFDLQLAEVESTQVRITWKKPRQPNGIINQYRVKVLVPETGIILENTLLTGNNEYINDPMAPEIVNIVEPMVGLYEGSAEMSSDLHSLATFIYNSHPDKNFPARNRAEDQTSPVVTTRNQYITDIAAEQLSYVIRRLVPFTEHMISVSAFTIMGEGPPTVLSVRTRQQVPSSIKIINYKNISSSSILLYWDPPEYPNGKITHYTIYAMELDTNRAFQITTIDNSFLITGLKKYTKYKMRVAASTHVGESSLSEENDIFVRTSEDEPESSPQDVEVIDVTADEIRLKWSPPEKPNGIIIAYEVLYKNIDTLYMKNTSTTDIILRNLRPHTLYNISVRSYTRFGHGNQVSSLLSVRTSETVPDSAPENITYKNISSGEIELSFLPPSSPNGIIKKYTIYLKRSNGNEERTINTTSLTQNIKVLKKYTQYIIEVSASTLKGEGVRSAPISILTEEDAPDSPPQDFSVKQLSGVTVKLSWQPPLEPNGIILYYTVYVWNRSSLKTINVTETSLELSDLDYNVEYSAYVTASTRFGDGKTRSNIISFQTPEGAPSDPPKDVYYANLSSSSIILFWTPPSKPNGIIQYYSVYYRNTSGTFMQNFTLHEVTNDFDNMTVSTIIDKLTIFSYYTFWLTASTSVGNGNKSSDIIEVYTDQDIPEGFVGNLTYESISSTAINVSWVPPAQPNGLVFYYVSLILQQTPRHVRPPLVTYERSIYFDNLEKYTDYILKITPSTEKGFSDTYTAQLYIKTEEDVPETSPIINTFKNLSSTSVLLSWDPPVKPNGAIISYDLTLQGPNENYSFITSDNYIILEELSPFTLYSFFAAARTRKGLGPSSILFFYTDESVPLAPPQNLTLINCTSDFVWLKWSPSPLPGGIVKVYSFKIHEHETDTIYYKNISGFKTEAKLVGLEPVSTYSIRVSAFTKVGNGNQFSNVVKFTTQESVPDVVQNMQCMATSWQSVLVKWDPPKKANGIITQYMVTVERNSTKVSPQDHMYTFIKLLANTSYVFKVRASTSAGEGDESTCHVSTLPETVPSVPTNIAFSDVQSTSATLTWIRPDTILGYFQNYKITTQLRAQKCKEWESEECVEYQKIQYLYEAHLTEETVYGLKKFRWYRFQVAASTNAGYGNASNWISTKTLPGPPDGPPENVHVVATSPFSISISWSEPAVITGPTCYLIDVKSVDNDEFNISFIKSNEENKTIEIKDLEIFTRYSVVITAFTGNISAAYVEGKSSAEMIVTTLESAPKDPPNNMTFQKIPDEVTKFQLTFLPPSQPNGNIQVYQALVYREDDPTAVQIHNLSIIQKTNTFVIAMLEGLKGGHTYNISVYAVNSAGAGPKVPMRITMDIKAPARPKTKPTPIYDATGKLLVTSTTITIRMPICYYSDDHGPIKNVQVLVTETGAQHDGNVTKWYDAYFNKARPYFTNEGFPNPPCTEGKTKFSGNEEIYIIGADNACMIPGNEDKICNGPLKPKKQYLFKFRATNIMGQFTDSDYSDPVKTLGEGLSERTVE

SEQ ID NO: 1819 - protein, 206 aa, synthetic construct
  REGION 1..206: note = PTPRR (Q15256) ECD
FSGNNDHFLAINQKKSGKPVFIYKHSQDIEKSLDIAPQKIYRHSYHSSSEAQVSKRHQIVNSAFPRPAYDPSLNLLAMDGQDLEVENLPIPAANVIVVTLQMDVNKLNITLLRIFRQGVAAALGLLPQQVHINRLIGKKNSIELFVSPINRKTGISDALPSEEVLRSLNINVLHQSLSQFGITEVSPEKNVLQGQHEADKIWSKEG

SEQ ID NO: 1820 - protein, 1253 aa, synthetic construct
  REGION 1..1253: note = PTPRS (Q13332) ECD
EEPPRFIKEPKDQIGVSGGVASFVCQATGDPKPRVTWNKKGKKVNSQRFETIEFDESAGAVLRIQPLRTPRDENVYECVAQNSVGEITVHAKLTVLREDQLPSGFPNIDMGPQLKVVERTRTATMLCAASGNPDPEITWFKDFLPVDPSASNGRIKQLRSETFESTPIRGALQIESSEETDQGKYECVATNSAGVRYSSPANLYVRELREVRRVAPRFSILPMSHEIMPGGNVNITCVAVGSPMPYVKWMQGAEDLTPEDDMPVGRNVLELTDVKDSANYTCVAMSSLGVIEAVAQITVKSLPKAPGTPMVTENTATSITITWDSGNPDPVSYYVIEYKSKSQDGPYQIKEDITTTRYSIGGLSPNSEYEIWVSAVNSIGQGPPSESVVTRTGEQAPASAPRNVQARMLSATTMIVQWEEPVEPNGLIRGYRVYYTMEPEHPVGNWQKHNVDDSLLTTVGSLLEDETYTVRVLAFTSVGDGPLSDPIQVKTQQGVPGQPMNLRAEARSETSITLSWSPPRQESIIKYELLFREGDHGREVGRTFDPTTSYVVEDLKPNTEYAFRLAARSPQGLGAFTPVVRQRTLQSKPSAPPQDVKCVSVRSTAILVSWRPPPPETHNGALVGYSVRYRPLGSEDPEPKEVNGIPPTTTQILLEALEKWTQYRITTVAHTEVGPGPESSPVVVRTDEDVPSAPPRKVEAEALNATAIRVLWRSPAPGRQHGQIRGYQVHYVRMEGAEARGPPRIKDVMLADAQWETDDTAEYEMVITNLQPETAYSITVAAYTMKGDGARSKPKVVVTKGAVLGRPTLSVQQTPEGSLLARWEPPAGTAEDQVLGYRLQFGREDSTPLATLEFPPSEDRYTASGVHKGATYVFRLAARSRGGLGEEAAEVLSIPEDTPRGHPQILEAAGNASAGTVLLRWLPPVPAERNGAIVKYTVAVREAGALGPARETELPAAAEPGAENALTLQGLKPDTAYDLQVRAHTRRGPGPFSPPVRYRTFLRDQVSPKNFKVKMIMKTSVLLSWEFPDNYNSPTPYKIQYNGLTLDVDGRTTKKLITHLKPHTFYNFVLTNRGSSLGGLQQTVTAWTAFNLLNGKPSVAPKPDADGFIMVYLPDGQSPVPVQSYFIVMVPLRKSRGGQFLTPLGSPEDMDLEELIQDISRLQRRSLRHSRQLEVPRPYIAARFSVLPPTFHPGDQKQYGGFDNRGLEPGHRYVLFVLAVLQKSEPTFAASPFSDPFQLDNPDPQPIVDGEEG

SEQ ID NO: 1821 - protein, 722 aa, synthetic construct
  REGION 1..722: note = PTPRT (O14522) ECD
QSAAGGCSFDEHYSNCGYSVALGTNGFTWEQINTWEKPMLDQAVPTGSFMMVNSSGRASGQKAHLLLPTLKENDTHCIDFHYYFSSRDRSSPGALNVYVKVNGGPQGNPVWNVSGVVTEGWVKAELAISTFWPHFYQVIFESVSLKGHPGYIAVDEVRVLAHPCRKAPHFLRLQNVEVNVGQNATFQCIAGGKWSQHDKLWLQQWNGRDTALMVTRVVNHRRFSATVSVADTAQRSVSKYRCVIRSDGGSGVSNYAELIVKEPPTPIAPPELLAVGATYLWIKPNANSIIGDGPIILKEVEYRTTTGTWAETHIVDSPNYKLWHLDPDVEYEIRVLLTRPGEGGTGPPGPPLTTRTKCADPVHGPQNVEIVDIRARQLTLQWEPFGYAVTRCHSYNLTVQYQYVFNQQQYEAEEVIQTSSHYTLRGLRPFMTIRLRLLLSNPEGRMESEELVVQTEEDVPGAVPLESIQGGPFEEKIYIQWKPPNETNGVITLYEINYKAVGSLDPSADLSSQRGKVFKLRNETHHLFVGLYPGTTYSFTIKASTAKGFGPPVTTRIATKISAPSMPEYDTDTPLNETDTTITVMLKPAQSRGAPVSVYQLVVKEERLQKSRRAADIIECFSVPVSYRNASSLDSLHYFAAELKPANLPVTQPFTVGDNKTYNGYWNPPLSPLKSYSIYFQALSKANGETKINCVRLATKGASTQNSNTVEPEKQVDNTVKM

SEQ ID NO: 1822 - protein, 731 aa, synthetic construct
  REGION 1..731: note = PTPRU (Q92729) ECD
ETETPAAGCTFEEASDPAVPCEYSQAQYDDFQWEQVRIHPGTRAPADLPHGSYLMVNTSQHAPGQRAHVIFQSLSENDTHCVQFSYFLYSRDGHSPGTLGVYVRVNGGPLGSAVWNMTGSHGRQWHQAELAVSTFWPNEYQVLFEALISPDRRGYMGLDDILLLSYPCAKAPHFSRLGDVEVNAGQNASFQCMAAGRAAEAERFLLQRQSGALVPAAGVRHISHRRFLATFPLAAVSRAEQDLYRCVSQAPRGAGVSNFAELIVKEPPTPIAPPQLLRAGPTYLIIQLNTNSIIGDGPIVRKEIEYRMARGPWAEVHAVSLQTYKLWHLDPDTEYEISVLLTRPGDGGTGRPGPPLISRTKCAEPMRAPKGLAFAEIQARQLTLQWEPLGYNVTRCHTYTVSLCYHYTLGSSHNQTIRECVKTEQGVSRYTIKNLLPYRNVHVRLVLTNPEGRKEGKEVTFQTDEDVPSGIAAESLTFTPLEDMIFLKWEEPQEPNGLITQYEISYQSIESSDPAVNVPGPRRTISKLRNETYHVFSNLHPGTTYLFSVRARTGKGFGQAALTEITTNISAPSFDYADMPSPLGESENTITVLLRPAQGRGAPISVYQVIVEEERARRLRREPGGQDCFPVPLTFEAALARGLVHYFGAELAASSLPEAMPFTVGDNQTYRGFWNPPLEPRKAYLIYFQAASHLKGETRLNCIRIARKAACKESKRPLEVSQRSEEMGLIL

SEQ ID NO: 1823 - protein, 1612 aa, synthetic construct
  REGION 1..1612: note = PTPRZ1 (P23471) ECD
YYRQQRKLVEEIGWSYTGALNQKNWGKKYPTCNSPKQSPINIDEDLTQVNVNLKKLKFQGWDKTSLENTFIHNTGKTVEINLTNDYRVSGGVSEMVFKASKITFHWGKCNMSSDGSEHSLEGQKFPLEMQIYCFDADRFSSFEEAVKGKGKLRALSILFEVGTEENLDFKAIIDGVESVSRFGKQAALDPFILLNLLPNSTDKYYIYNGSLTSPPCTDTVDWIVFKDTVSISESQLAVFCEVLTMQQSGYVMLMDYLQNNFREQQYKFSRQVFSSYTGKEEIHEAVCSSEPENVQADPENYTSLLVTWERPRVVYDTMIEKFAVLYQQLDGEDQTKHEFLTDGYQDLGAILNNLLPNMSYVLQIVAICTNGLYGKYSDQLIVDMPTDNPELDLFPELIGTEEIIKEEEEGKDIEEGAIVNPGRDSATNQIRKKEPQISTTTHYNRIGTKYNEAKTNRSPTRGSEFSGKGDVPNTSLNSTSQPVTKLATEKDISLTSQTVTELPPHTVEGTSASLNDGSKTVLRSPHMNLSGTAESLNTVSITEYEEESLLTSFKLDTGAEDSSGSSPATSAIPFISENISQGYIFSSENPETITYDVLIPESARNASEDSTSSGSEESLKDPSMEGNVWFPSSTDITAQPDVGSGRESFLQTNYTEIRVDESEKTTKSFSAGPVMSQGPSVTDLEMPHYSTFAYFPTEVTPHAFTPSSRQQDLVSTVNVVYSQTTQPVYNGETPLQPSYSSEVFPLVTPLLLDNQILNTTPAASSSDSALHATPVFPSVDVSFESILSSYDGAPLLPFSSASFSSELFRHLHTVSQILPQVTSATESDKVPLHASLPVAGGDLLLEPSLAQYSDVLSTTHAASETLEFGSESGVLYKTLMFSQVEPPSSDAMMHARSSGPEPSYALSDNEGSQHIFTVSYSSAIPVHDSVGVTYQGSLFSGPSHIPIPKSSLITPTASLLQPTHALSGDGEWSGASSDSEFLLPDTDGLTALNISSPVSVAEFTYTTSVFGDDNKALSKSEIIYGNETELQIPSFNEMVYPSESTVMPNMYDNVNKLNASLQETSVSISSTKGMFPGSLAHTTTKVFDHEISQVPENNFSVQPTHTVSQASGDTSLKPVLSANSEPASSDPASSEMLSPSTQLLFYETSASFSTEVLLQPSFQASDVDTLLKTVLPAVPSDPILVETPKVDKISSTMLHLIVSNSASSENMLHSTSVPVFDVSPTSHMHSASLQGLTISYASEKYEPVLLKSESSHQVVPSLYSNDELFQTANLEINQAHPPKGRHVFATPVLSIDEPLNTLINKLIHSDEILTSTKSSVTGKVFAGIPTVASDTFVSTDHSVPIGNGHVAITAVSPHRDGSVTSTKLLFPSKATSELSHSAKSDAGLVGGGEDGDTDDDGDDDDDDRGSDGLSIHKCMSCSSYRESQEKVMNDSDTHENSLMDQNNPISYSLSENSEEDNRVTSVSSDSQTGMDRSPGKSPSANGLSQKHNDGKEENDIQTGSALLPLSPESKAWAVLTSDEESGSGQGTSDSLNENETSTDFSFADTNEKDADGILAAGDSEITPGFPQSPTSSVTSENSEVFHVSEAEASNSSHESRIGLAEGLESEKK

SEQ ID NO: 1824 - protein, 64 aa, synthetic construct
  REGION 1..64: note = PTTG1IP (P53801) ECD
QEPPGAACSQNTNKTCEECLKNVSCLWCNTNKACLDYPVTSVLPPASLCKLSSARWGVCWVNFE

SEQ ID NO: 1825 - protein, 323 aa, synthetic construct
  REGION 1..323: note = PVR (P15151) ECD
WPPPGTGDVVVQAPTQVPGFLGDSVTLPCYLQVPNMEVTHVSQLTWARHGESGSMAVFHQTQGPSYSESKRLEFVAARLGAELRNASLRMFGLRVEDEGNYTCLFVTFPQGSRSVDIWLRVLAKPQNTAEVQKVQLTGEPVPMARCVSTGGRPPAQITWHSDLGGMPNTSQVPGFLSGTVTVTSLWILVPSSQVDGKNVTCKVEHESFEKPQLLTVNLTVYYPPEVSISGYDNNWYLGQNEATLTCDARSNPEPTGYNWSTTMGPLPPFAVAQGAQLLIRPVDKPINTTLICNVTNALGARQAELTVQVKEGPPSEHSGISRN

SEQ ID NO: 1826 - protein, 325 aa, synthetic construct
  REGION 1..325: note = PVRL1 (Q15223) ECD
QVVQVNDSMYGFIGTDVVLHCSFANPLPSVKITQVTWQKSTNGSKQNVAIYNPSMGVSVLAPYRERVEFLRPSFTDGTIRLSRLELEDEGVYICEFATFPTGNRESQLNLTVMAKPTNWIEGTQAVLRAKKGQDDKVLVATCTSANGKPPSVVSWETRLKGEAEYQEIRNPNGTVTVISRYRLVPSREAHQQSLACIVNYHMDRFKESLTLNVQYEPEVTIEGFDGNWYLQRMDVKLTCKADANPPATEYHWTTLNGSLPKGVEAQNRTLFFKGPINYSLAGTYICEATNPIGTRSGQVEVNITEFPYTPSPPEHGRRAGPVPTA

SEQ ID NO: 1827 - protein, 329 aa, synthetic construct
  REGION 1..329: note = PVRL2 (Q92692) ECD
QDVRVQVLPEVRGQLGGTVELPCHLLPPVPGLYISLVTWQRPDAPANHQNVAAFHPKMGPSFPSPKPGSERLSFVSAKQSTGQDTEAELQDATLALHGLTVEDEGNYTCEFATFPKGSVRGMTWLRVIAKPKNQAEAQKVTFSQDPTTVALCISKEGRPPARISWLSSLDWEAKETQVSGTLAGTVTVTSRFTLVPSGRADGVTVTCKVEHESFEEPALIPVTLSVRYPPEVSISGYDDNWYLGRTDATLSCDVRSNPEPTGYDWSTTSGTFPTSAVAQGSQLVIHAVDSLFNTTFVCTVTNAVGMGRAEQVIFVRETPNTAGAGATGG

SEQ ID NO: 1828 - protein, 347 aa, synthetic construct
  REGION 1..347: note = PVRL3 (Q9NQS3) ECD
GPIIVEPHVTAVWGKNVSLKCLIEVNETITQISWEKIHGKSSQTVAVHHPQYGFSVQGEYQGRVLFKNYSLNDATITLHNIGFSDSGKYICKAVTFPLGNAQSSTTVTVLVEPTVSLIKGPDSLIDGGNETVAAICIAATGKPVAHIDWEGDLGEMESTTTSFPNETATIISQYKLFPTRFARGRRITCVVKHPALEKDIRYSFILDIQYAPEVSVTGYDGNWFVGRKGVNLKCNADANPPPFKSVWSRLDGQWPDGLLASDNTLHFVHPLTFNYSGVYICKVTNSLGQRSDQKVIYISDPPTTTTLQPTIQWHPSTADIEDLATEPKKLPFPLSTLATIKDDTIAT

SEQ ID NO: 1829 - protein, 318 aa, synthetic construct
  REGION 1..318: note = PVRL4 (Q96NY8) ECD
GELETSDVVTVVLGQDAKLPCFYRGDSGEQVGQVAWARVDAGEGAQELALLHSKYGLHVSPAYEGRVEQPPPPRNPLDGSVLLRNAVQADEGEYECRVSTFPAGSFQARLRLRVLVPPLPSLNPGPALEEGQGLTLAASCTAEGSPAPSVTWDTEVKGTTSSRSFKHSRSAAVTSEFHLVPSRSMNGQPLTCVVSHPGLLQDQRITHILHVSFLAEASVRGLEDQNLWHIGREGAMLKCLSEGQPPPSYNWTRLDGPLPSGVRVDGDTLGFPPLTTEHSGIYVCHVSNEFSSRDSQVTVDVLDPQEDSGKQVDLVSAS

SEQ ID NO: 1830 - protein, 680 aa, synthetic construct
  REGION 1..680: note = QSOX1 (O00391) ECD
APRSALYSPSDPLTLLQADTVRGAVLGSRSAWAVEFFASWCGHCIAFAPTWKALAEDVKAWRPALYLAALDCAEETNSAVCRDFNIPGFPTVRFFKAFTKNGSGAVFPVAGADVQTLRERLIDALESHHDTWPPACPPLEPAKLEEIDGFFARNNEEYLALIFEKGGSYLGREVALDLSQHKGVAVRRVLNTEANVVRKFGVTDFPSCYLLFRNGSVSRVPVLMESRSFYTAYLQRLSGLTREAAQTTVAPTTANKIAPTVWKLADRSKIYMADLESALHYILRIEVGRFPVLEGQRLVALKKFVAVLAKYFPGRPLVQNFLHSVNEWLKRQKRNKIPYSFFKTALDDRKEGAVLAKKVNWIGCQGSEPHFRGFPCSLWVLFHFLTVQAARQNVDHSQEAAKAKEVLPAIRGYVHYFFGCRDCASHFEQMAAASMHRVGSPNAAVLWLWSSHNRVNARLAGAPSEDPQFPKVQWPPRELCSACHNERLDVPVWDVEATLNFLKAHFSPSNIILDFPAAGSAARRDVQNVAAAPELAMGALELESRNSTLDPGKPEMMKSPTNTTPHVPAEGPEASRPPKLHPGLRAAPGQEPPEHMAELQRNEQEQPLGQWHLSKRDTGAALLAESRAEKNRLWGPLEVRRVGRSSKQLVDIPEGQLEARAGRGRGQWLQVLGGGFSYLD

SEQ ID NO: 1831 - protein, 640 aa, synthetic construct
  REGION 1..640: note = QSOX2 (Q6ZRP7) ECD
ARRSPPPRAARLPRLLVLLAAAAVGPGAGGAARLYRAGEDAVWVLDSGSVRGATANSSAAWLVQFYSSWCGHCIGYAPTWRALAGDVRDWASAIRVAALDCMEEKNQAVCHDYDIHFYPTFRYFKAFTKEFTTGENFKGPDRELRTVRQTMIDFLQNHTEGSRPPACPRLDPIQPSDVLSLLDNRGSHYVAIVFESNSSYLGREVILDLIPYESIVVTRALDGDKAFLEKLGVSSVPSCYLIYPNGSHGLINVVKPLRAFFSSYLKSLPDVRKKSLPLPEKPHKEENSEIVVWREFDKSKLYTVDLESGLHYLLRVELAAHKSLAGAELKTLKDFVTVLAKLFPGRPPVKKLLEMLQEWLASLPLDRIPYNAVLDLVNNKMRISGIFLTNHIKWVGCQGSRSELRGYPCSLWKLFHTLTVEASTHPDALVGTGFEDDPQAVLQTMRRYVHTFFGCKECGEHFEEMAKESMDSVKTPDQAILWLWKKHNMVNGRLAGHLSEDPRFPKLQWPTPDLCPACHEEIKGLASWDEGHVLTFLKQHYGRDNLLDTYSADQGDSSEGGTLARGEEEEKRLTPPEVSHGDRDTQSVRPPGALGPRPALPESLHHSLDGKLQSLDGPGAHKEVGGAAPFLGVDFSSLDM

SEQ ID NO: 1832 - protein, 195 aa, synthetic construct
  REGION 1..195: note = RAET1E (Q8TD07) ECD
HSLCFNFTIKSLSRPGQPWCEAQVFLNKNLFLQYNSDNNMVKPLGLLGKKVYATSTWGELTQTLGEVGRDLRMLLCDIKPQIKTSDPSTLQVEMFCQREAERCTGASWQFATNGEKSLLFDAMNMTWTVINHEASKIKETWKKDRGLEKYFRKLSKGDCDHWLREFLGHWEAMPEPTVSPVNASDIHWSSSSLPD

SEQ ID NO: 1833 - protein, 198 aa, synthetic construct
  REGION 1..198: note = RAET1G (Q6H3X3) ECD
GLADPHSLCYDITVIPKFRPGPRWCAVQGQVDEKTFLHYDCGSKTVTPVSPLGKKLNVTTAWKAQNPVLREVVDILTEQLLDIQLENYIPKEPLTLQARMSCEQKAEGHGSGSWQLSFDGQIFLLFDSENRMWTTVHPGARKMKEKWENDKDMTMSFHYISMGDCTGWLEDFLMGMDSTLEPSAGAPPTMSSGTAQPR

SEQ ID NO: 1834 - protein, 103 aa, synthetic construct
  REGION 1..103: note = RAMP2 (O60895) ECD
QPLPTTGTPGSEGGTVKNYETAVQFCWNHYKDQMDPIEKDWCDWAMISRPYSTLRDCLEHFAELFDLGFPNPLAERIIFETHQIHFANCSLVQPTFSDPPEDV

SEQ ID NO: 1835 - protein, 95 aa, synthetic construct
  REGION 1..95: note = RAMP3 (O60896) ECD
RAGGCNETGMLERLPLCGKAFADMMGKVDVWKWCNLSEFIVYYESFTNCTEMEANVVGCYWPNPLAQGFITGIHRQFFSNCTVDRVHLEDPPDEV

SEQ ID NO: 1836 - protein, 34 aa, synthetic construct
  REGION 1..34: note = RELL1 (Q8IUW5) ECD
SPLVAPDNGSSRTLHSRTETTPSPSNDTGNGHPE

SEQ ID NO: 1837 - protein, 137 aa, synthetic construct
  REGION 1..137: note = RELT (Q969Z4) ECD
STTLWQCPPGEEPDLDPGQGTLCRPCPPGTFSAAWGSSPCQPHARCSLWRRLEAQVGMATRDTLCGDCWPGWFGPWGVPRVPCQPCSWAPLGTHGCDEWGRRARRGVEVAAGASSGGETRQPGNGTRAGGPEETAAQ

SEQ ID NO: 1838 - protein, 607 aa, synthetic construct
  REGION 1..607: note = RET (P07949) ECD
LYFSRDAYWEKLYVDQAAGTPLLYVHALRDAPEEVPSFRLGQHLYGTYRTRLHENNWICIQEDTGLLYLNRSLDHSSWEKLSVRNRGFPLLTVYLKVFLSPTSLREGECQWPGCARVYFSFFNTSFPACSSLKPRELCFPETRPSFRIRENRPPGTFHQFRLLPVQFLCPNISVAYRLLEGEGLPFRCAPDSLEVSTRWALDREQREKYELVAVCTVHAGAREEVVMVPFPVTVYDEDDSAPTFPAGVDTASAVVEFKRKEDTVVATLRVFDADVVPASGELVRRYTSTLLPGDTWAQQTFRVEHWPNETSVQANGSFVRATVHDYRLVLNRNLSISENRTMQLAVLVNDSDFQGPGAGVLLLHFNVSVLPVSLHLPSTYSLSVSRRARRFAQIGKVCVENCQAFSGINVQYKLHSSGANCSTLGVVTSAEDTSGILFVNDTKALRRPKCAELHYMVVATDQQTSRQAQAQLLVTVEGSYVAEEAGCPLSCAVSKRRLECEECGGLGSPTGRCEWRQGDGKGITRNFSTCSPSTKTCPDGHCDVVETQDINICPQDCLRGSIVGGHEPGEPRGIKAGYGTCNCFPEEEKCFCEPEDIQDPLCDELCR

SEQ ID NO: 1839 - protein, 169 aa, synthetic construct
  REGION 1..169: note = RNF128 (Q8TEB7) ECD
AEAVWTAYLNVSWRVPHTGVNRTVWELSEEGVYGQDSPLEPVAGVLVPPDGPGALNACNPHTNFTVPTVWGSTVQVSWLALIQRGGGCTFADKIHLAYERGASGAVIFNFPGTRNEVIPMSHPGAVDIVAIMIGNLKGTKILQSIQRGIQVTMVIEVGKKHGPWVNHYS

SEQ ID NO: 1840 - protein, 148 aa, synthetic construct
  REGION 1..148: note = RNF13 (O43567) ECD
DILAYNFENASQTFDDLPARFGYRLPAEGLKGFLINSKPENACEPIVPPPVKDNSSGTFIVLIRRLDCNFDIKVLNAQRAGYKAAIVHNVDSDDLISMGSNDIEVLKKIDIPSVFIGESSANSLKDEFTYEKGGHLILVPEFSLPLEY

SEQ ID NO: 1841 - protein, 167 aa, synthetic construct
  REGION 1..167: note = RNF130 (Q86XS8) ECD
DNASQEYYTALINVTVQEPGRGAPLTFRIDRGRYGLDSPKAEVRGQVLAPLPLHGVADHLGCDPQTRFFVPPNIKQWIALLQRGNCTFKEKISRAAFHNAVAVVIYNNKSKEEPVTMTHPGTGDIIAVMITELRGKDILSYLEKNISVQMTIAVGTRMPPKNFSRGS

SEQ ID NO: 1842 - protein, 168 aa, synthetic construct
  REGION 1..168: note = RNF149 (Q8NC42) ECD
RALEWFSAVVNIEYVDPQTNLTVWSVSESGRFGDSSPKEGAHGLVGVPWAPGGDLEGCAPDTRFFVPEPGGRGAAPWVALVARGGCTFKDKVLVAARRNASAVVLYNEERYGNITLPMSHAGTGNIVVIMISYPKGREILELVQKGIPVTMTIGVGTRHVQEFISGQS

SEQ ID NO: 1843 - protein, 174 aa, synthetic construct
  REGION 1..174: note = RNF150 (Q9ULK6) ECD
EKEEWYTAFVNITYAEPAPDPGAGAAGGGGAELHTEKTECGRYGEHSPKQDARGEVVMASSAHDRLACDPNTKFAAPTRGKNWIALIPKGNCTYRDKIRNAFLQNASAVVIFNVGSNTNETITMPHAGVEDIVAIMIPEPKGKEIVSLLERNITVTMYITIGTRNLQKYVSRTS

SEQ ID NO: 1844 - protein, 149 aa, synthetic construct
  REGION 1..149: note = RNF167 (Q9H6Y7) ECD
LIRATSDHNASMDFADLPALFGATLSQEGLQGFLVEAHPDNACSPIAPPPPAPVNGSVFIALLRRFDCNFDLKVLNAQKAGYGAAVVHNVNSNELLNMVWNSEEIQQQIWIPSVFIGERSSEYLRALFVYEKGARVLLVPDNTFPLGYY

SEQ ID NO: 1845 - protein, 174 aa, synthetic construct
  REGION 1..174: note = RNF43 (Q68DV7) ECD
GFGRTGLVLAAAVESERSAEQKAIIRVIPLKMDPTGKLNLTLEGVFAGVAEITPAEGKLMQSHPLYLCNASDDDNLEPGFISIVKLESPRRAPRPCLSLASKARMAGERGASAVLFDITEDRAAAEQLQQPLGLTWPVVLIWGNDAEKLMEFVYKNQKAHVRIELKEPPAWPDY

SEQ ID NO: 1846 - protein, 872 aa, synthetic construct
  REGION 1..872: note = ROBO1 (Q9Y6N7) ECD
QLIPDPEDVERGNDHGTPIPTSDNDDNSLGYTGSRLRQEDFPPRIVEHPSDLIVSKGEPATLNCKAEGRPTPTIEWYKGGERVETDKDDPRSHRMLLPSGSLFFLRIVHGRKSRPDEGVYVCVARNYLGEAVSHNASLEVAILRDDFRQNPSDVMVAVGEPAVMECQPPRGHPEPTISWKKDGSPLDDKDERITIRGGKLMITYTRKSDAGKYVCVGTNMVGERESEVAELTVLERPSFVKRPSNLAVTVDDSAEFKCEARGDPVPTVRWRKDDGELPKSRYEIRDDHTLKIRKVTAGDMGSYTCVAENMVGKAEASATLTVQEPPHFVVKPRDQVVALGRTVTFQCEATGNPQPAIFWRREGSQNLLFSYQPPQSSSRFSVSQTGDLTITNVQRSDVGYYICQTLNVAGSIITKAYLEVTDVIADRPPPVIRQGPVNQTVAVDGTFVLSCVATGSPVPTILWRKDGVLVSTQDSRIKQLENGVLQIRYAKLGDTGRYTCIASTPSGEATWSAYIEVQEFGVPVQPPRPTDPNLIPSAPSKPEVTDVSRNTVTLSWQPNLNSGATPTSYIIEAFSHASGSSWQTVAENVKTETSAIKGLKPNAIYLFLVRAANAYGISDPSQISDPVKTQDVLPTSQGVDHKQVQRELGNAVLHLHNPTVLSSSSIEVHWTVDQQSQYIQGYKILYRPSGANHGESDWLVFEVRTPAKNSVVIPDLRKGVNYEIKARPFFNEFQGADSEIKFAKTLEEAPSAPPQGVTVSKNDGNGTAILVSWQPPPEDTQNGMVQEYKVWCLGNETRYHINKTVDGSTFSVVIPFLVPGIRYSVEVAASTGAGSGVKSEPQFIQLDAHGNPVSPEDQVSLAQQISDVVKQP

SEQ ID NO: 1847 - protein, 838 aa, synthetic construct
  REGION 1..838: note = ROBO2 (Q9HCK4) ECD
SRLRQEDFPPRIVEHPSDVIVSKGEPTTLNCKAEGRPTPTIEWYKDGERVETDKDDPRSHRMLLPSGSLFFLRIVHGRRSKPDEGSYVCVARNYLGEAVSRNASLEVALLRDDFRQNPTDVVVAAGEPAILECQPPRGHPEPTIYWKKDKVRIDDKEERISIRGGKLMISNTRKSDAGMYTCVGTNMVGERDSDPAELTVFERPTFLRRPINQVVLEEEAVEFRCQVQGDPQPTVRWKKDDADLPRGRYDIKDDYTLRIKKTMSTDEGTYMCIAENRVGKMEASATLTVRAPPQFVVRPRDQIVAQGRTVTFPCETKGNPQPAVFWQKEGSQNLLFPNQPQQPNSRCSVSPTGDLTITNIQRSDAGYYICQALTVAGSILAKAQLEVTDVLTDRPPPIILQGPANQTLAVDGTALLKCKATGDPLPVISWLKEGFTFPGRDPRATIQEQGTLQIKNLRISDTGTYTCVATSSSGETSWSAVLDVTESGATISKNYDLSDLPGPPSKPQVTDVTKNSVTLSWQPGTPGTLPASAYIIEAFSQSVSNSWQTVANHVKTTLYTVRGLRPNTIYLFMVRAINPQGLSDPSPMSDPVRTQDISPPAQGVDHRQVQKELGDVLVRLHNPVVLTPTTVQVTWTVDRQPQFIQGYRVMYRQTSGLQATSSWQNLDAKVPTERSAVLVNLKKGVTYEIKVRPYFNEFQGMDSESKTVRTTEEAPSAPPQSVTVLTVGSYNSTSISVSWDPPPPDHQNGIIQEYKIWCLGNETRFHINKTVDAAIRSVIIGGLFPGIQYRVEVAASTSAGVGVKSEPQPIIIGRRNEVVITENNNSITEQITDVVKQP

SEQ ID NO: 1848 - protein, 871 aa, synthetic construct
  REGION 1..871: note = ROBO3 (Q96MS0) ECD
GDISNSSELLLGFNSSLAALNHTLLPPGDPSLNGSRVGPEDAMPRIVEQPPDLLVSRGEPATLPCRAEGRPRPNIEWYKNGARVATVREDPRAHRLLLPSGALFFPRIVHGRRARPDEGVYTCVARNYLGAAASRNASLEVAVLRDDFRQSPGNVVVAVGEPAVLECVPPRGHPEPSVSWRKDGARLKEEEGRITIRGGKLMMSHTLKSDAGMYVCVASNMAGERESAAAEVMVLERPSFLRRPVNQVVLADAPVTFLCEVKGDPPPRLRWRKEDGELPTGRYEIRSDHSLWIGHVSAEDEGTYTCVAENSVGRAEASGSLSVHVPPQLVTQPQDQMAAPGESVAFQCETKGNPPPAIFWQKEGSQVLLFPSQSLQPTGRFSVSPRGQLNITAVQRGDAGYYVCQAVSVAGSILAKALLEIKGASLDGLPPVILQGPANQTLVLGSSVWLPCRVTGNPQPSVRWKKDGQWLQGDDLQFKTMANGTLYIANVQEMDMGFYSCVAKSSTGEATWSGWLKMREDWGVSPDPPTEPSSPPGAPSQPVVTEITKNSITLTWKPNPQTGAAVTSYVIEAFSPAAGNTWRTVADGVQLETHTVSGLQPNTIYLFLVRAVGAWGLSEPSPVSEPVRTQDSSPSRPVEDPWRGQQGLAEVAVRLQEPIVLGPRTLQVSWTVDGPVQLVQGFRVSWRVAGPEGGSWTMLDLQSPSQQSTVLRGLPPGTQIQIKVQAQGQEGLGAESLSVTRSIPEEAPSGPPQGVAVALGGDGNSSITVSWEPPLPSQQNGVITEYQIWCLGNESRFHLNRSAAGWARSAMLRGLVPGLLYRTLVAAATSAGVGVPSAPVLVQLPSPPDLEPGLEVGAGLAVRLARVLREP

SEQ ID NO: 1849 - protein, 377 aa, synthetic construct
  REGION 1..377: note = ROR1 (Q01973) ECD
QETELSVSAELVPTSSWNISSELNKDSYLTLDEPMNNITTSLGQTAELHCKVSGNPPPTIRWFKNDAPVVQEPRRLSFRSTIYGSRLRIRNLDTTDTGYFQCVATNGKEVVSSTGVLFVKFGPPPTASPGYSDEYEEDGFCQPYRGIACARFIGNRTVYMESLHMQGEIENQITAAFTMIGTSSHLSDKCSQFAIPSLCHYAFPYCDETSSVPKPRDLCRDECEILENVLCQTEYIFARSNPMILMRLKLPNCEDLPQPESPEAANCIRIGIPMADPINKNHKCYNSTGVDYRGTVSVTKSGRQCQPWNSQYPHTHTFTALRFPELNGGHSYCRNPGNQKEAPWCFTLDENFKSDLCDIPACDSKDSKEKNKMEILY

SEQ ID NO: 1850 - protein, 370 aa, synthetic construct
  REGION 1..370: note = ROR2 (Q01974) ECD
EVEVLDPNDPLGPLDGQDGPIPTLKGYFLNFLEPVNNITIVQGQTAILHCKVAGNPPPNVRWLKNDAPVVQEPRRIIIRKTEYGSRLRIQDLDTTDTGYYQCVATNGMKTITATGVLFVRLGPTHSPNHNFQDDYHEDGFCQPYRGIACARFIGNRTIYVDSLQMQGEIENRITAAFTMIGTSTHLSDQCSQFAIPSFCHFVFPLCDARSRTPKPRELCRDECEVLESDLCRQEYTIARSNPLILMRLQLPKCEALPMPESPDAANCMRIGIPAERLGRYHQCYNGSGMDYRGTASTTKSGHQCQPWALQHPHSHHLSSTDFPELGGGHAYCRNPGGQMEGPWCFTQNKNVRMELCDVPSCSPRDSSKMG

SEQ ID NO: 1851 - protein, 1832 aa, synthetic construct
  REGION 1..1832: note = ROS1 (P08922) ECD
TVLNSCLKSCVTNLGQQLDLGTPHNLSEPCIQGCHFWNSVDQKNCALKCRESCEVGCSSAEGAYEEEVLENADLPTAPFASSIGSHNMTLRWKSANFSGVKYIIQWKYAQLLGSWTYTKTVSRPSYVVKPLHPFTEYIFRVVWIFTAQLQLYSPPSPSYRTHPHGVPETAPLIRNIESSSPDTVEVSWDPPQFPGGPILGYNLRLISKNQKLDAGTQRTSFQFYSTLPNTIYRFSIAAVNEVGEGPEAESSITTSSSAVQQEEQWLFLSRKTSLRKRSLKHLVDEAHCLRLDAIYHNITGISVDVHQQIVYFSEGTLIWAKKAANMSDVSDLRIFYRGSGLISSISIDWLYQRMYFIMDELVCVCDLENCSNIEEITPPSISAPQKIVADSYNGYVFYLLRDGIYRADLPVPSGRCAEAVRIVESCTLKDFAIKPQAKRIIYFNDTAQVFMSTFLDGSASHLILPRIPFADVKSFACENNDFLVTDGKVIFQQDALSFNEFIVGCDLSHIEEFGFGNLVIFGSSSQLHPLPGRPQELSVLFGSHQALVQWKPPALAIGANVILISDIIELFELGPSAWQNWTYEVKVSTQDPPEVTHIFLNISGTMLNVPELQSAMKYKVSVRASSPKRPGPWSEPSVGTTLVPASEPPFIMAVKEDGLWSKPLNSFGPGEFLSSDIGNVSDMDWYNNSLYYSDTKGDVFVWLLNGTDISENYHLPSIAGAGALAFEWLGHFLYWAGKTYVIQRQSVLTGHTDIVTHVKLLVNDMVVDSVGGYLYWTTLYSVESTRLNGESSLVLQTQPWFSGKKVIALTLDLSDGLLYWLVQDSQCIHLYTAVLRGQSTGDTTITEFAAWSTSEISQNALMYYSGRLFWINGFRIITTQEIGQKTSVSVLEPARFNQFTIIQTSLKPLPGNFSFTPKVIPDSVQESSFRIEGNASSFQILWNGPPAVDWGVVFYSVEFSAHSKFLASEQHSLPVFTVEGLEPYALFNLSVTPYTYWGKGPKTSLSLRAPETVPSAPENPRIFILPSGKCCNKNEVVVEFRWNKPKHENGVLTKFEIFYNISNQSITNKTCEDWIAVNVTPSVMSFQLEGMSPRCFIAFQVRAFTSKGPGPYADVVKSTTSEINPFPHLITLLGNKIVFLDMDQNQVVWTFSAERVISAVCYTADNEMGYYAEGDSLFLLHLHNRSSSELFQDSLVFDITVITIDWISRHLYFALKESQNGMQVFDVDLEHKVKYPREVKIHNRNSTIISFSVYPLLSRLYWTEVSNFGYQMFYYSIISHTLHRILQPTATNQQNKRNQCSCNVTEFELSGAMAIDTSNLEKPLIYFAKAQEIWAMDLEGCQCWRVITVPAMLAGKTLVSLTVDGDLIYWIITAKDSTQIYQAKKGNGAIVSQVKALRSRHILAYSSVMQPFPDKAFLSLASDTVEPTILNATNTSLTIRLPLAKTNLTWYGITSPTPTYLVYYAEVNDRKNSSDLKYRILEFQDSIALIEDLQPFSTYMIQIAVKNYYSDPLEHLPPGKEIWGKTKNGVPEAVQLINTTVRSDTSLIISWRESHKPNGPKESVRYQLAISHLALIPETPLRQSEFPNGRLTLLVTRLSGGNIYVLKVLACHSEEMWCTESHPVTVEMFNTPEKPYSLVPENTSLQFNWKAPLNVNLIRFWVELQKWKYNEFYHVKTSCSQGPAYVCNITNLQPYTSYNVRVVVVYKTGENSTSLPESFKTKAGVPNKPGIPKLLEGSKNSIQWEKAEDNGCRITYYILEIRKSTSNNLQNQNLRWKMTFNGSCSSVCTWKSKNLKGIFQFRVVAANNLGFGEYSGISENIILVGDDFWIPE

SEQ ID NO: 1852 - protein, 415 aa, synthetic construct
  REGION 1..415: note = RPN1 (P04843) ECD
ASSEAPPLINEDVKRTVDLSSHLAKVTAEVVLAHLGGGSTSRATSFLLALEPELEARLAHLGVQVKGEDEEENNLEVRETKIKGKSGRFFTVKLPVALDPGAKISVIVETVYTHVLHPYPTQITQSEKQFVVFEGNHYFYSPYPTKTQTMRVKLASRNVESYTKLGNPTRSEDLLDYGPFRDVPAYSQDTFKVHYENNSPFLTITSMTRVIEVSHWGNIAVEENVDLKHTGAVLKGPFSRYDYQRQPDSGISSIRSFKTILPAAAQDVYYRDEIGNVSTSHLLILDDSVEMEIRPRFPLFGGWKTHYIVGYNLPSYEYLYNLGDQYALKMRFVDHVFDEQVIDSLTVKIILPEGAKNIEIDSPYEISRAPDELHYTYLDTFGRPVIVAYKKNLVEQHIQDIVVHYTFNKVLMLQE

SEQ ID NO: 1853 - protein, 202 aa, synthetic construct
  REGION 1..202: note = RYK (P34925) ECD
PPPLLLLLALLPLLPAPGAAAAPAPRPPELQSASAGPSVSLYLSEDEVRRLIGLDAELYYVRNDLISHYALSFSLLVPSETNFLHFTWHAKSKVEYKLGFQVDNVLAMDMPQVNISVQGEVPRTLSVFRVELSCTGKVDSEVMILMQLNLTVNSSKNFTVLNFKRRKMCYKKLEEVKTSALDKNTSRTIYDPVHAAPTTSTR

SEQ ID NO: 1854 - protein, 402 aa, synthetic construct
  REGION 1..402: note = SCARF1 (Q14162) ECD
SELDPKGQHVCVASSPSAELQCCAGWRQKDQECTIPICEGPDACQKDEVCVKPGLCRCKPGFFGAHCSSRCPGQYWGPDCRESCPCHPHGQCEPATGACQCQADRWGARCEFPCACGPHGRCDPATGVCHCEPGWWSSTCRRPCQCNTAAARCEQATGACVCKPGWWGRRCSFRCNCHGSPCEQDSGRCACRPGWWGPECQQQCECVRGRCSAASGECTCPPGFRGARCELPCPAGSHGVQCAHSCGRCKHNEPCSPDTGSCESCEPGWNGTQCQQPCLPGTFGESCEQQCPHCRHGEACEPDTGHCQRCDPGWLGPRCEDPCPTGTFGEDCGSTCPTCVQGSCDTVTGDCVCSAGYWGPSCNASCPAGFHGNNCSVPCECPEGLCHPVSGSCQPGSGSRDT

SEQ ID NO: 1855 - protein, 398 aa, synthetic construct
  REGION 1..398: note = SCARF2 (Q96GP6) ECD
QELNPRGRNVCRAPGSQVPTCCAGWRQQGDECGIAVCEGNSTCSENEVCVRPGECRCRHGYFGANCDTKCPRQFWGPDCKELCSCHPHGQCEDVTGQCTCHARRWGARCEHACQCQHGTCHPRSGACRCEPGWWGAQCASACYCSATSRCDPQTGACLCHAGWWGRSCNNQCACNSSPCEQQSGRCQCRERTFGARCDRYCQCFRGRCHPVDGTCACEPGYRGKYCREPCPAGFYGLGCRRRCGQCKGQQPCTVAEGRCLTCEPGWNGTKCDQPCATGFYGEGCSHRCPPCRDGHACNHVTGKCTRCNAGWIGDRCETKCSNGTYGEDCAFVCADCGSGHCDFQSGRCLCSPGVHGPHCNVTCPPGLHGADCAQACSCHEDTCDPVTGACHLETNQRK

SEQ ID NO: 1856 - protein, 887 aa, synthetic construct
  REGION 1..887: note = SCART1 (Q4G0T1) ECD
VPIGGPGALRLAYRHSTCDGVVLVRHHGAWGYVCNQEWTLAEASVVCRQLGCGPAVGAPKYVPLPGEMAQPWLHNVSCRGNESSLWECSLGSWCQSPCPHAWVVVALCSNGTFRELRLVKGRSPCAGLPEIRNVNGVDRLCVLHVEEAMVFCRELGCGPVLQAPRRDVGVVRKYLACRGTEPTIRSCRLDNNFRSGCDLRLDAEVVCSGHTEARLVGGEHPCAGRLEVTWGTVCDAALDLATAHVVCRELQCGAVVSTPEGARFGRGSGPVWTEAFRCAGNESLLFHCPRGRGSQCGHGHDAGLRCSEFRMVNGSSSCEGRVEFQVQGSWAPLCATHWDIADATVLCHQLNCGNAVAAPGGGHFGDGDAAIWPDAFHCEGTESYLWNCPVSTLGAPACAPGNTASAVCSGLAHALRLREGQSRCDGRVEVSLDGVWGRVLDDAWDLRGAGVVCRQLGCRGAQQAYDAPAPSRGSVQVALSRVRCLGTETRLTQCNVSATLQEPAGTSRDAGVVCSGEVGTASPMARRHGIPGALTLSLHREPQGAAGRGAGALHGGAWGTVCDDAWDLRDAHVVCRQLGCGRALSALGAAHFGAGAGRIWLDELGCQGHESALWQCPSAGWGRHDWRHKEDAGVFCSESVALRLRGGTCCCAGWLDVFYNGTWGAMCSNALKDLSLSIICKQLGCGVWGVGLAGEQALPLCGHRDRLGGQHRVPQAAQLHSVAMPFPPMAPALLRPSRAGLSEDRPQAAGEPLNCSSWLGCPEEGALRVRGGEDRCSGRVELWHAGSWGTVCDDGWDLADAEVVCRQLGCGRAVAALGAAAFGPGSGPVWLDEVGCRGSEASLWGCPAERWGRGDRAHEEDAGVRCWEPGPGPPLPAAPFRTFWVVS

SEQ ID NO: 1857 - protein, 142 aa, synthetic construct
  REGION 1..142: note = SCN1B (Q07699) ECD
GGCVEVDSETEAVYGMTFKILCISCKRRSETNAETFTEWTFRQKGTEEFVKILRYENEVLQLEEDERFEGRVVWNGSRGTKDLQDLSIFITNVTYNHSGDYECHVYRLLFFENYEHNTSVVKKIHIEVVDKANRDMASIVSE

SEQ ID NO: 1858 - protein, 130 aa, synthetic construct
  REGION 1..130: note = SCN2B (O60939) ECD
MEVTVPATLNVLNGSDARLPCTFNSCYTVNHKQFSLNWTYQECNNCSEEMFLQFRMKIINLKLERFQDRVEFSGNPSKYDVSVMLRNVQPEDEGIYNCYIMNPPDRHRGHGKIHLQVLMEEPPERDSTVA

SEQ ID NO: 1859 - protein, 137 aa, synthetic construct
  REGION 1..137: note = SCN3B (Q9NY72) ECD
FPVCVEVPSETEAVQGNPMKLRCISCMKREEVEATTVVEWFYRPEGGKDFLIYEYRNGHQEVESPFQGRLQWNGSKDLQDVSITVLNVTLNDSGLYTCNVSREFEFEAHRPFVKTTRLIPLRVTEEAGEDFTSVVSE

SEQ ID NO: 1860 - protein, 132 aa, synthetic construct
  REGION 1..132: note = SCN4B (Q8IWT1) ECD
LEVSVGKATDIYAVNGTEILLPCTFSSCFGFEDLHFRWTYNSSDAFKILIEGTVKNEKSDPKVTLKDDDRITLVGSTKEKMNNISIVLRDLEFSDTGKYTCHVKNPKENNLQHHATIFLQVVDRLEEVDNTV

SEQ ID NO: 1861 - protein, 232 aa, synthetic construct
  REGION 1..232: note = SDC1 (P18827) ECD
QIVATNLPPEDQDGSGDDSDNFSGSGAGALQDITLSQQTPSTWKDTQLLTAIPTSPEPTGLEATAASTSTLPAGEGPKEGEAVVLPEVEPGLTAREQEATPRPRETTQLPTTHLASTTTATTAQEPATSHPHRDMQPGHHETSTPAGPSQADLHTPHTEDGGPSATERAAEDGASSQLPAAEGSGEQDFTFETSGENTAVVAVEPDRRNQSPVDQGATGASQGLLDRKEVLG

SEQ ID NO: 1862 - protein, 126 aa, synthetic construct
  REGION 1..126: note = SDC2 (P34741) ECD
ESRAELTSDKDMYLDNSSIEEASGVYPIDDDDYASASGSGADEDVESPELTTSRPLPKILLTSAAPKVETTTLNIQNKIPAQTKSPEETDKEKVHLSDSERKMDPAEEDTNVYTEKHSDSLFKRTE

SEQ ID NO: 1863 - protein, 1912 aa, synthetic construct
  REGION 1..1912: note = SDK2 (Q58EX2) ECD
QDDVSPYFKTEPVRTQVHLEGNRLVLTCMAEGSWPLEFKWLHNNRELTKFSLEYRYMITSLDRTHAGFYRCIVRNRMGALLQRQTEVQVAYMGSFEEGEKHQSVSHGEAAVIRAPRIASFPQPQVTWFRDGRKIPPSSRIAITLENTLVILSTVAPDAGRYYVQAVNDKNGDNKTSQPITLTVENVGGPADPIAPTIIIPPKNTSVVAGTSEVTLECVANARPLIKLHIIWKKDGVLLSGGISDHNRRLTIPNPTGSDAGYYECEAVLRSSSVPSVVRGAYLSVLEPPQFVKEPERHITAEMEKVVDIPCQAKGVPPPSITWYKDAAVVEVEKLTRFRQRNDGGLQISGLVPDDTGMFQCFARNAAGEVQTSTYLAVTSIAPNITRGPLDSTVIDGMSVVLACETSGAPRPAITWQKGERILASGSVQLPRFTPLESGSLLISPTHISDAGTYTCLATNSRGVDEASADLVVWARTRITKPPQDQSVIKGTQASMVCGVTHDPRVTIRYIWEKDGATLGTESHPRIRLDRNGSLHISQTWSGDIGTYTCRVISAGGNDSRSAHLRVRQLPHAPEHPVATLSTVERRAINLTWTKPFDGNSPLIRYILEMSENNAPWTVLLASVDPKATSVTVKGLVPARSYQFRLCAVNDVGKGQFSKDTERVSLPEEPPTAPPQNVIASGRTNQSIMIQWQPPPESHQNGILKGYIIRYCLAGLPVGYQFKNITDADVNNLLLEDLIIWTNYEIEVAAYNSAGLGVYSSKVTEWTLQGVPTVPPGNVHAEATNSTTIRFTWNAPSPQFINGINQGYKLIAWEPEQEEEVTMVTARPNFQDSIHVGFVSGLKKFTEYFTSVLCFTTPGDGPRSTPQLVRTHEDVPGPVGHLSFSEILDTSLKVSWQEPGEKNGILTGYRISWEEYNRTNTRVTHYLPNVTLEYRVTGLTALTTYTIEVAAMTSKGQGQVSASTISSGVPPELPGPPTNLGISNIGPRSVTLQFRPGYDGKTSISRWLVEAQVGVVGEGEEWLLIHQLSNEPDARSMEVPDLNPFTCYSFRMRQVNIVGTSPPSQPSRKIQTLQAPPDMAPANVSLRTASETSLWLRWMPLPEMEYNGNPESVGYKIKYSRSDGHGKTLSHVVQDRVERDYTIEDLEEWTEYRVQVQAFNAIGSGPWSQTVVGRTRESVPSSGPTNVSALATTSSSMLVRWSEVPEADRNGLVLGYKVMYKEKDSDTQPRFWLVEGNSSRSAQLTGLGKYVLYEVQVLAFTRIGDGSPSHPPILERTLDDVPGPPMGILFPEVRTTSVRLIWQPPAAPNGIILAYQITHRLNTTTANTATVEVLAPSARQYTATGLKPESVYLFRITAQTRKGWGEAAEALVVTTEKRDRPQPPSRPMVQQEDVRARSVLLSWEPGSDGLSPVRYYTIQTRELPSGRWALHSASVSHNASSFIVDRLKPFTSYKFRVKATNDIGDSEFSEESESLTTLQAAPDEAPTILSVTPHTTTSVLIRWQPPAEDKINGILLGFRIRYRELLYEGLRGFTLRGINNPGATWAELTSMYSMRNLSRPSLTQYELDNLNKHRRYEIRMSVYNAVGEGPSSPPQEVFVGEAVPTAAPRNVVVHGATATQLDVTWEPPPLDSQNGDIQGYKIYFWEAQRGNLTERVKTLFLAENSVKLKNLTGYTAYMVSVAAFNAAGDGPRSTPTQGQTQQAAPSAPSSVKFSELTTTSVNVSWEAPQFPNGILEGYRLVYEPCSPVDGVSKIVTVDVKGNSPLWLKVKDLAEGVTYRFRIRAKTFTYGPEIEANVTTGPGEGAPGPPGVPIIVRYSSAIAIHWSSGDPGKGPITRYVIEARPSDEGLWDILIKDIPKEVSSYTFSMDILKPGVSYDFRVIAVNDYGFGTPSSPSQSVPAQKANPFYEEWWF

SEQ ID NO: 1864 - protein, 117 aa, synthetic construct
  REGION 1..117: note = SECTM1 (Q8WVN6) ECD
QNEGWDSPICTEGVVSVSWGENTVMSCNISNAFSHVNIKLRAHGQESAIFNEVAPGYFSRDGWQLQVQGGVAQLVIKGARDSHAGLYMWHLVGHQRNNRQVTLEVSGAEPQSAPDTG

SEQ ID NO: 1865 - protein, 535 aa, synthetic construct
  REGION 1..535: note = SELE (P16581) ECD
WSYNTSTEAMTYDEASAYCQQRYTHLVAIQNKEEIEYLNSILSYSPSYYWIGIRKVNNVWVWVGTQKPLTEEAKNWAPGEPNNRQKDEDCVEIYIKREKDVGMWNDERCSKKKLALCYTAACTNTSCSGHGECVETINNYTCKCDPGFSGLKCEQIVNCTALESPEHGSLVCSHPLGNFSYNSSCSISCDRGYLPSSMETMQCMSSGEWSAPIPACNVVECDAVTNPANGFVECFQNPGSFPWNTTCTFDCEEGFELMGAQSLQCTSSGNWDNEKPTCKAVTCRAVRQPQNGSVRCSHSPAGEFTFKSSCNFTCEEGFMLQGPAQVECTTQGQWTQQIPVCEAFQCTALSNPERGYMNCLPSASGSFRYGSSCEFSCEQGFVLKGSKRLQCGPTGEWDNEKPTCEAVRCDAVHQPPKGLVRCAHSPIGEFTYKSSCAFSCEEGFELHGSTQLECTSQGQWTEEVPSCQVVKCSSLAVPGKINMSCSGEPVFGTVCKFACPEGWTLNGSAARTCGATGHWSGLLPTCEAPTESNIP

SEQ ID NO: 1866 - protein, 294 aa, synthetic construct
  REGION 1..294: note = SELL (P14151) ECD
WTYHYSEKPMNWQRARRFCRDNYTDLVAIQNKAEIEYLEKTLPFSRSYYWIGIRKIGGIWTWVGTNKSLTEEAENWGDGEPNNKKNKEDCVEIYIKRNKDAGKWNDDACHKLKAALCYTASCQPWSCSGHGECVEIINNYTCNCDVGYYGPQCQFVIQCEPLEAPELGTMDCTHPLGNFSFSSQCAFSCSEGTNLTGIEETTCGPFGNWSSPEPTCQVIQCEPLSAPDLGIMNCSHPLASFSFTSACTFICSEGTELIGKKKTICESSGIWSNPSPICQKLDKSFSMIKEGDYN

SEQ ID NO: 1867 - protein, 730 aa, synthetic construct
  REGION 1..730: note = SELP (P16109) ECD
WTYHYSTKAYSWNISRKYCQNRYTDLVAIQNKNEIDYLNKVLPYYSSYYWIGIRKNNKTWTWVGTKKALTNEAENWADNEPNNKRNNEDCVEIYIKSPSAPGKWNDEHCLKKKHALCYTASCQDMSCSKQGECLETIGNYTCSCYPGFYGPECEYVRECGELELPQHVLMNCSHPLGNFSFNSQCSFHCTDGYQVNGPSKLECLASGIWTNKPPQCLAAQCPPLKIPERGNMTCLHSAKAFQHQSSCSFSCEEGFALVGPEVVQCTASGVWTAPAPVCKAVQCQHLEAPSEGTMDCVHPLTAFAYGSSCKFECQPGYRVRGLDMLRCIDSGHWSAPLPTCEAISCEPLESPVHGSMDCSPSLRAFQYDTNCSFRCAEGFMLRGADIVRCDNLGQWTAPAPVCQALQCQDLPVPNEARVNCSHPFGAFRYQSVCSFTCNEGLLLVGASVLQCLATGNWNSVPPECQAIPCTPLLSPQNGTMTCVQPLGSSSYKSTCQFICDEGYSLSGPERLDCTRSGRWTDSPPMCEAIKCPELFAPEQGSLDCSDTRGEFNVGSTCHFSCDNGFKLEGPNNVECTTSGRWSATPPTCKGIASLPTPGLQCPALTTPGQGTMYCRHHPGTFGFNTTCYFGCNAGFTLIGDSTLSCRPSGQWTAVTPACRAVKCSELHVNKPIAMNCSNLWGNFSYGSICSFHCLEGQLLNGSAQTACQENGHWSTTVPTCQAGPLTIQEA

SEQ ID NO: 1868 - protein, 303 aa, synthetic construct
  REGION 1..303: note = SELPLG (Q14242) ECD
LQLWDTWADEAEKALGPLLARDRRQATEYEYLDYDFLPETEPPEMLRNSTDTTPLTGPGTPESTTVEPAARRSTGLDAGGAVTELTTELANMGNLSTDSAAMEIQTTQPAATEAQTTQPVPTEAQTTPLAATEAQTTRLTATEAQTTPLAATEAQTTPPAATEAQTTQPTGLEAQTTAPAAMEAQTTAPAAMEAQTTPPAAMEAQTTQTTAMEAQTTAPEATEAQTTQPTATEAQTTPLAAMEALSTEPSATEALSMEPTTKRGLFIPFSVSSVTHKGIPMAASNLSVNYPVGAPDHISVKQC

SEQ ID NO: 1869 - protein, 651 aa, synthetic construct [sequence omitted]

SEQ ID NO: 1870 - protein, 674 aa, synthetic construct
  REGION 1..674: note = SEMA4B (Q9NPR2) ECD
LSPRISLPLGSEERPFLRFEAEHISNYTALLLSRDGRTLYVGAREALFALSSNLSFLPGGEYQELLWGADAEKKQQCSFKGKDPQRDCQNYIKILLPLSGSHLFTCGTAAFSPMCTYINMENFTLARDEKGNVLLEDGKGRCPFDPNFKSTALVVDGELYTGTVSSFQGNDPAISRSQSLRPTKTESSLNWLQDPAFVASAYIPESLGSLQGDDDKIYFFFSETGQEFEFFENTIVSRIARICKGDEGGERVLQQRWTSFLKAQLLCSRPDDGFPFNVLQDVFTLSPSPQDWRDTLFYGVFTSQWHRGTTEGSAVCVFTMKDVQRVFSGLYKEVNRETQQWYTVTHPVPTPRPGACITNSARERKINSSLQLPDRVLNFLKDHFLMDGQVRSRMLLLQPQARYQRVAVHRVPGLHHTYDVLFLGTGDGRLHKAVSVGPRVHIIEELQIFSSGQPVQNLLLDTHRGLLYAASHSGVVQVPMANCSLYRSCGDCLLARDPYCAWSGSSCKHVSLYQPQLATRPWIQDIEGASAKDLCSASSVVSPSFVPTGEKPCEQVQFQPNTVNTLACPLLSNLATRLWLRNGAPVNASASCHVLPTGDLLLVGTQQLGEFQCWSLEEGFQQLVASYCPEVVEDGVADQTDEGGSVPVIISTSRVSAPAGGKASWGADRSYWKE

SEQ ID NO: 1871 - protein, 643 aa, synthetic construct
  REGION 1..643: note = SEMA4C (Q9C0C4) ECD
AEVWWNLVPRKTVSSGELATVVRRFSQTGIQDFLTLTLTEPTGLLYVGAREALFAFSMEALELQGAISWEAPVEKKTECIQKGKNNQTECFNFIRFLQPYNASHLYVCGTYAFQPKCTYVNMLTFTLEHGEFEDGKGKCPYDPAKGHAGLLVDGELYSATLNNFLGTEPIILRNMGPHHSMKTEYLAFWLNEPHFVGSAYVPESVGSFTGDDDKVYFFFRERAVESDCYAEQVVARVARVCKGDMGGARTLQRKWTTFLKARLACSAPNWQLYFNQLQAMHTLQDTSWHNTTFFGVFQAQWGDMYLSAICEYQLEEIQRVFEGPYKEYHEEAQKWDRYTDPVPSPRPGSCINNWHRRHGYTSSLELPDNILNFVKKHPLMEEQVGPRWSRPLLVKKGTNFTHLVADRVTGLDGATYTVLFIGTGDGWLLKAVSLGPWVHLIEELQLFDQEPMRSLVLSQSKKLLFAGSRSQLVQLPVADCMKYRSCADCVLARDPYCAWSVNTSRCVAVGGHSGSLLIQHVMTSDTSGICNLRGSKKVRPTPKNITVVAGTDLVLPCHLSSNLAHARWTFGGRDLPAEQPGSFLYDARLQALVVMAAQPRHAGAYHCFSEEQGARLAAEGYLVAVVAGPSVTLEARAPLENLG

SEQ ID NO: 1872 - protein, 713 aa, synthetic construct
  REGION 1..713: note = SEMA4D (Q92854) ECD
MAFAPIPRITWEHREVHLVQFHEPDIYNYSALLLSEDKDTLYIGAREAVFAVNALNISEKQHEVYWKVSEDKKAKCAEKGKSKQTECLNYIRVLQPLSATSLYVCGTNAFQPACDHLNLTSFKFLGKNEDGKGRCPFDPAHSYTSVMVDGELYSGTSYNFLGSEPIISRNSSHSPLRTEYAIPWLNEPSFVFADVIRKSPDSPDGEDDRVYFFFTEVSVEYEFVFRVLIPRIARVCKGDQGGLRTLQKKWTSFLKARLICSRPDSGLVFNVLRDVFVLRSPGLKVPVFYALFTPQLNNVGLSAVCAYNLSTAEEVFSHGKYMQSTTVEQSHTKWVRYNGPVPKPRPGACIDSEARAANYTSSLNLPDKTLQFVKDHPLMDDSVTPIDNRPRLIKKDVNYTQIVVDRTQALDGTVYDVMFVSTDRGALHKAISLEHAVHIIEETQLFQDFEPVQTLLLSSKKGNRFVYAGSNSGVVQAPLAFCGKHGTCEDCVLARDPYCAWSPPTATCVALHQTESPSRGLIQEMSGDASVCPDKSKGSYRQHFFKHGGTAELKCSQKSNLARVFWKFQNGVLKAESPKYGLMGRKNLLIFNLSEGDSGVYQCLSEERVKNKTVFQVVAKHVLEVKVVPKPVVAPTLSVVQTEGSRIATKVLVASTQGSSPPTPAVQATSSGAITLPPKPAPTGTSCEPKIVINTVPQLHSEKTMYLKSSDNR

SEQ ID NO: 1873 - protein, 625 aa, synthetic construct
  REGION 1..625: note = SEMA4F (O95754) ECD
RVPRSVPRTSLPISEADSCLTRFAVPHTYNYSVLLVDPASHTLYVGARDTIFALSLPFSGERPRRIDWMVPEAHRQNCRKKGKKEDECHNFVQILAIANASHLLTCGTFAFDPKCGVIDVSRFQQVERLESGRGKCPFEPAQRSAAVMAGGVLYAATVKNYLGTEPIITRAVGRAEDWIRTDTLPSWLNAPAFVAAVALSPAEWGDEDGDDEIYFFFTETSRAFDSYERIKVPRVARVCAGDLGGRKTLQQRWTTFLKADLLCPGPEHGRASSVLQDVAVLRPELGAGTPIFYGIFSSQWEGATISAVCAFRPQDIRTVLNGPFRELKHDCNRGLPVVDNDVPQPRPGECITNNMKLRHFGSSLSLPDRVLTFIRDHPLMDRPVFPADGHPLLVTTDTAYLRVVAHRVTSLSGKEYDVLYLGTEDGHLHRAVRIGAQLSVLEDLALFPEPQPVENMKLYHSWLLVGSRTEVTQVNTTNCGRLQSCSECILAQDPVCAWSFRLDECVAHAGEHRGLVQDIESADVSSLCPKEPGERPVVFEVPVATAAHVVLPCSPSSAWASCVWHQPSGVTALTPRRDGLEVVVTPGAMGAYACECQEGGAAHVVAAYSLVWGSQRDAPSRAHTV

SEQ ID NO: 1874 - protein, 658 aa, synthetic construct
  REGION 1..658: note = SEMA4G (Q9NTN9) ECD
VPGPSLRRPSRELDATPRMTIPYEELSGTRHFKGQAQNYSTLLLEEASARLLVGARGALFSLSANDIGDGAHKEIHWEASPEMQSKCHQKGKNNQTECFNHVRFLQRLNSTHLYACGTHAFQPLCAAIDAEAFTLPTSFEEGKEKCPYDPARGFTGLIIDGGLYTATRYEFRSIPDIRRSRHPHSLRTEETPMHWLNDAEFVFSVLVRESKASAVGDDDKVYYFFTERATEEGSGSFTQSRSSHRVARVARVCKGDLGGKKILQKKWTSFLKARLICHIPLYETLRGVCSLDAETSSRTHFYAAFTLSTQWKTLEASAICRYDLAEIQAVFAGPYMEYQDGSRRWGRYEGGVPEPRPGSCITDSLRSQGYNSSQDLPSLVLDFVKLHPLMARPVVPTRGRPLLLKRNIRYTHLTGTPVTTPAGPTYDLLFLGTADGWIHKAVVLGSGMHIIEETQVFRESQSVENLVISLLQHSLYVGAPSGVIQLPLSSCSRYRSCYDCILARDPYCGWDPGTHACAAATTIANRTALIQDIERGNRGCESSRDTGPPPPLKTRSVLRGDDVLLPCDQPSNLARALWLLNGSMGLSDGQGGYRVGVDGLLVTDAQPEHSGNYGCYAEENGLRTLLASYSLTVRPATPAPAPKAPATPGAQLAPDVRL

SEQ ID NO: 1875 - protein, 946 aa, synthetic construct
  REGION 1..946: note = SEMA5A (Q13591) ECD
EAQGTTQCQRTEHPVISYKEIGPWLREFRAKNAVDFSQLTFDPGQKELVVGARNYLFRLQLEDLSLIQAVEWECDEATKKACYSKGKSKEECQNYIRVLLVGGDRLFTCGTNAFTPVCTNRSLSNLTEIHDQISGMARCPYSPQHNSTALLTAGGELYAATAMDFPGRDPAIYRSLGILPPLRTAQYNSKWLNEPNFVSSYDIGNFTYFFFRENAVEHDCGKTVFSRAARVCKNDIGGRFLLEDTWTTFMKARLNCSRPGEVPFYYNELQSTFFLPELDLIYGIFTTNVNSIAASAVCVFNLSAIAQAFSGPFKYQENSRSAWLPYPNPNPHFQCGTVDQGLYVNLTERNLQDAQKFILMHEVVQPVTTVPSFMEDNSRFSHVAVDVVQGREALVHIIYLATDYGTIKKVRVPLNQTSSSCLLEEIELFPERRREPIRSLQILHSQSVLFVGLREHVVKIPLKRCQFYRTRSTCIGAQDPYCGWDVVMKKCTSLEESLSMTQWEQSISACPTRNLTVDGHFGVWSPWTPCTHTDGSAVGSCLCRTRSCDSPAPQCGGWQCEGPGMEIANCSRNGGWTPWTSWSPCSTTCGIGFQVRQRSCSNPTPRHGGRVCVGQNREERYCNEHLLCPPHMFWTGWGPWERCTAQCGGGIQARRRICENGPDCAGCNVEYQSCNTNPCPELKKTTPWTPWTPVNISDNGGHYEQRFRYTCKARLADPNLLEVGRQRIEMRYCSSDGTSGCSTDGLSGDFLRAGRYSAHTVNGAWSAWTSWSQCSRDCSRGIRNRKRVCNNPEPKYGGMPCLGPSLEYQECNILPCPVDGVWSCWSPWTKCSATCGGGHYMRTRSCSNPAPAYGGDICLGLHTEEALCNTQPCPESWSEWSDWSECEASGVQVRARQCILLFPMGSQCSGNTTESRPCVFDSNFIPEVSVARSSSVEEKRCGEFNM

SEQ ID NO: 1876 - protein, 631 aa, synthetic construct
  REGION 1..631: note = SEMA6A (Q9H2E6) ECD
GFPEDSEPISISHGNYTKQYPVFVGHKPGRNTTQRHRLDIQMIMIMNGTLYIAARDHIYTVDIDTSHTEEIYCSKKLTWKSRQADVDTCRMKGKHKDECHNFIKVLLKKNDDALFVCGTNAFNPSCRNYKMDTLEPFGDEFSGMARCPYDAKHANVALFADGKLYSATVTDFLAIDAVIYRSLGESPTLRTVKHDSKWLKEPYFVQAVDYGDYIYFFFREIAVEYNTMGKVVFPRVAQVCKNDMGGSQRVLEKQWTSFLKARLNCSVPGDSHFYFNILQAVTDVIRINGRDVVLATFSTPYNSIPGSAVCAYDMLDIASVFTGRFKEQKSPDSTWTPVPDERVPKPRPGCCAGSSSLERYATSNEFPDDTLNFIKTHPLMDEAVPSIFNRPWFLRTMVRYRLTKIAVDTAAGPYQNHTVVFLGSEKGIILKFLARIGNSGFLNDSLFLEEMSVYNSEKCSYDGVEDKRIMGMQLDRASSSLYVAFSTCVIKVPLGRCERYGKCKKTCIASRDPYCGWIKEGGACSHLSPNSRLTFEQDIERGNTDGLGDCHNSFVALNGHSSSLLPSTTTSDSTAQEGYESRGGMLDWKHLLDSPDSTDPLGAVSSHNHQDKKGVIRESYLKGHDQLVPVT

SEQ ID NO: 1877 - protein, 578 aa, synthetic construct
  REGION 1..578: note = SEMA6B (Q9H3T3) ECD
LFPEEPPPLSVAPRDYLNHYPVFVGSGPGRLTPAEGADDLNIQRVLRVNRTLFIGDRDNLYRVELEPPTSTELRYQRKLTWRSNPSDINVCRMKGKQEGECRNFVKVLLLRDESTLFVCGSNAFNPVCANYSIDTLQPVGDNISGMARCPYDPKHANVALFSDGMLFTATVTDFLAIDAVIYRSLGDRPTLRTVKHDSKWFKEPYFVHAVEWGSHVYFFFREIAMEFNYLEKVVVSRVARVCKNDVGGSPRVLEKQWTSFLKARLNCSVPGDSHFYFNVLQAVTGVVSLGGRPVVLAVFSTPSNSIPGSAVCAFDLTQVAAVFEGRFREQKSPESIWTPVPEDQVPRPRPGCCAAPGMQYNASSALPDDILNFVKTHPLMDEAVPSLGHAPWILRTLMRHQLTRVAVDVGAGPWGNQTVVFLGSEAGTVLKFLVRPNASTSGTSGLSVFLEEFETYRPDRCGRPGGGETGQRLLSLELDAASGGLLAAFPRCVVRVPVARCQQYSGCMKNCIGSQDPYCGWAPDGSCIFLSPGTRAAFEQDVSGASTSGLGDCTGLLRASLSEDRAGLVSVNLLVTSS

SEQ ID NO: 1878 - protein, 580 aa, synthetic construct
  REGION 1..580: note = SEMA6C (Q9H3T2) ECD
AFPQDPLPLLISDLQGTSPLSWFRGLEDDAVAAELGLDFQRFLTLNRTLLVAARDHVFSFDLQAEEEGEGLVPNKYLTWRSQDVENCAVRGKLTDECYNYIRVLVPWDSQTLLACGTNSFSPVCRSYGITSLQQEGEELSGQARCPFDATQSNVAIFAEGSLYSATAADFQASDAVVYRSLGPQPPLRSAKYDSKWLREPHFVQALEHGDHVYFFFREVSVEDARLGRVQFSRVARVCKRDMGGSPRALDRHWTSFLKLRLNCSVPGDSTFYFDVLQALTGPVNLHGRSALFGVFTTQTNSIPGSAVCAFYLDEIERGFEGKFKEQRSLDGAWTPVSEDRVPSPRPGSCAGVGGAALFSSSRDLPDDVLTFIKAHPLLDPAVPPVTHQPLLTLTSRALLTQVAVDGMAGPHSNITVMFLGSNDGTVLKVLTPGGRSGGPEPILLEEIDAYSPARCSGKRTAQTARRIIGLELDTEGHRLFVAFSGCIVYLPLSRCARHGACQRSCLASQDPYCGWHSSRGCVDIRGSGGTDVDQAGNQESMEHGDCQDGATGSQSGPGDSAYGVRRDLPPASASRSVPIP

SEQ ID NO: 1879 - protein, 642 aa, synthetic construct
  REGION 1..642: note = SEMA6D (Q8NFY4) ECD
VSFPEDDEPLNTVDYHYSRQYPVFRGRPSGNESQHRLDFQLMLKIRDTLYIAGRDQVYTVNLNEMPKTEVIPNKKLTWRSRQQDRENCAMKGKHKDECHNFIKVFVPRNDEMVFVCGTNAFNPMCRYYRLSTLEYDGEEISGLARCPFDARQTNVALFADGKLYSATVADFLASDAVIYRSMGDGSALRTIKYDSKWIKEPHFLHAIEYGNYVYFFFREIAVEHNNLGKAVYSRVARICKNDMGGSQRVLEKHWTSFLKARLNCSVPGDSFFYFDVLQSITDIIQINGIPTVVGVFTTQLNSIPGSAVCAFSMDDIEKVFKGRFKEQKTPDSVWTAVPEDKVPKPRPGCCAKHGLAEAYKTSIDFPDETLSFIKSHPLMDSAVPPIADEPWFTKTRVRYRLTAISVDHSAGPYQNYTVIFVGSEAGMVLKVLAKTSPFSLNDSVLLEEIEAYNHAKCSAENEEDKKVISLQLDKDHHALYVAFSSCIIRIPLSRCERYGSCKKSCIASRDPYCGWLSQGSCGRVTPGMLAEGYEQDTEFGNTAHLGDCHEILPTSTTPDYKIFGGPTSDMEVSSSSVTTMASIPEITPKVIDTWRPKLTSSRKFVVQDDPNTSDFTDPLSGIPKGVRWEVQSGESNQMVHMN

SEQ ID NO: 1880 - protein, 906 aa, synthetic construct
  REGION 1..906: note = SEZ6 (Q53EL9) ECD
LSLEAPTVGKGQAPGIEETDGELTAAPTPEQPERGVHFVTTAPTLKLLNHHPLLEEFLQEGLEKGDEELRPALPFQPDPPAPFTPSPLPRLANQDSRPVFTSPTPAMAAVPTQPQSKEGPWSPESESPMLRITAPLPPGPSMAVPTLGPGEIASTTPPSRAWTPTQEGPGDMGRPWVAEVVSQGAGIGIQGTITSSTASGDDEETTTTTTIITTTITTVQTPGPCSWNFSGPEGSLDSPTDLSSPTDVGLDCFFYISVYPGYGVEIKVQNISLREGETVTVEGLGGPDPLPLANQSFLLRGQVIRSPTHQAALRFQSLPPPAGPGTFHFHYQAYLLSCHFPRRPAYGDVTVTSLHPGGSARFHCATGYQLKGARHLTCLNATQPFWDSKEPVCIAACGGVIRNATTGRIVSPGFPGNYSNNLTCHWLLEAPEGQRLHLHFEKVSLAEDDDRLIIRNGDNVEAPPVYDSYEVEYLPIEGLLSSGKHFFVELSTDSSGAAAGMALRYEAFQQGHCYEPFVKYGNFSSSTPTYPVGTTVEFSCDPGYTLEQGSIIIECVDPHDPQWNETEPACRAVCSGEITDSAGVVLSPNWPEPYGRGQDCIWGVHVEEDKRIMLDIRVLRIGPGDVLTFYDGDDLTARVLGQYSGPRSHFKLFTSMADVTIQFQSDPGTSVLGYQQGFVIHFFEVPRNDTCPELPEIPNGWKSPSQPELVHGTVVTYQCYPGYQVVGSSVLMCQWDLTWSEDLPSCQRVTSCHDPGDVEHSRRLISSPKFPVGATVQYICDQGFVLMGSSILTCHDRQAGSPKWSDRAPKCLLEQLKPCHGLSAPENGARSPEKQLHPAGATIHFSCAPGYVLKGQASIKCVPGHPSHWSDPPPICRAASLDGFYNSRSLDVAKAPAASSTLDAAH

SEQ ID NO: 1881 - protein, 817 aa, synthetic construct
  REGION 1..817: note = SEZ6L2 (Q6UXD5) ECD
LPLKEEEILPEPGSETPTVASEALAELLHGALLRRGPEMGYLPGSDRDPTLATPPAGQTLAVPSLPRATEPGTGPLTTAVTPNGVRGAGPTAPELLTPPPGTTAPPPPSPASPGPPLGPEGGEEETTTTIITTTTVTTTVTSPVLCNNNISEGEGYVESPDLGSPVSRTLGLLDCTYSIHVYPGYGIEIQVQTLNLSQEEELLVLAGGGSPGLAPRLLANSSMLGEGQVLRSPTNRLLLHFQSPRVPRGGGFRIHYQAYLLSCGFPPRPAHGDVSVTDLHPGGTATFHCDSGYQLQGEETLICLNGTRPSWNGETPSCMASCGGTIHNATLGRIVSPEPGGAVGPNLTCRWVIEAAEGRRLHLHFERVSLDEDNDRLMVRSGGSPLSPVIYDSDMDDVPERGLISDAQSLYVELLSETPANPLLLSLRFEAFEEDRCFAPFLAHGNVTTTDPEYRPGALATFSCLPGYALEPPGPPNAIECVDPTEPHWNDTEPACKAMCGGELSEPAGVVLSPDWPQSYSPGQDCVWGVHVQEEKRILLQVEILNVREGDMLTLFDGDGPSARVLAQLRGPQPRRRLLSSGPDLTLQFQAPPGPPNPGLGQGFVLHFKEVPRNDTCPELPPPEWGWRTASHGDLIRGTVLTYQCEPGYELLGSDILTCQWDLSWSAAPPACQKIMTCADPGEIANGHRTASDAGFPVGSHVQYRCLPGYSLEGAAMLTCYSRDTGTPKWSDRVPKCALKYEPCLNPGVPENGYQTLYKHHYQAGESLRFFCYEGFELIGEVTITCVPGHPSQWTSQPPLCKVTQTTDPSRQLEGGN

SEQ ID NO: 1882 - protein, 267 aa, synthetic construct
  REGION 1..267: note = SGCA (Q16586) ECD
QQTTLHPLVGRVFVHTLDHETFLSLPEHVAVPPAVHITYHAHLQGHPDLPRWLRYTQRSPHHPGFLYGSATPEDRGLQVIEVTAYNRDSFDTTRQRLVLEIGDPEGPLLPYQAEFLVRSHDAEEVLPSTPASRFLSALGGLWEPGELQLLNVTSALDRGGRVPLPIEGRKEGVYIKVGSASPFSTCLKMVASPDSHARCAQGQPPLLSCYDTLAPHFRVDWCNVTLVDKSVPEPADEVPTPGDGILEHDPFFCPPTEAPDRDFLVDA

SEQ ID NO: 1883 - protein, 60 aa, synthetic construct
  REGION 1..60: note = SHISA4 (Q96DD7) ECD
GEDCLWYLDRNGSWHPGFNCEFFTFCCGTCYHRYCCRDLTLLITERQQKHCLAFSPKTIA

SEQ ID NO: 1884 - protein, 149 aa, synthetic construct
  REGION 1..149: note = SHISA6 (Q6ZSJ9) ECD
ARGRAANRTLSAGGAAVGGRRAGGALARGGRELNGTARAPGIPEAGSRRGQPAAAVAAAASAAVTYETCWGYYDVSGQYDKEFECNNSESGYLYCCGTCYYRFCCKKRHEKLDQRQCTNYQSPVWVQTPSTKVVSPGPENKYDPEKDKT

SEQ ID NO: 1885 - protein, 167 aa, synthetic construct
  REGION 1..167: note = SHISA7 (A6NL88) ECD
RPSNATSAEPAGPLPALLAHLRRLTGALTGGGGAASPGANGTRTGPAGGAGAAARAPPPAELCHGYYDVMGQYDATFNCSTGSYRFCCGTCHYRFCCEHRHMRLAQASCSNYDTPRWATTPPPLAGGAGGAGGAGGGPGPGQAGWLEGGRTGGAGGRGGEGPGGSTA

SEQ ID NO: 1886 - protein, 100 aa, synthetic construct
  REGION 1..100: note = SHISA8 (B8ZZ34) ECD
GAPEAQGPAAPGTTAPEGGDRCRGYYDVMGQWDPPFNCSSGAYSFCCGTCGYRFCCHDGPRRLDQSRCSNYDTPAWVQTGRPPARARDTAAPRDPGRERS

SEQ ID NO: 1887 - protein, 126 aa, synthetic construct
  REGION 1..126: note = SHISA9 (B4DS77) ECD
QERAGHGQLAQLGGVLLLAGGNRSGAASGEASEGAEASDAPPTRAPTPDFCRGYFDVMGQWDPPFNCSSGDFIFCCGTCGFRFCCTFKKRRLNQSTCTNYDTPLWLNTGKPPARKDDPLHDPTKDK

SEQ ID NO: 1888 - protein, 1622 aa, synthetic construct
  REGION 1..1622: note = SIGLEC1 (Q9BZZ2) ECD
SWGVSSPQDVQGVKGSCLLIPCIFSFPADVEVPDGITAIWYYDYSGQRQVVSHSADPKLVEARFRGRTEFMGNPEHRVCNLLLKDLQPEDSGSYNFRFEISEVNRWSDVKGTLVTVTEEPRVPTIASPVELLEGTEVDFNCSTPYVCLQEQVRLQWQGQDPARSVTFNSQKFEPTGVGHLETLHMAMSWQDHGRILRCQLSVANHRAQSEIHLQVKYAPKGVKILLSPSGRNILPGELVTLTCQVNSSYPAVSSIKWLKDGVRLQTKTGVLHLPQAAWSDAGVYTCQAENGVGSLVSPPISLHIFMAEVQVSPAGPILENQTVTLVCNTPNEAPSDLRYSWYKNHVLLEDAHSHTLRLHLATRADTGFYFCEVQNVHGSERSGPVSVVVNHPPLTPVLTAFLETQAGLVGILHCSVVSEPLATLVLSHGGHILASTSGDSDHSPRFSGTSGPNSLRLEIRDLEETDSGEYKCSATNSLGNATSTLDFHANAARLLISPAAEVVEGQAVTLSCRSGLSPTPDARFSWYLNGALLHEGPGSSLLLPAASSTDAGSYHCRARDGHSASGPSSPAVLTVLYPPRQPTFTTRLDLDAAGAGAGRRGLLLCRVDSDPPARLQLLHKDRVVATSLPSGGGCSTCGGCSPRMKVTKAPNLLRVEIHNPLLEEEGLYLCEASNALGNASTSATFNGQATVLAIAPSHTLQEGTEANLTCNVSREAAGSPANFSWFRNGVLWAQGPLETVTLLPVARTDAALYACRILTEAGAQLSTPVLLSVLYPPDRPKLSALLDMGQGHMALFICTVDSRPLALLALFHGEHLLATSLGPQVPSHGRFQAKAEANSLKLEVRELGLGDSGSYRCEATNVLGSSNTSLFFQVRGAWVQVSPSPELQEGQAVVLSCQVHTGVPEGTSYRWYRDGQPLQESTSATLRFAAITLTQAGAYHCQAQAPGSATTSLAAPISLHVSYAPRHVTLTTLMDTGPGRLGLLLCRVDSDPPAQLRLLHGDRLVASTLQGVGGPEGSSPRLHVAVAPNTLRLEIHGAMLEDEGVYICEASNTLGQASASADFDAQAVNVQVWPGATVREGQLVNLTCLVWTTHPAQLTYTWYQDGQQRLDAHSIPLPNVTVRDATSYRCGVGPPGRAPRLSRPITLDVLYAPRNLRLTYLLESHGGQLALVLCTVDSRPPAQLALSHAGRLLASSTAASVPNTLRLELRGPQPRDEGFYSCSARSPLGQANTSLELRLEGVRVILAPEAAVPEGAPITVTCADPAAHAPTLYTWYHNGRWLQEGPAASLSFLVATRAHAGAYSCQAQDAQGTRSSRPAALQVLYAPQDAVLSSFRDSRARSMAVIQCTVDSEPPAELALSHDGKVLATSSGVHSLASGTGHVQVARNALRLQVQDVPAGDDTYVCTAQNLLGSISTIGRLQVEGARVVAEPGLDVPEGAALNLSCRLLGGPGPVGNSTFAWFWNDRRLHAEPVPTLAFTHVARAQAGMYHCLAELPTGAAASAPVMLRVLYPPKTPTMMVFVEPEGGLRGILDCRVDSEPLASLTLHLGSRLVASSQPQGAPAEPHIHVLASPNALRVDIEALRPSDQGEYICSASNVLGSASTSTYFGVRALHRLHQFQQ

SEQ ID NO: 1889 - protein, 534 aa, synthetic construct
  REGION 1..534: note = SIGLEC10 (Q96LC7) ECD
MDGRFWIRVQESVMVPEGLCISVPCSFSYPRQDWTGSTPAYGYWFKAVTETTKGAPVATNHQSREVEMSTRGRFQLTGDPAKGNCSLVIRDAQMQDESQYFFRVERGSYVRYNFMNDGFFLKVTALTQKPDVYIPETLEPGQPVTVICVFNWAFEECPPPSFSWTGAALSSQGTKPTTSHFSVLSFTPRPQDHNTDLTCHVDFSRKGVSAQRTVRLRVAYAPRDLVISISRDNTPALEPQPQGNVPYLEAQKGQFLRLLCAADSQPPATLSWVLQNRVLSSSHPWGPRPLGLELPGVKAGDSGRYTCRAENRLGSQQRALDLSVQYPPENLRVMVSQANRTVLENLGNGTSLPVLEGQSLCLVCVTHSSPPARLSWTQRGQVLSPSQPSDPGVLELPRVQVEHEGEFTCHARHPLGSQHVSLSLSVHYSPKLLGPSCSWEAEGLHCSCSSQASPAPSLRWWLGEELLEGNSSQDSFEVTPSSAGPWANSSLSLHGGLSSGLRLRCEAWNVHGAQSGSILQLPDKKGLISTAFSN

SEQ ID NO: 1890 - protein, 534 aa, synthetic construct
  REGION 1..534: note = SIGLEC11 (Q96RL6) ECD
LNKDPSYSLQVQRQVPVPEGLCVIVSCNLSYPRDGWDESTAAYGYWFKGRTSPKTGAPVATNNQSREVEMSTRDRFQLTGDPGKGSCSLVIRDAQREDEAWYFFRVERGSRVRHSFLSNAFFLKVTALTKKPDVYIPETLEPGQPVTVICVFNWAFKKCPAPSFSWTGAALSPRRTRPSTSHFSVLSFTPSPQDHDTDLTCHVDFSRKGVSAQRTVRLRVAYAPKDLIISISHDNTSALELQGNVIYLEVQKGQFLRLLCAADSQPPATLSWVLQDRVLSSSHPWGPRTLGLELRGVRAGDSGRYTCRAENRLGSQQQALDLSVQYPPENLRVMVSQANRTVLENLGNGTSLPVLEGQSLRLVCVTHSSPPARLSWTRWGQTVGPSQPSDPGVLELPPIQMEHEGEFTCHAQHPLGSQHVSLSLSVHYPPQLLGPSCSWEAEGLHCSCSSQASPAPSLRWWLGEELLEGNSSQGSFEVTPSSAGPWANSSLSLHGGLSSGLRLRCKAWNVHGAQSGSVFQLLPGKLEHGGGLGL

SEQ ID NO: 1891 - protein, 463 aa, synthetic construct
  REGION 1..463: note = SIGLEC12 (Q96PQ1) ECD
KEQKDYLLTMQKSVTVQEGLCVSVLCSFSYPQNGWTASDPVHGYWFRAGDHVSRNIPVATNNPARAVQEETRDRFHLLGDPQNKDCTLSIRDTRESDAGTYVFCVERGNMKWNYKYDQLSVNVTASQDLLSRYRLEVPESVTVQEGLCVSVPCSVLYPHYNWTASSPVYGSWFKEGADIPWDIPVATNTPSGKVQEDTHGRFLLLGDPQTNNCSLSIRDARKGDSGKYYFQVERGSRKWNYIYDKLSVHVTALTHMPTFSIPGTLESGHPRNLTCSVPWACEQGTPPTITWMGASVSSLDPTITRSSMLSLIPQPQDHGTSLTCQVTLPGAGVTMTRAVRLNISYPPQNLTMTVFQGDGTASTTLRNGSALSVLEGQSLHLVCAVDSNPPARLSWTWGSLTLSPSQSSNLGVLELPRVHVKDEGEFTCRAQNPLGSQHISLSLSLQNEYTGKMRPISGVTLGA

SEQ ID NO: 1892 - protein, 342 aa, synthetic construct
  REGION 1..342: note = SIGLEC14 (Q08ET2) ECD
EKPVYELQVQKSVTVQEGLCVLVPCSFSYPWRSWYSSPPLYVYWFRDGEIPYYAEVVATNNPDRRVKPETQGRFRLLGDVQKKNCSLSIGDARMEDTGSYFFRVERGRDVKYSYQQNKLNLEVTALIEKPDIHFLEPLESGRPTRLSCSLPGSCEAGPPLTFSWTGNALSPLDPETTRSSELTLTPRPEDHGTNLTCQVKRQGAQVTTERTVQLNVSYAPQNLAISIFFRNGTGTALRILSNGMSVPIQEGQSLFLACTVDSNPPASLSWFREGKALNPSQTSMSGTLELPNIGAREGGEFTCRVQHPLGSQHLSFILSVQRSSSSCICVTEKQQGSWPLVL

SEQ ID NO: 1893 - protein, 244 aa, synthetic construct
  REGION 1..244: note = SIGLEC15 (Q6ZMC9) ECD
FVRTKIDTTENLLNTEVHSSPAQRWSMQVPPEVSAEAGDAAVLPCTFTHPHRHYDGPLTAIWRAGEPYAGPQVFRCAAARGSELCQTALSLHGRFRLLGNPRRNDLSLRVERLALADDRRYFCRVEFAGDVHDRYESRHGVRLHVTAAPRIVNISVLPSPAHAFRALCTAEGEPPPALAWSGPALGNSLAAVRSPREGHGHLVTAELPALTHDGRYTCTAANSLGRSEASVYLFRFHGASGAST

SEQ ID NO: 1894 - protein, 418 aa, synthetic construct
  REGION 1..418: note = SIGLEC16 (A6NMB1) ECD
NKDPSYSLQVQRQVPVPEGLCVIVSCNLSYPRDGWDESTAAYGYWFKGRTSPKTGAPVATNNQSREVAMSTRDRFQLTGDPGKGSCSLVIRDAQREDEAWYFFRVERGSRVRHSFLSNAFFLKVTALTQKPDVYIPETLEPGQPVTVICVFNWAFKKCPAPSFSWTGAALSPRRTRPSTSHFSVLSFTPSPQDHDTDLTCHVDFSRKGVSAQRTVRLRVASLELQGNVIYLEVQKGQFLRLLCAADSQPPATLSWVLQDRVLSSSHPWGPRTLGLELPGVKAGDSGRYTCRAENRLGSQQRALDLSVQYPPENLRVMVSQANRTVLENLRNGTSLRVLEGQSLRLVCVTHSSPPARLSWTWGEQTVGPSQPSDPGVLQLPRVQMEHEGEFTCHARHPLGSQRVSLSFSVHCKSGPMTG

SEQ ID NO: 1895 - protein, 425 aa, synthetic construct
  REGION 1..425: note = SIGLEC5 (O15389) ECD
EKPVYELQVQKSVTVQEGLCVLVPCSFSYPWRSWYSSPPLYVYWFRDGEIPYYAEVVATNNPDRRVKPETQGRFRLLGDVQKKNCSLSIGDARMEDTGSYFFRVERGRDVKYSYQQNKLNLEVTALIEKPDIHFLEPLESGRPTRLSCSLPGSCEAGPPLTFSWTGNALSPLDPETTRSSELTLTPRPEDHGTNLTCQMKRQGAQVTTERTVQLNVSYAPQTITIFRNGIALEILQNTSYLPVLEGQALRLLCDAPSNPPAHLSWFQGSPALNATPISNTGILELRRVRSAEEGGFTCRAQHPLGFLQIFLNLSVYSLPQLLGPSCSWEAEGLHCRCSFRARPAPSLCWRLEEKPLEGNSSQGSFKVNSSSAGPWANSSLILHGGLSSDLKVSCKAWNIYGSQSGSVLLLQGRSNLGTGVVPAAL

SEQ ID NO: 1896 - protein, 321 aa, synthetic construct
  REGION 1..321: note = SIGLEC6 (O43699) ECD
QERRFQLEGPESLTVQEGLCVLVPCRLPTTLPASYYGYGYWFLEGADVPVATNDPDEEVQEETRGRFHLLWDPRRKNCSLSIRDARRRDNAAYFFRLKSKWMKYGYTSSKLSVRVMALTHRPNISIPGTLESGHPSNLTCSVPWVCEQGTPPIFSWMSAAPTSLGPRTTQSSVLTITPRPQDHSTNLTCQVTFPGAGVTMERTIQLNVSYAPQKVAISIFQGNSAAFKILQNTSSLPVLEGQALRLLCDADGNPPAHLSWFQGFPALNATPISNTGVLELPQVGSAEEGDFTCRAQHPLGSLQISLSLFVHWKPEGRAGGV

SEQ ID NO: 1897 - protein, 335 aa, synthetic construct
  REGION 1..335: note = SIGLEC7 (Q9Y286) ECD
QKSNRKDYSLTMQSSVTVQEGMCVHVRCSFSYPVDSQTDSDPVHGYWFRAGNDISWKAPVATNNPAWAVQEETRDRFHLLGDPQTKNCTLSIRDARMSDAGRYFFRMEKGNIKWNYKYDQLSVNVTALTHRPNILIPGTLESGCFQNLTCSVPWACEQGTPPMISWMGTSVSPLHPSTTRSSVLTLIPQPQHHGTSLTCQVTLPGAGVTTNRTIQLNVSYPPQNLTVTVFQGEGTASTALGNSSSLSVLEGQSLRLVCAVDSNPPARLSWTWRSLTLYPSQPSNPLVLELQVHLGDEGEFTCRAQNSLGSQHVSLNLSLQQEYTGKMRPVSGVLL

SEQ ID NO: 1898 - protein, 347 aa, synthetic construct [sequence omitted]

SEQ ID NO: 1899 - protein, 331 aa, synthetic construct
  REGION 1..331: note = SIGLEC9 (Q9Y336) ECD
QTSKLLTMQSSVTVQEGLCVHVPCSFSYPSHGWIYPGPVVHGYWFREGANTDQDAPVATNNPARAVWEETRDRFHLLGDPHTKNCTLSIRDARRSDAGRYFFRMEKGSIKWNYKHHRLSVNVTALTHRPNILIPGTLESGCPQNLTCSVPWACEQGTPPMISWIGTSVSPLDPSTTRSSVLTLIPQPQDHGTSLTCQVTFPGASVTTNKTVHLNVSYPPQNLTMTVFQGDGTVSTVLGNGSSLSLPEGQSLRLVCAVDAVDSNPPARLSLSWRGLTLCPSQPSNPGVLELPWVHLRDAAEFTCRAQNPLGSQQVYLNVSLQSKATSGVTQG

SEQ ID NO: 1900 - protein, 343 aa, synthetic construct
  REGION 1..343: note = SIRPA (P78324) ECD
EEELQVIQPDKSVLVAAGETATLRCTATSLIPVGPIQWFRGAGPGRELIYNQKEGHFPRVTTVSDLTKRNNMDFSIRIGNITPADAGTYYCVKFRKGSPDDVEFKSGAGTELSVRAKPSAPVVSGPAARATPQHTVSFTCESHGFSPRDITLKWFKNGNELSDFQTNVDPVGESVSYSIHSTAKVVLTREDVHSQVICEVAHVTLQGDPLRGTANLSETIRVPPTLEVTQQPVRAENQVNVTCQVRKFYPQRLQLTWLENGNVSRTETASTVTENKDGTYNWMSWLLVNVSAHRDDVKLTCQVEHDGQPAVSKSHDLKVSAHPKEQGSNTAAENTGSNERNIY

SEQ ID NO: 1901 - protein, 342 aa, synthetic construct
  REGION 1..342: note = SIRPB1 (O00241) ECD
EDELQVIQPEKSVSVAAGESATLRCAMTSLIPVGPIMWFRGAGAGRELIYNQKEGHFPRVTTVSELTKRNNLDFSISISNITPADAGTYYCVKFRKGSPDDVEFKSGAGTELSVRAKPSAPVVSGPAVRATPEHTVSFTCESHGFSPRDITLKWFKNGNELSDFQTNVDPAGDSVSYSIHSTARVVLTRGDVHSQVICEIAHITLQGDPLRGTANLSEAIRVPPTLEVTQQPMRAENQANVTCQVSNFYPRGLQLTWLENGNVSRTETASTLIENKDGTYNWMSWLLVNTCAHRDDVVLTCQVEHDGQQAVSKSYALEISAHQKEHGSDITHEAALAPTAPL

SEQ ID NO: 1902 - protein, 342 aa, synthetic construct
  REGION 1..342: note = SIRPB1 (Q5TFQ8) ECD
EEELQVIQPDKSISVAAGESATLHCTVTSLIPVGPIQWFRGAGPGRELIYNQKEGHFPRVTTVSDLTKRNNMDFSIRISNITPADAGTYYCVKFRKGSPDHVEFKSGAGTELSVRAKPSAPVVSGPAARATPQHTVSFTCESHGFSPRDITLKWFKNGNELSDFQTNVDPAGDSVSYSIHSTAKVVLTREDVHSQVICEVAHVTLQGDPLRGTANLSETIRVPPTLEVTQQPVRAENQVNVTCQVRKFYPQRLQLTWLENGNVSRTETASTLTENKDGTYNWMSWLLVNVSAHRDDVKLTCQVEHDGQPAVSKSHDLKVSAHPKEQGSNTAPGPALASAAPL

SEQ ID NO: 1903 - protein, 255 aa, synthetic construct
  REGION 1..255: note = SIRPB2 (Q5JXA9) ECD
QSSRNDWQVLQPEGPMLVAEGETLLLRCMVVGSCTDGMIKWVKVSTQDQQEIYNFKRGSFPGVMPMIQRTSEPLNCDYSIYIHNVTREHTGTYHCVRFDGLSEHSEMKSDEGTSVLVKGAGDPEPDLWIIQPQELVLGTTGDTVFLNCTVLGDGPPGPIRWFQGAGLSREAIYNFGGISHPKETAVQASNNDFSILLQNVSSEDAGTYYCVKFQRKPNRQYLSGQGTSLKVKAKSTSSKEAEFTSEPATEMSPTG

SEQ ID NO: 1904 - protein, 332 aa, synthetic construct
  REGION 1..332: note = SIRPG (Q9P1W8) ECD
EEELQMIQPEKLLLVTVGKTATLHCTVTSLLPVGPVLWFRGVGPGRELIYNQKEGHFPRVTTVSDLTKRNNMDFSIRISSITPADVGTYYCVKFRKGSPENVEFKSGPGTEMALGAKPSAPVVLGPAARTTPEHTVSFTCESHGFSPRDITLKWFKNGNELSDFQTNVDPTGQSVAYSIRSTARVVLDPWDVRSQVICEVAHVTLQGDPLRGTANLSEAIRVPPTLEVTQQPMRVGNQVNVTCQVRKFYPQSLQLTWSENGNVCQRETASTLTENKDGTYNWTSWFLVNISDQRDDVVLTCQVKHDGQLAVSKRLALEVTVHQKDQSSDATP

SEQ ID NO: 1905 - protein, 16 aa, synthetic construct
  REGION 1..16: note = SIT1 (Q9Y3P8) ECD
DNCTDLLALGIPSITQ

SEQ ID NO: 1906 - protein, 217 aa, synthetic construct
  REGION 1..217: note = SLAMF1 (Q13291) ECD
ASYGTGGRMMNCPKILRQLGSKVLLPLTYERINKSMNKSIHIVVTMAKSLENSVENKIVSLDPSEAGPPRYLGDRYKFYLENLTLGIRESRKEDEGWYLMTLEKNVSVQRFCLQLRLYEQVSTPEIKVLNKTQENGTCTLILGCTVEKGDHVAYSWSEKAGTHPLNPANSSHLLSLTLGPQHADNIYICTVSNPISNNSQTFSPWPGCRTDPSETKP

SEQ ID NO: 1907 - protein, 205 aa, synthetic construct
  REGION 1..205: note = SLAMF6 (Q96DU3) ECD
QSSLTPLMVNGILGESVTLPLEFPAGEKVNFITWLFNETSLAFIVPHETKSPEIHVTNPKQGKRLNFTQSYSLQLSNLKMEDTGSYRAQISTKTSAKLSSYTLRILRQLRNIQVTNHSQLFQNMTCELHLTCSVEDADDNVSFRWEALGNTLSSQPNLTVSWDPRISSEQDYTCIAENAVSNLSFSVSAQKLCEDVKIQYTDTKM

SEQ ID NO: 1908 - protein, 204 aa, synthetic construct
  REGION 1..204: note = SLAMF7 (Q9NQ25) ECD
SGPVKELVGSVGGAVTFPLKSKVKQVDSIVWTFNTTPLVTIQPEGGTIIVTQNRNRERVDFPDGGYSLKLSKLKKNDSGIYYVGIYSSSLQQPSTQEYVLHVYEHLSKPKVTMGLQSNKNGTCVTNLTCCMEHGEEDVIYTWKALGQAANESHNGSILPISWRWGESDMTFICVARNPVSRNFSSPILARKLCEGAADDPDSSM

SEQ ID NO: 1909 - protein, 211 aa, synthetic construct
  REGION 1..211: note = SLAMF8 (Q9P0V8) ECD
AQVLSKVGGSVLLVAARPPGFQVREAIWRSLWPSEELLATFFRGSLETLYHSRFLGRAQLHSNLSLELGPLESGDSGNFSVLMVDTRGQPWTQTLQLKVYDAVPRPVVQVFIAVERDAQPSKTCQVFLSCWAPNISEITYSWRRETTMDFGMEPHSLFTDGQVLSISLGPGDRDVAYSCIVSNPVSWDLATVTPWDSCHHEAAPGKASYKD

SEQ ID NO: 1910 - protein, 218 aa, synthetic construct
  REGION 1..218: note = SLAMF9 (Q96A28) ECD
RRLWRWCGSEEVVAVLQESISLPLEIPPDEEVENIIWSSHKSLATVVPGKEGHPATIMVTNPHYQGQVSFLDPSYSLHISNLSWEDSGLYQAQVNLRTSQISTMQQYNICVYRWLSEPQITVNFESSGEGACSMSLVCSVEKAGMDMTYSWLSRGDSTYTFHEGPVLSTSWRPGDSALSYTCRANNPISNVSSCPIPDGPFYADPNYASEKPSTAFCL

SEQ ID NO: 1911 - protein, 605 aa, synthetic construct
  REGION 1..605: note = SLITRK1 (Q96PX8) ECD
NVTGDVCKEKICSCNEIEGDLHVDCEKKGFTSLQRFTAPTSQFYHLFLHGNSLTRLFPNEFANFYNAVSLHMENNGLHEIVPGAFLGLQLVKRLHINNNKIKSFRKQTFLGLDDLEYLQADFNLLRDIDPGAFQDLNKLEVLILNDNLISTLPANVFQYVPITHLDLRGNRLKTLPYEEVLEQIPGIAEILLEDNPWDCTCDLLSLKEWLENIPKNALIGRVVCEAPTRLQGKDLNETTEQDLCPLKNRVDSSLPAPPAQEETFAPGPLPTPFKTNGQEDHATPGSAPNGGTKIPGNWQIKIRPTAAIATGSSRNKPLANSLPCPGGCSCDHIPGSGLKMNCNNRNVSSLADLKPKLSNVQELFLRDNKIHSIRKSHFVDYKNLILLDLGNNNIATVENNTFKNLLDLRWLYMDSNYLDTLSREKFAGLQNLEYLNVEYNAIQLILPGTFNAMPKLRILILNNNLLRSLPVDVFAGVSLSKLSLHNNYFMYLPVAGVLDQLTSIIQIDLHGNPWECSCTIVPFKQWAERLGSEVLMSDLKCETPVNFFRKDFMLLSNDEICPQLYARISPTLTSHSKNSTGLAETGTHSNSYLDTSRVSISVLVP

SEQ ID NO: 1912 - protein, 600 aa, synthetic construct
  REGION 1..600: note = SLITRK2 (Q9H156) ECD
RKTAKDICKIRCLCEEKENVLNINCENKGFTTVSLLQPPQYRIYQLFLNGNLLTRLYPNEFVNYSNAVTLHLGNNGLQEIRTGAFSGLKTLKRLHLNNNKLEILREDTFLGLESLEYLQADYNYISAIEAGAFSKLNKLKVLILNDNLLLSLPSNVFRFVLLTHLDLRGNRLKVMPFAGVLEHIGGIMEIQLEENPWNCTCDLLPLKAWLDTITVFVGEIVCETPFRLHGKDVTQLTRQDLCPRKSASDSSQRGSHADTHVQRLSPTMNPALNPTRAPKASRPPKMRNRPTPRVTVSKDRQSFGPIMVYQTKSPVPLTCPSSCVCTSQSSDNGLNVNCQERKFTNISDLQPKPTSPKKLYLTGNYLQTVYKNDLLEYSSLDLLHLGNNRIAVIQEGAFTNLTSLRRLYLNGNYLEVLYPSMFDGLQSLQYLYLEYNVIKEIKPLTFDALINLQLLFLNNNLLRSLPDNIFGGTALTRLNLRNNHFSHLPVKGVLDQLPAFIQIDLQENPWDCTCDIMGLKDWTEHANSPVIINEVTCESPAKHAGEILKFLGREAICPDSPNLSDGTVLSMNHNTDTPRSLSVSPSSYPELHTEVPLSVL

SEQ ID NO: 1913 - protein, 600 aa, synthetic construct
  REGION 1..600: note = SLITRK4 (Q8IW52) ECD
DSDISVEICNVCSCVSVENVLYVNCEKVSVYRPNQLKPPWSNFYHLNFQNNFLNILYPNTFLNFSHAVSLHLGNNKLQNIEGGAFLGLSALKQLHLNNNELKILRADTFLGIENLEYLQADYNLIKYIERGAFNKLHKLKVLILNDNLISFLPDNIFRFASLTHLDIRGNRIQKLPYIGVLEHIGRVVELQLEDNPWNCSCDLLPLKAWLENMPYNIYIGEAICETPSDLYGRLLKETNKQELCPMGTGSDFDVRILPPSQLENGYTTPNGHTTQTSLHRLVTKPPKTTNPSKISGIVAGKALSNRNLSQIVSYQTRVPPLTPCPAPCFCKTHPSDLGLSVNCQEKNIQSMSELIPKPLNAKKLHVNGNSIKDVDVSDFTDFEGLDLLHLGSNQITVIKGDVFHNLTNLRRLYLNGNQIERLYPEIFSGLHNLQYLYLEYNLIKEISAGTFDSMPNLQLLYLNNNLLKSLPVYIFSGAPLARLNLRNNKFMYLPVSGVLDQLQSLTQIDLEGNPWDCTCDLVALKLWVEKLSDGIVVKELKCETPVQFANIELKSLKNEILCPKLLNKPSAPFTSPAPAITFTTPLGPIRSPPGGPVPLS

SEQ ID NO: 1914 - protein, 624 aa, synthetic construct
  REGION 1..624: note = SLITRK5 (O94991) ECD
IDYYGEICDNACPCEEKDGILTVSCENRGIISLSEISPPRFPIYHLLLSGNLLNRLYPNEFVNYTGASILHLGSNVIQDIETGAFHGLRGLRRLHLNNNKLELLRDDTFLGLENLEYLQVDYNYISVIEPNAFGKLHLLQVLILNDNLLSSLPNNLFRFVPLTHLDLRGNRLKLLPYVGLLQHMDKVVELQLEENPWNCSCELISLKDWLDSISYSALVGDVVCETPFRLHGRDLDEVSKQELCPRRLISDYEMRPQTPLSTTGYLHTTPASVNSVATSSSAVYKPPLKPPKGTRQPNKPRVRPTSRQPSKDLGYSNYGPSIAYQTKSPVPLECPTACSCNLQISDLGLNVNCQERKIESIAELQPKPYNPKKMYLTENYIAVVRRTDFLEATGLDLLHLGNNRISMIQDRAFGDLTNLRRLYLNGNRIERLSPELFYGLQSLQYLFLQYNLIREIQSGTFDPVPNLQLLFLNNNLLQAMPSGVFSGLTLLRLNLRSNHFTSLPVSGVLDQLKSLIQIDLHDNPWDCTCDIVGMKLWVEQLKVGVLVDEVICKAPKKFAETDMRSIKSELLCPDYSDVVVSTPTPSSIQVPARTSAVTPAVRLNSTGAPASLGAGGGASSVPLS

SEQ ID NO: 1915 - protein, 582 aa, synthetic construct
  REGION 1..582: note = SLITRK6 (Q9H5Y7) ECD
SRGSCDSLCNCEEKDGTMLINCEAKGIKMVSEISVPPSRPFQLSLLNNGLTMLHTNDFSGLTNAISIHLGFNNIADIEIGAFNGLGLLKQLHINHNSLEILKEDTFHGLENLEFLQADNNFITVIEPSAFSKLNRLKVLILNDNAIESLPPNIFRFVPLTHLDLRGNQLQTLPYVGFLEHIGRILDLQLEDNKWACNCDLLQLKTWLENMPPQSIIGDVVCNSPPFFKGSILSRLKKESICPTPPVYEEHEDPSGSLHLAATSSINDSRMSTKTTSILKLPTKAPGLIPYITKPSTQLPGPYCPIPCNCKVLSPSGLLIHCQERNIESLSDLRPPPQNPRKLILAGNIIHSLMKSDLVEYFTLEMLHLGNNRIEVLEEGSFMNLTRLQKLYLNGNHLTKLSKGMFLGLHNLEYLYLEYNAIKEILPGTFNPMPKLKVLYLNNNLLQVLPPHIFSGVPLTKVNLKTNQFTHLPVSNILDDLDLLTQIDLEDNPWDCSCDLVGLQQWIQKLSKNTVTDDILCTSPGHLDKKELKALNSEILCPGLVNNPSMPTQTSYLMVTTPATTTNTADTILRSLTDAVPLS

SEQ ID NO: 1916 - protein, 1066 aa, synthetic construct
  REGION 1..1066: note = SORCS1 (Q8WY21) ECD
GGSCCPSPHPSSAPRSASTPRGFSHQGRPGRAPATPLPLVVRPLFSVAPGDRALSLERARGTGASMAVAARSGRRRRSGADQEKAERGEGASRSPRGVLRDGGQQEPGTRERDPDKATRFRMEELRLTSTTFALTGDSAHNQAMVHWSGHNSSVILILTKLYDYNLGSITESSLWRSTDYGTTYEKLNDKVGLKTILSYLYVCPTNKRKIMLLTDPEIESSLLISSDEGATYQKYRLNFYIQSLLFHPKQEDWILAYSQDQKLYSSAEFGRRWQLIQEGVVPNRFYWSVMGSNKEPDLVHLEARTVDGHSHYLTCRMQNCTEANRNQPFPGYIDPDSLIVQDHYVFVQLTSGGRPHYYVSYRRNAFAQMKLPKYALPKDMHVISTDENQVFAAVQEWNQNDTYNLYISDTRGVYFTLALENVQSSRGPEGNIMIDLYEVAGIKGMFLANKKIDNQVKTFITYNKGRDWRLLQAPDTDLRGDPVHCLLPYCSLHLHLKVSENPYTSGIIASKDTAPSIIVASGNIGSELSDTDISMFVSSDAGNTWRQIFEEEHSVLYLDQGGVLVAMKHTSLPIRHLWLSFDEGRSWSKYSFTSIPLFVDGVLGEPGEETLIMTVFGHFSHRSEWQLVKVDYKSIFDRRCAEEDYRPWQLHSQGEACIMGAKRIYKKRKSERKCMQGKYAGAMESEPCVCTEADFDCDYGYERHSNGQCLPAFWFNPSSLSKDCSLGQSYLNSTGYRKVVSNNCTDGVREQYTAKPQKCPGKAPRGLRIVTADGKLTAEQGHNVTLMVQLEEGDVQRTLIQVDFGDGIAVSYVNLSSMEDGIKHVYQNVGIFRVTVQVDNSLGSDSAVLYLHVTCPLEHVHLSLPFVTTKNKEVNATAVLWPSQVGTLTYVWWYGNNTEPLITLEGSISFRFTSEGMNTITVQVSAGNAILQDTKTIAVYEEFRSLRLSFSPNLDDYNPDIPEWRRDIGRVIKKSLVEATGVPGQHILVAVLPGLPTTAELFVLPYQDPAGENKRSTDDLEQISELLIHTLNQNSVHFELKPGVRVLVHAAHLTAAPLVDLTPTHS

SEQ ID NO: 1917 - protein, 1028 aa, synthetic construct
  REGION 1..1028: note = SORCS2 (Q96PQ0) ECD
RSPEPGRLGPHAQLTRVPRSPPAGRAEPGGGEDRQARGTEPGAPGPSPGPAPGPGEDGAPAAGYRRWERAAPLAGVASRAQVSLISTSFVLKGDATHNQAMVHWTGENSSVILILTKYYHADMGKVLESSLWRSSDFGTSYTKLTLQPGVTTVIDNFYICPTNKRKVILVSSSLSDRDQSLFLSADEGATFQKQPIPFFVETLIFHPKEEDKVLAYTKESKLYVSSDLGKKWTLLQERVTKDHVFWSVSGVDADPDLVHVEAQDLGGDFRYVTCAIHNCSEKMLTAPFAGPIDHGSLTVQDDYIFFKATSANQTKYYVSYRRNEFVLMKLPKYALPKDLQIISTDESQVFVAVQEWYQMDTYNLYQSDPRGVRYALVLQDVRSSRQAEESVLIDILEVRGVKGVFLANQKIDGKVMTLITYNKGRDWDYLRPPSMDMNGKPTNCKPPDCHLHLHLRWADNPYVSGTVHTKDTAPGLIMGAGNLGSQLVEYKEEMYITSDCGHTWRQVFEEEHHILYLDHGGVIVAIKDTSIPLKILKFSVDEGLTWSTHNFTSTSVFVDGLLSEPGDETLVMTVFGHISFRSDWELVKVDFRPSFSRQCGEEDYSSWELSNLQGDRCIMGQQRSFRKRKSTSWCIKGRSFTSALTSRVCECRDSDFLCDYGFERSSSSESSTNKCSANFWFNPLSPPDDCALGQTYTSSLGYRKVVSNVCEGGVDMQQSQVQLQCPLTPPRGLQVSIQGEAVAVRPGEDVLFVVRQEQGDVLTTKYQVDLGDGFKAMYVNLTLTGEPIRHRYESPGIYRVSVRAENTAGHDEAVLFVQVNSPLQALYLEVVPVIGLNQEVNLTAVLLPLNPNLTVFYWWIGHSLQPLLSLDNSVTTRFSDTGDVRVTVQAACGNSVLQDSRVLRVLDQFQVMPLQFSKELDAYNPNTPEWREDVGLVVTRLLSKETSVPQELLVTVVKPGLPTLADLYVLLPPPRPTRKRSLSSDKRLAAIQQVLNAQKISFLLRGGVRVLVALRDTGTGAEQLGGGG

SEQ ID NO: 1918 - protein, 1092 aa, synthetic construct
  REGION 1..1092: note = SORCS3 (Q9UPU3) ECD
EITWDATGGPGRPAAPASRPPALSPLSPRAVASQWPEELASARRAAVLGRRAGPELLPQQGGGRGGEMQVEAGGTSPAGERRGRGIPAPAKLGGARRSRRAQPPITQERGDAWATAPADGSRGSRPLAKGSREEVKAPRAGGSAAEDLRLPSTSFALTGDSAHNQAMVHWSGHNSSVILILTKLYDFNLGSVTESSLWRSTDYGTTYEKLNDKVGLKTVLSYLYVNPTNKRKIMLLSDPEMESSILISSDEGATYQKYRLTFYIQSLLFHPKQEDWVLAYSLDQKLYSSMDFGRRWQLMHERITPNRFYWSVAGLDKEADLVHMEVRTTDGYAHYLTCRIQECAETTRSGPFARSIDISSLVVQDEYIFIQVTTSGRASYYVSYRREAFAQIKLPKYSLPKDMHIISTDENQVFAAVQEWNQNDTYNLYISDTRGIYFTLAMENIKSSRGLMGNIIIELYEVAGIKGIFLANKKVDDQVKTYITYNKGRDWRLLQAPDVDLRGSPVHCLLPFCSLHLHLQLSENPYSSGRISSKETAPGLVVATGNIGPELSYTDIGVFISSDGGNTWRQIFDEEYNVWFLDWGGALVAMKHTPLPVRHLWVSFDEGHSWDKYGFTSVPLFVDGALVEAGMETHIMTVFGHFSLRSEWQLVKVDYKSIFSRHCTKEDYQTWHLLNQGEPCVMGERKIFKKRKPGAQCALGRDHSGSVVSEPCVCANWDFECDYGYERHGESQCVPAFWYNPASPSKDCSLGQSYLNSTGYRRIVSNNCTDGLREKYTAKAQMCPGKAPRGLHVVTTDGRLVAEQGHNATFIILMEEGDLQRTNIQLDFGDGIAVSYANFSPIEDGIKHVYKSAGIFQVTAYAENNLGSDTAVLFLHVVCPVEHVHLRVPFVAIRNKEVNISAVVWPSQLGTLTYFWWFGNSTKPLITLDSSISFTFLAEGTDTITVQVAAGNALIQDTKEIAVHEYFQSQLLSFSPNLDYHNPDIPEWRKDIGNVIKRALVKVTSVPEDQILIAVFPGLPTSAELFILPPKNLTERRKGNEGDLEQIVETLFNALNQNLVQFELKPGVQVIVYVTQLTLAPLVDSSAGHSSS

SEQ ID NO: 1919 - protein, 2056 aa, synthetic construct
  REGION 1..2056: note = SORL1 (Q92673) ECD
SAALQPEPIKVYGQVSLNDSHNQMVVHWAGEKSNVIVALARDSLALARPKSSDVYVSYDYGKSFKKISDKLNFGLGNRSEAVIAQFYHSPADNKRYIFADAYAQYLWITFDFCNTLQGFSIPFRAADLLLHSKASNLLLGFDRSHPNKQLWKSDDFGQTWIMIQEHVKSFSWGIDPYDKPNTIYIERHEPSGYSTVFRSTDFFQSRENQEVILEEVRDFQLRDKYMFATKVVHLLGSEQQSSVQLWVSFGRKPMRAAQFVTRHPINEYYIADASEDQVFVCVSHSNNRTNLYISEAEGLKFSLSLENVLYYSPGGAGSDTLVRYFANEPFADFHRVEGLQGVYIATLINGSMNEENMRSVITFDKGGTWEFLQAPAFTGYGEKINCELSQGCSLHLAQRLSQLLNLQLRRMPILSKESAPGLIIATGSVGKNLASKTNVYISSSAGARWREALPGPHYYTWGDHGGIITAIAQGMETNELKYSTNEGETWKTFIFSEKPVFVYGLLTEPGEKSTVFTIFGSNKENVHSWLILQVNATDALGVPCTENDYKLWSPSDERGNECLLGHKTVFKRRTPHATCFNGEDFDRPVVVSNCSCTREDYECDFGFKMSEDLSLEVCVPDPEFSGKSYSPPVPCPVGSTYRRTRGYRKISGDTCSGGDVEARLEGELVPCPLAEENEFILYAVRKSIYRYDLASGATEQLPLTGLRAAVALDFDYEHNCLYWSDLALDVIQRLCLNGSTGQEVIINSGLETVEALAFEPLSQLLYWVDAGFKKIEVANPDGDFRLTIVNSSVLDRPRALVLVPQEGVMFWTDWGDLKPGIYRSNMDGSAAYHLVSEDVKWPNGISVDDQWIYWTDAYLECIERITFSGQQRSVILDNLPHPYAIAVFKNEIYWDDWSQLSIFRASKYSGSQMEILANQLTGLMDMKIFYKGKNTGSNACVPRPCSLLCLPKANNSRSCRCPEDVSSSVLPSGDLMCDCPQGYQLKNNTCVKQENTCLRNQYRCSNGNCINSIWWCDFDNDCGDMSDERNCPTTICDLDTQFRCQESGTCIPLSYKCDLEDDCGDNSDESHCEMHQCRSDEYNCSSGMCIRSSWVCDGDNDCRDWSDEANCTAIYHTCEASNFQCRNGHCIPQRWACDGDTDCQDGSDEDPVNCEKKCNGFRCPNGTCIPSSKHCDGLRDCSDGSDEQHCEPLCTHFMDFVCKNRQQCLFHSMVCDGIIQCRDGSDEDAAFAGCSQDPEFHKVCDEFGFQCQNGVCISLIWKCDGMDDCGDYSDEANCENPTEAPNCSRYFQFRCENGHCIPNRWKCDRENDCGDWSDEKDCGDSHILPFSTPGPSTCLPNYYRCSSGTCVMDTWVCDGYRDCADGSDEEACPLLANVTAASTPTQLGRCDRFEFECHQPKTCIPNWKRCDGHQDCQDGRDEANCPTHSTLTCMSREFQCEDGEACIVLSERCDGFLDCSDESDEKACSDELTVYKVQNLQWTADFSGDVTLTWMRPKKMPSASCVYNVYYRVVGESIWKTLETHSNKTNTVLKVLKPDTTYQVKVQVQCLSKAHNTNDFVTLRTPEGLPDAPRNLQLSLPREAEGVIVGHWAPPIHTHGLIREYIVEYSRSGSKMWASQRAASNFTEIKNLLVNTLYTVRVAAVTSRGIGNWSDSKSITTIKGKVIPPPDIHIDSYGENYLSFTLTMESDIKVNGYVVNLFWAFDTHKQERRTLNFRGSILSHKVGNLTAHTSYEISAWAKTDLGDSPLAFEHVMTRGVRPPAPSLKAKAINQTAVECTWTGPRNVVYGIFYATSFLDLYRNPKSLTTSLHNKTVIVSKDEQYLFLVRVVVPYQGPSSDYVVVKMIPDSRLPPRHLHVVHTGKTSVVIKWESPYDSPDQDLLYAVAVKDLIRKTDRSYKVKSRNSTVEYTLNKLEPGGKYHIIVQLGNMSKDSSIKITTVSLSAPDALKIITENDHVLLFWKSLALKEKHFNESRGYEIHMFDSAMNITAYLGNTTDNFFKISNLKMGHNYTFTVQARCLFGNQICGEPAILLYDELGSGADASATQAARSTDVA

SEQ ID NO: 1920 - protein, 678 aa, synthetic construct
  REGION 1..678: note = SORT1 (Q99523) ECD
SAPGEDEECGRVRDFVAKLANNTHQHVFDDLRGSVSLSWVGDSTGVILVLTTFHVPLVIMTFGQSKLYRSEDYGKNFKDITDLINNTFIRTEFGMAIGPENSGKVVLTAEVSGGSRGGRIFRSSDFAKNFVQTDLPFHPLTQMMYSPQNSDYLLALSTENGLWVSKNFGGKWEEIHKAVCLAKWGSDNTIFFTTYANGSCKADLGALELWRTSDLGKSFKTIGVKIYSFGLGGRFLFASVMADKDTTRRIHVSTDQGDTWSMAQLPSVGQEQFYSILAANDDMVFMHVDEPGDTGFGTIFTSDDRGIVYSKSLDRHLYTTTGGETDFTNVTSLRGVYITSVLSEDNSIQTMITFDQGGRWTHLRKPENSECDATAKNKNECSLHIHASYSISQKLNVPMAPLSEPNAVGIVIAHGSVGDAISVMVPDVYISDDGGYSWTKMLEGPHYYTILDSGGIIVAIEHSSRPINVIKFSTDEGQCWQTYTFTRDPIYFTGLASEPGARSMNISIWGFTESFLTSQWVSYTIDFKDILERNCEEKDYTIWLAHSTDPEDYEDGCILGYKEQFLRLRKSSVCQNGRDYVVTKQPSICLCSLEDFLCDFGYYRPENDSKCVEQPELKGHDLEFCLYGREEHLTTNGYRKIPGDKCQGGVNPVREVKDLKKKCTSNFLSPEKQNSKSN

SEQ ID NO: 1921 - protein, 192 aa, synthetic construct
  REGION 1..192: note = SPACA1 (Q9HBV2) ECD
TNVTAAVQDAGLAHEGEGEEETENNDSETAENYAPPETEDVSNRNVVKEVEFGMCTVTCGIGVREVILTNGCPGGESKCVVRVEECRGPTDCGWGKPISESLESVRLACIHTSPLNRFKYMWKLLRQDQQSIILVNDSAILEVRKESHPLAFECDTLDNNEIVATIKFTVYTSSELQMRRSSLPATDAALIF

SEQ ID NO: 1922 - protein, 170 aa, synthetic construct
  REGION 1..170: note = SPINT2 (O43291) ECD
ADRERSIHDFCLVSKVVGRCRASMPRWWYNVTDGSCQLFVYGGCDGNSNNYLTKEECLKKCATVTENATGDLATSRNAADSSVPSAPRRQDSEDHSSDMFNYEEYCTANAVTGPCRASFPRWYFDVERNSCNNFIYGGCRGNKNSYRSEEACMLRCFRQQENPPLPLGSK

SEQ ID NO: 1923 - protein, 234 aa, synthetic construct
  REGION 1..234: note = SPN (P16150) ECD
STTAVQTPTSGEPLVSTSEPLSSKMYTTSITSDPKADSTGDQTSALPPSTSINEGSPLWTSIGASTGSPLPEPTTYQEVSIKMSSVPQETPHATSHPAVPITANSLGSHTVTGGTITTNSPETSSRTSGAPVTTAASSLETSRGTSGPPLTMATVSLETSKGTSGPPVTMATDSLETSTGTTGPPVTMTTGSLEPSSGASGPQVSSVKLSTMMSPTTSTNASTVPFRNPDENSR

SEQ ID NO: 1924 - protein, 189 aa, synthetic construct
  REGION 1..189: note = SSR1 (P43307) ECD
VLFRGGPRGLLAVAQDLTEDEETVEDSIIEDEDDEAEVEEDEPTDLVEDKEEEDVSGEPEASPSADTTILFVKGEDFPANNIVKFLVGFTNKGTEDFIVESLDASFRYPQDYQFYIQNFTALPLNTVVPPQRQATFEYSFIPAEPMGGRPFGLVINLNYKDLNGNVFQDAVFNQTVTVIEREDGLDGET

SEQ ID NO: 1925 - protein, 2453 aa, synthetic construct
  REGION 1..2453: note = STAB1 (Q9NY15) ECD
QVLFKGCDVKTTFVTHVPCTSCAAIKKQTCPSGWLRELPDQITQDCRYEVQLGGSMVSMSGCRRKCRKQVVQKACCPGYWGSRCHECPGGAETPCNGHGTCLDGMDRNGTCVCQENFRGSACQECQDPNRFGPDCQSVCSCVHGVCNHGPRGDGSCLCFAGYTGPHCDQELPVCQELRCPQNTQCSAEAPSCRCLPGYTQQGSECRAPNPCWPSPCSLLAQCSVSPKGQAQCHCPENYHGDGMVCLPKDPCTDNLGGCPSNSTLCVYQKPGQAFCTCRPGLVSINSNASAGCFAFCSPFSCDRSATCQVTADGKTSCVCRESEVGDGRACYGHLLHEVQKATQTGRVFLQLRVAVAMMDQGCREILTTAGPFTVLVPSVSSFSSRTMNASLAQQLCRQHIIAGQHILEDTRTQQTRRWWTLAGQEITVTFNQFTKYSYKYKDQPQQTFNIYKANNIAANGVFHVVTGLRWQAPSGTPGDPKRTIGQILASTEAFSRFETILENCGLPSILDGPGPFTVFAPSNEAVDSLRDGRLIYLFTAGLSKLQELVRYHIYNHGQLTVEKLISKGRILTMANQVLAVNISEEGRILLGPEGVPLQRVDVMAANGVIHMLDGILLPPTILPILPKHCSEEQHKIVAGSCVDCQALNTSTCPPNSVKLDIFPKECVYIHDPTGLNVLKKGCASYCNQTIMEQGCCKGFFGPDCTQCPGGFSNPCYGKGNCSDGIQGNGACLCFPDYKGIACHICSNPNKHGEQCQEDCGCVHGLCDNRPGSGGVCQQGTCAPGFSGRFCNESMGDCGPTGLAQHCHLHARCVSQEGVARCRCLDGFEGDGFSCTPSNPCSHPDRGGCSENAECVPGSLGTHHCTCHKGWSGDGRVCVAIDECELDMRGGCHTDALCSYVGPGQSRCTCKLGFAGDGYQCSPIDPCRAGNGGCHGLATCRAVGGGQRVCTCPPGFGGDGFSCYGDIFRELEANAHFSIFYQWLKSAGITLPADRRVTALVPSEAAVRQLSPEDRAFWLQPRTLPNLVRAHFLQGALFEEELARLGGQEVATLNPTTRWEIRNISGRVWVQNASVDVADLLATNGVLHILSQVLLPPRGDVPGGQGLLQQLDLVPAFSLFRELLQHHGLVPQIEAATAYTIFVPTNRSLEAQGNSSHLDADTVRHHVVLGEALSMETLRKGGHRNSLLGPAHWIVFYNHSGQPEVNHVPLEGPMLEAPGRSLIGLSGVLTVGSSRCLHSHAEALREKCVNCTRRFRCTQGFQLQDTPRKSCVYRSGFSFSRGCSYTCAKKIQVPDCCPGFFGTLCEPCPGGLGGVCSGHGQCQDRFLGSGECHCHEGFHGTACEVCELGRYGPNCTGVCDCAHGLCQEGLQGDGSCVCNVGWQGLRCDQKITSPQCPRKCDPNANCVQDSAGASTCACAAGYSGNGIFCSEVDPCAHGHGGCSPHANCTKVAPGQRTCTCQDGYMGDGELCQEINSCLIHHGGCHIHAECIPTGPQQVSCSCREGYSGDGIRTCELLDPCSKNNGGCSPYATCKSTGDGQRTCTCDTAHTVGDGLTCRARVGLELLRDKHASFFSLRLLEYKELKGDGPFTIFVPHADLMSNLSQDELARIRAHRQLVFRYHVVGCRRLRSEDLLEQGYATALSGHPLRFSEREGSIYLNDFARVVSSDHEAVNGILHFIDRVLLPPEALHWEPDDAPIPRRNVTAAAQGFGYKIFSGLLKVAGLLPLLREASHRPFTMLWPTDAAFRALPPDRQAWLYHEDHRDKLAAILRGHMIRNVEALASDLPNLGPLRTMHGTPISFSCSRTRAGELMVGEDDARIVQRHLPFEGGLAYGIDQLLEPPGLGARCDHFETRPLRLNTCSICGLEPPCPEGSQEQGSPEACWRFYPKFWTSPPLHSLGLRSVWVHPSLWGRPQGLGRGCHRNCVTTTWKPSCCPGHYGSECQACPGGPSSPCSDRGVCMDGMSGSGQCLCRSGFAGTACELCAPGAFGPHCQACRCTVHGRCDEGLGGSGSCFCDEGWTGPRCEVQLELQPVCTPPCAPEAVCRAGNSCECSLGYEGDGRVCTVADLCQDGHGGCSEHANCSQVGTMVTCTCLPDYEGDGWSCRARNPCTDGHRGGCSEHANCLSTGLNTRRCECHAGYVGDGLQCLEESEPPVDRCLGQPPPCHSDAMCTDLHFQEKRAGVFHLQATSGPYGLNFSEAEAACEAQGAVLASFPQLSAAQQLGFHLCLMGWLANGSTAHPVVFPVADCGNGRVGIVSLGARKNLSERWDAYCFRVQDVACRCRNGFVGDGISTCNGKLLDVLAATANFSTFYGMLLGYANATQRGLDFLDFLDDELTYKTLFVPVNEGFVDNMTLSGPDLELHASNATLLSANASQGKLLPAHSGLSLIISDAGPDNSSWAPVAPGTVVVSRIIVWDIMAFNGIIHALASPLLAPPQPQAVLAPEAPPVAA

SEQ ID NO: 1926 - protein, 2439 aa, synthetic construct
  REGION 1..2439: note = STAB2 (Q8WWQ8) ECD
SPAETTGQARRCDRKSLLTIRTECRSCALNLGVKCPDGYTMITSGSVGVRDCRYTFEVRTYSLSLPGCRHICRKDYLQPRCCPGRWGPDCIECPGGAGSPCNGRGSCAEGMEGNGTCSCQEGFGGTACETCADDNLFGPSCSSVCNCVHGVCNSGLDGDGTCECYSAYTGPKCDKPIPECAALLCPENSRCSPSTEDENKLECKCLPNYRGDGKYCDPINPCLRKICHPHAHCTYLGPNRHSCTCQEGYRGDGQVCLPVDPCQINFGNCPTKSTVCKYDGPGQSHCECKEHYQNFVPGVGCSMTDICKSDNPCHRNANCTTVAPGRTECICQKGYVGDGLTCYGNIMERLRELNTEPRGKWQGRLTSFISLLDKAYAWPLSKLGPFTVLLPTDKGLKGFNVNELLVDNKAAQYFVKLHIIAGQMNIEYMNNTDMFYTLTGKSGEIFNSDKDNQIKLKLHGGKKKVKIIQGDIIASNGLLHILDRAMDKLEPTFESNNEQTIMTMLQPRYSKFRSLLEETNLGHALDEDGVGGPYTIFVPNNEALNNMKDGTLDYLLSPEGSRKLLELVRYHIVPFTQLEVATLISTPHIRSMANQLIQFNTTDNGQILANDVAMEEIEITAKNGRIYTLTGVLIPPSIVPILPHRCDETKREMKLGTCVSCSLVYWSRCPANSEPTALFTHRCVYSGRFGSLKSGCARYCNATVKIPKCCKGFYGPDCNQCPGGFSNPCSGNGQCADSLGGNGTCICEEGFQGSQCQFCSDPNKYGPRCNKKCLCVHGTCNNRIDSDGACLTGTCRDGSAGRLCDKQTSACGPYVQFCHIHATCEYSNGTASCICKAGYEGDGTLCSEMDPCTGLTPGGCSRNAECIKTGTGTHTCVCQQGWTGNGRDCSEINNCLLPSAGGCHDNASCLYVGPGQNECECKKGFRGNGIDCEPITSCLEQTGKCHPLASCQSTSSGVWSCVCQEGYEGDGFLCYGNAAVELSFLSEAAIFNRWINNASLQPTLSATSNLTVLVPSQQATEDMDQDEKSFWLSQSNIPALIKYHMLLGTYRVADLQTLSSSDMLATSLQGNFLHLAKVDGNITIEGASIVDGDNAATNGVIHIINKVLVPQRRLTGSLPNLLMRLEQMPDYSIFRGYIIQYNLANAIEAADAYTVFAPNNNAIENYIREKKVLSLEEDVLRYHVVLEEKLLKNDLHNGMHRETMLGFSYFLSFFLHNDQLYVNEAPINYTNVATDKGVIHGLGKVLEIQKNRCDNNDTTIIRGRCRTCSSELTCPFGTKSLGNEKRRCIYTSYFMGRRTLFIGCQPKCVRTVITRECCAGFFGPQCQPCPGNAQNVCFGNGICLDGVNGTGVCECGEGFSGTACETCTEGKYGIHCDQACSCVHGRCNQGPLGDGSCDCDVGWRGVHCDNATTEDNCNGTCHTSANCLTNSDGTASCKCAAGFQGNGTICTAINACEISNGGCSAKADCKRTTPGRRVCTCKAGYTGDGIVCLEINPCLENHGGCDKNAECTQTGPNQAACNCLPAYTGDGKVCTLINVCLTKNGGCSEFAICNHTGQVERTCTCKPNYIGDGFTCRGSIYQELPKNPKTSQYFFQLQEHFVKDLVGPGPFTVFAPLSAAFDEEARVKDWDKYGLMPQVLRYHVVACHQLLLENLKLISNATSLQGEPIVISVSQSTVYINNKAKIISSDIISTNGIVHIIDKLLSPKNLLITPKDNSGRILQNLTTLATNNGYIKFSNLIQDSGLLSVITDPIHTPVTLFWPTDQALHALPAEQQDFLFNQDNKDKLKEYLKFHVIRDAKVLAVDLPTSTAWKTLQGSELSVKCGAGRDIGDLFLNGQTCRIVQRELLFDLGVAYGIDCLLIDPTLGGRCDTFTTFDASGECGSCVNTPSCPRWSKPKGVKQKCLYNLPFKRNLEGCRERCSLVIQIPRCCKGYFGRDCQACPGGPDAPCNNRGVCLDQYSATGECKCNTGFNGTACEMCWPGRFGPDCLPCGCSDHGQCDDGITGSGQCLCETGWTGPSCDTQAVLPAVCTPPCSAHATCKENNTCECNLDYEGDGITCTVVDFCKQDNGGCAKVARCSQKGTKVSCSCQKGYKGDGHSCTEIDPCADGLNGGCHEHATCKMTGPGKHKCECKSHYVGDGLNCEPEQLPIDRCLQDNGQCHADAKCVDLHFQDTTVGVFHLRSPLGQYKLTFDKAREACANEAATMATYNQLSYAQKAKYHLCSAGWLETGRVAYPTAFASQNCGSGVVGIVDYGPRPNKSEMWDVFCYRMKDVNCTCKVGYVGDGFSCSGNLLQVLMSFPSLTNFLTEVLAYSNSSARGRAFLEHLTDLSIRGTLFVPQNSGLGENETLSGRDIEHHLANVSMFFYNDLVNGTTLQTRLGSKLLITASQDPLQPTETRFVDGRAILQWDIFASNGIIHVISRPLKAPPAPVTLTHT

SEQ ID NO: 1927 - protein, 191 aa, synthetic construct
  REGION 1..191: note = STIM1 (Q13586) ECD
LSHSHSEKATGTSSGANSEESTAAEFCRIDKPLCHSEDEKLSFEAVRNIHKLMDDDANGDVDVEESDEFLREDLNYHDPTVKHSTFHGEDKLISVEDLWKAWKSSEVYNWTVDEVVQWLITYVELPQYEETFRKLQLSGHAMPRLAVTNTTMTGTVLKMTDRSHRQKLQLKALDTVLFGPPLLTRHNHLKD

SEQ ID NO: 1928 - protein, 981 aa, synthetic construct
  REGION 1..981: note = SUCO (Q9UBS9) ECD
KESSSASASSYYSQDDNCALENEDVQFQKKDEREGPINAESLGKSGSNLPISPKEHKLKDDSIVDVQNTESKKLSPPVVETLPTVDLHEESSNAVVDSETVENISSSSTSEITPISKLDEIEKSGTIPIAKPSETEQSETDCDVGEALDASAPIEQPSFVSPPDSLVGQHIENVSSSHGKGKITKSEFESKVSASEQGGGDPKSALNASDNLKNESSDYTKPGDIDPTSVASPKDPEDIPTFDEWKKKVMEVEKEKSQSMHASSNGGSHATKKVQKNRNNYASVECGAKILAANPEAKSTSAILIENMDLYMLNPCSTKIWFVIELCEPIQVKQLDIANYELFSSTPKDFLVSISDRYPTNKWIKLGTFHGRDERNVQSFPLDEQMYAKYVKMFIKYIKVELLSHFGSEHFCPLSLIRVFGTSMVEEYEEIADSQYHSERQELFDEDYDYPLDYNTGEDKSSKNLLGSATNAILNMVNIAANILGAKTEDLTEGNKSISENATATAAPKMPESTPVSTPVPSPEYVTTEVHTHDMEPSTPDTPKESPIVQLVQEEEEEASPSTVTLLGSGEQEDESSPWFESETQIFCSELTTICCISSFSEYIYKWCSVRVALYRQRSRTALSKGKDYLVLAQPPLLLPAESVDVSVLQPLSGELENTNIEREAETVVLGDLSSSMHQDDLVNHTVDAVELEPSHSQTLSQSLLLDITPEINPLPKIEVSESVEYEAGHIPSPVIPQESSVEIDNETEQKSESFSSIEKPSITYETNKVNELMDNIIKEDVNSMQIFTKLSETIVPPINTATVPDNEDGEAKMNIADTAKQTLISVVDSSSLPEVKEEEQSPEDALLRGLQRTATDFYAELQNSTDLGYANGNLVHGSNQKESVFMRLNNRIKALEVNMSLSGRYLEELSQRYRKQMEEMQKAFNKTIVKLQNTSRIAEEQDQRQTEAIQLLQAQLTNMTQLVSNLSATVAELKREVSDR

SEQ ID NO: 1929 - protein, 692 aa, synthetic construct
  REGION 1..692: note = SUSD1 (Q6UWL2) ECD
APGPDGLDVCATCHEHATCQQREGKKICICNYGFVGNGRTQCVDKNECQFGATLVCGNHTSCHNTPGGFYCICLEGYRATNNNKTFIPNDGTFCTDIDECEVSGLCRHGGRCVNTHGSFECYCMDGYLPRNGPEPFHPTTDATSCTEIDCGTPPEVPDGYIIGNYTSSLGSQVRYACREGFFSVPEDTVSSCTGLGTWESPKLHCQEINCGNPPEMRHAILVGNHSSRLGGVARYVCQEGFESPGGKITSVCTEKGTWRESTLTCTEILTKINDVSLFNDTCVRWQINSRRINPKISYVISIKGQRLDPMESVREETVNLTTDSRTPEVCLALYPGTNYTVNISTAPPRRSMPAVIGFQTAEVDLLEDDGSFNISIFNETCLKLNRRSRKVGSEHMYQFTVLGQRWYLANFSHATSFNFTTREQVPVVCLDLYPTTDYTVNVTLLRSPKRHSVQITIATPPAVKQTISNISGFNETCLRWRSIKTADMEEMYLFHIWGQRWYQKEFAQEMTFNISSSSRDPEVCLDLRPGTNYNVSLRALSSELPVVISLTTQITEPPLPEVEFFTVHRGPLPRLRLRKAKEKNGPISSYQVLVLPLALQSTFSCDSEGASSFFSNASDADGYVAAELLAKDVPDDAMEIPIGDRLYYGEYYNAPLKRGSDYCIILRITSEWNKVRRHSCAVWAQVKDSSLM

SEQ ID NO: 1930 - protein, 758 aa, synthetic construct
  REGION 1..758: note = SUSD2 (Q9UGT4) ECD
QESCSMRCGALDGPCSCHPTCSGLGTCCLDFRDFCLEILPYSGSMMGGKDFVVRHFKMSSPTDASVICRFKDSIQTLGHVDSSGQVHCVSPLLYESGRIPFTVSLDNGHSFPRAGTWLAVHPNKVSMMEKSELVNETRWQYYGTANTSGNLSLTWHVKSLPTQTITIELWGYEETGMPYSQEWTAKWSYLYPLATHIPNSGSFTFTPKPAPPSYQRWRVGALRIIDSKNYAGQKDVQALWTNDHALAWHLSDDFREDPVAWARTQCQAWEELEDQLPNFLEELPDCPCTLTQARADSGRFFTDYGCDMEQGSVCTYHPGAVHCVRSVQASLRYGSGQQCCYTADGTQLLTADSSGGSTPDRGHDWGAPPFRTPPRVPSMSHWLYDVLSFYYCCLWAPDCPRYMQRRPSNDCRNYRPPRLASAFGDPHFVTFDGTNFTFNGRGEYVLLEAALTDLRVQARAQPGTMSNGTETRGTGLTAVAVQEGNSDVVEVRLANRTGGLEVLLNQEVLSFTEQSWMDLKGMFLSVAAGDRVSIMLASGAGLEVSVQGPFLSVSVLLPEKFLTHTHGLLGTLNNDPTDDFTLHSGRVLPPGTSPQELFLFGANWTVHNASSLLTYDSWFLVHNFLYQPKHDPTFEPLFPSETTLNPSLAQEAAKLCGDDHFCNFDVAATGSLSTGTATRVAHQLHQRRMQSLQPVVSCGWLAPPPNGQKEGNRYLAGSTIYFHCDNGYSLAGAETSTCQADGTWSSPTPKCQPGRSYA

SEQ ID NO: 1931 - protein, 278 aa, synthetic construct
  REGION 1..278: note = SUSD4 (Q5VX71) ECD
FGPAQLTGGFDDLQVCADPGIPENGFRTPSGGVFFEGSVARFHCQDGFKLKGATKRLCLKHFNGTLGWIPSDNSICVQEDCRIPQIEDAEIHNKTYRHGEKLIITCHEGFKIRYPDLHNMVSLCRDDGTWNNLPICQGCLRPLASSNGYVNISELQTSFPVGTVISYRCFPGFKLDGSAYLECLQNLIWSSSPPRCLALEVCPLPPMVSHGDFVCHPRPCERYNHGTVVEFYCDPGYSLTSDYKYITCQYGEWFPSYQVYCIKSEQTWPSTHETLLTT

SEQ ID NO: 1932 - protein, 539 aa, synthetic construct
  REGION 1..539: note = SUSD5 (O60279) ECD
ADGKFFVLESQNGSQGLQLEAARLSCKSRGAHLASADELRRVVQDCSFAVCTTGWLADGTLGTTVCSKGSGEQQIMRAVDVRIESNPVPGGTYSALCIKDEEKPCGDPPSFPHTILQGRTGLEMGDELLYVCAPGHIMGHRETAFTLLCNSCGEWYGLVQACGKDEAEAHIDYEDNFPDDRSVSFRELMEDSRTEADEDRGQGDSSEEAPKQDRLVSISVGRENIARDKVFVPTTGLPGAGSSVPADSPGSRLLQKHLFWFPAEAFHKPGLEKEVDDDTKKQFSAGDNHSGVKLVPGEPETKVIYGNTDGPSGPFVGKNDSKAGDPVVSSSDESWLDGYPVTEGAWRKTEAEEEEDGDRGDGSVGLDENVLVTPDQPILVEVKKPKSSTLTPSEGMTHSSVLPSQMLDVEALALRPVNASETEGIGDGDLTKYQSTLPWRFITEESPMATLSYELTSSTLEILTVNTVKQTPNHIPSTIMATTQPPVETTVPEIQDSFPYLLSEDFFGQEGPGPGASEELHPTLESCVGDGCPGLSRGP

SEQ ID NO: 1933 - protein, 248 aa, synthetic construct
  REGION 1..248: note = TACSTD2 (P09758) ECD
HTAAQDNCTCPTNKMTVCSPDGPGGRCQCRALGSGMAVDCSTLTSKCLLLKARMSAPKNARTLVRPSEHALVDNDGLYDPDCDPEGRFKARQCNQTSVCWCVNSVGVRRTDKGDLSLRCDELVRTHHILIDLRHRPTAGAFNHSDLDAELRRLFRERYRLHPKFVAAVHYEQPTIQIELRQNTSQKAAGDVDIGDAAYYFERDIKGESLFQGRGGLDLRVRGEPLQVERTLIYYLDEIPPKFSMKRLT

SEQ ID NO: 1934 - protein, 220 aa, synthetic construct
  REGION 1..220: note = TARM1 (B6A8C7) ECD
QGDTRGDGSLPKPSLSAWPSSVVPANSNVTLRCWTPARGVSFVLRKGGIILESPKPLDSTEGAAEFHLNNLKVRNAGEYTCEYYRKASPHILSQRSDVLLLLVTGHLSKPFLRTYQRGTVTAGGRVTLQCQKRDQLFVPIMFALLKAGTPSPIQLQSPAGKEIDFSLVDVTAGDAGNYSCMYYQTKSPFWASEPSDQLEILVTVPPGTTSSNYSLGNFVR

SEQ ID NO: 1935 - protein, 643 aa, synthetic construct
  REGION 1..643: note = TCTN2 (Q96GX1) ECD
DLAFIPPFIRMSGPAVSASLVGDTEGVTVSLAVLQDEAGILPIPTCGVLNNETEDWSVTVIPGAKVLEVTVRWKRGLDWCSSNETDSFSESPCILQTLLVSASHNSSCSAHLLIQVEIYANSSLTHNASENVTVIPNQVYQPLGPCPCNLTAGACDVRCCCDQECSSNLTTLFRRSCFTGVFGGDVNPPFDQLCSAGTTTRGVPDWFPFLCVQSPLANTPFLGYFYHGAVSPKQDSSFEVYVDTDAKDFADFGYKQGDPIMTVKKAYFTIPQVSLAGQCMQNAPVAFLHNFDVKCVTNLELYQERDGIINAKIKNVALGGIVTPKVIYEEATDLDKFITNTETPLNNGSTPRIVNVEEHYIFKWNNNTISEINVKIFRAEINAHQKGIMTQRFVVKFLSYNSGNEEELSGNPGYQLGKPVRALNINRMNNVTTLHLWQSAGRGLCTSATFKPILFGENVLSGCLLEVGINENCTQLRENAVERLDSLIQATHVAMRGNSDYADLSDGWLEIIRVDAPDPGADPLASSVNGMCLDIPAHLSIRILISDAGAVEGITQQEILGVETRFSSVNWQYQCGLTCEHKADLLPISASVQFIKIPAQLPHPLTRFQINYTEYDCNRNEVCWPQLLYPWTQYYQGELHSQC

SEQ ID NO: 1936 - protein, 559 aa, synthetic construct
  REGION 1..559: note = TCTN3 (Q6NUS6) ECD
QPSSSPSGAVPTSLELQRGTDGGTLQSPSEATATRPAVPGLPTVVPTLVTPSAPGNRTVDLFPVLPICVCDLTPGACDINCCCDRDCYLLHPRTVFSFCLPGSVRSSSWVCVDNSVIFRSNSPFPSRVFMDSNGIRQFCVHVNNSNLNYFQKLQKVNATNFQALAAEFGGESFTSTFQTQSPPSFYRAGDPILTYFPKWSVISLLRQPAGVGAGGLCAESNPAGFLESKSTTCTRFFKNLASSCTLDSALNAASYYNFTVLKVPRSMTDPQNMEFQVPVILTSQANAPLLAGNTCQNVVSQVTYEIETNGTFGIQKVSVSLGQTNLTVEPGASLQQHFILRFRAFQQSTAASLTSPRSGNPGYIVGKPLLALTDDISYSMTLLQSQGNGSCSVKRHEVQFGVNAISGCKLRLKKADCSHLQQEIYQTLHGRPRPEYVAIFGNADPAQKGGWTRILNRHCSISAINCTSCCLIPVSLEIQVLWAYVGLLSNPQAHVSGVRFLYQCQSIQDSQQVTEVSLTTLVNFVDITQKPQPPRGQPKMDWKWPFDFFPFKVAFSRGV

SEQ ID NO: 1937 - protein, 726 aa, synthetic construct
  REGION 1..726: note = TEK (Q02763) ECD
AMDLILINSLPLVSDAETSLTCIASGWRPHEPITIGRDFEALMNQHQDPLEVTQDVTREWAKKVVWKREKASKINGAYFCEGRVRGEAIRIRTMKMRQQASFLPATLTMTVDKGDNVNISFKKVLIKEEDAVIYKNGSFIHSVPRHEVPDILEVHLPHAQPQDAGVYSARYIGGNLFTSAFTRLIVRRCEAQKWGPECNHLCTACMNNGVCHEDTGECICPPGFMGRTCEKACELHTFGRTCKERCSGQEGCKSYVFCLPDPYGCSCATGWKGLQCNEACHPGFYGPDCKLRCSCNNGEMCDRFQGCLCSPGWQGLQCEREGIQRMTPKIVDLPDHIEVNSGKFNPICKASGWPLPTNEEMTLVKPDGTVLHPKDFNHTDHFSVAIFTIHRILPPDSGVWVCSVNTVAGMVEKPFNISVKVLPKPLNAPNVIDTGHNFAVINISSEPYFGDGPIKSKKLLYKPVNHYEAWQHIQVTNEIVTLNYLEPRTEYELCVQLVRRGEGGEGHPGPVRRFTTASIGLPPPRGLNLLPKSQTTLNLTWQPIFPSSEDDFYVEVERRSVQKSDQQNIKVPGNLTSVLLNNLHPREQYVVRARVNTKAQGEWSEDLTAWTLSDILPPQPENIKISNITHSSAVISWTILDGYSISSITIRYKVQGKNEDQHVDVKIKNATITQYQLKGLEPETAYQVDIFAENNIGSSNPAFSHELVTLPESQAPADLGGGKMLL

SEQ ID NO: 1938 - protein, 75 aa, synthetic construct
  REGION 1..75: note = TGFA (P01135) ECD
ENSTSPLSADPPVAAAVVSHFNDCPDSHTQFCFHGTCRFLVQEDKPACVCHSGYVGARCEHADLLAVVAASQKKQ

SEQ ID NO: 1939 - protein, 93 aa, synthetic construct
  REGION 1..93: note = TGFBR1 (P36897) ECD
LQCFCHLCTKDNFTCVTDGLCFVSVTETTDKVIHNSMCIAEIDLIPRDRPFVCAPSSKTGSVTTTYCCNQDHCNKIELPTTVKSSPGLGPVEL

SEQ ID NO: 1940 - protein, 144 aa, synthetic construct
  REGION 1..144: note = TGFBR2 (P37173) ECD
TIPPHVQKSVNNDMIVTDNNGAVKFPQLCKFCDVRFSTCDNQKSCMSNCSITSICEKPQEVCVAVWRKNDENITLETVCHDPKLPYHDFILEDAASPKCIMKEKKKPGETFFMCSCSSDECNDNIIFSEEYNTSNPDLLLVIFQ

SEQ ID NO: 1941 - protein, 767 aa, synthetic construct
  REGION 1..767: note = TGFBR3 (Q03167) ECD
GPEPGALCELSPVSASHPVQALMESFTVLSGCASRGTTGLPQEVHVLNLRTAGQGPGQLQREVTLHLNPISSVHIHHKSVVFLLNSPHPLVWHLKTERLATGVSRLFLVSEGSVVQFSSANFSLTAETEERNFPHGNEHLLNWARKEYGAVTSFTELKIARNIYIKVGEDQVFPPKCNIGKNFLSLNYLAEYLQPKAAEGCVMSSQPQNEEVHIIELITPNSNPYSAFQVDITIDIRPSQEDLEVVKNLILILKCKKSVNWVIKSFDVKGSLKIIAPNSIGFGKESERSMTMTKSIRDDIPSTQGNLVKWALDNGYSPITSYTMAPVANRFHLRLENNAEEMGDEEVHTIPPELRILLDPGALPALQNPPIRGGEGQNGGLPFPFPDISRRVWNEEGEDGLPRPKDPVIPSIQLFPGLREPEEVQGSVDIALSVKCDNEKMIVAVEKDSFQASGYSGMDVTLLDPTCKAKMNGTHFVLESPLNGCGTRPRWSALDGVVYYNSIVIQVPALGDSSGWPDGYEDLESGDNGFPGDMDEGDASLFTRPEIVVFNCSLQQVRNPSSFQEQPHGNITFNMELYNTDLFLVPSQGVFSVPENGHVYVEVSVTKAEQELGFAIQTCFISPYSNPDRMSHYTIIENICPKDESVKFYSPKRVHFPIPQADMDKKRFSFVFKPVFNTSLLFLQCELTLCTKMEKHPQKLPKCVPPDEACTSLDASIIWAMMQNKKTFTKPLAVIHHEAESKEKGPSMKEPNPISPPIFHGLDTLTV

SEQ ID NO: 1942 - protein, 360 aa, synthetic construct
  REGION 1..360: note = TGOLN2 (O43493) ECD
ATESVKQEEAGVRPSAGNVSTHPSLSQRPGGSTKSHPEPQTPKDSPSKSSAEAQTPEDTPNKSGAEAKTQKDSSNKSGAEAKTQKGSTSKSGSEAQTTKDSTSKSHPELQTPKDSTGKSGAEAQTPEDSPNRSGAEAKTQKDSPSKSGSEAQTTKDVPNKSGADGQTPKDGSSKSGAEDQTPKDVPNKSGAEKQTPKDGSNKSGAEEQGPIDGPSKSGAEEQTSKDSPNKVVPEQPSRKDHSKPISNPSDNKELPKADTNQLADKGKLSPHAFKTESGEETDLISPPQEEVKSSEPTEDVEPKEAEDDDTGPEEGSPPKEEKEKMSGSASSENREGTLSDSTGSEKDDLYPNGSGNGSAE

SEQ ID NO: 1943 - protein, 497 aa, synthetic construct
  REGION 1..497: note = THBD (P07204) ECD
APAEPQPGGSQCVEHDCFALYPGPATFLNASQICDGLRGHLMTVRSSVAADVISLLLNGDGGVGRRRLWIGLQLPPGCGDPKRLGPLRGFQWVTGDNNTSYSRWARLDLNGAPLCGPLCVAVSAAEATVPSEPIWEEQQCEVKADGFLCEFHFPATCRPLAVEPGAAAAAVSITYGTPFAARGADFQALPVGSSAAVAPLGLQLMCTAPPGAVQGHWAREAPGAWDCSVENGGCEHACNAIPGAPRCQCPAGAALQADGRSCTASATQSCNDLCEHFCVPNPDQPGSYSCMCETGYRLAADQHRCEDVDDCILEPSPCPQRCVNTQGGFECHCYPNYDLVDGECVEPVDPCFRANCEYQCQPLNQTSYLCVCAEGFAPIPHEPHRCQMFCNQTACPADCDPNTQASCECPEGYILDDGFICTDIDECENGGFCSGVCHNLPGTFECICGPDSALARHIGTDCDSGKVDGGDSGSGEPPPSPTPGSTLTPPAVGLVHS

SEQ ID NO: 1944 - protein, 389 aa, synthetic construct
  REGION 1..389: note = THSD1 (Q9NS62) ECD
EYLLLREPGHVALSNDTVYVDFQYFDGANGTLRNVSVLLLEANTNQTVTTKYLLTNQSQGTLKFECFYFKEAGDYWFTMTPEATDNSTPFPWWEKSAFLKVEWPVFHVDLNRSAKAAEGTFQVGLFTSQPLCPFPVDKPNIVVDVIFTNSLPEARRNSRQPLEIRTSKRTELAQGQWVEFGCAPLGPEAYVTVVLKLLGRDSVITSTGPIDLAQKFGYKLVMVPELTCESGVEVTVLPPPCTFVQGVVTVFKEAPRYPGKRTIHLAENSLPLGERRTIFNCTLFDMGKNKYCFDFGISSRSHFSAKEECMLIQRNTETWGLWQPWSQCSATCGDGVRERRRVCLTSFPSSPVCPGMSLEASLCSLEECAAFQPSSPSPLQPQGPVKSNN

SEQ ID NO: 1945 - protein, 1560 aa, synthetic construct
  REGION 1..1560: note = THSD7A (Q9UPZ6) ECD
AAQGEAEAPTLYLWKTGPWGRCMGDECGPGGIQTRAVWCAHVEGWTTLHTNCKQAERPNNQQNCFKVCDWHKELYDWRLGPWNQCQPVISKSLEKPLECIKGEEGIQVREIACIQKDKDIPAEDIICEYFEPKPLLEQACLIPCQQDCIVSEFSAWSECSKTCGSGLQHRTRHVVAPPQFGGSGCPNLTEFQVCQSSPCEAEELRYSLHVGPWSTCSMPHSRQVRQARRRGKNKEREKDRSKGVKDPEARELIKKKRNRNRQNRQENKYWDIQIGYQTREVMCINKTGKAADLSFCQQEKLPMTFQSCVITKECQVSEWSEWSPCSKTCHDMVSPAGTRVRTRTIRQFPIGSEKECPEFEEKEPCLSQGDGVVPCATYGWRTTEWTECRVDPLLSQQDKRRGNQTALCGGGIQTREVYCVQANENLLSQLSTHKNKEASKPMDLKLCTGPIPNTTQLCHIPCPTECEVSPWSAWGPCTYENCNDQQGKKGFKLRKRRITNEPTGGSGVTGNCPHLLEAIPCEEPACYDWKAVRLGNCEPDNGKECGPGTQVQEVVCINSDGEEVDRQLCRDAIFPIPVACDAPCPKDCVLSTWSTWSSCSHTCSGKTTEGKQIRARSILAYAGEEGGIRCPNSSALQEVRSCNEHPCTVYHWQTGPWGQCIEDTSVSSFNTTTTWNGEASCSVGMQTRKVICVRVNVGQVGPKKCPESLRPETVRPCLLPCKKDCIVTPYSDWTSCPSSCKEGDSSIRKQSRHRVIIQLPANGGRDCTDPLYEEKACEAPQACQSYRWKTHKWRRCQLVPWSVQQDSPGAQEGCGPGRQARAITCRKQDGGQAGIHECLQYAGPVPALTQACQIPCQDDCQLTSWSKFSSCNGDCGAVRTRKRTLVGKSKKKEKCKNSHLYPLIETQYCPCDKYNAQPVGNWSDCILPEGKVEVLLGMKVQGDIKECGQGYRYQAMACYDQNGRLVETSRCNSHGYIEEACIIPCPSDCKLSEWSNWSRCSKSCGSGVKVRSKWLREKPYNGGRPCPKLDHVNQAQVYEVVPCHSDCNQYLWVTEPWSICKVTFVNMRENCGEGVQTRKVRCMQNTADGPSEHVEDYLCDPEEMPLGSRVCKLPCPEDCVISEWGPWTQCVLPCNQSSFRQRSADPIRQPADEGRSCPNAVEKEPCNLNKNCYHYDYNVTDWSTCQLSEKAVCGNGIKTRMLDCVRSDGKSVDLKYCEALGLEKNWQMNTSCMVECPVNCQLSDWSPWSECSQTCGLTGKMIRRRTVTQPFQGDGRPCPSLMDQSKPCPVKPCYRWQYGQWSPCQVQEAQCGEGTRTRNISCVVSDGSADDFSKVVDEEFCADIELIIDGNKNMVLEESCSQPCPGDCYLKDWSSWSLCQLTCVNGEDLGFGGIQVRSRPVIIQELENQHLCPEQMLETKSCYDGQCYEYKWMASAWKGSSRTVWCQRSDGINVTGGCLVMSQPDADRSCNPPCSQPHSYCSETKTCHCEEGYTEVMSSNSTLEQCTLIPVVVLPTMEDKRGDVKTSRAVHPTQPSSNPAGRGRTWFLQPFGPDGRLKTW

SEQ ID NO: 1946 - protein, 1524 aa, synthetic construct
  REGION 1..1524: note = THSD7B (Q9C0I4) ECD
AHLEGKKDNQFIWKPGPWGRCTGDCGPGGVQSRAVWCFHVDGWTSHLSNCGESNRPPKERSCFRVCDWHSDLFQWEVSDWHHCVLVPYARGEVKPRTAECVTAQHGLQHRMVRCIQKLNRTVVANEICEHFALQPPTEQACLIPCPRDCVVSEFLPWSNCSKGCGKKLQHRTRAVIAPPLFGGLQCPNLTESRACDAPISCPLGEEEYTFSLKVGPWSKCRLPHLKEINPSGRTVLDFNSDSNERVTFKHQSYKAHHHSKSWAIEIGYQTRQVSCTRSDGQNAMLSLCLQDSFPLTVQSCIMPKDCETSQWSSWSPCSKTCRSGSLLPGFRSRSRNVKHMAIGGGKECPELLEKEACIVEGELLQQCPRYSWRTSEWKECQVSLLLEQQDPHWHVTGPVCGGGIQTREVYCAQSVPAAAALRAKEVSRPVEKALCVGPAPLPSQLCNIPCSTDCIVSSWSAWGLCIHENCHDPQGKKGFRTRQRHVLMESTGPAGHCPHLVESVPCEDPMCYRWLASEGICFPDHGKCGLGHRILKAVCQNDRGEDVSGSLCPVPPPPERKSCEIPCRMDCVLSEWTEWSSCSQSCSNKNSDGKQTRSRTILALAGEGGKPCPPSQALQEHRLCNDHSCMQLHWETSPWGPCSEDTLVTALNATIGWNGEATCGVGIQTRRVFCVKSHVGQVMTKRCPDSTRPETVRPCFLPCKKDCIVTAFSEWTPCPRMCQAGNATVKQSRYRIIIQEAANGGQECPDTLYEERECEDVSLCPVYRWKPQKWSPCILVPESVWQGITGSSEACGKGLQTRAVSCISDDNRSAEMMECLKQTNGMPLLVQECTVPCREDCTFTAWSKFTPCSTNCEATKSRRRQLTGKSRKKEKCQDSDLYPLVETELCPCDEFISQPYGNWSDCILPEGRREPHRGLRVQADSKECGEGLRFRAVACSDKNGRPVDPSFCSSSGYIQEKCVIPCPFDCKLSDWSSWGSCSSSCGIGVRIRSKWLKEKPYNGGRPCPKLDLKNQVHEAVPCYSECNQYSWVVEHWSSCKINNELRSLRCGGGTQSRKIRCVNTADGEGGAVDSNLCNQDEIPPETQSCSLMCPNECVMSEWGLWSKCPQSCDPHTMQRRTRHLLRPSLNSRTCAEDSQVQPCLLNENCFQFQYNLTEWSTCQLSENAPCGQGVRTRLLSCVCSDGKPVSMDQCEQHNLEKPQRMSIPCLVECVVNCQLSGWTAWTECSQTCGHGGRMSRTRFIIMPTQGEGRPCPTELTQEKTCPVTPCYSWVLGNWSACKLEGGDCGEGVQIRSLSCMVHSGSISHAAGRVEDALCGEMPFQDSILKQLCSVPCPGDCHLTEWSEWSTCELTCIDGRSFETVGRQSRSRTFIIQSFENQDSCPQQVLETRPCTGGKCYHYTWKASLWNNNERTVWCQRSDGVNVTGGCSPQARPAAIRQCIPACRKPFSYCTQGGVCGCEKGYTEIMKSNGFLDYCMKVPGSEDKKADVKNLSGKNRPVNSKIHDIFKGWSLQPLDPDGRVK

SEQ ID NO: 1947 - protein, 738 aa, synthetic construct
  REGION 1..738: note = TIE1 (P35590) ECD
AVDLTLLANLRLTDPQRFFLTCVSGEAGAGRGSDAWGPPLLLEKDDRIVRTPPGPPLRLARNGSHQVTLRGFSKPSDLVGVFSCVGGAGARRTRVIYVHNSPGAHLLPDKVTHTVNKGDTAVLSARVHKEKQTDVIWKSNGSYFYTLDWHEAQDGRFLLQLPNVQPPSSGIYSATYLEASPLGSAFFRLIVRGCGAGRWGPGCTKECPGCLHGGVCHDHDGECVCPPGFTGTRCEQACREGRFGQSCQEQCPGISGCRGLTFCLPDPYGCSCGSGWRGSQCQEACAPGHFGADCRLQCQCQNGGTCDRFSGCVCPSGWHGVHCEKSDRIPQILNMASELEFNLETMPRINCAAAGNPFPVRGSIELRKPDGTVLLSTKAIVEPEKTTAEFEVPRLVLADSGFWECRVSTSGGQDSRRFKVNVKVPPVPLAAPRLLTKQSRQLVVSPLVSFSGDGPISTVRLHYRPQDSTMDWSTIVVDPSENVTLMNLRPKTGYSVRVQLSRPGEGGEGAWGPPTLMTTDCPEPLLQPWLEGWHVEGTDRLRVSWSLPLVPGPLVGDGFLLRLWDGTRGQERRENVSSPQARTALLTGLTPGTHYQLDVQLYHCTLLGPASPPAHVLLPPSGPPAPRHLHAQALSDSEIQLTWKHPEALPGPISKYVVEVQVAGGAGDPLWIDVDRPEETSTIIRGLNASTRYLFRMRASIQGLGDWSNTVEESTLGNGLQAEGPVQESRAAEEGLDQ

SEQ ID NO: 1948 - protein, 120 aa, synthetic construct
  REGION 1..120: note = TIGIT (Q495A1) ECD
MMTGTIETTGNISAEKGGSIILQCHLSSTTAQVTQVNWEQQDQLLAICNADLGWHISPSFKDRVAPGPGLGLTLQSLTVNDTGEYFCIYHTYPDGTYTGRIFLEVLESSVAEHGARFQIP

SEQ ID NO: 1949 - protein, 290 aa, synthetic construct [sequence omitted]

SEQ ID NO: 1950 - protein, 556 aa, synthetic construct
  REGION 1..556: note = TLR1 (Q15399) ECD
SEFLVDRSKNGLIHVPKDLSQKTTILNISQNYISELWTSDILSLSKLRILIISHNRIQYLDISVFKFNQELEYLDLSHNKLVKISCHPTVNLKHLDLSFNAFDALPICKEFGNMSQLKFLGLSTTHLEKSSVLPIAHLNISKVLLVLGETYGEKEDPEGLQDFNTESLHIVFPTNKEFHFILDVSVKTVANLELSNIKCVLEDNKCSYFLSILAKLQTNPKLSNLTLNNIETTWNSFIRILQLVWHTTVWYFSISNVKLQGQLDFRDFDYSGTSLKALSIHQVVSDVFGFPQSYIYEIFSNMNIKNFTVSGTRMVHMLCPSKISPFLHLDFSNNLLTDTVFENCGHLTELETLILQMNQLKELSKIAEMTTQMKSLQQLDISQNSVSYDEKKGDCSWTKSLLSLNMSSNILTDTIFRCLPPRIKVLDLHSNKIKSIPKQVVKLEALQELNVAFNSLTDLPGCGSFSSLSVLIIDHNSVSHPSADFFQSCQKMRSIKAGDNPFQCTCELGEFVKNIDQVSSEVLEGWPDSYKCDYPESYRGTLLKDFHMSELSCNIT

SEQ ID NO: 1951 - protein, 557 aa, synthetic construct
  REGION 1..557: note = TLR10 (Q9BXR5) ECD
DAPELPEERELMTNCSNMSLRKVPADLTPATTTLDLSYNLLFQLQSSDFHSVSKLRVLILCHNRIQQLDLKTFEFNKELRYLDLSNNRLKSVTWYLLAGLRYLDLSFNDFDTMPICEEAGNMSHLEILGLSGAKIQKSDFQKIAHLHLNTVFLGFRTLPHYEEGSLPILNTTKLHIVLPMDTNFWVLLRDGIKTSKILEMTNIDGKSQFVSYEMQRNLSLENAKTSVLLLNKVDLLWDDLFLILQFVWHTSVEHFQIRNVTFGGKAYLDHNSFDYSNTVMRTIKLEHVHFRVFYIQQDKIYLLLTKMDIENLTISNAQMPHMLFPNYPTKFQYLNFANNILTDELFKRTIQLPHLKTLILNGNKLETLSLVSCFANNTPLEHLDLSQNLLQHKNDENCSWPETVVNMNLSYNKLSDSVFRCLPKSIQILDLNNNQIQTVPKETIHLMALRELNIAFNFLTDLPGCSHFSRLSVLNIEMNFILSPSLDFVQSCQEVKTLNAGRNPFRCTCELKNFIQLETYSEVMMVGWSDSYTCEYPLNLRGTRLKDVHLHELSCNT

SEQ ID NO: 1952 - protein, 568 aa, synthetic construct
  REGION 1..568: note = TLR2 (O60603) ECD
ESSNQASLSCDRNGICKGSSGSLNSIPSGLTEAVKSLDLSNNRITYISNSDLQRCVNLQALVLTSNGINTIEEDSFSSLGSLEHLDLSYNYLSNLSSSWFKPLSSLTFLNLLGNPYKTLGETSLFSHLTKLQILRVGNMDTFTKIQRKDFAGLTFLEELEIDASDLQSYEPKSLKSIQNVSHLILHMKQHILLLEIFVDVTSSVECLELRDTDLDTFHFSELSTGETNSLIKKFTFRNVKITDESLFQVMKLLNQISGLLELEFDDCTLNGVGNFRASDNDRVIDPGKVETLTIRRLHIPRFYLFYDLSTLYSLTERVKRITVENSKVFLVPCLLSQHLKSLEYLDLSENLMVEEYLKNSACEDAWPSLQTLILRQNHLASLEKTGETLLTLKNLTNIDISKNSFHSMPETCQWPEKMKYLNLSSTRIHSVTGCIPKTLEILDVSNNNLNLFSLNLPQLKELYISRNKLMTLPDASLLPMLLVLKISRNAITTFSKEQLDSFHTLKTLEAGGNNFICSCEFLSFTQEQQALAKVLIDWPANYLCDSPSHVRGQQVQDVRLSVSECHRT

SEQ ID NO: 1953 - protein, 681 aa, synthetic construct
  REGION 1..681: note = TLR3 (O15455) ECD
STTKCTVSHEVADCSHLKLTQVPDDLPTNITVLNLTHNQLRRLPAANFTRYSQLTSLDVGFNTISKLEPELCQKLPMLKVLNLQHNELSQLSDKTFAFCTNLTELHLMSNSIQKIKNNPFVKQKNLITLDLSHNGLSSTKLGTQVQLENLQELLLSNNKIQALKSEELDIFANSSLKKLELSSNQIKEFSPGCFHAIGRLFGLFLNNVQLGPSLTEKLCLELANTSIRNLSLSNSQLSTTSNTTFLGLKWTNLTMLDLSYNNLNVVGNDSFAWLPQLEYFFLEYNNIQHLFSHSLHGLFNVRYLNLKRSFTKQSISLASLPKIDDFSFQWLKCLEHLNMEDNDIPGIKSNMFTGLINLKYLSLSNSFTSLRTLTNETFVSLAHSPLHILNLTKNKISKIESDAFSWLGHLEVLDLGLNEIGQELTGQEWRGLENIFEIYLSYNKYLQLTRNSFALVPSLQRLMLRRVALKNVDSSPSPFQPLRNLTILDLSNNNIANINDDMLEGLEKLEILDLQHNNLARLWKHANPGGPIYFLKGLSHLHILNLESNGFDEIPVEVFKDLFELKIIDLGLNNLNTLPASVFNNQVSLKSLNLQKNLITSVEKKVFGPAFRNLTELDMRFNPFDCTCESIAWFVNWINETHTNIPELSSHYLCNTPPHYHGFPVRLFDTSSCKDSAPFEL

SEQ ID NO: 1954 - protein, 608 aa, synthetic construct
  REGION 1..608: note = TLR4 (O00206) ECD
ESWEPCVEVVPNITYQCMELNFYKIPDNLPFSTKNLDLSFNPLRHLGSYSFFSFPELQVLDLSRCEIQTIEDGAYQSLSHLSTLILTGNPIQSLALGAFSGLSSLQKLVAVETNLASLENFPIGHLKTLKELNVAHNLIQSFKLPEYFSNLTNLEHLDLSSNKIQSIYCTDLRVLHQMPLLNLSLDLSLNPMNFIQPGAFKEIRLHKLTLRNNFDSLNVMKTCIQGLAGLEVHRLVLGEFRNEGNLEKFDKSALEGLCNLTIEEFRLAYLDYYLDDIIDLFNCLTNVSSFSLVSVTIERVKDFSYNFGWQHLELVNCKFGQFPTLKLKSLKRLTFTSNKGGNAFSEVDLPSLEFLDLSRNGLSFKGCCSQSDFGTTSLKYLDLSFNGVITMSSNFLGLEQLEHLDFQHSNLKQMSEFSVFLSLRNLIYLDISHTHTRVAFNGIFNGLSSLEVLKMAGNSFQENFLPDIFTELRNLTFLDLSQCQLEQLSPTAFNSLSSLQVLNMSHNNFFSLDTFPYKCLNSLQVLDYSLNHIMTSKKQELQHFPSSLAFLNLTQNDFACTCEHQSFLQWIKDQRQLLVEVERMECATPSDKQGMPVLSLNITCQMNK

SEQ ID NO: 1955 - protein, 619 aa, synthetic construct
  REGION 1..619: note = TLR5 (O60602) ECD
IPSCSFDGRIAFYRFCNLTQVPQVLNTTERLLLSFNYIRTVTASSFPFLEQLQLLELGSQYTPLTIDKEAFRNLPNLRILDLGSSKIYFLHPDAFQGLFHLFELRLYFCGLSDAVLKDGYFRNLKALTRLDLSKNQIRSLYLHPSFGKLNSLKSIDFSSNQIFLVCEHELEPLQGKTLSFFSLAANSLYSRVSVDWGKCMNPFRNMVLEILDVSGNGWTVDITGNFSNAISKSQAFSLILAHHIMGAGFGFHNIKDPDQNTFAGLARSSVRHLDLSHGFVFSLNSRVFETLKDLKVLNLAYNKINKIADEAFYGLDNLQVLNLSYNLLGELYSSNFYGLPKVAYIDLQKNHIAIIQDQTFKFLEKLQTLDLRDNALTTIHFIPSIPDIFLSGNKLVTLPKINLTANLIHLSENRLENLDILYFLLRVPHLQILILNQNRFSSCSGDQTPSENPSLEQLFLGENMLQLAWETELCWDVFEGLSHLQVLYLNHNYLNSLPPGVFSHLTALRGLSLNSNRLTVLSHNDLPANLEILDISRNQLLAPNPDVFVSLSVLDITHNKFICECELSTFINWLNHTNVTIAGPPADIYCVYPDSFSGVSLFSLSTEGCDEEEVLKSLK

SEQ ID NO: 1956 - protein, 555 aa, synthetic construct
  REGION 1..555: note = TLR6 (Q9Y2C9) ECD
NEFAVDKSKRGLIHVPKDLPLKTKVLDMSQNYIAELQVSDMSFLSELTVLRLSHNRIQLLDLSVFKFNQDLEYLDLSHNQLQKISCHPIVSFRHLDLSFNDFKALPICKEFGNLSQLNFLGLSAMKLQKLDLLPIAHLHLSYILLDLRNYYIKENETESLQILNAKTLHLVFHPTSLFAIQVNISVNTLGCLQLTNIKLNDDNCQVFIKFLSELTRGSTLLNFTLNHIETTWKCLVRVFQFLWPKPVEYLNIYNLTIIESIREEDFTYSKTTLKALTIEHITNQVFLFSQTALYTVFSEMNIMMLTISDTPFIHMLCPHAPSTFKFLNFTQNVFTDSIFEKCSTLVKLETLILQKNGLKDLFKVGLMTKDMPSLEILDVSWNSLESGRHKENCTWVESIVVLNLSSNMLTDSVFRCLPPRIKVLDLHSNKIKSVPKQVVKLEALQELNVAFNSLTDLPGCGSFSSLSVLIIDHNSVSHPSADFFQSCQKMRSIKAGDNPFQCTCELREFVKNIDQVSSEVLEGWPDSYKCDYPESYRGSPLKDFHMSELSCNITL

SEQ ID NO: 1957 - protein, 813 aa, synthetic construct
  REGION 1..813: note = TLR7 (Q9NYK1) ECD
ARWFPKTLPCDVTLDVPKNHVIVDCTDKHLTEIPGGIPTNTTNLTLTINHIPDISPASFHRLDHLVEIDFRCNCVPIPLGSKNNMCIKRLQIKPRSFSGLTYLKSLYLDGNQLLEIPQGLPPSLQLLSLEANNIFSIRKENLTELANIEILYLGQNCYYRNPCYVSYSIEKDAFLNLTKLKVLSLKDNNVTAVPTVLPSTLTELYLYNNMIAKIQEDDFNNLNQLQILDLSGNCPRCYNAPFPCAPCKNNSPLQIPVNAFDALTELKVLRLHSNSLQHVPPRWFKNINKLQELDLSQNFLAKEIGDAKFLHFLPSLIQLDLSFNFELQVYRASMNLSQAFSSLKSLKILRIRGYVFKELKSFNLSPLHNLQNLEVLDLGTNFIKIANLSMFKQFKRLKVIDLSVNKISPSGDSSEVGFCSNARTSVESYEPQVLEQLHYFRYDKYARSCRFKNKEASFMSVNESCYKYGQTLDLSKNSIFFVKSSDFQHLSFLKCLNLSGNLISQTLNGSEFQPLAELRYLDFSNNRLDLLHSTAFEELHKLEVLDISSNSHYFQSEGITHMLNFTKNLKVLQKLMMNDNDISSSTSRTMESESLRTLEFRGNHLDVLWREGDNRYLQLFKNLLKLEELDISKNSLSFLPSGVFDGMPPNLKNLSLAKNGLKSFSWKKLQCLKNLETLDLSHNQLTTVPERLSNCSRSLKNLILKNNQIRSLTKYFLQDAFQLRYLDLSSNKIQMIQKTSFPENVLNNLKMLLLHHNRFLCTCDAVWFVWWVNHTEVTIPYLATDVTCVGPGAHKGQSVISLDLYTCELDLTN

SEQ ID NO: 1958 - protein, 801 aa, synthetic construct
  REGION 1..801: note = TLR8 (Q9NR97) ECD
EENFSRSYPCDEKKQNDSVIAECSNRRLQEVPQTVGKYVTELDLSDNFITHITNESFQGLQNLTKINLNHNPNVQHQNGNPGIQSNGLNITDGAFLNLKNLRELLLEDNQLPQIPSGLPESLTELSLIQNNIYNITKEGISRLINLKNLYLAWNCYFNKVCEKTNIEDGVFETLTNLELLSLSFNSLSHVPPKLPSSLRKLFLSNTQIKYISEEDFKGLINLTLLDLSGNCPRCFNAPFPCVPCDGGASINIDRFAFQNLTQLRYLNLSSTSLRKINAAWFKNMPHLKVLDLEFNYLVGEIASGAFLTMLPRLEILDLSFNYIKGSYPQHINISRNFSKLLSLRALHLRGYVFQELREDDFQPLMQLPNLSTINLGINFIKQIDFKLFQNFSNLEIIYLSENRISPLVKDTRQSYANSSSFQRHIRKRRSTDFEFDPHSNFYHFTRPLIKPQCAAYGKALDLSLNSIFFIGPNQFENLPDIACLNLSANSNAQVLSGTEFSAIPHVKYLDLTNNRLDFDNASALTELSDLEVLDLSYNSHYFRIAGVTHHLEFIQNFTNLKVLNLSHNNIYTLTDKYNLESKSLVELVFSGNRLDILWNDDDNRYISIFKGLKNLTRLDLSLNRLKHIPNEAFLNLPASLTELHINDNMLKFFNWTLLQQFPRLELLDLRGNKLLFLTDSLSDFTSSLRTLLLSHNRISHLPSGFLSEVSSLKHLDLSSNLLKTINKSALETKTTTKLSMLELHGNPFECTCDIGDFRRWMDEHLNVKIPRLVDVICASPGDQRGKSIVSLELTTCVSDVT

SEQ ID NO: 1959 - protein, 793 aa, synthetic construct
  REGION 1..793: note = TLR9 (Q9NR96) ECD
LGTLPAFLPCELQPHGLVNCNWLFLKSVPHFSMAAPRGNVTSLSLSSNRIHHLHDSDFAHLPSLRHLNLKWNCPPVGLSPMHFPCHMTIEPSTFLAVPTLEELNLSYNNIMTVPALPKSLISLSLSHTNILMLDSASLAGLHALRFLFMDGNCYYKNPCRQALEVAPGALLGLGNLTHLSLKYNNLTVVPRNLPSSLEYLLLSYNRIVKLAPEDLANLTALRVLDVGGNCRRCDHAPNPCMECPRHFPQLHPDTFSHLSRLEGLVLKDSSLSWLNASWFRGLGNLRVLDLSENFLYKCITKTKAFQGLTQLRKLNLSFNYQKRVSFAHLSLAPSFGSLVALKELDMHGIFFRSLDETTLRPLARLPMLQTLRLQMNFINQAQLGIFRAFPGLRYVDLSDNRISGASELTATMGEADGGEKVWLQPGDLAPAPVDTPSSEDFRPNCSTLNFTLDLSRNNLVTVQPEMFAQLSHLQCLRLSHNCISQAVNGSQFLPLTGLQVLDLSHNKLDLYHEHSFTELPRLEALDLSYNSQPFGMQGVGHNFSFVAHLRTLRHLSLAHNNIHSQVSQQLCSTSLRALDFSGNALGHMWAEGDLYLHFFQGLSGLIWLDLSQNRLHTLLPQTLRNLPKSLQVLRLRDNYLAFFKWWSLHFLPKLEVLDLAGNQLKALTNGSLPAGTRLRRLDVSCNSISFVAPGFFSKAKELRELNLSANALKTVDHSWFGPLASALQILDVSANPLHCACGAAFMDFLLEVQAAVPGLPSRVKCGSPGQLQGLSIFAQDLRLCLDEALSWDC

SEQ ID NO: 1960 - protein, 153 aa, synthetic construct
  REGION 1..153: note = TMED7 (Q9Y3B3) ECD
SEITFELPDNAKQCFYEDIAQGTKCTLEFQVITGGHYDVDCRLEDPDGKVLYKEMKKQYDSFTFTASKNGTYKFCFSNEFSTFTHKTVYFDFQVGEDPPLFPSENRVSALTQMESACVSIHEALKSVIDYQTHFRLREAQGRSRAEDLNTRVA

SEQ ID NO: 1961 - protein, 291 aa, synthetic construct
  REGION 1..291: note = TMEFF1 (Q8IYR6) ECD
SNQPPGGGGGSGGDCPGGKGKSINCSELNVRESDVRVCDESSCKYGGVCKEDGDGLKCACQFQCHTNYIPVCGSNGDTYQNECFLRRAACKHQKEITVIARGPCYSDNGSGSGEGEEEGSGAEVHRKHSKCGPCKYKAECDEDAENVGCVCNIDCSGYSFNPVCASDGSSYNNPCFVREASCIKQEQIDIRHLGHCTDTDDTSLLGKKDDGLQYRPDVKDASDQREDVYIGNHMPCPENLNGYCIHGKCEFIYSTQKASCRCESGYTGQHCEKTDFSILYVVPSRQKLTHV

SEQ ID NO: 1962 - protein, 280 aa, synthetic construct
  REGION 1..280: note = TMEFF2 (Q9UIK5) ECD
FPTSLSDCQTPTGWNCSGYDDRENDLFLCDTNTCKFDGECLRIGDTVTCVCQFKCNNDYVPVCGSNGESYQNECYLRQAACKQQSEILVVSEGSCATDAGSGSGDGVHEGSGETSQKETSTCDICQFGAECDEDAEDVWCVCNIDCSQTNFNPLCASDGKSYDNACQIKEASCQKQEKIEVMSLGRCQDNTTTTTKSEDGHYARTDYAENANKLEESAREHHIPCPEHYNGFCMHGKCEHSINMQEPSCRCDAGYTGQHCEKKDYSVLYVVPGPVRFQYV

SEQ ID NO: 1963 - protein, 439 aa, synthetic construct
  REGION 1..439: note = TMEM108 (Q6UXF1) ECD
QEPSPRESLQVLPSGTPPGTMVTAPHSSTRHTSVVMLTPNPDGPPSQAAAPMATPTPRAEGHPPTHTISTIAATVTAPHSESSLSTGPAPAAMATTSSKPEGRPRGQAAPTILLTKPPGATSRPTTAPPRTTTRRPPRPPGSSRKGAGNSSRPVPPAPGGHSRSKEGQRGRNPSSTPLGQKRPLGKIFQIYKGNFTGSVEPEPSTLTPRTPLWGYSSSPQPQTVAATTVPSNTSWAPTTTSLGPAKDKPGLRRAAQGGGSTFTSQGGTPDATAASGAPVSPQAAPVPSQRPHHGDPQDGPSHSDSWLTVTPGTSRPLSTSSGVFTAATGPTPAAFDTSVSAPSQGIPQGASTTPQAPTHPSRVSESTISGAKEETVATLTMTDRVPSPLSTVVSTATGNFLNRLVPAGTWKPGTAGNISHVAEGDKPQHRATICLSKMD

SEQ ID NO: 1964 - protein, 140 aa, synthetic construct
  REGION 1..140: note = TMEM123 (Q8N131) ECD
HESAAMAASANIENSGLPHNSSANSTETLQHVPSDHTNETSNSTVKPPTSVASDSSNTTVTTMKPTAASNTTTPGMVSTNMTSTTLKSTPKTTSVSQNTSQISTSTMTVTHNSSVTSAASSVTITTTMHSEAKKGSKFDT

SEQ ID NO: 1965 - protein, 817 aa, synthetic construct
  REGION 1..817: note = TMEM132A (Q24JP5) ECD
CGQAPLDPVYLPAALELLDAPEHFRVQQVGHYPPANSSLSSRSETFLLLQPWPRAQPLLRASYPPFATQQVVPPRVTEPHQRPVPWDVRAVSVEAAVTPAEPYARVLFHLKGQDWPPGSGSLPCARLHATHPAGTAHQACRFQPSLGACVVELELPSHWFSQASTTRAELAYTLEPAAEGPGGCGSGEENDPGEQALPVGGVELRPADPPQYQEVPLDEAVTLRVPDMPVRPGQLFSATLLLRHNFTASLLTLRIKVKKGLHVTAARPAQPTLWTAKLDRFKGSRHHTTLITCHRAGLTEPDSSPLELSEFLWVDFVVENSTGGGVAVTRPVTWQLEYPGQAPEAEKDKMVWEILVSERDIRALIPLAKAEELVNTAPLTGVPQHVPVRLVTVDGGGALVEVTEHVGCESANTQVLQVSEACDAVFVAGKESRGARGVRVDFWWRRLRASLRLTVWAPLLPLRIELTDTTLEQVRGWRVPGPAEGPAEPAAEASDEAERRARGCHLQYQRAGVRFLAPFAAHPLDGGRRLTHLLGPDWLLDVSHLVAPHARVLDSRVASLEGGRVVVGREPGVTSIEVRSPLSDSILGEQALAVTDDKVSVLELRVQPVMGISLTLSRGTAHPGEVTATCWAQSALPAPKQEVALSLWLSFSDHTVAPAELYDRRDLGLSVSAEEPGAILPAEEQGAQLGVVVSGAGAEGLPLHVALHPPEPCRRGRHRVPLASGTAWLGLPPASTPAPALPSSPAWSPPATEATMGGKRQVAGSVGGNTGVRGKFERAEEEARKEETEAREEEEEEEEEMVPAPQHVTELELGMYA

SEQ ID NO: 1966 - protein, 895 aa, synthetic construct
  REGION 1..895: note = TMEM132C (Q8N3T6) ECD
KVIEGHGVTDNIQRFSSLPPYLPVSYHILRAETSFFLKEANQDLLRNSSLQARVESFFTYKTRQPPVLNASYGPFSVEKVVPLDLMLTSNFLGPTNKFSFDWKLKAHILRDKVYLSRPKVQVLFHIMGRDWDDHGAGEKLPCLRVFAFRETREVRGSCRLKGDLGLCVAELELLSSWFSAPTVGAGRKKSMDQPEGTPVELYYTVHPGNERGDCAGGDFRKGNAIRPGKDGLEETTSHLQRIGTVGLYRAQDSAQLSELRLDGNVVIWLPSRPVKQGEVVTAYVTISSNSSVDLFILRAKVKKGVNILSAQTREPRQWGVKQEVGSGGKHVTATVACQRLGPSPRNRSSSLFNEVVQMNFEIASFSSLSGTQPITWQVEYPRKGTTDIAVSEIFVSQKDLVGIVPLAMDTEILNTAVLTGKTVAMPIKVVSVEENSAVMDISESVECKSTDEDVIKVSERCDYIFVNGKEIKGKMDAVVNFTYQYLSAPLCVTVWVPRLPLQIEVSDTELSQIKGWRVPIVTNKRPTRESEDEDEEERRGRGCALQYQHATVRVLTQFVSEGAGPWGQPNYLLSPNWQFDITHLVADFMKLEEPHVATLQDSRVLVGREVGMTTIQVLSPLSDSILAEKTITVLDDKVSVTDLAIQLVAGLSVALYPNAENSKAVTAVVTAEEVLRTPKQEAVFSTWLQFSDGSVTPLDIYDTKDFSLAATSQDEAVVSVPQPRSPRWPVVVAEGEGQGPLIRVDMTIAEACQKSKRKSILAVGVGNVRVKFGQNDADSSPGGDYEEDEIKNHASDRRQKGQHHERTGQDGHLYGSSPVEREEGALRRATTTARSLLDNKVVKNSRADGGRLAGEGQLQNIPIDFTNFPAHVDLPKAGSGLEENDLVQTPRGLSD

SEQ ID NO: 1967 - protein, 885 aa, synthetic construct
  REGION 1..885: note = TMEM132D (Q14C87) ECD
RGILESIQRFSLLPTYLPVTYHINNADVSFFLKEANQDIMRNSSLQSRVESFLIYKSRRLPVLNASYGPFSIEQVVPQDLMLPSNPFGFTNKFSLNWKLKAHILRDKVYLSRPKVQVLFHIMGRDWDDRSAGEKLPCLRVFAFRETREVRGSCRLQGDLGLCVAELELLSSWFSPPTVVAGRRKSVDQPEGTPVELYYTVHPGGERGDCVREDARRSNGIRTGHSDIDESGPPLQRIGSIFLYQTHRKPSLRELRLDNSVAIHYIPKTVRKGDVLTFPVSISRNSTEDRFTLRAKVKKGVNIIGVRASSPSIWDVKERTDYTGKYAPAVIVCQKKAAGSENSADGASYEVMQIDVEVEEPGDLPATQLVTWQVEYPGEITSDLGVSKIYVSPKDLIGVVPLAMEAEILNTAILTGKTVAVPVKVVSVEDDGTVTELLESVECRSSDEDVIKVSDRCDYVFVNGKEMKGKVNVVVNFTYQHLSSPLEMTVWVPRLPLQIEVSDTELNQIKGWRVPIVSSRRPAGDSEEEEDDERRGRGCTLQYQHAMVRVLTQFVAEAAGPGGHLAHLLGSDWQVDITELINDFMQVEEPRIAKLQGGQILMGQELGMTTIQILSPLSDTILAEKTITVLDEKVTITDLGVQLVTGLSLSLQLSPGSNRAIFATAVAQELLQRPKQEAAISCWVQFSDGSVTPLDIYDGKDFSLMATSLDEKVVSIHQDPKFKWPIIAAETEGQGTLVKVEMVISESCQKSKRKSVLAVGTANIKVKFGQNDANPNTSDSRHTGAGVHMENNVSDRRPKKPSQEWGSQEGQYYGSSSMGLMEGRGTTTDRSILQKKKGQESLLDDNSHLQTIPSDLTSFPAQVDLPRSNGEMDGNDLMQASKGLSD

SEQ ID NO: 1968 - protein, 868 aa, synthetic construct
  REGION 1..868: note = TMEM132E (Q6IEE7) ECD
RSHPASPSPPGPQASPVLPVSYRLSHTRLAFFLREARPPSPAVANSSLQRSEPFVVFQTKELPVLNVSLGPFSTSQVVARELLQPSSTLDIPERLTVNWKVRAFIVRSHVPASQPVVQVLFYVAGRDWDDFGVTERLPCVRLHAFRDAREVKSSCRLSGGLATCLVRAELPLAWFGPPAPAAPPTARRKSPDGLEPEATGESQQAELYYTLHAPDASGGCGGSRRGAGPGVGARAESPTQHPLLRIGSISLFRPPPRRTLQEHRLDSNLMIRLPDRPLKPGEVLSILLYLAPNSSSPSSPSVEHFTLRVKAKKGVTLLGTKSRSGQWHVTSELLTGAKHSTATVDVAWAQSTPLPPREGQGPLEILQLDFEMENFTSQSVKRRIMWHIDYRGHGALPDLERAVTELTVIQRDVQAILPLAMDTEIINTAILTGRTVAIPVKVIAIEVNGLVLDISALVECESDNEDIIKVSSSCDYVFVSGKESRGSMNARVTFRYDVLNAPLEMTVWVPKLPLHIELSDARLSQVKGWRVPILPDRRSVRESEDEDEEEEERRQSASRGCTLQYQHATLQVFTQFHTTSSEGTDQVVTMLGPDWLVEVTDLVSDFMRVGDPRVAHMVDSSTLAGLEPGTTPFKVVSPLTEAVLGETLLTVTEEKVSITQLQAQVVASLALSLRPSPGSSHTILATTAAQQTLSFLKQEALLSLWLSYSDGTTAPLSLYSPRDYGLLVSSLDEHVATVTQDRAFPLVVAEAEGSGELLRAELTIAESCQKTKRKSVLATTPVGLRVHFGRDEEDPTYDYPGPSQPGPGGGEDEARGAGPPGSALPAPEAPGPGTASPVVPPTEDFLPLPTGFLQVPRGLTDLEIGMYA

SEQ ID NO: 1969 - protein, 53 aa, synthetic construct
  REGION 1..53: note = TMEM154 (Q6P9G4) ECD
NYEELENSGDTTVESERPNKVTIPSTFAAVTIKETLNANINSTNFAPDENQLE

SEQ ID NO: 1970 - protein, 252 aa, synthetic construct
  REGION 1..252: note = TMEM158 (Q8WZ71) ECD
GAADAPGLLGVPSNASVNASSADEPIAPRLLASAAPGPPERPGPEEAAAAAAPCNISVQRQMLSSLLVRWGRPRGFQCDLLLFSTNAHGRAFFAAAFHRVGPPLLIEHLGLAAGGAQQDLRLCVGCGWVRGRRTGRLRPAAAPSAAAATAGAPTALPAYPAAEPPGPLWLQGEPLHFCCLDFSLEELQGEPGWRLNRKPIESTLVACFMTLVIVVWSVAALIWPVPIIAGFLPNGMEQRRTTASTTAATPAA

SEQ ID NO: 1971 - protein, 43 aa, synthetic construct
  REGION 1..43: note = TMEM213 (A2RRL7) ECD
EASSSNSSSLTAHHPDPGTLEQCLNVDFCPQAARCCRTGVDEY

SEQ ID NO: 1972 - protein, 166 aa, synthetic construct
  REGION 1..166: note = TMEM219 (Q86XT9) ECD
SFLLTHRTGLRSPDIPQDWVSFLRSFGQLTLCPRNGTVTGKWRGSHVVGLLTTLNFGDGPDRNKTRTFQATVLGSQMGLKGSSAGQLVLITARVTTERTAGTCLYFSAVPGILPSSQPPISCSEEGAGNATLSPRMGEECVSVWSHEGLVLTKLLTSEELALCGSR

SEQ ID NO: 1973 - protein, 206 aa, synthetic construct
  REGION 1..206: note = TMEM25 (Q86YD3) ECD
ELEPQIDGQTWAERALRENERHAFTCRVAGGPGTPRLAWYLDGQLQEASTSRLLSVGGEAFSGGTSTFTVTAHRAQHELNCSLQDPRSGRSANASVILNVQFKPEIAQVGAKYQEAQGPGLLVVLFALVRANPPANVTWIDQDGPVTVNTSDFLVLDAQNYPWLTNHTVQLQLRSLAHNLSVVATNDVGVTSASLPAPGLLATRVE

SEQ ID NO: 1974 - protein, 127 aa, synthetic construct; identical to SEQ ID NO: 783
  REGION 1..127: note = TMEM27 (Q9HBJ8) ECD

SEQ ID NO: 1975 - protein, 69 aa, synthetic construct
  REGION 1..69: note = TMEM9 (Q9P0T7) ECD
NKSSEDIRCKCICPPYRNISGHIYNQNVSQKDCNCLHVVEPMPVPGHDVEAYCLLCECRYEERSTTTIK

SEQ ID NO: 1976 - protein, 129 aa, synthetic construct
  REGION 1..129: note = TMEM95 (Q3KNT9) ECD
CVFCRLPAHDLSGRLARLCSQMEARQKECGASPDFSAFALDEVSMNKVTEKTHRVLRVMEIKEAVSSLPSYWSWLRKTKLPEYTREALCPPACRGSTTLYNCSTCKGTEVSCWPRKRCFPGSQDLWEAK

SEQ ID NO: 1977 - protein, 71 aa, synthetic construct
  REGION 1..71: note = TMEM9B (Q9NQ34) ECD
AKNFEDVRCKCICPPYKENSGHIYNKNISQKDCDCLHVVEPMPVRGPDVEAYCLRCECKYEERSSVTIKVT

SEQ ID NO: 1978 - protein, 191 aa, synthetic construct
  REGION 1..191: note = TMIGD1 (Q6UXZ0) ECD
VLTVNGKTENYILDTTPGSQASLICAVQNHTREEELLWYREEGRVDLKSGNKINSSSVCVSSISENDNGISFTCRLGRDQSVSVSVVLNVTFPPLLSGNDFQTVEEGSNVKLVCNVKANPQAQMMWYKNSSLLDLEKSRHQIQQTSESFQLSITKVEKPDNGTYSCIAKSSLKTESLDFHLIVKDKTVGVP

SEQ ID NO: 1979 - protein, 128 aa, synthetic construct
  REGION 1..128: note = TMIGD2 (Q96BF3) ECD
LSVQQGPNLLQVRQGSQATLVCQVDQATAWERLRVKWTKDGAILCQPYITNGSLSLGVCGPQGRLSWQAPSHLTLQLDPVSLNHSGAYVCWAAVEIPELEEAEGNITRLFVDPDDPTQNRNRIASFPG

SEQ ID NO: 1980 - protein, 351 aa, synthetic construct
  REGION 1..351: note = TMX3 (Q96JJ7) ECD
KGFVEDLDESFKENRNDDIWLVDFYAPWCGHCKKLEPIWNEVGLEMKSIGSPVKVGKMDATSYSSIASEFGVRGYPTIKLLKGDLAYNYRGPRTKDDIIEFAHRVSGALIRPLPSQQMFEHMQKRHRVFFVYVGGESPLKEKYIDAASELIVYTYFFSASEEVVPEYVTLKEMPAVLVFKDETYFVYDEYEDGDLSSWINRERFQNYLAMDGFLLYELGDTGKLVALAVIDEKNTSVEHTRLKSIIQEVARDYRDLFHRDFQFGHMDGNDYINTLLMDELTVPTVVVLNTSNQQYFLLDRQIKNVEDMVQFINNILDGTVEAQGGDSILQRLKRIVFDAKSTIVSIFKSSP

SEQ ID NO: 1981 - protein, 166 aa, synthetic construct
  REGION 1..166: note = TMX4 (Q9H1E5) ECD
TAGPEEAALPPEQSRVQPMTASNWTLVMEGEWMLKFYAPWCPSCQQTDSEWEAFAKNGEILQISVGKVDVIQEPGLSGRFFVTTLPAFFHAKDGIFRRYRGPGIFEDLQNYILEKKWQSVEPLTGWKSPASLTMSGMAGLFSISGKIWHLHNYFTVTLGIPAWCSY

SEQ ID NO: 1982 - protein, 216 aa, synthetic construct
  REGION 1..216: note = TNFRSF10A (O00220) ECD
ASGTEAAAATPSKVWGSSAGRIEPRGGGRGALPTSMGQHGPSARARAGRAPGPRPAREASPRLRVHKTFKFVVVGVLLQVVPSSAATIKLHDQSIGTQQWEHSPLGELCPPGSHRSEHPGACNRCTEGVGYTNASNNLFACLPCTACKSDEEERSPCTTTRNTACQCKPGTFRNDNSAEMCRKCSRGCPRGMVKVKDCTPWSDIECVHKESGNGHN

SEQ ID NO: 1983 - protein, 156 aa, synthetic construct
  REGION 1..156: note = TNFRSF10D (Q9UBN6) ECD
ATIPRQDEVPQQTVAPQQQRRSLKEEECPAGSHRSEYTGACNPCTEGVDYTIASNNLPSCLLCTVCKSGQTNKSSCTTTRDTVCQCEKGSFQDKNSPEMCRTCRTGCPRGMVKVSNCTPRSDIKCKNESAASSTGKTPAAEETVTTILGMLASPYH

SEQ ID NO: 1984 - protein, 183 aa, synthetic construct
  REGION 1..183: note = TNFRSF11A (Q9Y6Q6) ECD
IAPPCTSEKHYEHLGRCCNKCEPGKYMSSKCTTTSDSVCLPCGPDEYLDSWNEEDKCLLHKVCDTGKALVAVVAGNSTTPRRCACTAGYHWSQDCECCRRNTECAPGLGAQHPLQLNKDTVCKPCLAGYFSDAFSSTDKCRPWTNCTFLGKRVEHHGTEKSDAVCSSSLPARKPPNEPHVYLP

SEQ ID NO: 1985 - protein, 164 aa, synthetic construct [sequence omitted]

SEQ ID NO: 1986 - protein, 137 aa, synthetic construct
  REGION 1..137: note = TNFRSF18 (Q9Y5U5) ECD
QRPTGGPGCGPGRLLLGTGTDARCCRVHTTRCCRDYPGEECCSEWDCMCVQPEFHCGDPCCTTCRHHPCPPGQGVQSQGKFSFGFQCIDCASGTFSGGHEGHCKPWTDCTQFGFLTVFPGNKTHNAVCVPGSPPAEP

SEQ ID NO: 1987 - protein, 141 aa, synthetic construct
  REGION 1..141: note = TNFRSF19 (Q9NS68) ECD
ESGDCRQQEFRDRSGNCVPCNQCGPGMELSKECGFGYGEDAQCVTCRLHRFKEDWGFQKCKPCLDCAVVNRFQKANCSATSDAICGDCLPGFYRKTKLVGFQDMECVPCGDPPPPYEPHCASKVNLVKIASTASSPRDTAL

SEQ ID NO: 1988 - protein, 182 aa, synthetic construct
  REGION 1..182: note = TNFRSF1A (P19438) ECD
LVPHLGDREKRDSVCPQGKYIHPQNNSICCTKCHKGTYLYNDCPGPGQDTDCRECESGSFTASENHLRHCLSCSKCRKEMGQVEISSCTVDRDTVCGCRKNQYRHYWSENLFQCFNCSLCLNGTVHLSCQEKQNTVCTCHAGFFLRENECVSCSNCKKSLECTKLCLPQIENVKGTEDSGTT

SEQ ID NO: 1989 - protein, 235 aa, synthetic construct
  REGION 1..235: note = TNFRSF1B (P20333) ECD
LPAQVAFTPYAPEPGSTCRLREYYDQTAQMCCSKCSPGQHAKVFCTKTSDTVCDSCEDSTYTQLWNWVPECLSCGSRCSSDQVETQACTREQNRICTCRPGWYCALSKQEGCRLCAPLRKCRPGFGVARPGTETSDVVCKPCAPGTFSNTTSSTDICRPHQICNVVAIPGNASMDAVCTSTSPTRSMAPGAVHLPQPVSTRSQHTQPTPEPSTAPSTSFLLPMGPSPPAEGSTGD

SEQ ID NO: 1990 - protein, 308 aa, synthetic construct
  REGION 1..308: note = TNFRSF21 (O75509) ECD
QPEQKASNLIGTYRHVDRATGQVLTCDKCPAGTYVSEHCTNTSLRVCSSCPVGTFTRHENGIEKCHDCSQPCPWPMIEKLPCAALTDRECTCPPGMFQSNATCAPHTVCPVGWGVRKKGTETEDVRCKQCARGTFSDVPSSVMKCKAYTDCLSQNLVVIKPGTKETDNVCGTLPSFSSSTSPSPGTAIFPRPEHMETHEVPSSTYVPKGMNSTESNSSASVRPKVLSSIQEGTVPDNTSSARGKEDVNKTLPNLQVVNHQQGPHHRHILKLLPSMEATGGEKSSTPIKGPKRGHPRQNLHKHFDINEH

SEQ ID NO: 1991 - protein, 175 aa, synthetic construct
  REGION 1..175: note = TNFRSF25 (Q93038) ECD
QGGTRSPRCDCAGDFHKKIGLFCCRGCPAGHYLKAPCTEPCGNSTCLVCPQDTFLAWENHHNSECARCQACDEQASQVALENCSAVADTRCGCKPGWFVECQVSQCVSSSPFYCQPCLDCGALHRHTRLLCSRRDTDCGTCLPGFYEHGDGCVSCPTSTLGSCPERCAAVCGWRQ

SEQ ID NO: 1992 - protein, 186 aa, synthetic construct [sequence omitted]

SEQ ID NO: 1993 - protein, 367 aa, synthetic construct
  REGION 1..367: note = TNFRSF8 (P28908) ECD
FPQDRPFEDTCHGNPSHYYDKAVRRCCYRCPMGLFPTQQCPQRPTDCRKQCEPDYYLDEADRCTACVTCSRDDLVEKTPCAWNSSRVCECRPGMFCSTSAVNSCARCFFHSVCPAGMIVKFPGTAQKNTVCEPASPGVSPACASPENCKEPSSGTIPQAKPTPVSPATSSASTMPVRGGTRLAQEAASKLTRAPDSPSSVGRPSSDPGLSPTQPCPEGSGDCRKQCEPDYYLDEAGRCTACVSCSRDDLVEKTPCAWNSSRTCECRPGMICATSATNSCARCVPYPICAAETVTKPQDMAEKDTTFEAPPLGTQPDCNPTPENGEAPASTSPTQSLLVDSQASKTLPIPTSAPVALSSTGKPVLDAG

SEQ ID NO: 1994 - protein, 163 aa, synthetic construct
  REGION 1..163: note = TNFRSF9 (Q07011) ECD
LQDPCSNCPAGTFCDNNRNQICSPCPPNSFSSAGGQRTCDICRQCKGVFRTRKECSSTSNAECDCTPGFHCLGAGCSMCEQDCKQGQELTKKGCKDCCFGTFNDQKRGICRPWTNCSLDGKSVLVNGTKERDVVCGPSPADLSPGASSVTPPAPAREPGHSPQ

SEQ ID NO: 1995 - protein, 282 aa, synthetic construct
  REGION 1..282: note = TP53I13 (Q8NBR0) ECD
GPAEEAGAHCPESLWPLPPQVSPRVTYTRVSPGQAEDVTFLYHPCAHPWLKLQLALLAYACMANPSLTPDFSLTQDRPLVLTAWGLALEMAWVEPAWAAHWLMRRRRRKQRKKKAWIYCESLSGPAPSEPTPGRGRLCRRGCVQALALAFALRSWRPPGTEVTSQGPRQPSSSGAKRRRLRAALGPQPTRSALRFPSASPGSLKAKQSMAGIPGRESNAPSVPTVSLLPGAPGGNASSRTEAQVPNGQGSPGGCVCSSQASPAPRAAAPPRAARGPTPRTEE

SEQ ID NO: 1996 - protein, 324 aa, synthetic construct
  REGION 1..324: note = TPBG (Q13641) ECD
SSPTSSASSFSSSAPFLASAVSAQPPLPDQCPALCECSEAARTVKCVNRNLTEVPTDLPAYVRNLFLTGNQLAVLPAGAFARRPPLAELAALNLSGSRLDEVRAGAFEHLPSLRQLDLSHNPLADLSPFAFSGSNASVSAPSPLVELILNHIVPPEDERQNRSFEGMVVAALLAGRALQGLRRLELASNHFLYLPRDVLAQLPSLRHLDLSNNSLVSLTYVSFRNLTHLESLHLEDNALKVLHNGTLAELQGLPHIRVFLDNNPWVCDCHMADMVTWLKETEVVQGKDRLTCAYPEKMRNRVLLELNSADLDCDPILPPSLQTS

SEQ ID NO: 1997 - protein, 281 aa, synthetic construct
  REGION 1..281: note = TPBGL (P0DKB5) ECD
CPFQCYCFGGPKLLLRCASGAELRQPPRDVPPDARNLTIVGANLTVLRAAAFAGGDGDGDQAAGVRLPLLSALRLTHNHIEVVEDGAFDGLPSLAALDLSHNPLRALGGGAFRGLPALRSLQLNHALVRGGPALLAALDAALAPLAELRLLGLAGNALSRLPPAALRLARLEQLDVRLNALAGLDPDELRALERDGGLPGPRLLLADNPLRCGCAARPLLAWLRNATERVPDSRRLRCAAPRALLDRPLLDLDGARLRCADSGADARGEEAEAAGPELEAS

SEQ ID NO: 1998 - protein, 828 aa, synthetic construct
  REGION 1..828: note = TPO (P07202) ECD
FFPFISRGKELLWGKPEESRVSSVLEESKRLVDTAMYATMQRNLKKRGILSPAQLLSFSKLPEPTSGVIARAAEIMETSIQAMKRKVNLKTQQSQHPTDALSEDLLSIIANMSGCLPYMLPPKCPNTCLANKYRPITGACNNRDHPRWGASNTALARWLPPVYEDGFSQPRGWNPGFLYNGFPLPPVREVTRHVIQVSNEVVTDDDRYSDLLMAWGQYIDHDIAFTPQSTSKAAFGGGADCQMTCENQNPCFPIQLPEEARPAAGTACLPFYRSSAACGTGDQGALFGNLSTANPRQQMNGLTSFLDASTVYGSSPALERQLRNWTSAEGLLRVHARLRDSGRAYLPFVPPRAPAACAPEPGIPGETRGPCFLAGDGRASEVPSLTALHTLWLREHNRLAAALKALNAHWSADAVYQEARKVVGALHQIITLRDYIPRILGPEAFQQYVGPYEGYDSTANPTVSNVFSTAAFRFGHATIHPLVRRLDASFQEHPDLPGLWLHQAFFSPWTLLRGGGLDPLIRGLLARPAKLQVQDQLMNEELTERLFVLSNSSTLDLASINLQRGRDHGLPGYNEWREFCGLPRLETPADLSTAIASRSVADKILDLYKHPDNIDVWLGGLAENFLPRARTGPLFACLIGKQMKALRDGDWFWWENSHVFTDAQRRELEKHSLSRVICDNTGLTRVPMDAFQVGKFPEDFESCDSITGMNLEAWRETFPQDDKCGFPESVENGDFVHCEESGRRVLVYSCRHGYELQGREQLTCTQEGWDFQPPLCKDVNECADGAHPPCHASARCRNTKGGFQCLCADPYELGDDGRTCVDSGRLPR

SEQ ID NO: 1999 - protein, 264 aa, synthetic construct
  REGION 1..264: note = TPSG1 (Q9NRR2) ECD
RTLQPGCGRPQVSDAGGRIVGGHAAPAGAWPWQASLRLRRMHVCGGSLLSPQWVLTAAHCFSGSLNSSDYQVHLGELEITLSPHFSTVRQIILHSSPSGQPGTSGDIALVELSVPVTLSSRILPVCLPEASDDFCPGIRCWVTGWGYTREGEPLPPPYSLREVKVSVVDTETCRRDYPGPGGSILQPDMLCARGPGDACQDDSGGPLVCQVNGAWVQAGTVSWGEGCGRPNRPGVYTRVPAYVNWIRRHITASGGSESGYPRLP

SEQ ID NO: 2000 - protein, 458 aa, synthetic construct
  REGION 1..458: note = TRABD2A (Q86V40) ECD
ASRRGAPGTANCELKPQQSELNSFLWTIKRDPPSYFFGTIHVPYTRVWDFIPDNSKEAFLQSSIVYFELDLTDPYTISALTSCQMLPQGENLQDVLPRDIYCRLKRHLEYVKLMMPLWMTPDQRGKGLYADYLFNAIAGNWERKRPVWVMLMVNSLTEVDIKSRGVPVLDLFLAQEAERLRKQTGAVEKVEEQCHPLNGLNFSQVIFALNQTLLQQESLRAGSLQIPYTTEDLIKHYNCGDLSSVILSHDSSQVPNFINATLPPQERITAQEIDSYLRRELIYKRNERIGKRVKALLEEFPDKGFFFAFGAGHFMGNNTVLDVLRREGYEVEHAPAGRPIHKGKSKKTSTRPTLSTIFAPKVPTLEVPAPEAVSSGHSTLPPLVSRPGSADTPSEAEQRFRKKRRRSQRRPRLRQFSDLWVRLEESDIVPQLQVPVLDRHISTELRLPRRGHSHHSQM

SEQ ID NO: 2001 - protein, 475 aa, synthetic construct
  REGION 1..475: note = TRABD2B (A6NFA1) ECD
RPQPPDGGQCRPPGSQRDLNSFLWTIRRDPPAYLFGTIHVPYTRVWDFIPDNSKAAFQASTRVYFELDLTDPYTISALASCQLLPHGENLQDVLPHELYWRLKRHLDYVKLMMPSWMTPAQRGKGLYADYLFNAIAGNWERKRPVWVMLMVNSLTERDVRFRGVPVLDLYLAQQAEKMKKTTGAVEQVEEQCHPLNNGLNFSQVLFALNQTLLQQESVRAGSLQASYTTEDLIKHYNCGDLSAVIFNHDTSQLPNFINTTLPPHEQVTAQEIDSYFRQELIYKRNERMGKRVMALLRENEDKICFFAFGAGHFLGNNTVIDILRQAGLEVDHTPAGQAIHSPAPQSPAPSPEGTSTSPAPVTPAAAVPEAPSVTPTAPPEDEDPALSPHLLLPDSLSQLEEFGRQRKWHKRQSTHQRPRQFNDLWVRIEDSTTASPPPLPLQPTHSSGTAKPPFQLSDQLQQQDPPGPASSSAPT

SEQ ID NO: 2002 - protein, 185 aa, synthetic construct
  REGION 1..185: note = TREM1 (Q9NP99) ECD
ATKLTEEKYELKEGQTLDVKCDYTLEKFASSQKAWQIIRDGEMPKTLACTERPSKNSHPVQVGRIILEDYHDHGLLRVRMVNLQVEDSGLYQCVIYQPPKEPHMLFDRIRLVVTKGFSGTPGSNENSTQNVYKIPPTTTKALCPLYTSPRTVTQAPPKSTADVSTPDSEINLTNVTDIIRVPVFN

SEQ ID NO: 2003 - protein, 156 aa, synthetic construct [sequence omitted]

SEQ ID NO: 2004 - protein, 250 aa, synthetic construct
  REGION 1..250: note = TREML2 (Q5T2D2) ECD
GPSADSVYTKVRLLEGETLSVQCSYKGYKNRVEGKVWCKIRKKKCEPGFARVWVKGPRYLLQDDAQAKVVNITMVALKLQDSGRYWCMRNTSGILYPLMGFQLDVSPAPQTERNIPFTHLDNILKSGTVTTGQAPTSGPDAPFTTGVMVFTPGLITLPRLLASTRPASKTGYSFTATSTTSQGPRRTMGSQTVTASPSNARDSSAGPESISTKSGDLSTRSPTTGLCLTSRSLLNRLPSMPSIRHQDVYS

SEQ ID NO: 2005 - protein, 671 aa, synthetic construct
  REGION 1..671: note = TRIL (Q7L0X0) ECD
VCPERCDCQHPQHLLCTNRGLRVVPKTSSLPSPHDVLTYSLGGNFITNITAFDFHRLGQLRRLDLQYNQIRSLHPKTFEKLSRLEELYLGNNLLQALAPGTLAPLRKLRILYANGNEISRLSRGSFEGLESLVKLRLDGNALGALPDAVFAPLGNLLYLHLESNRIRFLGKNAFAQLGKLRFLNLSANELQPSLRHAATFAPLRSLSSLILSANNLQHLGPRIFQHLPRLGLLSLRGNQLTHLAPEAFWGLEALRELRLEGNRLSQLPTALLEPLHSLEALDLSGNELSALHPATFGHLGRLRELSLRNNALSALSGDIFAASPALYRLDLDGNGWTCDCRLRGLKRWMGDWHSQGRLLTVFVQCRHPPALRGKYLDYLDDQQLQNGSCADPSPSASLTADRRRQPLPTAAGEEMTPPAGLAEELPPQPQLQQQGRFLAGVAWDGAARELVGNRSALRLSRRGPGLQQPSPSVAAAAGPAPQSLDLHKKPQRGRPTRADPALAEPTPTASPGSAPSPAGDPWQRATKHRLGTEHQERAAQSDGGAGLPPLVSDPCDFNKFILCNLTVEAVGADSASVRWAVREHRSPRPLGGARFRLLFDRFGQQPKFHRFVYLPESSDSATLRELRGDTPYLVCVEGVLGGRVCPVAPRDHCAGLVTLPEAGSRGGVDYQ

SEQ ID NO: 2006 - protein, 289 aa, synthetic construct
  REGION 1..289: note = TXNDC15 (Q96J42) ECD
VEVAEESGRLWSEEQPAHPLQVGAVYLGEEELLHDPMGQDRAAEEANAVLGLDTQGDHMVMLSVIPGEAEDKVSSEPSGVTCGAGGAEDSRCNVRESLFSLDGAGAHFPDREEEYYTEPEVAESDAAPTEDSNNTESLKSPKVNCEERNITGLENFTLKILNMSQDLMDFLNPNGSDCTLVLFYTPWCRFSASLAPHFNSLPRAFPALHFLALDASQHSSLSTRFGTVAVPNILLFQGAKPMARFNHTDRTLETLKIFIFNQTGIEAKKNVVVTQADQIGPLPSTLIKS

SEQ ID NO: 2007 - protein, 458 aa, synthetic construct
  REGION 1..458: note = TYR (P14679) ECD
HFPRACVSSKNLMEKECCPPWSGDRSPCGQLSGRGSCQNILLSNAPLGPQFPFTGVDDRESWPSVFYNRTCQCSGNFMGFNCGNCKFGFWGPNCTERRLLVRRNIFDLSAPEKDKFFAYLTLAKHTISSDYVIPIGTYGQMKNGSTPMFNDINIYDLFVWMHYYVSMDALLGGSEIWRDIDFAHEAPAFLPWHRLFLLRWEQEIQKLTGDENFTIPYWDWRDAEKCDICTDEYMGGQHPTNPNLLSPASFFSSWQIVCSRLEEYNSHQSLCNGTPEGPLRRNPGNHDKSRTPRLPSSADVEFCLSLTQYESGSMDKAANFSFRNTLEGFASPLTGIADASQSSMHNALHIYMNGTMSQVQGSANDPIFLLHHAFVDSIFEQWLRRHRPLQEVYPEANAPIGHNRESYMVPFIPLYRNGDFFISSKDLGYDYSYLQDSDPDSFQDYIKSYLEQASRIWS

SEQ ID NO: 2008 - protein, 389 aa, synthetic construct
  REGION 1..389: note = TYRO3 (Q06418) ECD
AGLKLMGAPVKLTVSQGQPVKLNCSVEGMEEPDIQWVKDGAVVQNLDQLYIPVSEQHWIGFLSLKSVERSDAGRYWCQVEDGGETEISQPVWLTVEGVPFFTVEPKDLAVPPNAPFQLSCEAVGPPEPVTIVWWRGTTKIGGPAPSPSVLNVTGVTQSTMFSCEAHNLKGLASSRTATVHLQALPAAPFNITVTKLSSSNASVAWMPGADGRALLQSCTVQVTQAPGGWEVLAVVVPVPPFTCLLRDLVPATNYSLRVRCANALGPSPYADWVPFQTKGLAPASAPQNLHAIRTDSGLILEWEEVIPEAPLEGPLGPYKLSWVQDNGTQDELTVEGTRANLTGWDPQKDLIVRVCVSNAVGCGPWSQPLVVSSHDRAGQQGPPHSRTSW

SEQ ID NO: 2009 - protein, 453 aa, synthetic construct
  REGION 1..453: note = TYRP1 (P17643) ECD
QFPRQCATVEALRSGMCCPDLSPVSGPGTDRCGSSSGRGRCEAVTADSRPHSPQYPHDGRDDREVWPLRFFNRTCHCNGNFSGHNCGTCRPGWRGAACDQRVLIVRRNLLDLSKEEKNHFVRALDMAKRTTHPLFVIATRRSEEILGPDGNTPQFENISIYNYFVWTHYYSVKKTFLGVGQESFGEVDFSHEGPAFLTWHRYHLLRLEKDMQEMLQEPSFSLPYWNFATGKNVCDICTDDLMGSRSNFDSTLISPNSVFSQWRVVCDSLEDYDTLGTLCNSTEDGPIRRNPAGNVARPMVQRLPEPQDVAQCLEVGLFDTPPFYSNSTNSFRNTVEGYSDPTGKYDPAVRSLHNLAHLFLNGTGGQTHLSPNDPIFVLLHTFTDAVFDEWLRRYNADISTFPLENAPIGHNRQYNMVPFWPPVTNTEMFVTAPDNLGYTYEIQWPSREFSVPE

SEQ ID NO: 2010 - protein, 451 aa, synthetic construct
  REGION 1..451: note = UGT8 (Q16880) ECD
AKIIIVPPIMFESHMYIFKTLASALHERGHHTVFLLSEGRDIAPSNHYSLQRYPGIFNSTTSDAFLQSKMRNIFSGRLTAIELFDILDHYTKNCDLMVGNHALIQGLKKEKFDLLLVDPNDMCGFVIAHLLGVKYAVFSTGLWYPAEVGAPAPLAYVPEFNSLLTDRMNLLQRMKNTGVYLISRLGVSFLVLPKYERIMQKYNLLPEKSMYDLVHGSSLWMLCTDVALEFPRPTLPNVVYVGGILTKPASPLPEDLQRWVNGANEHGFVLVSFGAGVKYLSEDIANKLAGALGRLPQKVIWRFSGPKPKNLGNNTKLIEWLPQNDLLGHSKIKAFLSHGGLNSIFETIYHGVPVVGIPLFGDHYDTMTRVQAKGMGILLEWKTVTEKELYEALVKVINNPSYRQRAQKLSEIHKDQPGHPVNRTIYWIDYIIRHNGAHHLRAAVHQISFCQ

SEQ ID NO: 2011 - protein, 1251 aa, synthetic construct
  REGION 1..1251: note = UMODL1 (Q5DID0) ECD
SGFTEKGLSLLGYQLCSHRVTHTVQKVEAVQTSYTSYVSCGGWIPWRRCPKMVYRTQYLVVEVPESRNVTDCCEGYEQLGLYCVLPLNQSGQFTSRPGACPAEGPEPSTSPCSLDIDCPGLEKCCPWSGGRYCMAPAPQAPERDPVGSWYNVTILVKMDFKELQQVDPRLLNHMRLLHSLVTSALQPMASTVHHLHSAPGNASTTVSRLLLGLPRPLPVADVSTLLGDIAKRVYEVISVQVQDVNECFYEELNACSGRELCANLEGSYWCVCHQEAPATSPRKLNLEWEDCPPVSDYVVLNVTSDSFQVSWRLNSTQNHTFHVRVYRGMELLRSARTQSQALAVAGLEAGVLYRVKTSYQGCGADVSTTLTIKTNAQVFEVTIKIVNHNLTEKLLNRSSVEYQDFSRQLLHEVESSFPPVVSDLYRSGKLRMQIVSLQAGSVVVRLKLTVQDPGFPMGISTLAPILQPLLASTVFQIDRQGTRVQDWDECVDSAEHDCSPAAWCINLEGSYTCQCRTTRDATPSRAGRACEGDLVSPMGGGLSAATGVTVPGLGTGTAALGLENFTLSPSPGYPQGTPAAGQAWTPEPSPRRGGSNVVGYDRNNTGKGVEQELQGNSIMEPPSWPSPTEDPTGHFLWHATRSTRETLLNPTWLRNEDSGPSGSVDLPLTSTLTALKTPACVPVSIGRIMVSNVTSTGFHLAWEADLAMDSTFQLTLTSMWSPAVVLETWNTSVTLSGLEPGVLHLVEIMAKACGKEGARAHLKVRTAARKLIGKVRIKNVRYSESFRNASSQEYRDFLELFFRMVRGSLPATMCQHMDAGGVRMEVVSVTNGSIVVEFHLLIIADVDVQEVSAAFLTAFQTVPLLEVIRGDTFIQDYDECERKEDDCVPGTSCRNTLGSFTCSCEGGAPDFPVEYSERPCEGDSPGNETWATSPERPLTTAGTKAAFVQGTSPTPQGLPQRLNLTGAVRVLCEIEKVVVAIQKRFLQQESIPESSLYLSHPSCNVSHSNGTHVLLEAGWSECGTLMQSNMTNTVVRTTLRNDLSQEGIIHHLKILSPIYCAFQNDLLTSSGFTLEWGVYTIIEDLHGAGNFVTEMQLFIGDSPIPQNYSVSASDDVRIEVGLYRQKSNLKVVLTECWATPSSNARDPITFSFINNSCPVPNTYTNVIENGNSNKAQFKLRIFSFINDSIVYLHCKLRVCMESPGATCKINCNNFRLLQNSETSATHQMSWGPLIRSEGEPPHAEAGLGAGY

SEQ ID NO: 2012 - protein, 281 aa, synthetic construct
  REGION 1..281: note = UNC5A (Q6ZN44) ECD
QQSATVANPVPGANPDLLPHFLVEPEDVYIVKNKPVLLVCKAVPATQIFFKCNGEWVRQVDHVIERSTDGSSGLPTMEVRINVSRQQVEKVFGLEEYWCQCVAWSSSGTTKSQKAYIRIAYLRKNFEQEPLAKEVSLEQGIVLPCRPPEGIPPAEVEWLRNEDLVDPSLDPNVYITREHSLVVRQARLADTANYTCVAKNIVARRRSASAAVIVYVDGSWSPWSKWSACGLDCTHWRSRECSDPAPRNGGEECQGTDLDTRNCTSDLCVHTASGPEDVALY

SEQ ID NO: 2013 - protein, 351 aa, synthetic construct
  REGION 1..351: note = UNC5B (Q8IZJ1) ECD
GTDSGSEVLPDSFPSAPAEPLPYFLQEPQDAYIVKNKPVELRCRAFPATQIYFKCNGEWVSQNDHVTQEGLDEATGLRVREVQIEVSRQQVEELFGLEDYWCQCVAWSSAGTTKSRRAYVRIAYLRKNFDQEPLGKEVPLDHEVLLQCRPPEGVPVAEVEWLKNEDVIDPTQDTNFLLTIDHNLIIRQARLSDTANYTCVAKNIVAKRRSTTATVIVYVNGGWSSWAEWSPCSNRCGRGWQKRTRTCTNPAPLNGGAFCEGQAFQKTACTTICPVDGAWTEWSKWSACSTECAHWRSRECMAPPPQNGGRDCSGTLLDSKNCTDGLCMQNKKTLSDPNSHLLEASGDAALY

SEQ ID NO: 2014 - protein, 340 aa, synthetic construct
  REGION 1..340: note = UNC5C (O95185) ECD
QDDDFFHELPETFPSDPPEPLPHFLIEPEEAYIVKNKPVNLYCKASPATQIYFKCNSEWVHQKDHIVDERVDETSGLIVREVSIEISRQQVEELFGPEDYWCQCVAWSSAGTTKSRKAYVRIAYLRKTFEQEPLGKEVSLEQEVLLQCRPPEGIPVAEVEWLKNEDIIDPVEDRNFYITIDHNLIIKQARLSDTANYTCVAKNIVAKRKSTTATVIVYVNGGWSTWTEWSVCNSRCGRGYQKRTRTCTNPAPLNGGAFCEGQSVQKIACTTLCPVDGRWTPWSKWSTCGTECTHWRRRECTAPAPKNGGKDCDGLVLQSKNCTDGLCMQTAPDSDDVALY

SEQ ID NO: 2015 - protein, 347 aa, synthetic construct
  REGION 1..347: note = UNC5D (Q6UXZ4) ECD
ARGTDNGEALPESIPSAPGTLPHFIEEPDDAYIIKSNPIALRCKARPAMQIFFKCNGEWVHQNEHVSEETLDESSGLKVREVFINVTRQQVEDFHGPEDYWCQCVAWSHLGTSKSRKASVRIAYLRKNFEQDPQGREVPIEGMIVLHCRPPEGVPAAEVEWLKNEEPIDSEQDENIDTRADHNLIIRQARLSDSGNYTCMAANIVAKRRSLSATVVVYVNGGWSSWTEWSACNVRCGRGWQKRSRTCTNPAPLNGGAFCEGMSVQKITCTSLCPVDGSWEVWSEWSVCSPECEHLRIRECTAPPPRNGGKFCEGLSQESENCTDGLCILDKKPLHEIKPQSIENASD

SEQ ID NO: 2016 - protein, 71 aa, synthetic construct
  REGION 1..71: note = UPK2 (O00526) ECD
ELVSVVDSGAGFTVTRLSAYQVTNLVPGTKFYISYLVKKGTATESSREIPMSTLPRRNMESIGLGMARTGG

SEQ ID NO: 2017 - protein, 189 aa, synthetic construct
  REGION 1..189: note = UPK3A (O75631) ECD
VNLQPQLASVTFATNNPTLTTVALEKPLCMFDSKEALTGTHEVYLYVLVDSAISRNASVQDSTNTPLGSTFLQTEGGRTGPYKAVAFDLIPCSDLPSLDAIGDVSKASQILNAYLVRVGANGTCLWDPNFQGLCNAPLSAATEYRFKYVLVNMSTGLVEDQTLWSDPIRTNQLTPYSTIDTWPGRRSGG

SEQ ID NO: 2018 - protein, 211 aa, synthetic construct
  REGION 1..211: note = UPK3B (Q9BT76) ECD
EWGSWMDASSQTQGAGGPAGVIGPWAPAPLRLGEAAPGTPTPVSVAHLLSPVATELVPYTPQITAWDLEGKVTATTFSLEQPRCVFDGLASASDTVWLVVAFSNASRGFQNPETLADIPASPQLLTDGHYMTLPLSPDQLPCGDPMAGSGGAPVLRVGHDHGCHQQPFCNAPLPGPGPYREDPRIHRHLARAAKWQHDRHYLHPLFSGRPP

SEQ ID NO: 2019 - protein, 171 aa, synthetic construct
  REGION 1..171: note = UPK3BL (B0FP48) ECD
GTDVAAPEHISYVPQLSNDTLAGRLTLSTFTLEQPLGQFSSHNISDLDTIWLVVALSNATQSFTAPRTNQDIPAPANFSQRGYYLTLRANRVLYQTRGQLHVLRVGNDTHCQPTKIGCNHPLPGPGPYRVKFLVMNDEGPVAETKWSSDTRLQQAQALRAVPGPQSPGTVV

SEQ ID NO: 2020 - protein, 5011 aa, synthetic construct
  REGION 1..5011: note = USH2A (O75445) ECD
ESRGLFPRLENVGAFKKVSIVPTQAVCGLPDRSTFCHSSAAAESIQFCTQRFCIQDCPYRSSHPTYTALFSAGLSSCITPDKNDLHPNAHSNSASFIFGNHKSCFSSPPSPKLMASFTLAVWLKPEQQGVMCVIEKTVDGQIVFKLTISEKETMFYYRTVNGLQPPIKVMTLGRILVKKWIHLSVQVHQTKISFFINGVEKDHTPFNARTLSGSITDFASGTVQIGQSLNGLEQFVGRMQDFRLYQVALTNREILEVFSGDLLRLHAQSHCRCPGSHPRVHPLAQRYCIPNDAGDTADNRVSRLNPEAHPLSFVNDNDVGTSWVSNVFTNITQLNQGVTISVDLENGQYQVFYIIIQFFSPQPTEIRIQRKKENSLDWEDWQYFARNCGAFGMKNNGDLEKPDSVNCLQLSNFTPYSRGNVTFSILTPGPNYRPGYNNFYNTPSLQEFVKATQIRFHFHGQYYTTETAVNLRHRYYAVDEITISGRCQCHGHADNCDTTSQPYRCLCSQESFTEGLHCDRCLPLYNDKPFRQGDQVYAFNCKPCQCNSHSKSCHYNISVDPFPFEHFRGGGGVCDDCEHNTTGRNCELCKDYFFRQVGADPSAIDVCKPCDCDTVGTRNGSILCDQIGGQCNCKRHVSGRQCNQCQNGFYNLQELDPDGCSPCNCNTSGTVDGDITCHQNSGQCKCKANVIGLRCDHCNFGFKFLRSFNDVGCEPCQCNLHGSVNKFCNPHSGQCECKKEAKGLQCDTCRENFYGLDVTNCKACDCDTAGSLPGTVCNAKTGQCICKPNVEGRQCNKCLEGNFYLRQNNSFLCLPCNCDKTGTINGSLLCNKSTGQCPCKLGVTGLRCNQCEPHRYNLTIDNFQHCQMCECDSLGTLPGTICDPISGQCLCVPNRQGRRCNQCQPGFYISPGNATGCLPCSCHTTGAVNHICNSLTGQCVCQDASIAGQRCDQCKDHYFGFDPQTGRCQPCNCHLSGALNETCHLVTGQCFCKQFVTGSKCDACVPSASHLDVNNLLGCSKTPFQQPPPRGQVQSSSAINLSWSPPDSPNAHWLTYSLLRDGFEIYTTEDQYPYSIQYFLDTDLLPYTKYSYYIETTNVHGSTRSVAVTYKTKPGVPEGNLTLSYIIPIGSDSVTLTWTTLSNQSGPIEKYILSCAPLAGGQPCVSYEGHETSATIWNLVPFAKYDFSVQACTSGGCLHSLPITVTTAQAPPQRLSPPKMQKISSTELHVEWSPPAELNGIIIRYELYMRRLRSTKETTSEESRVFQSSGWLSPHSFVESANENALKPPQTMTTITGLEPYTKYEFRVLAVNMAGSVSSAWVSERTGESAPVFMIPPSVFPLSSYSLNISWEKPADNVTRGKVVGYDINMLSEQSPQQSIPMAFSQLLHTAKSQELSYTVEGLKPYRIYEFTITLCNSVGCVTSASGAGQTLAAAPAQLRPPLVKGINSTTIHLRWFPPEELNGPSPIYQLERRESSLPALMTTMMKGIRFIGNGYCKFPSSTHPVNTDFTGIKASFRTKVPEGLIVFAASPGNQEEYFALQLKKGRLYFLFDPQGSPVEVTTTNDHGKQYSDGKWHEIIAIRHQAFGQITLDGIYTGSSAILNGSTVIGDNTGVFLGGLPRSYTILRKDPEIIQKGFVGCLKDVHFMKNYNPSAIWEPLDWQSSEEQINVYNSWEGCPASLNEGAQFLGAGFLELHPYMFHGGMNFEISFKFRTDQLNGLLLFVYNKDGPDFLAMELKSGILTFRLNTSLAFTQVDLLLGLSYCNGKWNKVIIKKEGSFISASVNGLMKHASESGDQPLVVNSPVYVGGIPQELLNSYQHLCLEQGFGGCMKDVKFTRGAVVNLASVSSGAVRVNLDGCLSTDSAVNCRGNDSILVYQGKEQSVYEGGLQPFTEYLYRVIASHEGGSVYSDWSRGRTTGAAPQSVPTPSRVRSLNGYSIEVTWDEPVVRGVIEKYILKAYSEDSTRPPRMPSASAEFVNTSNLTGILTGLLPFKNYAVTLTACTLAGCTESSHALNISTPQEAPQEVQPPVAKSLPSSLLLSWNPPKKANGIITQYCLYMDGRLIYSGSEENYIVTDLAVFTPHQFLLSACTHVGCTNSSWVLLYTAQLPPEHVDSPVLTVLDSRTIHIQWKQPRKISGILERYVLYMSNHTHDFTIWSVIYNSTELFQDHMLQYVLPGNKYLIKLGACTGGGCTVSEASEALTDEDIPEGVPAPKAHSYSPDSFNVSWTEPEYPNGVITSYGLYLDGILIHNSSELSYRAYGFAPWSLHSFRVQACTAKGCALGPLVENRTLEAPPEGTVNVFVKTQGSRKAHVRWEAPFRPNGLLTHSVLFTGIFYVDPVGNNYTLLNVTKVMYSGEETNLWVLIDGLVPFTNYTVQVNISNSQGSLITDPITIAMPPGAPDGVLPPRLSSATPTSLQVVWSTPARNNAPGSPRYQLQMRSGDSTHGFLELFSNPSASLSYEVSDLQPYTEYMFRLVASNGFGSAHSSWIPFMTAEDKPGPVVPPILLDVKSRMMLVTWQHPRKSNGVITHYNIYLHGRLYLRTPGNVTNCTVMHLHPYTAYKFQVEACTSKGCSLSPESQTVWTLPGAPEGIPSPELFSDTPTSVIISWQPPTHPNGLVENFTIERRVKGKEEVTTLVTLPRSHSMRFIDKTSALSPWTKYEYRVLMSTLHGGTNSSAWVEVTTRPSRPAGVQPPVVTVLEPDAVQVTWKPPLIQNGDILSYEIHMPDPHITLTNVTSAVLSQKVTHLIPFTNYSVTIVACSGGNGYLGGCTESLPTYVTTHPTVPQNVGPLSVIPLSESYVVISWQPPSKPNGPNLRYELLRRKIQQPLASNPPEDLNRWHNIYSGTQWLYEDKGLSRFTTYEYMLFVHNSVGFTPSREVTVTTLAGLPERGANLTASVLNHTAIDVRWAKPTVQDLQGEVEYYTLFWSSATSNDSLKILPDVNSHVIGHLKPNTEYWIFISVFNGVHSINSAGLHATTCDGEPQGMLPPEVVIINSTAVRVIWTSPSNPNGVVTEYSIYVNNKLYKTGMNVPGSFILRDLSPFTIYDIQVEVCTIYACVKSNGTQITTVEDTPSDIPTPTIRGITSRSLQIDWVSPRKPNGIILGYDLLWKTWYPCAKTQKLVQDQSDELCKAVRCQKPESICGHICYSSEAKVCCNGVLYNPKPGHRCCEEKYIPFVLNSTGVCCGGRIQEAQPNHQCCSGYYARILPGEVCCPDEQHNRVSVGIGDSCCGRMPYSTSGNQICCAGRLHDGHGQKCCGRQIVSNDLECCGGEEGVVYNRLPGMFCCGQDYVNMSDTICCSASSGESKAHIKKNDPVPVKCCETELIPKSQKCCNGVGYNPLKYVCSDKISTGMMMKETKECRILCPASMEATEHCGRCDFNFTSHICTVIRGSHNSTGKASIEEMCSSAEETIHTGSVNTYSYTDVNLKPYMTYEYRISAWNSYGRGLSKAVRARTKEDVPQGVSPPTWTKIDNLEDTIVLNWRKPIQSNGPIIYYILLRNGIERFRGTSLSFSDKEGIQPFQEYSYQLKACTVAGCATSSKVVAATTQGVPESILPPSITALSAVALHLSWSVPEKSNGVIKEYQIRQVGKGLIHTDTTDRRQHTVTGLQPYTNYSFTLTACTSAGCTSSEPFLGQTLQAAPEGVWVTPRHIIINSTTVELYWSLPEKPNGLVSQYQLSRNGNLLFLGGSEEQNFTDKNLEPNSRYTYKLEVKTGGGSSASDDYIVQTPMSTPEEIYPPYNITVIGPYSIFVAWIPPGILIPEIPVEYNVLLNDGSVTPLAFSVGHHQSTLLENLTPFTQYEIRIQACQNGSCGVSSRMFVKTPEAAPMDLNSPVLKALGSACIEIKWMPPEKPNGIIINYFIYRRPAGIEEESVLFVWSEGALEFMDEGDTLRPFTLYEYRVRACNSKGSVESLWSLTQTLEAPPQDFPAPWAQATSAHSVLLNWTKPESPNGIISHYRVVYQERPDDPTFNSPTVHAFTVKGTSHQAHLYGLEPFTTYRIGVVAANHAGEILSPWTLIQTLESSPSGLRNFIVEQKENGRALLLQWSEPMRTNGVIKTYNIFSDGFLEYSGLNRQFLFRRLDPFTLYTLTLEACTRAGCAHSAPQPLWTDEAPPDSQLAPTVHSVKSTSVELSWSEPVNPNGKIIRYEVIRRCFEGKAWGNQTIQADEKIVFTEYNTERNTFMYNDTGLQPWTQCEYKIYTWNSAGHTCSSWNVVRTLQAPPEGLSPPVISYVSMNPQKLLISWIPPEQSNGIIQSYRLQRNEMLYPFSFDPVTFNYTDEELLPFSTYSYALQACTSGGCSTSKPTSITTLEAAPSEVSPPDLWAVSATQMNVCWSPPTVQNGKITKYLVRYDNKESLAGQGLCLLVSHLQPYSQYNFSLVACTNGGCTASVSKSAWTMEALPENMDSPTLQVTGSESIEITWKPPRNPNGQIRSYELRRDGTIVYTGLETRYRDFTLTPGVEYSYTVTASNSQGGILSPLVKDRTSPSAPSGMEPPKLQARGPQEILVNWDPPVRTNGDIINYTLFIRELFERETKIIHINTTHNSFGMQSYIVNQLKPFHRYEIRIQACTTLGCASSDWTFIQTPEIAPLMQPPPHLEVQMAPGGFQPTVSLLWTGPLQPNGKVLYYELYRRQIATQPRKSNPVLIYNGSSTSFIDSELLPFTEYEYQVWAVNSAGKAPSSWTWCRTGPAPPEGLRAPTFHVISSTQAVVNISAPGKPNGIVSLYRLFSSSAHGAETVLSEGMATQQTLHGLQAFTNYSIGVEACTCFNCCSKGPTAELRTHPAPPSGLSSPQIGTLASRTASFRWSPPMFPNGVIHSYELQFHVACPPDSALPCTPSQIETKYTGLGQKASLGGLQPYTTYKLRVVAHNEVGSTASEWISFTTQKELPQYRAPFSVDSNLSVVCVNWSDTFLLNGQLKEYVLTDGGRRVYSGLDTTLYIPRTADKTFFFQVICTTDEGSVKTPLIQYDTSTGLGLVLTTPGKKKGSRSKSTEFYSELW

SEQ ID NO: 2021 - protein, 552 aa, synthetic construct
  REGION 1..552: note = VASN (Q6EMK4) ECD
CPSGCQCSQPQTVFCTARQGTTVPRDVPPDTVGLYVFENGITMLDAGSFAGLPGLQLLDLSQNQIASLPSGVFQPLANLSNLDLTANRLHEITNETFRGLRRLERLYLGKNRIRHIQPGAFDTLDRLLELKLQDNELRALPPLRLPRLLLLDLSHNSLLALEPGILDTANVEALRLAGLGLQQLDEGLFSRLRNLHDLDVSDNQLERVPPVIRGLRGLTRLRLAGNTRIAQLRPEDLAGLAALQELDVSNLSLQALPGDLSGLFPRLRLLAAARNPFNCVCPLSWFGPWVRESHVTLASPEETRCHFPPKNAGRLLLELDYADFGCPATTTTATVPTTRPVVREPTALSSSLAPTWLSPTEPATEAPSPPSTAPPTVGPVPQPQDCPPSTCLNGGTCHLGTRHHLACLCPEGFTGLYCESQMGQGTRPSPTPVTPRPPRSLTLGIEPVSPTSLRVGLQRYLQGSSVQLRSLRLTYRNLSGPDKRLVTLRLPASLAEYTVTQLRPNATYSVCVMPLGPGRVPEGEEACGEAHTPPAVHSNHAPVTQAREGNLP

SEQ ID NO: 2022 - protein, 674 aa, synthetic construct
  REGION 1..674: note = VCAM1 (P19320) ECD
FKIETTPESRYLAQIGDSVSLTCSTTGCESPFFSWRTQIDSPLNGKVTNEGTTSTLTMNPVSFGNEHSYLCTATCESRKLEKGIQVEIYSFPKDPEIHLSGPLEAGKPITVKCSVADVYPFDRLEIDLLKGDHLMKSQEFLEDADRKSLETKSLEVTFTPVIEDIGKVLVCRAKLHIDEMDSVPTVRQAVKELQVYISPKNTVISVNPSTKLQEGGSVTMTCSSEGLPAPEIFWSKKLDNGNLQHLSGNATLTLIAMRMEDSGIYVCEGVNLIGKNRKEVELIVQEKPFTVEISPGPRIAAQIGDSVMLTCSVMGCESPSFSWRTQIDSPLSGKVRSEGTNSTLTLSPVSFENEHSYLCTVTCGHKKLEKGIQVELYSFPRDPEIEMSGGLVNGSSVTVSCKVPSVYPLDRLEIELLKGETILENIEFLEDTDMKSLENKSLEMTFIPTIEDTGKALVCQAKLHIDDMEFEPKQRQSTQTLYVNVAPRDTTVLVSPSSILEEGSSVNMTCLSQGFPAPKILWSRQLPNGELQPLSENATLTLISTKMEDSGVYLCEGINQAGRSRKEVELIIQVTPKDIKLTAFPSESVKEGDTVIISCTCGNVPETWIILKKKAETGDTVLKSIDGAYTIRKAQLKDAGVYECESKNKVGSQLRSLTLDVQGRENNKDYFSPE

SEQ ID NO: 2023 - protein, 770 aa, synthetic construct
  REGION 1..770: note = VLDLR (P98155) ECD
GRKAKCEPSQFQCTNGRCITLLWKCDGDEDCVDGSDEKNCVKKTCAESDFVCNNGQCVPSRWKCDGDPDCEDGSDESPEQCHMRTCRIHEISCGAHSTQCIPVSWRCDGENDCDSGEDEENCGNITCSPDEFTCSSGRCISRNFVCNGQDDCSDGSDELDCAPPTCGAHEFQCSTSSCIPISWVCDDDADCSDQSDESLEQCGRQPVIHTKCPASEIQCGSGECIHKKWRCDGDPDCKDGSDEVNCPSRTCRPDQFECEDGSCIHGSRQCNGIRDCVDGSDEVNCKNVNQCLGPGKFKCRSGECIDISKVCNQEQDCRDWSDEPLKECHINECLVNNGGCSHICKDLVIGYECDCAAGFELIDRKTCGDIDECQNPGICSQICINLKGGYKCECSRGYQMDLATGVCKAVGKEPSLIFTNRRDIRKIGLERKEYIQLVEQLRNTVALDADIAAQKLFWADLSQKAIFSASIDDKVGRHVKMIDNVYNPAAIAVDWVYKTIYWTDAASKTISVATLDGTKRKFLFNSDLREPASIAVDPLSGFVYWSDWGEPAKIEKAGMNGFDRRPLVTADIQWPNGITLDLIKSRLYWLDSKLHMLSSVDLNGQDRRIVLKSLEFLAHPLALTIFEDRVYWIDGENEAVYGANKFTGSELATLVNNLNDAQDIIVYHELVQPSGKNWCEEDMENGGCEYLCLPAPQINDHSPKYTCSCPSGYNVEENGRDCQSTATTVTYSETKDTNTTEISATSGLVPGGINVTTAVSEVSVPPKGTS

SEQ ID NO: 2024 - protein, 211 aa, synthetic construct
  REGION 1..211: note = VSIG1 (Q86XK7) ECD
VQVTIPDGFVNVTVGSNVTLICIYTTTVASREQLSIQWSFFHKKEMEPISIYFSQGGQAVAIGQFKDRITGSNDPGNASITISHMQPADSGIYICDVNNPPDFLGQNQGILNVSVLVKPSKPLCSVQGRPETGHTISLSCLSALGTPSPVYYWHKLEGRDIVPVKENFNPTTGILVIGNLTNFEQGYYQCTAINRLGNSSCEIDLTSSHPE

SEQ ID NO: 2025 - protein, 383 aa, synthetic construct
  REGION 1..383: note = VSIG10 (Q8N0Z9) ECD
VVIGEVHENVTLHCGNISGLRGQVTWYRNNSEPVFLLSSNSSLRPAEPRFSLVDATSLHIESLSLGDEGIYTCQEILNVTQWFQVWLQVASGPYQIEVHIVATGTLPNGTLYAARGSQVDFSCNSSSRPPPVVEWWFQALNSSSESFGHNLTVNFFSLLLISPNLQGNYTCLALNQLSKRHRKVTTELLVYYPPPSAPQCWAQMASGSFMLQLTCRWDGGYPDPDFLWIEEPGGVIVGKSKLGVEMLSESQLSDGKKFKCVTSHIVGPESGASCMVQIRGPSLLSEPMKTCFTGGNVTLTCQVSGAYPPAKILWLRNLTQPEVIIQPSSRHLITQDGQNSTLTIHNCSQDLDEGYYICRADSPVGVREMEIWLSVKEPLNIGG

SEQ ID NO: 2026 - protein, 749 aa, synthetic construct
  REGION 1..749: note = VSIG10L (Q86VR7) ECD
LQQTNFSSAFSSDSKSSSQGLGVEVPSIKPPSWKVPDQFLDSKASAGISDSSWFPEALSSNMSGSFWSNVSAEGQDLSPVSPFSETPGSEVFPDISDPQVPAKDPKPSFTVKTPASNISTQVSHTKLSVEAPDSKFSPDDMDLKLSAQSPESKFSAETHSAASFPQQVGGPLAVLVGTTIRLPLVPIPNPGPPTSLVVWRRGSKVLAAGGLGPGAPLISLDPAHRDHLRFDQARGVLELASAQLDDAGVYTAEVIRAGVSQQTHEFTVGVYEPLPQLSVQPKAPETEEGAAELRLRCLGWGPGRGELSWSRDGRALEAAESEGAETPRMRSEGDQLLIVRPVRSDHARYTCRVRSPFGHREAAADVSVFYGPDPPTITVSSDRDAAPARFVTAGSNVTLRCAAASRPPADITWSLADPAEAAVPAGSRLLLPAVGPGHAGTYACLAANPRTGRRRRSLLNLTVADLPPGAPQCSVEGGPGDRSLRFRCSWPGGAPAASLQFQGLPEGIRAGPVSSVLLAAVPAHPRLSGVPITCLARHLVATRTCTVTPEAPREVLLHPLVAETRLGEAEVALEASGCPPPSRASWAREGRPLAPGGGSRLRLSQDGRKLHIGNFSLDWDLGNYSVLCSGALGAGGDQITLIGPSISSWRLQRARDAAVLTWDVERGALISSFEIQAWPDGPALGRTSTYRDWVSLLILGPQERSAVVPLPPRNPGTWTFRILPILGGQPGTPSQSRVYRAGPTLSHGA

SEQ ID NO: 2027 - protein, 220 aa, synthetic construct
  REGION 1..220: note = VSIG2 (Q96IQ7) ECD
VEVKVPTEPLSTPLGKTAELTCTYSTSVGDSFALEWSFVQPGKPISESHPILYFTNGHLYPTGSKSKRVSLLQNPPTVGVATLKLTDVHPSDTGTYLCQVNNPPDFYTNGLGLINLTVLVPPSNPLCSQSGQTSVGGSTALRCSSSEGAPKPVYNWVRLGTFPTPSPGSMVQDEVSGQLILTNLSLTSSGTYRCVATNQMGSASCELTLSVTEPSQGRVA

SEQ ID NO: 2028 - protein, 119 aa, synthetic construct
  REGION 1..119: note = VSTM1 (Q6UX27) ECD
YEDEKKNEKPPKPSLHAWPSSVVEAESNVTLKCQAHSQNVTFVLRKVNDSGYKQEQSSAENEAEFPFTDLKPKDAGRYFCAYKTTASHEWSESSEHLQLVVTDKHDELEAPSMKTDTRT

SEQ ID NO: 2029 - protein, 157 aa, synthetic construct
  REGION 1..157: note = VSTM4 (Q8IW00) ECD
LNVTVSPGPVVDYLEGENATLLCHVSQKRRKDSLLAVRWFFAHSFDSQEALMVKMTKLRVVQYYGNFSRSAKRRRLRLLEEQRGALYRLSVLTLQPSDQGHYVCRVQEISRHRNKWTAWSNGSSATEMRVISLKASEESSFEKTKETWAFFEDLYVY

SEQ ID NO: 2030 - protein, 119 aa, synthetic construct
  REGION 1..119: note = VSTM5 (A8MXK1) ECD
LQSQGVSLYIPQATINATVKEDILLSVEYSCHGVPTIEWTYSSNWGTQKIVEWKPGTQANISQSHKDRVCTFDNGSIQLFSVGVRDSGYYVITVTERLGSSQFGTIVLHVSEILYEDLH

SEQ ID NO: 2031 - protein, 235 aa, synthetic construct
  REGION 1..235: note = VTCN1 (Q7Z7D3) ECD
LIIGFGISGRHSITVTTVASAGNIGEDGILSCTFEPDIKLSDIVIQWLKEGVLGLVHEFKEGKDELSEQDEMFRGRTAVFADQVIVGNASLRLKNVQLTDAGTYKCYIITSKGKGNANLEYKTGAFSMPEVNVDYNASSETLRCEAPRWFPQPTVVWASQVDQGANFSEVSNTSFELNSENVTMKVVSVLYNVTINNTYSCMIENDIAKATGDIKVTESEIKRRSHLQLLNSKAS

SEQ ID NO: 2032 - protein, 2740 aa, synthetic construct
  REGION 1..2740: note = ZAN (Q9Y493) ECD
RKEKPPDQKLVVRSSRDNYVLTQCDFEDDAKPLCDWSQVSADDEDWVRASGPSPTGSTGAPGGYPNGEGSYLHMESNSFHRGGVARLLSPDLWEQGPLCVHFAHHMFGLSWGAQLRLLLLSGEEGRRPDVLWKHWNTQRPSWMLTTVTVPAGFTLPTRLMFEGTRGSTAYLDIALDALSIRRGSCNRVCMMQTCSFDIPNDLCDWTWIPTASGAKWTQKKGSSGKPGVGPDGDFSSPGSGCYMLLDPKNARPGQKAVLLSPVSLSSGCLSFSFHYILRGQSPGAALHIYASVLGSIRKHTLFSGQPGPNWQAVSVNYTAVGRIQFAVVGVFGKTPEPAVAVDATSIAPCGEGFPQCDFEDNAHPFCDWVQTSGDGGHWALGHKNGPVHGMGPAGGFPNAGGHYIYLEADEFSQAGQSVRLVSRPFCAPGDICVEFAYHMYGLGEGTMLELLLGSPAGSPPIPLWKRVGSQRPYWQNTSVTVPSGHQQPMQLIFKGIQGSNTASVVAMGFILINPGTCPVKVLPELPPVSPVSSTGPSETTGLTENPTISTKKPTVSIEKPSVTTEKPTVPKEKPTIPTEKPTISTEKPTIPSEKPNMPSEKPTIPSEKPTILTEKPTIPSEKPTIPSEKPTISTEKPTVPTEEPTTPTEETTTSMEEPVIPTEKPSIPTEKPSIPTEKPTISMEETIISTEKPTISPEKPTIPTEKPTIPTEKSTISPEKPTTPTEKPTIPTEKPTISPEKPTTPTEKPTISPEKLTIPTEKPTIPTEKPTIPTEKPTISTEEPTTPTEETTISTEKPSIPMEKPTLPTEETTTSVEETTISTEKLTIPMEKPTISTEKPTIPTEKPTISPEKLTIPTEKLTIPTEKPTIPIEETTISTEKLTIPTEKPTISPEKPTISTEKPTIPTEKPTIPTEETTISTEKLTIPTEKPTISPEKLTIPTEKPTISTEKPTIPTEKLTIPTEKPTIPTEKPTIPTEKLTALRPPHPSPTATGLAALVMSPHAPSTPMTSVILGTTTTSRSSTERCPPNARYESCACPASCKSPRPSCGPLCREGCVCNPGFLFSDNHCIQASSCNCFYNNDYYEPGAEWFSPNCTEHCRCWPGSRVECQISQCGTHTVCQLKNGQYGCHPYAGTATCLVYGDPHYVTFDGRHFGFMGKCTYILAQPCGNSTDPFFRVTAKNEEQGQEGVSCLSKVYVTLPESTVTLLKGRRTLVGGQQVTLPAIPSKGVFLGASGRFVELQTEFGLRVRWDGDQQLYVTVSSTYSGKLCGLCGNYDGNSDNDHLKLDGSPAGDKEELGNSWQTDQDEDQECQKYQVVNSPSCDSSLQSSMSGPGFCGRLVDTHGPFETCLLHVKAASFFDSCMLDMCGFQGLQHLLCTHMSTMTTTCQDAGHAVKPWREPHFCPMACPPNSKYSLCAKPCPDTCHSGFSGMFCSDRCVEACECNPGFVLSGLECIPRSQCGCLHPAGSYFKVGERWYKPGCKELCVCESNNRIRCQPWRCRAQEFCGQQDGIYGCHAQGAATCTASGDPHYLTFDGALHHFMGTCTYVLTRPCWSRSQDSYFVVSATNENRGGILEVSYIKAVHVTVFDLSISLLRGCKVMLNGHRVALPVWLAQGRVTIRLSSNLVLLYTNFGLQVRYDGSHLVEVTVPSSYGGQLCGLCGNYNNNSLDDNLRPDRKLAGDSMQLGAAWKLPESSEPGCFLVGGKPSSCQENSMADAWNKNCAILINPQGPFSQCHQVVPPQSSFASCVHGQCGTKGDTTALCRSLQAYASLCAQAGQAPAWRNRTFCPMRCPPGSSYSPCSSPCPDTCSSINNPRDCPKALPCAESCECQKGHILSGTSCVPLGQCGCTDPAGSYHPVGERWYTENTCTRLCTCSVHNNITCFQSTCKPNQICWALDGLLHCRASGVGVCQLPGESHYVSFDGSNHSIPDACTLVLVKVCHPAMALPFFKISAKHEKEEGGTEAFRLHEVYIDIYDAQVTLQKGHRVLINSKQVTLPAISQIPGVSVKSSSIYSIVNIKIGVQVKFDGNHLLEIEIPTTYYGKVCGMCGNFNDEEEDELMMPSDEVANSDSEFVNSWKDKDIDPSCQSLLVDEQQIPAEQQENPSGNCRAADLRRAREKCEAALRAPVWAQCASRIDLTPFLVDCANTLCEFGGLYQALCQALQAFGATCQSQGLKPPLWRNSSFCPLECPAYSSYTNCLPSCSPSCWDLDGRCEGAKVPSACAEGCICQPGYVLSEDKCVPRSQCGCKDAHGGSIPLGKSWVSSGCTEKCVCTGGAIQCGDFRCPSGSHCQLTSDNSNSNCVSDKSEQCSVYGDPRYLTFDGFSYRLQGRMTYVLIKTVDVLPEGVEPLLVEGRNKMDPPRSSIFLQEVITTVYGYKVQLQAGLELVVNNQKMAVPYRPNEHLRVTLWGQRLYLVTDFELVVSFGGRKNAVISLPSMYEGLVSGLCGNYDKNRKNDMMLPSGALTQNLNTFGNSWEVKTEDALLRFPRAIPAEEEGQGAELGLRTGLQVSECSPEQLASNSTQACRVLADPQGPFAACHQTVAPEPFQEHCVLDLCSAQDPREQEELRCQVLSGHGVSSRYHISELYDTLPSILCQPGRPRGLRGPLRGRLRQHPRLCLQWHPEPPLADCGCTSNGIYYQLGSSFLTEDCSQRCTCASSRILLCEPFSCRAGEVCTLGNHTQGCFPESPCLQNPCQNDGQCREQGATFTCECEVGYGGGLCMEPRDAPPPRKPAS

SEQ ID NO: 2033 - protein, 223 aa, synthetic construct
  REGION 1..223: note = ZNRF4 (Q8WWF5) ECD
VIPTQLPSRPGHRPPGRPRRCPKASCLPPPVGPSSTQTAKRVTMGWPRPGRALVAVKALLVLSLLQVPAQAVVRAVLEDNSSSVDFADLPALFGVPLAPEGIRGYLMEVKPANACHPIEAPRLGNRSLGAIVLIRRYDCTFDLKVLNAQRAGFEAAIVHNVHSDDLVSMTHVYEDLRGQIAIPSVFVSEAASQDLRVILGCNKSAHALLLPDDPPCHDLGCHP

SEQ ID NO: 2034 - protein, 576 aa, synthetic construct
  REGION 1..576: note = ZP1 (P60852) ECD
RWLQPDPGLPGLRHSYDCGIKGMQLLVFPRPGQTLRFKVVDEFGNRFDVNNCSICYHWVTSRPQEPAVFSADYRGCHVLEKDGRFHLRVFMEAVLPNGRVDVAQDATLICPKPDPSRTLDSQLAPPAMFSVSTPQTLSFLPTSGHTSQGSGHAFPSPLDPGHSSVHPTPALPSPGPGPTLATLAQPHWGTLEHWDVNKRDYIGTHLSQEQCQVASGHLPCIVRRTSKEACQQAGCCYDNTREVPCYYGNTATVQCFRDGYFVLVVSQEMALTHRITLANIHLAYAPTSCSPTQHTEAFVVFYFPLTHCGTTMQVAGDQLIYENWLVSGIHIQKGPQGSITRDSTFQLHVRCVFNASDFLPIQASIFPPPSPAPMTQPGPLRLELRIAKDETFSSYYGEDDYPIVRLLREPVHVEVRLLQRTDPNLVLLLHQCWGAPSANPFQQPQWPILSDGCPFKGDSYRTQMVALDGATPFQSHYQRFTVATFALLDSGSQRALRGLVYLFCSTSACHTSGLETCSTACSTGTTRQRRSSGHRNDTARPQDIVSSPGPVGFEDSYGQEPTLGPTDSNGNSSLRP

SEQ ID NO: 2035 - protein, 678 aa, synthetic construct
  REGION 1..678: note = ZP2 (Q05996) ECD
IDVSQLVNPAFPGTVTCDEREITVEFPSSPGTKKWHASVVDPLGLDMPNCTYILDPEKLTLRATYDNCTRRVHGGHQMTIRVMNNSAALRHGAVMYQFFCPAMQVEETQGLSASTICQKDFMSFSLPRVFSGLADDSKGTKVQMGWSIEVGDGARAKTLTLPEAMKEGFSLLIDNHRMTFHVPFNATGVTHYVQGNSHLYMVSLKLTFISPGQKVIFSSQAICAPDPVTCNATHMTLTIPEFPGKLKSVSFENQNIDVSQLHDNGIDLEATNGMKLHFSKTLLKTKLSEKCLLHQFYLASLKLTFLLRPETVSMVIYPECLCESPVSIVTGELCTQDGFMDVEVYSYQTQPALDLGTLRVGNSSCQPVFEAQSQGLVRFHIPLNGCGTRYKFEDDKVVYENEIHALWTDFPPSKISRDSEFRMTVKCSYSRNDMLLNINVESLTPPVASVKLGPFTLILQSYPDNSYQQPYGENEYPLVRFLRQPIYMEVRVLNRDDPNIKLVLDDCWATSTMDPDSFPQWNVVVDGCAYDLDNYQTTFHPVGSSVTHPDHYQRFDMKAFAFVSEAHVLSSLVYFHCSALICNRLSPDSPLCSVTCPVSSRHRRATGATEAEKMTVSLPGPILLLSDDSSFRGVGSSDLKASGSSGEKSRSETGEEVGSRGAMDTKGHKTAGDVGSKA

SEQ ID NO: 2036 - protein, 365 aa, synthetic construct
  REGION 1..365: note = ZP3 (P21754) ECD
QPLWLLQGGASHPETSVQPVLVECQEATLMVMVSKDLFGTGKLIRAADLTLGPEACEPLVSMDTEDVVRFEVGLHECGNSMQVTDDALVYSTFLLHDPRPVGNLSIVRTNRAEIPIECRYPRQGNVSSQAILPTWLPFRTTVFSEEKLTFSLRLMEENWNAEKRSPTFHLGDAAHLQAEIHTGSHVPLRLFVDHCVATPTPDQNASPYHTIVDFHGCLVDGLTDASSAFKVPRPGPDTLQFTVDVFHFANDSRNMIYITCHLKVTLAEQDPDELNKACSFSKPSNSWFPVEGSADICQCCNKGDCGTPSHSRRQPHVMSQWSRSASRNRRHVTEEADVTVGPLIFLDRRGDHEVEQWALPSDTSV

SEQ ID NO: 2037 - protein, 487 aa, synthetic construct
  REGION 1..487: note = ZP4 (Q12836) ECD
GQHKPEAPDYSSVLHCGPWSFQFAVNLNQEATSPPVLIAWDNQGLLHELQNDSDCGTWIRKGPGSSVVLEATYSSCYVTEWDSHYIMPVGVEGAGAAEHKVVTERKLLKCPMDLLARDAPDTDWCDSIPARDRLPCAPSPISRGDCEGLGCCYSSEEVNSCYYGNTVTLHCTREGHFSIAVSRNVTSPPLLLDSVRLALRNDSACNPVMATQAFVLFQFPFTSCGTTRQITGDRAVYENELVATRDVKNGSRGSVTRDSIFRLHVSCSYSVSSNSLPINVQVFTLPPPFPETQPGPLTLELQIAKDKNYGSYYGVGDYPVVKLLRDPIYVEVSILHRTDPYLGLLLQQCWATPSTDPLSQPQWPILVKGCPYIGDNYQTQLIPVQKALDLPFPSHHQRFSIFTFSFVNPTVEKQALRGPVHLHCSVSVCQPAETPSCVVTCPDLSRRRNFDNSSQNTTASVSSKGPMILLQATKDPPEKLRVPVDSK

SEQ ID NO: 2038 - protein, 353 aa, synthetic construct
  REGION 1..353: note = ZPLD1 (Q8TCW7) ECD
QFNGYNCDANLHSRFPAERDISVYCGVQAITMKINFCTVLFSGYSETDLALNGRHGDSHCRGFINNNTFPAVVIFIINLSTLEGCGNNLVVSTIPGVSAYGNATSVQVGNISGYIDTPDPPTIISYLPGLLYKFSCSYPLEYLVNNTQLASSSAAISVRENNGTFVSTLNLLLYNDSTYNQQLIIPSIGLPLKTKVFAAVQATNLDGRWNVLMDYCYTTPSGNPNDDIRYDLFLSCDKDPQTTVIENGRSQRGRFSFEVFRFVKHKNQKMSTVFLHCVTKLCRADDCPFLMPICSHRERRDAGRRTTWSPQSSSGSAVLSAGPIITRSDETPTNNSQLGSPSMPPFQLNAITS

SEQ ID NO: 2039 - protein, 1256 aa, synthetic construct
  REGION 1..1256: note = ACE (P12821) SP+PP+ECD
MGAASGRRGPGLLLPLPLLLLLPPQPALALDPGLQPGNFSADEAGAQLFAQSYNSSAEQVLFQSVAASWAHDTNITAENARRQEEAALLSQEFAEAWGQKAKELYEPIWQNFTDPQLRRIIGAVRTLGSANLPLAKRQQYNALLSNMSRIYSTAKVCLPNKTATCWSLDPDLTNILASSRSYAMLLFAWEGWHNAAGIPLKPLYEDFTALSNEAYKQDGFTDTGAYWRSWYNSPTFEDDLEHLYQQLEPLYLNLHAFVRRALHRRYGDRYINLRGPIPAHLLGDMWAQSWENIYDMVVPFPDKPNLDVTSTMLQQGWNATHMFRVAEEFFTSLELSPMPPEFWEGSMLEKPADGREVVCHASAWDFYNRKDFRIKQCTRVTMDQLSTVHHEMGHIQYYLQYKDLPVSLRRGANPGFHEAIGDVLALSVSTPEHLHKIGLLDRVTNDTESDINYLLKMALEKIAFLPFGYLVDQWRWGVFSGRTPPSRYNFDWWYLRTKYQGICPPVTRNETHFDAGAKFHVPNVTPYIRYFVSFVLQFQFHEALCKEAGYEGPLHQCDIYRSTKAGAKLRKVLQAGSSRPWQEVLKDMVGLDALDAQPLLKYFQPVTQWLQEQNQQNGEVLGWPEYQWHPPLPDNYPEGIDLVTDEAEASKFVEEYDRTSQVVWNEYAEANWNYNTNITTETSKILLQKNMQIANHTLKYGTQARKFDVNQLQNTTIKRIIKKVQDLERAALPAQELEEYNKILLDMETTYSVATVCHPNGSCLQLEPDLTNVMATSRKYEDLLWAWEGWRDKAGRAILQFYPKYVELINQAARLNGYVDAGDSWRSMYETPSLEQDLERLFQELQPLYLNLHAYVRRALHRHYGAQHINLEGPIPAHLLGNMWAQTWSNIYDLVVPFPSAPSMDTTEAMLKQGWTPRRMFKEADDFFTSLGLLPVPPEFWNKSMLEKPTDGREVVCHASAWDFYNGKDFRIKQCTTVNLEDLVVAHHEMGHIQYFMQYKDLPVALREGANPGFHEAIGDVLALSVSTPKHLHSLNLLSSEGGSDEHDINFLMKMALDKIAFIPFSYLVDQWRWRVFDGSITKENYNQEWWSLRLKYQGLCPPVPRTQGDFDPGAKFHIPSSVPYIRYFVSFIIQFQFHEALCQAAGHTGPLHKCDIYQSKEAGQRLATAMKLGFSRPWPEAMQLITGQPNMSASAMLSYFKPLLDWLRTENELHGEKLGWPQYNWTPNSARSEGPLPDSGRVSFLGLDLDAQQAR

SEQ ID NO: 2040 - protein, 740 aa, synthetic construct
  REGION 1..740: note = ACE2 (Q9BYF1) SP+PP+ECD
MSSSSWLLLSLVAVTAAQSTIEEQAKTFLDKFNHEAEDLFYQSSLASWNYNTNITEENVQNMNNAGDKWSAFLKEQSTLAQMYPLQEIQNLTVKLQLQALQQNGSSVLSEDKSKRLNTILNTMSTIYSTGKVCNPDNPQECLLLEPGLNEIMANSLDYNERLWAWESWRSEVGKQLRPLYEEYVVLKNEMARANHYEDYGDYWRGDYEVNGVDGYDYSRGQLIEDVEHTFEEIKPLYEHLHAYVRAKLMNAYPSYISPIGCLPAHLLGDMWGRFWTNLYSLTVPFGQKPNIDVTDAMVDQAWDAQRIFKEAEKFFVSVGLPNMTQGFWENSMLTDPGNVQKAVCHPTAWDLGKGDFRILMCTKVTMDDFLTAHHEMGHIQYDMAYAAQPFLLRNGANEGFHEAVGEIMSLSAATPKHLKSIGLLSPDFQEDNETEINFLLKQALTIVGTLPFTYMLEKWRWMVFKGEIPKDQWMKKWWEMKREIVGVVEPVPHDETYCDPASLFHVSNDYSFIRYYTRTLYQFQFQEALCQAAKHEGPLHKCDISNSTEAGQKLFNMLRLGKSEPWTLALENVVGAKNMNVRPLLNYFEPLFTWLKDQNKNSFVGWSTDWSPYADQSIKVRISLKSALGDKAYEWNDNEMYLFRSSVAYAMRQYFLKVKNQMILFGEEDVRVANLKPRISFNFFVTAPKNVSDIIPRTEVEKAIRMSRSRINDAFRLNDNSLEFLGIQPTLGPPNQPPVS

SEQ ID NO: 2041 - protein, 380 aa, synthetic construct
  REGION 1..380: note = ACP2 (P11117) SP+PP+ECD
MAGKRSGWSRAALLQLLLGVNLVVMPPTRARSLRFVTLLYRHGDRSPVKTYPKDPYQEEEWPQGFGQLTKEGMLQHWELGQALRQRYHGFLNTSYHRQEVYVRSTDFDRTLMSAEANLAGLFPPNGMQRFNPNISWQPIPVHTVPITEDRLLKFPLGPCPRYEQLQNETRQTPEYQNESSRNAQFLDMVANETGLTDLTLETVWNVYDTLFCEQTHGLRLPPWASPQTMQRLSRLKDFSFRFLFGIYQQAEKARLQGGVLLAQIRKNLTLMATTSQLPKLLVYSAHDTTLVALQMALDVYNGEQAPYASCHIFELYQEDSGNFSVEMYFRNESDKAPWPLSLPGCPHRCPLQDFLRLTEPVVPKDWQQECQLASGPADTE

SEQ ID NO: 2042 - protein, 393 aa, synthetic construct
  REGION 1..393: note = ACPT (Q9BZG2) SP+PP+ECD
MAGLGFWGHPAGPLLLLLLLVLPPRALPEGPLVFVALVFRHGDRAPLASYPMDPHKEVASTLWPRGLGQLTTEGVRQQLELGRFLRSRYEAFLSPEYRREEVYIRSTDFDRTLESAQANLAGLFPEAAPGSPEARWRPIPVHTVPVAEDKLLRFPMRSCPRYHELLREATEAAEYQEALEGWTGFLSRLENFTGLSLVGEPLRRAWKVLDTLMCQQAHGLPLPAWASPDVLRTLAQISALDIGAHVGPPRAAEKAQLTGGILLNAILANFSRVQRLGLPLKMVMYSAHDSTLLALQGALGLYDGHTPPYAACLGFEFRKHLGNPAKDGGNVTVSLFYRNDSAHLPLPLSLPGCPAPCPLGRFYQLTAPARPPAHGVSCHGPYEAAIPPAPVVP

SEQ ID NO: 2043 - protein, 123 aa, synthetic construct
  REGION 1..123: note = ACVR1 (Q04771) SP+PP+ECD
MVDGVMILPVLIMIALPSPSMEDEKPKVNPKLYMCVCEGLSCGNEDHCEGQQCFSSLSINDGFHVYQKGCFQVYEQGKMTCKTPPSPGQAVECCQGDWCNRNITAQLPTKGKSFPGTQNFHLE

SEQ ID NO: 2044 - protein, 126 aa, synthetic construct
  REGION 1..126: note = ACVR1B (P36896) SP+PP+ECD
MAESAGASSFFPLVVLLLAGSGGSGPRGVQALLCACTSCLQANYTCETDGACMVSIFNLDGMEHHVRTCIPKVELVPAGKPFYCLSSEDLRNTHCCYTDYCNRIDLRVPSGHLKEPEHPSMWGPVE

SEQ ID NO: 2045 - protein, 113 aa, synthetic construct
  REGION 1..113: note = ACVR1C (Q8NER5) SP+PP+ECD
MTRALCSALRQALLLLAAAAELSPGLKCVCLLCDSSNFTCQTEGACWASVMLTNGKEQVIKSCVSLPELNAQVFCHSSNNVTKTECCFTDFCNNITLHLPTASPNAPKLGPME

SEQ ID NO: 2046 - protein, 135 aa, synthetic construct
  REGION 1..135: note = ACVR2A (P27037) SP+PP+ECD
MGAAAKLAFAVFLISCSSGAILGRSETQECLFFNANWEKDRTNQTGVEPCYGDKDKRRHCFATWKNISGSIEIVKQGCWLDDINCYDRTDCVEKKDSPEVYFCCCEGNMCNEKFSYFPEMEVTQPTSNPVTPKPP

SEQ ID NO: 2047 - protein, 137 aa, synthetic construct
  REGION 1..137: note = ACVR2B (Q13705) SP+PP+ECD
MTAPWVALALLWGSLCAGSGRGEAETRECIYYNANWELERTNQSGLERCEGEQDKRLHCYASWRNSSGTIELVKKGCWLDDFNCYDRQECVATEENPQVYFCCCEGNFCNERFTHLPEAGGPEVTYEPPPTAPTLLT

SEQ ID NO: 2048 - protein, 118 aa, synthetic construct
  REGION 1..118: note = ACVRL1 (P37023) SP+PP+ECD
MTLGSPRKGLLMLLMALVTQGDPVKPSRGPLVTCTCESPHCKGPTCRGAWCTVVLVREEGRHPQEHRGCGNLHRELCRGRPTEFVNHYCCDSHLCNHNVSLVLEATQPPSEQPGTDGQ

SEQ ID NO: 2049 - protein, 672 aa, synthetic construct
  REGION 1..672: note = ADAM10 (O14672) SP+PP+ECD
MVLLRVLILLLSWAAGMGGQYGNPLNKYIRHYEGLSYNVDSLHQKHQRAKRAVSHEDQFLRLDFHAHGRHFNLRMKRDTSLFSDEFKVETSNKVLDYDTSHIYTGHIYGEEGSFSHGSVIDGRFEGFIQTRGGTFYVEPAERYIKDRTLPFHSVIYHEDDINYPHKYGPQGGCADHSVFERMRKYQMTGVEEVTQIPQEEHAANGPELLRKKRTTSAEKNTCQLYIQTDHLFFKYYGTREAVIAQISSHVKAIDTIYQTTDFSGIRNISFMVKRIRINTTADEKDPTNPFRFPNIGVEKFLELNSEQNHDDYCLAYVFTDRDFDDGVLGLAWVGAPSGSSGGICEKSKLYSDGKKKSLNTGIITVQNYGSHVPPKVSHITFAHEVGHNFGSPHDSGTECTPGESKNLGQKENGNYIMYARATSGDKLNNNKFSLCSIRNISQVLEKKRNNCFVESGQPICGNGMVEQGEECDCGYSDQCKDECCFDANQPEGRKCKLKPGKQCSPSQGPCCTAQCAFKSKSEKCRDDSDCAREGICNGFTALCPASDPKPNFTDCNRHTQVCINGQCAGSICEKYGLEECTCASSDGKDDKELCHVCCMKKMDPSTCASTGSVQWSRHFSGRTITLQPGSPCNDFRGYCDVFMRCRLVDADGPLARLKKAIFSPELYENIAE

SEQ ID NO: 2050 - protein, 734 aa, synthetic construct
  REGION 1..734: note = ADAM11 (O75078) SP+PP+ECD
MRLLRRWAFAALLLSLLPTPGLGTQGPAGALRWGGLPQLGGPGAPEVTEPSRLVRESSGGEVRKQQLDTRVRQEPPGGPPVHLAQVSFVIPAFNSNFTLDLELNHHLLSSQYVERHFSREGTTQHSTGAGDHCYYQGKLRGNPHSFAALSTCQGLHGVFSDGNLTYIVEPQEVAGPWGAPQGPLPHLIYRTPLLPDPLGCREPGCLFAVPAQSAPPNRPRLRRKRQVRRGHPTVHSETKYVELIVINDHQLFEQMRQSVVLTSNFAKSVVNLADVIYKEQLNTRIVLVAMETWADGDKIQVQDDLLETLARLMVYRREGLPEPSDATHLFSGRTFQSTSSGAAYVGGICSLSHGGGVNEYGNMGAMAVTLAQTLGQNLGMMWNKHRSSAGDCKCPDIWLGCIMEDTGFYLPRKFSRCSIDEYNQFLQEGGGSCLFNKPLKLLDPPECGNGFVEAGEECDCGSVQECSRAGGNCCKKCTLTHDAMCSDGLCCRRCKYEPRGVSCREAVNECDIAETCTGDSSQCPPNLHKLDGYYCDHEQGRCYGGRCKTRDRQCQVLWGHAAADRFCYEKLNVEGTERGSCGRKGSGWVQCSKQDVLCGFLLCVNISGAPRLGDLVGDISSVTFYHQGKELDCRGGHVQLADGSDLSYVEDGTACGPNMLCLDHRCLPASAFNFSTCPGSGERRICSHHGVCSNEGKCICQPDWTGKDCSIHNPLPTSPPTGETERYKGPSGTN

SEQ ID NO: 2051 - protein, 708 aa, synthetic construct
  REGION 1..708: note = ADAM12 (O43184) SP+PP+ECD
MAARPLPVSPARALLLALAGALLAPCEARGVSLWNQGRADEVVSASVGSGDLWIPVKSFDSKNHPEVLNIRLQRESKELIINLERNEGLIASSFTETHYLQDGTDVSLARNYTVILGHCYYHGHVRGYSDSAVSLSTCSGLRGLIVFENESYVLEPMKSATNRYKLFPAKKLKSVRGSCGSHHNTPNLAAKNVFPPPSQTWARRHKRETLKATKYVELVIVADNREFQRQGKDLEKVKQRLIEIANHVDKFYRPLNIRIVLVGVEVWNDMDKCSVSQDPFTSLHEFLDWRKMKLLPRKSHDNAQLVSGVYFQGTTIGMAPIMSMCTADQSGGIVMDHSDNPLGAAVTLAHELGHNFGMNHDTLDRGCSCQMAVEKGGCIMNASTGYPFPMVFSSCSRKDLETSLEKGMGVCLFNLPEVRESFGGQKCGNRFVEEGEECDCGEPEECMNRCCNATTCTLKPDAVCAHGLCCEDCQLKPAGTACRDSSNSCDLPEFCTGASPHCPANVYLHDGHSCQDVDGYCYNGICQTHEQQCVTLWGPGAKPAPGICFERVNSAGDPYGNCGKVSKSSFAKCEMRDAKCGKIQCQGGASRPVIGTNAVSIETNIPLQQGGRILCRGTHVYLGDDMPDPGLVLAGTKCADGKICLNRQCQNISVFGVHECAMQCHGRGVCNNRKNCHCEAHWAPPFCDKFGFGGSTDSGPIRQADNQG

SEQ ID NO: 2052 - protein, 696 aa, synthetic construct
  REGION 1..696: note = ADAM15 (Q13444) SP+PP+ECD
MRLALLWALGLLGAGSPLPSWPLPNIGGTEEQQAESEKAPREPLEPQVLQDDLPISLKKVLQTSLPEPLRIKLELDGDSHILELLQNRELVPGRPTLVWYQPDGTRVVSEGHTLENCCYQGRVRGYAGSWVSICTCSGLRGLVVLTPERSYTLEQGPGDLQGPPIISRIQDLHLPGHTCALSWRESVHTQKPPEHPLGQRHIRRRRDVVTETKTVELVIVADHSEAQKYRDFQHLLNRTLEVALLLDTFFRPLNVRVALVGLEAWTQRDLVEISPNPAVTLENFLHWRRAHLLPRLPHDSAQLVTGTSFSGPTVGMAIQNSICSPDFSGGVNMDHSTSILGVASSIAHELGHSLGLDHDLPGNSCPCPGPAPAKTCIMEASTDFLPGLNFSNCSRRALEKALLDGMGSCLFERLPSLPPMAAFCGNMFVEPGEQCDCGFLDDCVDPCCDSLTCQLRPGAQCASDGPCCQNCQLRPSGWQCRPTRGDCDLPEFCPGDSSQCPPDVSLGDGEPCAGGQAVCMHGRCASYAQQCQSLWGPGAQPAAPLCLQTANTRGNAFGSCGRNPSGSYVSCTPRDAICGQLQCQTGRTQPLLGSIRDLLWETIDVNGTELNCSWVHLDLGSDVAQPLLTLPGTACGPGLVCIDHRCQRVDLLGAQECRSKCHGHGVCDSNRHCYCEEGWAPPDCTTQLKATSSLTT

SEQ ID NO: 2053 - protein, 671 aa, synthetic construct
  REGION 1..671: note = ADAM17 (P78536) SP+PP+ECD
MRQSLLFLTSVVPFVLAPRPPDDPGFGPHQRLEKLDSLLSDYDILSLSNIQQHSVRKRDLQTSTHVETLLTFSALKRHFKLYLTSSTERFSQNFKVVVVDGKNESEYTVKWQDFFTGHVVGEPDSRVLAHIRDDDVIIRINTDGAEYNIEPLWRFVNDTKDKRMLVYKSEDIKNVSRLQSPKVCGYLKVDNEELLPKGLVDREPPEELVHRVKRRADPDPMKNTCKLLVVADHRFYRYMGRGEESTTTNYLIELIDRVDDIYRNTSWDNAGFKGYGIQIEQIRILKSPQEVKPGEKHYNMAKSYPNEEKDAWDVKMLLEQFSFDIAEEASKVCLAHLFTYQDFDMGTLGLAYVGSPRANSHGGVCPKAYYSPVGKKNIYLNSGLTSTKNYGKTILTKEADLVTTHELGHNFGAEHDPDGLAECAPNEDQGGKYVMYPIAVSGDHENNKMFSNCSKQSIYKTIESKAQECFQERSNKVCGNSRVDEGEECDPGIMYLNNDTCCNSDCTLKEGVQCSDRNSPCCKNCQFETAQKKCQEAINATCKGVSYCTGNSSECPPPGNAEDDTVCLDLGKCKDGKCIPFCEREQQLESCACNETDNSCKVCCRDLSGRCVPYVDAEQKNLFLRKGKPCTVGFCDMNGKCEKRVQDVIERFWDFIDQLSINTFGKFLADN

SEQ ID NO: 2054 - protein, 687 aa, synthetic construct
  REGION 1..687: note = ADAM18 (Q9Y3Q7) SP+PP+ECD
MFLLLALLTELGRLQAHEGSEGIFLHVTVPRKIKSNDSEVSERKMIYIITIDGQPYTLHLGKQSFLPQNFLVYTYNETGSLHSVSPYFMMHCHYQGYAAEFPNSFVTLSICSGLRGFLQFENISYGIEPVESSARFEHIIYQMKNNDPNVSILAVNYSHIWQKDQPYKVPLNSQIKNLSKLLPQYLEIYIIVEKALYDYMGSEMMAVTQKIVQVIGLVNTMFTQFKLTVILSSLELWSNENQISTSGDADDILQRFLAWKRDYLILRPHDIAYLLVYRKHPKYVGATFPGTVCNKSYDAGIAMYPDAIGLEGFSVIIAQLLGLNVGLTYDDITQCFCLRATCIMNHEAVSASGRKIFSNCSMHDYRYFVSKFETKCLQKLSNLQPLHQNQPVCGNGILESNEECDCGNKNECQFKKCCDYNTCKLKGSVKCGSGPCCTSKCELSIAGTPCRKSIDPECDFTEYCNGTSSNCVPDTYALNGRLCKLGTAYCYNGQCQTTDNQCAKIFGKGAQGAPFACFKEVNSLHERSENCGFKNSQPLPCERKDVLCGKLACVQPHKNANKSDAQSTVYSYIQDHVCVSIATGSSMRSDGTDNAYVADGTMCGPEMYCVNKTCRKVHLMGYNCNATTKCKGKGICNNFGNCQCFPGHRPPDCKFQFGSPGGSIDDGNFQKSGDFYTEKGYNTHWNN

SEQ ID NO: 2055 - protein, 699 aa, synthetic construct
  REGION 1..699: note = ADAM19 (Q9H013) SP+PP+ECD
MPGGAGAARLCLLAFALQPLRPRAAREPGWTRGSEEGSPKLQHELIIPQWKTSESPVREKHPLKAELRVMAEGRELILDLEKNEQLFAPSYTETHYTSSGNPQTTTRKLEDHCFYHGTVRETELSSVTLSTCRGIRGLITVSSNLSYVIEPLPDSKGQHLIYRSEHLKPPPGNCGFEHSKPTTRDWALQFTQQTKKRPRRMKREDLNSMKYVELYLVADYLEFQKNRRDQDATKHKLIEIANYVDKFYRSLNIRIALVGLEVWTHGNMCEVSENPYSTLWSFLSWRRKLLAQKYHDNAQLITGMSFHGTTIGLAPLMAMCSVYQSGGVNMDHSENAIGVAATMAHEMGHNFGMTHDSADCCSASAADGGCIMAAATGHPFPKVFNGCNRRELDRYLQSGGGMCLSNMPDTRMLYGGRRCGNGYLEDGEECDCGEEEECNNPCCNASNCTLRPGAECAHGSCCHQCKLLAPGTLCREQARQCDLPEFCTGKSPHCPTNFYQMDGTPCEGGQAYCYNGMCLTYQEQCQQLWGPGARPAPDLCFEKVNVAGDTFGNCGKDMNGEHRKCNMRDAKCGKIQCQSSEARPLESNAVPIDTTIIMNGRQIQCRGTHVYRGPEEEGDMLDPGLVMTGTKCGYNHICFEGQCRNTSFFETEGCGKKCNGHGVCNNNQNCHCLPGWAPPFCNTPGHGGSIDSGPMPPES

SEQ ID NO: 2056 - protein, 686 aa, synthetic construct
  REGION 1..686: note = ADAM2 (Q99965) SP+PP+ECD
MWRVLFLLSGLGGLRMDSNFDSLPVQITVPEKIRSIIKEGIESQASYKIVIEGKPYTVNLMQKNFLPHNFRVYSYSGTGIMKPLDQDFQNFCHYQGYIEGYPKSVVMVSTCTGLRGVLQFENVSYGIEPLESSVGFEHVIYQVKHKKADVSLYNEKDIESRDLSFKLQSVEPQQDFAKYIEMHVIVEKQLYNHMGSDTTVVAQKVFQLIGLTNAIFVSFNITIILSSLELWIDENKIATTGEANELLHTFLRWKTSYLVLRPHDVAFLLVYREKSNYVGATFQGKMCDANYAGGVVLHPRTISLESLAVILAQLLSLSMGITYDDINKCQCSGAVCIMNPEAIHFSGVKIFSNCSFEDFAHFISKQKSQCLHNQPRLDPFFKQQAVCGNAKLEAGEECDCGTEQDCALIGETCCDIATCRFKAGSNCAEGPCCENCLFMSKERMCRPSFEECDLPEYCNGSSASCPENHYVQTGHPCGLNQWICIDGVCMSGDKQCTDTFGKEVEFGPSECYSHLNSKTDVSGNCGISDSGYTQCEADNLQCGKLICKYVGKFLLQIPRATIIYANISGHLCIAVEFASDHADSQKMWIKDGTSCGSNKVCRNQRCVSSSYLGYDCTTDKCNDRGVCNNKKHCHCSASYLPPDCSVQSDLWPGGSIDSGNFPPVAIPARLPERRYIENIYHSKPMR

SEQ ID NO: 2057 - protein, 693 aa, synthetic construct
  REGION 1..693: note = ADAM20 (O43506) SP+PP+ECD
MAVGEPLVHIRVTLLLLWFGMFLSISGHSQARPSQYFTSPEVVIPLKVISRGRGAKAPGWLSYSLRFGGQRYIVHMRVNKLLFAAHLPVFTYTEQHALLQDQPFIQDDCYYHGYVEGVPESLVALSTCSGGFLGMLQINDLVYEIKPISVSATFEHLVYKIDSDDTQFPPMRCGLTEEKIAHQMELQLSYNFTLKQSSFVGWWTHQRFVELVVVVDNIRYLFSQSNATTVQHEVFNVVNIVDSFYHPLEVDVILTGIDIWTASNPLPTSGDLDNVLEDFSIWKNYNLNNRLQHDVAHLFIKDTQGMKLGVAYVKGICQNPFNTGVDVFEDNRLVVFAITLGHELGHNLGMQHDTQWCVCELQWCIMHAYRKVTTKFSNCSYAQYWDSTISSGLCIQPPPYPGNIFRLKYCGNLVVEEGEECDCGTIRQCAKDPCCLLNCTLHPGAACAFGICCKDCKFLPSGTLCRQQVGECDLPEWCNGTSHQCPDDVYVQDGISCNVNAFCYEKTCNNHDIQCKEIFGQDARSASQSCYQEINTQGNRFGHCGIVGTTYVKCWTPDIMCGRVQCENVGVIPNLIEHSTVQQFHLNDTTCWGTDYHLGMAIPDIGEVKDGTVCGPEKICIRKKCASMVHLSQACQPKTCNMRGICNNKQHCHCNHEWAPPYCKDKGYGGSADSGPPPKNNMEGLNVMGKLRY

SEQ ID NO: 2058 - protein, 681 aa, synthetic construct
  REGION 1..681: note = ADAM21 (Q9UKJ8) SP+PP+ECD
MAVDGTLVYIRVTLLLLWLGVFLSISGYCQAGPSQHFTSPEVVIPLKVISRGRSAKAPGWLSYSLRFGGQKHVVHMRVKKLLVSRHLPVFTYTDDRALLEDQLFIPDDCYYHGYVEAAPESLVVFSACFGGFRGVLKISGLTYEIEPIRHSATFEHLVYKINSNETQFPAMRCGLTEKEVARQQLEFEEAENSALEPKSAGDWWTHAWFLELVVVVNHDFFIYSQSNISKVQEDVFLVVNIVDSMYKQLGTYIILIGIEIWNQGNVFPMTSIEQVLNDFSQWKQISLSQLQHDAAHMFIKNSLISILGLAYVAGICRPPIDCGVDNFQGDTWSLFANTVAHELGHTLGMQHDEEFCFCGERGCIMNTFRVPAEKFTNCSYADFMKTTLNQGSCLHNPPRLGEIFMLKRCGNGVVEREEQCDCGSVQQCEQDACCLLNCTLRPGAACAFGLCCKDCKFMPSGELCRQEVNECDLPEWCNGTSHQCPEDRYVQDGIPCSDSAYCYQKRCNNHDQHCREIFGKDAKSASQNCYKEINSQGNRFGHCGINGTTYLKCHISDVFCGRVQCENVRDIPLLQDHFTLQHTHINGVTCWGIDYHLRMNISDIGEVKDGTVCGPGKICIHKKCVSLSVLSHVCLPETCNMKGICNNKHHCHCGYGWSPPYCQHRGYGGSIDSGPASAKRG

SEQ ID NO: 2059 - protein, 736 aa, synthetic construct
  REGION 1..736: note = ADAM22 (Q9P0K1) SP+PP+ECD
MQAAVAVSVPFLLLCVLGTCPPARCGQAGDASLMELEKRKENRFVERQSIVPLRLIYRSGGEDESRHDALDTRVRGDLGGPQLTHVDQASFQVDAFGTSFILDVVLNHDLLSSEYIERHIEHGGKTVEVKGGEHCYYQGHIRGNPDSFVALSTCHGLHGMFYDGNHTYLIEPEENDTTQEDFHFHSVYKSRLFEFSLDDLPSEFQQVNITPSKFILKPRPKRSKRQLRRYPRNVEEETKYIELMIVNDHLMFKKHRLSVVHTNTYAKSVVNMADLIYKDQLKTRIVLVAMETWATDNKFAISENPLITLREFMKYRRDFIKEKSDAVHLFSGSQFESSRSGAAYIGGICSLLKGGGVNEFGKTDLMAVTLAQSLAHNIGIISDKRKLASGECKCEDTWSGCIMGDTGYYLPKKFTQCNIEEYHDFLNSGGGACLFNKPSKLLDPPECGNGFIETGEECDCGTPAECVLEGAECCKKCTLTQDSQCSDGLCCKKCKFQPMGTVCREAVNDCDIRETCSGNSSQCAPNIHKMDGYSCDGVQGICFGGRCKTRDRQCKYIWGQKVTASDKYCYEKLNIEGTEKGNCGKDKDTWIQCNKRDVLCGYLLCTNIGNIPRLGELDGEITSTLVVQQGRTLNCSGGHVKLEEDVDLGYVEDGTPCGPQMMCLEHRCLPVASFNFSTCLSSKEGTICSGNGVCSNELKCVCNRHWIGSDCNTYFPHNDDAKTGITLSGNGVAGTN

SEQ ID NO: 2060 - protein, 792 aa, synthetic construct
  REGION 1..792: note = ADAM23 (O75077) SP+PP+ECD
MKPPGSSSRQPPLAGCSLAGASCGPQRGPAGSVPASAPARTPPCRLLLVLLLLPPLAASSRPRAWGAAAPSAPHWNETAEKNLGVLADEDNTLQQNSSSNISYSNAMQKEITLPSRLIYYINQDSESPYHVLDTKARHQQKHNKAVHLAQASFQIEAFGSKFILDLILNNGLLSSDYVEIHYENGKPQYSKGGEHCYYHGSIRGVKDSKVALSTCNGLHGMFEDDTFVYMIEPLELVHDEKSTGRPHIIQKTLAGQYSKQMKNLTMERGDQWPFLSELQWLKRRKRAVNPSRGIFEEMKYLELMIVNDHKTYKKHRSSHAHTNNFAKSVVNLVDSIYKEQLNTRVVLVAVETWTEKDQIDITTNPVQMLHEFSKYRQRIKQHADAVHLISRVTFHYKRSSLSYFGGVCSRTRGVGVNEYGLPMAVAQVLSQSLAQNLGIQWEPSSRKPKCDCTESWGGCIMEETGVSHSRKFSKCSILEYRDFLQRGGGACLFNRPTKLFEPTECGNGYVEAGEECDCGFHVECYGLCCKKCSLSNGAHCSDGPCCNNTSCLFQPRGYECRDAVNECDITEYCTGDSGQCPPNLHKQDGYACNQNQGRCYNGECKTRDNQCQYIWGTKAAGSDKFCYEKLNTEGTEKGNCGKDGDRWIQCSKHDVFCGFLLCTNLTRAPRIGQLQGEIIPTSFYHQGRVIDCSGAHVVLDDDTDVGYVEDGTPCGPSMMCLDRKCLQIQALNMSSCPLDSKGKVCSGHGVCSNEATCICDFTWAGTDCSIRDPVRNLHPPKDEGPKGPSATN

SEQ ID NO: 2061 - protein, 665 aa, synthetic construct
  REGION 1..665: note = ADAM28 (Q9UKQ2) SP+PP+ECD
MLQGLLPVSLLLSVAVSAIKELPGVKKYEVVYPIRLHPLHKREAKEPEQQEQFETELKYKMTINGKIAVLYLKKNKNLLAPGYTETYYNSTGKEITTSPQIMDDCYYQGHILNEKVSDASISTCRGLRGYFSQGDQRYFIEPLSPIHRDGQEHALFKYNPDEKNYDSTCGMDGVLWAHDLQQNIALPATKLVKLKDRKVQEHEKYIEYYLVLDNGEFKRYNENQDEIRKRVFEMANYVNMLYKKLNTHVALVGMEIWTDKDKIKITPNASFTLENFSKWRGSVLSRRKRHDIAQLITATELAGTTVGLAFMSTMCSPYSVGVVQDHSDNLLRVAGTMAHEMGHNFGMFHDDYSCKCPSTICVMDKALSFYIPTDFSSCSRLSYDKFFEDKLSNCLFNAPLPTDIISTPICGNQLVEMGEDCDCGTSEECTNICCDAKTCKIKATFQCALGECCEKCQFKKAGMVCRPAKDECDLPEMCNGKSGNCPDDRFQVNGFPCHHGKGHCLMGTCPTLQEQCTELWGPGTEVADKSCYNRNEGGSKYGYCRRVDDTLIPCKANDTMCGKLFCQGGSDNLPWKGRIVTFLTCKTFDPEDTSQEIGMVANGTKCGDNKVCINAECVDIEKAYKSTNCSSKCKGHAVCDHELQCQCEEGWIPPDCDDSSVVFHF

SEQ ID NO: 2062 - protein, 674 aa, synthetic construct
  REGION 1..674: note = ADAM29 (Q9UKF5) SP+PP+ECD
MKMLLLLHCLGVFLSCSGHIQDEHPQYHSPPDVVIPVRITGTTRGMTPPGWLSYILPFGGQKHIIHIKVKKLLFSKHLPVFTYTDQGAILEDQPFVQNNCYYHGYVEGDPESLVSLSTCFGGFQGILQINDFAYEIKPLAFSTTFEHLVYKMDSEEKQFSTMRSGFMQNEITCRMEFEEIDNSTQKQSSYVGWWIHFRIVEIVVVIDNYLYIRYERNDSKLLEDLYVIVNIVDSILDVIGVKVLLFGLEIWTNKNLIVVDDVRKSVHLYCKWKSENITPRMQHDTSHLFTTLGLRGLSGIGAFRGMCTPHRSCAIVTFMNKTLGTFSIAVAHHLGHNLGMNHDEDTCRCSQPRCIMHEGNPPITKFSNCSYGDFWEYTVERTKCLLETVHTKDIFNVKRCGNGVVEEGEECDCGPLKHCAKDPCCLSNCTLTDGSTCAFGLCCKDCKFLPSGKVCRKEVNECDLPEWCNGTSHKCPDDFYVEDGIPCKERGYCYEKSCHDRNEQCRRIFGAGANTASETCYKELNTLGDRVGHCGIKNATYIKCNISDVQCGRIQCENVTEIPNMSDHTTVHWARFNDIMCWSTDYHLGMKGPDIGEVKDGTECGIDHICIHRHCVHITILNSNCSPAFCNKRGICNNKHHCHCNYLWDPPNCLIKGYGGSVDSGPPPKRKKKK

SEQ ID NO: 2063 - protein, 687 aa, synthetic construct
  REGION 1..687: note = ADAM30 (Q9UKF2) SP+PP+ECD
MRSVQIFLSQCRLLLLLVPTMLLKSLGEDVIFHPEGEFDSYEVTIPEKLSFRGEVQGVVSPVSYLLQLKGKKHVLHLWPKRLLLPRHLRVFSFTEHGELLEDHPYIPKDCNYMGSVKESLDSKATISTCMGGLRGVFNIDAKHYQIEPLKASPSFEHVVYLLKKEQFGNQVCGLSDDEIEWQMAPYENKARLRDFPGSYKHPKYLELILLFDQSRYRFVNNNLSQVIHDAILLTGIMDTYFQDVRMRIHLKALEVWTDFNKIRVGYPELAEVLGRFVIYKKSVLNARLSSDWAHLYLQRKYNDALAWSFGKVCSLEYAGSVSTLLDTNILAPATWSAHELGHAVGMSHDEQYCQCRGRLNCIMGSGRTGFSNCSYISFFKHISSGATCLNNIPGLGYVLKRCGNKIVEDNEECDCGSTEECQKDRCCQSNCKLQPGANCSIGLCCHDCRFRPSGYVCRQEGNECDLAEYCDGNSSSCPNDVYKQDGTPCKYEGRCFRKGCRSRYMQCQSIFGPDAMEAPSECYDAVNLIGDQFGNCEITGIRNFKKCESANSICGRLQCINVETIPDLPEHTTIISTHLQAENLMCWGTGYHLSMKPMGIPDLGMINDGTSCGEGRVCFKKNCVNSSVLQFDCLPEKCNTRGVCNNRKNCHCMYGWAPPFCEEVGYGGSIDSGPPGLLRGAIPSSIW

SEQ ID NO: 2064 - protein, 682 aa, synthetic construct
  REGION 1..682: note = ADAM32 (Q8TC27) SP+PP+ECD
MFRLWLLLAGLCGLLASRPGFQNSLLQIVIPEKIQTNTNDSSEIEYEQISYIIPIDEKLYTVHLKQRYFLADNFMIYLYNQGSMNTYSSDIQTQCYYQGNIEGYPDSMVTLSTCSGLRGILQFENVSYGIEPLESAVEFQHVLYKLKNEDNDIAIFIDRSLKEQPMDDNIFISEKSEPAVPDLFPLYLEMHIVVDKTLYDYWGSDSMIVTNKVIEIVGLANSMFTQFKVTIVLSSLELWSDENKISTVGEADELLQKFLEWKQSYLNLRPHDIAYLLIYMDYPRYLGAVFPGTMCITRYSAGVALYPKEITLEAFAVIVTQMLALSLGISYDDPKKCQCSESTCIMNPEVVQSNGVKTFSSCSLRSFQNFISNVGVKCLQNKPQMQKKSPKPVCGNGRLEGNEICDCGTEAQCGPASCCDFRTCVLKDGAKCYKGLCCKDCQILQSGVECRPKAHPECDIAENCNGTSPECGPDITLINGLSCKNNKFICYDGDCHDLDARCESVFGKGSRNAPFACYEEIQSQSDRFGNCGRDRNNKYVFCGWRNLICGRLVCTYPTRKPFHQENGDVIYAFVRDSVCITVDYKLPRTVPDPLAVKNGSQCDIGRVCVNRECVESRIIKASAHVCSQQCSGHGVCDSRNKCHCSPGYKPPNCQIRSKGFSIFPEEDMGSIMERASGKTENT

SEQ ID NO: 2065 - protein, 701 aa, synthetic construct
  REGION 1..701: note = ADAM33 (Q9BZ11) SP+PP+ECD
MGWRPRRARGTPLLLLLLLLLLWPVPGAGVLQGHIPGQPVTPHWVLDGQPWRTVSLEEPVSKPDMGLVALEAEGQELLLELEKNHRLLAPGYIETHYGPDGQPVVLAPNHTDHCHYQGRVRGFPDSWVVLCTCSGMSGLITLSRNASYYLRPWPPRGSKDFSTHEIFRMEQLLTWKGTCGHRDPGNKAGMTSLPGGPQSRGRREARRTRKYLELYIVADHTLFLTRHRNLNHTKQRLLEVANYVDQLLRTLDIQVALTGLEVWTERDRSRVTQDANATLWAFLQWRRGLWAQRPHDSAQLLTGRAFQGATVGLAPVEGMCRAESSGGVSTDHSELPIGAAATMAHEIGHSLGLSHDPDGCCVEAAAESGGCVMAAATGHPFPRVFSACSRRQLRAFFRKGGGACLSNAPDPGLPVPPALCGNGFVEAGEECDCGPGQECRDLCCFAHNCSLRPGAQCAHGDCCVRCLLKPAGALCRQAMGDCDLPEFCTGTSSHCPPDVYLLDGSPCARGSGYCWDGACPTLEQQCQQLWGPGSHPAPEACFQVVNSAGDAHGNCGQDSEGHFLPCAGRDALCGKLQCQGGKPSLLAPHMVPVDSTVHLDGQEVTCRGALALPSAQLDLLGLGLVEPGTQCGPRMVCQSRRCRKNAFQELQRCLTACHSHGVCNSNHNCHCAPGWAPPFCDKPGFGGSMDSGPVQAENHDT

SEQ ID NO: 2066 - protein, 668 aa, synthetic construct
  REGION 1..668: note = ADAM7 (Q9H2U9) SP+PP+ECD
MLPGCIFLMILLIPQVKEKFILGVEGQQLVRPKKLPLIQKRDTGHTHDDDILKTYEEELLYEIKLNRKTLVLHLLRSREFLGSNYSETFYSMKGEAFTRHPQIMDHCFYQGSIVHEYDSAASISTCNGLRGFFRINDQRYLIEPVKYSDEGEHLVFKYNLRVPYGANYSCTELNFTRKTVPGDNESEEDSKIKGIHDEKYVELFIVADDTVYRRNGHPHNKLRNRIWGMVNFVNMIYKTLNIHVTLVGIEIWTHEDKIELYSNIETTLLRFSFWQEKILKTRKDFDHVVLLSGKWLYSHVQGISYPGGMCLPYYSTSIIKDLLPDTNIIANRMAHQLGHNLGMQHDEFPCTCPSGKCVMDSDGSIPALKFSKCSQNQYHQYLKDYKPTCMLNIPFPYNFHDFQFCGNKKLDEGEECDCGPAQECTNPCCDAHTCVLKPGFTCAEGECCESCQIKKAGSICRPAKDECDFPEMCTGHSPACPKDQFRVNGFPCKNSEGYCFMGKCPTREDQCSELFDDEAIESHDICYKMNTKGNKFGYCKNKENRFLPCEEKDVRCGKIYCTGGELSSLLGEDKTYHLKDPQKNATVKCKTIFLYHDSTDIGLVASGTKCGEGMVCNNGECLNMEKVYISTNCPSQCNENPVDGHGLQCHCEEGQAPVACEETLHVTN

SEQ ID NO: 2067 - protein, 655 aa, synthetic construct
  REGION 1..655: note = ADAM8 (P78325) SP+PP+ECD
MRGLGLWLLGAMMLPAIAPSRPWALMEQYEVVLPWRLPGPRVRRALPSHLGLHPERVSYVLGATGHNFTLHLRKNRDLLGSGYTETYTAANGSEVTEQPRGQDHCFYQGHVEGYPDSAASLSTCAGLRGFFQVGSDLHLIEPLDEGGEGGRHAVYQAEHLLQTAGTCGVSDDSLGSLLGPRTAAVFRPRPGDSLPSRETRYVELYVVVDNAEFQMLGSEAAVRHRVLEVVNHVDKLYQKLNFRVVLVGLEIWNSQDRFHVSPDPSVTLENLLTWQARQRTRRHLHDNVQLITGVDFTGTTVGFARVSAMCSHSSGAVNQDHSKNPVGVACTMAHEMGHNLGMDHDENVQGCRCQERFEAGRCIMAGSIGSSFPRMFSDCSQAYLESFLERPQSVCLANAPDLSHLVGGPVCGNLFVERGEQCDCGPPEDCRNRCCNSTTCQLAEGAQCAHGTCCQECKVKPAGELCRPKKDMCDLEEFCDGRHPECPEDAFQENGTPCSGGYCYNGACPTLAQQCQAFWGPGGQAAEESCFSYDILPGCKASRYRADMCGVLQCKGGQQPLGRAICIVDVCHALTTEDGTAYEPVPEGTRCGPEKVCWKGRCQDLHVYRSSNCSAQCHNHGVCNHKQECHCHAGWAPPHCAKLLTEVHAASGSLP

SEQ ID NO: 2068 - protein, 697 aa, synthetic construct
  REGION 1..697: note = ADAM9 (Q13443) SP+PP+ECD
MGSGARFPSGTLRVRWLLLLGLVGPVLGAARPGFQQTSHLSSYEIITPWRLTRERREAPRPYSKQVSYVIQAEGKEHIIHLERNKDLLPEDFVVYTYNKEGTLITDHPNIQNHCHYRGYVEGVHNSSIALSDCFGLRGLLHLENASYGIEPLQNSSHFEHIIYRMDDVYKEPLKCGVSNKDIEKETAKDEEEEPPSMTQLLRRRRAVLPQTRYVELFIVVDKERYDMMGRNQTAVREEMILLANYLDSMYIMLNIRIVLVGLEIWTNGNLINIVGGAGDVLGNFVQWREKFLITRRRHDSAQLVLKKGFGGTAGMAFVGTVCSRSHAGGINVFGQITVETFASIVAHELGHNLGMNHDDGRDCSCGAKSCIMNSGASGSRNFSSCSAEDFEKLTLNKGGNCLLNIPKPDEAYSAPSCGNKLVDAGEECDCGTPKECELDPCCEGSTCKLKSFAECAYGDCCKDCRFLPGGTLCRGKTSECDVPEYCNGSSQFCQPDVFIQNGYPCQNNKAYCYNGMCQYYDAQCQVIFGSKAKAAPKDCFIEVNSKGDRFGNCGFSGNEYKKCATGNALCGKLQCENVQEIPVFGIVPAIIQTPSRGTKCWGVDFQLGSDVPDPGMVNEGTKCGAGKICRNFQCVDASVLNYDCDVQKKCHGHGVCNSNKNCHCENGWAPPNCETKGYGGSVDSGPTYNEMNTALRD

SEQ ID NO: 2069 - protein, 342 aa, synthetic construct
  REGION 1..342: note = AGER (Q15109) SP+PP+ECD
MAAGTAVGAWVLVLSLWGAVVGAQNITARIGEPLVLKCKGAPKKPPQRLEWKLNTGRTEAWKVLSPQGGGPWDSVARVLPNGSLFLPAVGIQDEGIFRCQAMNRNGKETKSNYRVRVYQIPGKPEIVDSASELTAGVPNKVGTCVSEGSYPAGTLSWHLDGKPLVPNEKGVSVKEQTRRHPETGLFTLQSELMVTPARGGDPRPTFSCSFSPGLPRHRALRTAPIQPRVWEPVPLEEVQLVVEPEGGAVAPGGTVTLTCEVPAQPSPQIHWMKDGVPLPLPPSPVLILPEIGPQDQGTYSCVATHSSHGPQESRAVSISIIEPGEEGPTAGSVGGSGLGTLA

SEQ ID NO: 2070 - protein, 527 aa, synthetic construct
  REGION 1..527: note = ALCAM (Q13740) SP+PP+ECD
MESKGASSCRLLFCLLISATVFRPGLGWYTVNSAYGDTIIIPCRLDVPQNLMFGKWKYEKPDGSPVFIAFRSSTKKSVQYDDVPEYKDRLNLSENYTLSISNARISDEKRFVCMLVTEDNVFEAPTIVKVFKQPSKPEIVSKALFLETEQLKKLGDCISEDSYPDGNITWYRNGKVLHPLEGAVVIIFKKEMDPVTQLYTMTSTLEYKTTKADIQMPFTCSVTYYGPSGQKTIHSEQAVFDIYYPTEQVTIQVLPPKNAIKEGDNITLKCLGNGNPPPEEFLFYLPGQPEGIRSSNTYTLTDVRRNATGDYKCSLIDKKSMIASTAITVHYLDLSLNPSGEVTRQIGDALPVSCTISASRNATVVWMKDNIRLRSSPSFSSLHYQDAGNYVCETALQEVEGLKKRESLTLIVEGKPQIKMTKKTDPSGLSKTIICHVEGFPKPAIQWTITGSGSVINQTEESPYINGRYYSKIIISPEENVTLTCTAENQLERTVNSLNVSAISIPEHDEADEISDENREKVNDQAK

SEQ ID NO: 2071 - protein, 1038 aa, synthetic construct
  REGION 1..1038: note = ALK (Q9UM73) SP+PP+ECD
MGAIGLLWLLPLLLSTAAVGSGMGTGQRAGSPAAGPPLQPREPLSYSRLQRKSLAVDFVVPSLFRVYARDLLLPPSSSELKAGRPEARGSLALDCAPLLRLLGPAPGVSWTAGSPAPAEARTLSRVLKGGSVRKLRRAKQLVLELGEEAILEGCVGPPGEAAVGLLQFNLSELFSWWIRQGEGRLRIRLMPEKKASEVGREGRLSAAIRASQPRLLFQIFGTGHSSLESPTNMPSPSPDYFTWNLTWIMKDSFPFLSHRSRYGLECSFDFPCELEYSPPLHDLRNQSWSWRRIPSEEASQMDLLDGPGAERSKEMPRGSFLLLNTSADSKHTILSPWMRSSSEHCTLAVSVHRHLQPSGRYIAQLLPHNEAAREILLMPTPGKHGWTVLQGRIGRPDNPFRVALEYISSGNRSLSAVDFFALKNCSEGTSPGSKMALQSSFTCWNGTVLQLGQACDFHQDCAQGEDESQMCRKLPVGFYCNFEDGFCGWTQGTLSPHTPQWQVRTLKDARFQDHQDHALLLSTTDVPASESATVTSATFPAPIKSSPCELRMSWLIRGVLRGNVSLVLVENKTGKEQGRMVWHVAAYEGLSLWQWMVLPLLDVSDRFWLQMVAWWGQGSRAIVAFDNISISLDCYLTISGEDKILQNTAPKSRNLFERNPNKELKPGENSPRQTPIFDPTVHWLFTTCGASGPHGPTQAQCNNAYQNSNLSVEVGSEGPLKGIQIWKVPATDTYSISGYGAAGGKGGKNTMMRSHGVSVLGIFNLEKDDMLYILVGQQGEDACPSTNQLIQKVCIGENNVIEEEIRVNRSVHEWAGGGGGGGGATYVFKMKDGVPVPLIIAAGGGGRAYGAKTDTFHPERLENNSSVLGLNGNSGAAGGGGGWNDNTSLLWAGKSLQEGATGGHSCPQAMKKWGWETRGGFGGGGGGCSSGGGGGGYIGGNAASNNDPEMDGEDGVSFISPLGILYTPALKVMEGHGEVNIKHYLNCSHCEVDECHMDPESHKVICFCDHGTVLAEDGVSCIVSPTPEPHLPLSLILS

SEQ ID NO: 2072 - protein, 149 aa, synthetic construct
  REGION 1..149: note = AMHR2 (Q16671) SP+PP+ECD
MLGSLGLWALLPTAVEAPPNRRTCVFFEAPGVRGSTKTLGELLDTGTELPRAIRCLYSRCCFGIWNLTQDRAQVEMQGCRDSDEPGCESLHCDPSPRAHPSPGSTLFTCSCGTDFCNANYSHLPPPGSPGTPGSQGPQAAPGESIWMAL

SEQ ID NO: 2073 - protein, 275 aa, synthetic construct
  REGION 1..275: note = AMICA1 (Q86YT9) SP+PP+ECD
MFCPLKLILLPVLLDYSLGLNDLNVSPPELTVHVGDSALMGCVFQSTEDKCIFKIDWTLSPGEHAKDEYVLYYYSNLSVPIGRFQNRVHLMGDILCNDGSLLLQDVQEADQGTYICEIRLKGESQVFKKAVVLHVLPEEPKELMVHVGGLIQMGCVFQSTEVKHVTKVEWIFSGRRAKEEIVFRYYHKLRMSVEYSQSWGHFQNRVNLVGDIFRNDGSIMLQGVRESDGGNYTCSIHLGNLVFKKTIVLHVSPEEPRTLVTPAALRPLVLGGNQL

SEQ ID NO: 2074 - protein, 372 aa, synthetic construct
  REGION 1..372: note = AMIGO1 (Q86WK6) SP+PP+ECD
MHPHRDPRGLWLLLPSLSLLLFEVARAGRAVVSCPAACLCASNILSCSKQQLPNVPHSLPSYTALLDLSHNNLSRLRAEWTPTRLTQLHSLLLSHNHLNFISSEAFSPVPNLRYLDLSSNQLRTLDEFLFSDLQVLEVLLLYNNHIMAVDRCAFDDMAQLQKLYLSQNQISRFPLELVKEGAKLPKLTLLDLSSNKLKNLPLPDLQKLPAWIKNGLYLHNNPLNCDCELYQLFSHWQYRQLSSVMDFQEDLYCMNSKKLHNVFNLSFLNCGEYKERAWEAHLGDTLIIKCDTKQQGMTKVWVTPSNERVLDEVTNGTVSVSKDGSLLFQQVQVEDGGVYTCYAMGETFNETLSVELKVHNFTLHGHHDTLNT

SEQ ID NO: 2075 - protein, 398 aa, synthetic construct
  REGION 1..398: note = AMIGO2 (Q86SJ2) SP+PP+ECD
MSLRVHTLPTLLGAVVRPGCRELLCLLMITVTVGPGASGVCPTACICATDIVSCTNKNLSKVPGNLFRLIKRLDLSYNRIGLLDSEWIPVSFAKLNTLILRHNNITSISTGSFSTTPNLKCLDLSSNKLKTVKNAVFQELKVLEVLLLYNNHISYLDPSAFGGLSQLQKLYLSGNFLTQFPMDLYVGRFKLAELMFLDVSYNRIPSMPMHHINLVPGKQLRGIYLHGNPFVCDCSLYSLLVFWYRRHFSSVMDFKNDYTCRLWSDSRHSRQVLLLQDSFMNCSDSIINGSFRALGFIHEAQVGERLMVHCDSKTGNANTDFIWVGPDNRLLEPDKEMENFYVFHNGSLVIESPRFEDAGVYSCIAMNKQRLLNETVDVTINVSNFTVSRSHAHEAFNT

SEQ ID NO: 2076 - protein, 383 aa, synthetic construct
  REGION 1..383: note = AMIGO3 (Q86WK7) SP+PP+ECD
MTWLVLLGTLLCMLRVGLGTPDSEGFPPRALHNCPYKCICAADLLSCTGLGLQDVPAELPAATADLDLSHNALQRLRPGWLAPLFQLRALHLDHNELDALGRGVFVNASGLRLLDLSSNTLRALGRHDLDGLGALEKLLLFNNRLVHLDEHAFHGLRALSHLYLGCNELASFSFDHLHGLSATHLLTLDLSSNRLGHISVPELAALPAFLKNGLYLHNNPLPCDCRLYHLLQRWHQRGLSAVRDFAREYVCLAFKVPASRVRFFQHSRVFENCSSAPALGLERPEEHLYALVGRSLRLYCNTSVPAMRIAWVSPQQELLRAPGSRDGSIAVLADGSLAIGNVQEQHAGLFVCLATGPRLHHNQTHEYNVSVHFPRPEPEAFNT

SEQ ID NO: 2077 - protein, 357 aa, synthetic construct
  REGION 1..357: note = AMN (Q9BXJ7) SP+PP+ECD
MGVLGRVLLWLQLCALTQAVSKLWVPNTDFDVAANWSQNRTPCAGGAVEFPADKMVSVLVQEGHAVSDMLLPLDGELVLASGAGFGVSDVGSHLDCGAGEPAVFRDSDRFSWHDPHLWRSGDEAPGLFFVDAERVPCRHDDVFFPPSASFRVGLGPGASPVRVRSISALGRTFTRDEDLAVFLASRAGRLRFHGPGALSVGPEDCADPSGCVCGNAEAQPWICAALLQPLGGRCPQAACHSALRPQGQCCDLCGAVVLLTHGPAFDLERYRARILDTFLGLPQYHGLQVAVSKVPRSSRLREADTEIQVVLVENGPETGGAGRLARALLADVAENGEALGVLEATMRESGAHVWGSS

SEQ ID NO: 2078 - protein, 321 aa, synthetic construct
  REGION 1..321: note = ANTXR1 (Q9H6X2) SP+PP+ECD
MATAERRALGIGFQWLSLATLVLICAGQGGRREDGGPACYGGFDLYFILDKSGSVLHHWNEIYYFVEQLAHKFISPQLRMSFIVFSTRGTTLMKLTEDREQIRQGLEELQKVLPGGDTYMHEGFERASEQIYYENRQGYRTASVIIALTDGELHEDLFFYSEREANRSRDLGAIVYCVGVKDFNETQLARIADSKDHVFPVNDGFQALQGIIHSILKKSCIEILAAEPSTICAGESFQVVVRGNGFRHARNVDRVLCSFKINDSVTLNEKPFSVEDTYLLCPAPILKEVGMKAALQVSMNDGLSFISSSVIITTTHCSDGS

SEQ ID NO: 2079 - protein, 318 aa, synthetic construct
  REGION 1..318: note = ANTXR2 (P58335) SP+PP+ECD
MVAERSPARSPGSWLFPGLWLLVLSGPGGLLRAQEQPSCRRAFDLYFVLDKSGSVANNWIEIYNFVQQLAERFVSPEMRLSFIVFSSQATIILPLTGDRGKISKGLEDLKRVSPVGETYIHEGLKLANEQIQKAGGLKTSSIIIALTDGKLDGLVPSYAEKEAKISRSLGASVYCVGVLDFEQAQLERIADSKEQVFPVKGGFQALKGIINSILAQSCTEILELQPSSVCVGEEFQIVLSGRGFMLGSRNGSVLCTYTVNETYTTSVKPVSVQLNSMLCPAPILNKAGETLDVSVSFNGGKSVISGSLIVTATECSNG

SEQ ID NO: 2080 - protein, 353 aa, synthetic construct
  REGION 1..353: note = ANTXRL (A6NF34) SP+PP+ECD
MGSHESLGPYFLVFLLLLLLPPPLFRAGSLRYHGPDWRIFHRLALGSRRAHHHHGPGWRQHWRQGQAGHRCQGSFDLYFILDKSGSVNNNWIDLYMWVEETVARFQSPNIRMCFITYSTDGQTVLPLTSDKNRIKNGLDQLQKIVPDGHTFMQAGFRKAIQQIESFNSGNKVPSMIIAMTDGELVAHAFQDTLREAQKARKLGANVYTLGVADYNLDQITAIADSPGHVFAVENGFKALRSTIDALTSKVCLDVTSVEPSSECVGEPYHVVIHGNGFQNLKKRDEVICRFIFNESTIIDEKPTSIDNNSMNCPGPKLEKPGEEYSIEVSLNKGKTFFKSNVSITSTTCGIFRN

SEQ ID NO: 2081 - protein, 492 aa, synthetic construct
  REGION 1..492: note = APCDD1 (Q8J025) SP+PP+ECD
MSWPRRLLLRYLFPALLLHGLGEGSALLHPDSRSHPRSLEKSAWRAFKESQCHHMLKHLHNGARITVQMPPTIEGHWVSTGCEVRSGPEFITRSYRFYHNNTFKAYQFYYGSNRCTNPTYTLIIRGKIRLRQASWIIRGGTEADYQLHNVQVICHTEAVAEKLGQQVNRTCPGFLADGGPWVQDVAYDLWREENGCECTKAVNFAMHELQLIRVEKQYLHHNLDHLVEELFLGDIHTDATQRMFYRPSSYQPPLQNAKNHDHACIACRIIYRSDEHHPPILPPKADLTIGLHGEWVSQRCEVRPEVLFLTRHFIFHDNNNTWEGHYYHYSDPVCKHPTFSIYARGRYSRGVLSSRVMGGTEFVFKVNHMKVTPMDAATASLLNVFNGNECGAEGSWQVGIQQDVTHTNGCVALGIKLPHTEYEIFKMEQDARGRYLLFNGQRPSDGSSPDRPEKRATSYQMPLVQCASSSPRAEDLAEDSGSSLYGRAPGRH

SEQ ID NO: 2082 - protein, 580 aa, synthetic construct
  REGION 1..580: note = APLP1 (P51693) SP+PP+ECD
MGPASPAARGLSRRPGQPPLPLLLPLLLLLLRAQPAIGSLAGGSPGAAEAPGSAQVAGLCGRLTLHRDLRTGRWEPDPQRSRRCLRDPQRVLEYCRQMYPELQIARVEQATQAIPMERWCGGSRSGSCAHPHHQVVPFRCLPGEFVSEALLVPEGCRFLHQERMDQCESSTRRHQEAQEACSSQGLILHGSGMLLPCGSDRFRGVEYVCCPPPGTPDPSGTAVGDPSTRSWPPGSRVEGAEDEEEEESFPQPVDDYFVEPPQAEEEEETVPPPSSHTLAVVGKVTPTPRPTDGVDIYFGMPGEISEHEGFLRAKMDLEERRMRQINEVMREWAMADNQSKNLPKADRQALNEHFQSILQTLEEQVSGERQRLVETHATRVIALINDQRRAALEGFLAALQADPPQAERVLLALRRYLRAEQKEQRHTLRHYQHVAAVDPEKAQQMRFQVHTHLQVIEERVNQSLGLLDQNPHLAQELRPQIQELLHSEHLGPSELEAPAPGGSSEDKGGLQPPDSKDDTPMTLPKGSTEQDAASPEKEKMNPLEQYERKVNASVPRGFPFHSSEIQRDELAPAGTGVSRE

SEQ ID NO: 2083 - protein, 692 aa, synthetic construct
  REGION 1..692: note = APLP2 (Q06481) SP+PP+ECD
MAATGTAAAAATGRLLLLLLVGLTAPALALAGYIEALAANAGTGFAVAEPQIAMFCGKLNMHVNIQTGKWEPDPTGTKSCFETKEEVLQYCQEMYPELQITNVMEANQRVSIDNWCRRDKKQCKSRFVTPFKCLVGEFVSDVLLVPEKCQFFHKERMEVCENHQHWHTVVKEACLTQGMTLYSYGMLLPCGVDQFHGTEYVCCPQTKIIGSVSKEEEEEDEEEEEEEDEEEDYDVYKSEFPTEADLEDFTEAAVDEDDEDEEEGEEVVEDRDYYYDTFKGDDYNEENPTEPGSDGTMSDKEITHDVKAVCSQEAMTGPCRAVMPRWYFDLSKGKCVRFIYGGCGGNRNNFESEDYCMAVCKAMIPPTPLPTNDVDVYFETSADDNEHARFQKAKEQLEIRHRNRMDRVKKEWEEAELQAKNLPKAERQTLIQHFQAMVKALEKEAASEKQQLVETHLARVEAMLNDRRRMALENYLAALQSDPPRPHRILQALRRYVRAENKDRLHTIRHYQHVLAVDPEKAAQMKSQVMTHLHVIEERRNQSLSLLYKVPYVAQEIQEEIDELLQEQRADMDQFTASISETPVDVRVSSEESEEIPPFHPFHPFPALPENEDTQPELYHPMKKGSGVGEQDGGLIGAEEKVINSKNKVDENMVIDETLDVKEMIFNAERVGGLEEERESVGPLREDFSLSS

SEQ ID NO: 2084 - protein, 701 aa, synthetic construct
  REGION 1..701: note = APP (P05067) SP+PP+ECD
MLPGLALLLLAAWTARALEVPTDGNAGLLAEPQIAMFCGRLNMHMNVQNGKWDSDPSGTKTCIDTKEGILQYCQEVYPELQITNVVEANQPVTIQNWCKRGRKQCKTHPHFVIPYRCLVGEFVSDALLVPDKCKFLHQERMDVCETHLHWHTVAKETCSEKSTNLHDYGMLLPCGIDKFRGVEFVCCPLAEESDNVDSADAEEDDSDVWWGGADTDYADGSEDKVVEVAEEEEVAEVEEEEADDDEDDEDGDEVEEEAEEPYEEATERTTSIATTTTTTTESVEEVVREVCSEQAETGPCRAMISRWYFDVTEGKCAPFFYGGCGGNRNNFDTEEYCMAVCGSAMSQSLLKTTQEPLARDPVKLPTTAASTPDAVDKYLETPGDENEHAHFQKAKERLEAKHRERMSQVMREWEEAERQAKNLPKADKKAVIQHFQEKVESLEQEAANERQQLVETHMARVEAMLNDRRRLALENYITALQAVPPRPRHVFNMLKKYVRAEQKDRQHTLKHFEHVRMVDPKKAAQIRSQVMTHLRVIYERMNQSLSLLYNVPAVAEEIQDEVDELLQKEQNYSDDVLANMISEPRISYGNDALMPSLTETKTTVELLPVNGEFSLDDLQPWHSFGADSVPANTENEVEPVDARPAADRGLTTRPGSGLTNIKTEEISEVKMDAEFRHDSGYEVHHQKLVFFAEDVGSNKGA

SEQ ID NO: 2085 - protein, 198 aa, synthetic construct
  REGION 1..198: note = AREG (P15514) SP+PP+ECD
MRAPLLPPAPVVLSLLILGSGHYAAGLDLNDTYSGKREPFSGDHSADGFEVTSRSEMSSGSEISPVSEMPSSSEPSSGADYDYSEEYDNEPQIPGYIVDDSVRVEQVVKPPQNKTESENTSDKPKRKKKGGKNGKNRRNRKKKNPCNAEFQNFCIHGECKYIEHLEAVTCKCQQEYFGERCGEKSMKTHSMIDSSLSK

SEQ ID NO: 2086 - protein, 199 aa, synthetic construct
  REGION 1..199: note = ATRAID (Q6UW56) SP+PP+ECD
MAPHDPGSLTTLVPWAAALLLALGVERALALPEICTQCPGSVQNLSKVAFYCKTTRELMLHARCCLNQKGTILGLDLQNCSLEDPGPNFHQAHTTVIIDLQANPLKGDLANTFRGFTQLQTLILPQHVNCPGGINAWNTITSYIDNQICQGQKNLCNNTGDPEMCPENGSCVPDGPGLLQCVCADGFHGYKCMRQGSFS

SEQ ID NO: 2087 - protein, 1279 aa, synthetic construct
  REGION 1..1279: note = ATRN (O75882) SP+PP+ECD
MVAAAAATEARLRRRTAATAALAGRSGGPHWDWDVTRAGRPGLGAGLRLPRLLSPPLRPRLLLLLLLLSPPLLLLLLPCEAEAAAAAAAVSGSAAAEAKECDRPCVNGGRCNPGTGQCVCPAGWVGEQCQHCGGRFRLTGSSGFVTDGPGNYKYKTKCTWLIEGQPNRIMRLRFNHFATECSWDHLYVYDGDSIYAPLVAAFSGLIVPERDGNETVPEVVATSGYALLHFFSDAAYNLTGFNITYSFDMCPNNCSGRGECKISNSSDTVECECSENWKGEACDIPHCTDNCGFPHRGICNSSDVRGCSCFSDWQGPGCSVPVPANQSFWTREEYSNLKLPRASHKAVVNGNIMWVVGGYMFNHSDYNMVLAYDLASREWLPLNRSVNNVVVRYGHSLALYKDKIYMYGGKIDSTGNVTNELRVFHIHNESWVLLTPKAKEQYAVVGHSAHIVTLKNGRVVMLVIFGHCPLYGYISNVQEYDLDKNTWSILHTQGALVQGGYGHSSVYDHRTRALYVHGGYKAFSANKYRLADDLYRYDVDTQMWTILKDSRFFRYLHTAVIVSGTMLVFGGNTHNDTSMSHGAKCFSSDFMAYDIACDRWSVLPRPDLHHDVNRFGHSAVLHNSTMYVFGGFNSLLLSDILVFTSEQCDAHRSEAACLAAGPGIRCVWNTGSSQCISWALATDEQEEKLKSECFSKRTLDHDRCDQHTDCYSCTANTNDCHWCNDHCVPRNHSCSEGQISIFRYENCPKDNPMYYCNKKTSCRSCALDQNCQWEPRNQECIALPENICGIGWHLVGNSCLKITTAKENYDNAKLFCRNHNALLASLTTQKKVEFVLKQLRIMQSSQSMSKLTLTPWVGLRKINVSYWCWEDMSPFTNSLLQWMPSEPSDAGFCGILSEPSTRGLKAATCINPLNGSVCERPANHSAKQCRTPCALRTACGDCTSGSSECMWCSNMKQCVDSNAYVASFPFGQCMEWYTMSTCPPENCSGYCTCSHCLEQPGCGWCTDPSNTGKGKCIEGSYKGPVKMPSQAPTGNFYPQPLLNSSMCLEDSRYNWSFIHCPACQCNGHSKCINQSICEKCENLTTGKHCETCISGFYGDPTNGGKCQPCKCNGHASLCNTNTGKCFCTTKGVKGDECQLCEVENRYQGNPLRGTCYYTLLIDYQFTFSLSQEDDRYYTAINFVATPDEQNRDLDMFINASKNFNLNITWAASFSAGTQAGEEMPVVSKTNIKEYKDSFSNEKFDFRNHPNITFFVYVSNFTWPIKIQIAFSQHSNFMDL

SEQ ID NO: 2088 - protein, 1230 aa, synthetic construct
  REGION 1..1230: note = ATRNL1 (Q5VV63) SP+PP+ECD
METGGRARTGTPQPAAPGVWRARPAGGGGGGASSWLLDGNSWLLCYGFLYLALYAQVSQSKPCERTGSCFSGRCVNSTCLCDPGWVGDQCQHCQGRFKLTEPSGYLTDGPINYKYKTKCTWLIEGYPNAVLRLRFNHFATECSWDHMYVYDGDSIYAPLIAVLSGLIVPEIRGNETVPEVVTTSGYALLHFFSDAAYNLTGFNIFYSINSCPNNCSGHGKCTTSVSVPSQVYCECDKYWKGEACDIPYCKANCGSPDHGYCDLTGEKLCVCNDSWQGPDCSLNVPSTESYWILPNVKPFSPSVGRASHKAVLHGKFMWVIGGYTFNYSSFQMVLNYNLESSIWNVGTPSRGPLQRYGHSLALYQENIFMYGGRIETNDGNVTDELWVFNIHSQSWSTKTPTVLGHGQQYAVEGHSAHIMELDSRDVVMIIIFGYSAIYGYTSSIQEYHISSNTWLVPETKGAIVQGGYGHTSVYDEITKSIYVHGGYKALPGNKYGLVDDLYKYEVNTKTWTILKESGFARYLHSAVLINGAMLIFGGNTHNDTSLSNGAKCFSADFLAYDIACDEWKILPKPNLHRDVNRFGHSAVVINGSMYIFGGFSSVLLNDILVYKPPNCKAFRDEELCKNAGPGIKCVWNKNHCESWESGNTNNILRAKCPPKTAASDDRCYRYADCASCTANTNGCQWCDDKKCISANSNCSMSVKNYTKCHVRNEQICNKLTSCKSCSLNLNCQWDQRQQECQALPAHLCGEGWSHIGDACLRVNSSRENYDNAKLYCYNLSGNLASLTTSKEVEFVLDEIQKYTQQKVSPWVGLRKINISYWGWEDMSPFTNTTLQWLPGEPNDSGFCAYLERAAVAGLKANPCTSMANGLVCEKPVVSPNQNARPCKKPCSLRTSCSNCTSNGMECMWCSSTKRCVDSNAYIISFPYGQCLEWQTATCSPQNCSGLRTCGQCLEQPGCGWCNDPSNTGRGHCIEGSSRGPMKLIGMHHSEMVLDTNLCPKEKNYEWSFIQCPACQCNGHSTCINNNVCEQCKNLTTGKQCQDCMPGYYGDPTNGGQCTACTCSGHANICHLHTGKCFCTTKGIKGDQCQLCDSENRYVGNPLRGTCYYSLLIDYQFTFSLLQEDDRHHTAINFIANPEQSNKNLDISINASNNFNLNITWSVGSTAGTISGEETSIVSKNNIKEYRDSFSYEKFNFRSNPNITFYVYVSNFSWPIKIQIAFSQHNTIMDL

SEQ ID NO: 2089 - protein, 451 aa, synthetic construct
  REGION 1..451: note = AXL (P30530) SP+PP+ECD
MAWRCPRMGRVPLAWCLALCGWACMAPRGTQAEESPFVGNPGNITGARGLTGTLRCQLQVQGEPPEVHWLRDGQILELADSTQTQVPLGEDEQDDWIVVSQLRITSLQLSDTGQYQCLVFLGHQTFVSQPGYVGLEGLPYFLEEPEDRTVAANTPFNLSCQAQGPPEPVDLLWLQDAVPLATAPGHGPQRSLHVPGLNKTSSFSCEAHNAKGVTTSRTATITVLPQQPRNLHLVSRQPTELEVAWTPGLSGIYPLTHCTLQAVLSDDGMGIQAGEPDPPEEPLTSQASVPPHQLRLGSLHPHTPYHIRVACTSSQGPSSWTHWLPVETPEGVPLGPPENISATRNGSQAFVHWQEPRAPLQGTLLGYRLAYQGQDTPEVLMDIGLRQEVTLELQGDGSVSNLTVCVAAYTAAGDGPWSLPVPLEAWRPGQAQPVHQLVKEPSTPAFSWPWW

SEQ ID NO: 2090 - protein, 457 aa, synthetic construct
  REGION 1..457: note = BACE1 (P56817) SP+PP+ECD
MAQALPWLLLWMGAGVLPAHGTQHGIRLPLRSGLGGAPLGLRLPRETDEEPEEPGRRGSFVEMVDNLRGKSGQGYYVEMTVGSPPQTLNILVDTGSSNFAVGAAPHPFLHRYYQRQLSSTYRDLRKGVYVPYTQGKWEGELGTDLVSIPHGPNVTVRANIAAITESDKFFINGSNWEGILGLAYAEIARPDDSLEPFFDSLVKQTHVPNLFSLQLCGAGFPLNQSEVLASVGGSMIIGGIDHSLYTGSLWYTPIRREWYYEVIIVRVEINGQDLKMDCKEYNYDKSIVDSGTTNLRLPKKVFEAAVKSIKAASSTEKFPDGFWLGEQLVCWQAGTTPWNIFPVISLYLMGEVTNQSFRITILPQQYLRPVEDVATSQDDCYKFAISQSSTGTVMGAVIMEGFYVVFDRARKRIGFAVSACHVHDEFRTAAVEGPFVTLDMEDCGYNIPQTDESTLMT

SEQ ID NO: 2091 - protein, 473 aa, synthetic construct
  REGION 1..473: note = BACE2 (Q9Y5Z0) SP+PP+ECD
MGALARALLLPLLAQWLLRAAPELAPAPFTLPLRVAAATNRVVAPTPGPGTPAERHADGLALALEPALASPAGAANFLAMVDNLQGDSGRGYYLEMLIGTPPQKLQILVDTGSSNFAVAGTPHSYIDTYFDTERSSTYRSKGFDVTVKYTQGSWTGFVGEDLVTIPKGFNTSFLVNIATIFESENFFLPGIKWNGILGLAYATLAKPSSSLETFFDSLVTQANIPNVFSMQMCGAGLPVAGSGTNGGSLVLGGIEPSLYKGDIWYTPIKEEWYYQIEILKLEIGGQSLNLDCREYNADKAIVDSGTTLLRLPQKVFDAVVEAVARASLIPEFSDGFWTGSQLACWTNSETPWSYFPKISIYLRDENSSRSFRITILPQLYIQPMMGAGLNYECYRFGISPSTNALVIGATVMEGFYVIFDRAQKRVGFAASPCAEIAGAAVSEISGPFSTEDVASNCVPAQSLSEPILWIVSY

SEQ ID NO: 2092 - protein, 152 aa, synthetic construct
  REGION 1..152: note = BAMBI (Q13145) SP+PP+ECD
MDRHSSYIFIWLQLELCAMAVLLTKGEIRCYCDAAHCVATGYMCKSELSACFSRLLDPQNSNSPLTHGCLDSLASTTDICQAKQARNHSGTTIPTLECCHEDMCNYRGLHDVLSPPRGEASGQGNRYQHDGSRNLITKVQELTSSKELWFRA

SEQ ID NO: 2093 - protein, 547 aa, synthetic construct
  REGION 1..547: note = BCAM (P50895) SP+PP+ECD
MEPPDAPAQARGAPRLLLLAVLLAAHPDAQAEVRLSVPPLVEVMRGKSVILDCTPTGTHDHYMLEWFLTDRSGARPRLASAEMQGSELQVTMHDTRGRSPPYQLDSQGRLVLAEAQVGDERDYVCVVRAGAAGTAEATARLNVFAKPEATEVSPNKGTLSVMEDSAQEIATCNSRNGNPAPKITWYRNGQRLEVPVEMNPEGYMTSRTVREASGLLSLTSTLYLRLRKDDRDASFHCAAHYSLPEGRHGRLDSPTFHLTLHYPTEHVQFWVGSPSTPAGWVREGDTVQLLCRGDGSPSPEYTLFRLQDEQEEVLNVNLEGNLTLEGVTRGQSGTYGCRVEDYDAADDVQLSKTLELRVAYLDPLELSEGKVLSLPLNSSAVVNCSVHGLPTPALRWTKDSTPLGDGPMLSLSSITFDSNGTYVCEASLPTVPVLSRTQNFTLLVQGSPELKTAEIEPKADGSWREGDEVTLICSARGHPDPKLSWSQLGGSPAEPIPGRQGWVSSSLTLKVTSALSRDGISCEASNPHGNKRHVFHFGTVSPQTSQA

SEQ ID NO: 2094 - protein, 152 aa, synthetic construct
  REGION 1..152: note = BMPR1A (P36894) SP+PP+ECD
MPQLYIYIRLLGAYLFIISRVQGQNLDSMLHGTGMKSDSDQKKSENGVTLAPEDTLPFLKCYCSGHCPDDAINNTCITNGHCFAIIEEDDQGETTLASGCMKYEGSDFQCKDSPKAQLRRTIECCRTNLCNQYLQPTLPPVVIGPFFDGSIR

SEQ ID NO: 2095 - protein, 150 aa, synthetic construct
  REGION 1..150: note = BMPR2 (Q13873) SP+PP+ECD
MTSSLQRPWRVPWLPWTILLVSTAAASQNQERLCAFKDPYQQDLGIGESRISHENGTILCSKGSTCYGLWEKSKGDINLVKQGCWSHIGDPQECHYEECVVTTTPPSIQNGTYRFCCCSTDLCNVNFTENFPPPDTTPLSPPHSFNRDET

SEQ ID NO: 2096 - protein, 855 aa, synthetic construct
  REGION 1..855: note = BOC (Q9BWV1) SP+PP+ECD
MLRGTMTAWRGMRPEVTLACLLLATAGCFADLNEVPQVTVQPASTVQKPGGTVILGCVVEPPRMNVTWRLNGKELNGSDDALGVLITHGTLVITALNNHTVGRYQCVARMPAGAVASVPATVTLANLQDFKLDVQHVIEVDEGNTAVIACHLPESHPKAQVRYSVKQEWLEASRGNYLIMPSGNLQIVNASQEDEGMYKCAAYNPVTQEVKTSGSSDRLRVRRSTAEAARIIYPPEAQTIIVTKGQSLILECVASGIPPPRVTWAKDGSSVTGYNKTRFLLSNLLIDTTSEEDSGTYRCMADNGVGQPGAAVILYNVQVFEPPEVTMELSQLVIPWGQSAKLTCEVRGNPPPSVLWLRNAVPLISSQRLRLSRRALRVLSMGPEDEGVYQCMAENEVGSAHAVVQLRTSRPSITPRLWQDAELATGTPPVSPSKLGNPEQMLRGQPALPRPPTSVGPASPQCPGEKGQGAPAEAPIILSSPRTSKTDSYELVWRPRHEGSGRAPILYYVVKHRKVTNSSDDWTISGIPANQHRLTLTRLDPGSLYEVEMAAYNCAGEGQTAMVTFRTGRRPKPEIMASKEQQIQRDDPGASPQSSSQPDHGRLSPPEAPDRPTISTASETSVYVTWIPRGNGGFPIQSFRVEYKKLKKVGDWILATSAIPPSRLSVEITGLEKGTSYKFRVRALNMLGESEPSAPSRPYVVSGYSGRVYERPVAGPYITFTDAVNETTIMLKWMYIPASNNNTPIHGFYIYYRPTDSDNDSDYKKDMVEGDKYWHSISHLQPETSYDIKMQCFNEGGESEFSNVMICETKARKSSGQPGRLPPPTLAPPQPPLPETIERPVGTGAMVARSSDLPY

SEQ ID NO: 2097 - protein, 323 aa, synthetic construct
  REGION 1..323: note = BSG (P35613) SP+PP+ECD
MAAALFVLLGFALLGTHGASGAAGFVQAPLSQQRWVGGSVELHCEAVGSPVPEIQWWFEGQGPNDTCSQLWDGARLDRVHIHATYHQHAASTISIDTLVEEDTGTYECRASNDPDRNHLTRAPRVKWVRAQAVVLVLEPGTVFTTVEDLGSKILLTCSLNDSATEVTGHRWLKGGVVLKEDALPGQKTEFKVDSDDQWGEYSCVFLPEPMGTANIQLHGPPRVKAVKSSEHINEGETAMLVCKSESVPPVTDWAWYKITDSEDKALMNGSESRFFVSSSQGRSELHIENLNMEADPGQYRCNGTSSKGSDQAIITLRVRSHLA

SEQ ID NO: 2098 - protein, 118 aa, synthetic construct
  REGION 1..118: note = BTC (P35070) SP+PP+ECD
MDRAARCSGASSLPLLLALALGLVILHCVVADGNSTRSPETNGLLCGDPEENCAATTTQSKRKGHFSRCPKQYKHYCIKGRCRFVVAEQTPSCVCDEGYIGARCERVDLFYLRGDRGQ

SEQ ID NO: 2099 - protein, 157 aa, synthetic construct
  REGION 1..157: note = BTLA (Q7Z6A9) SP+PP+ECD
MKTLPAMLGTGKLFWVFFLIPYLDIWNIHGKESCDVQLYIKRQSEHSILAGDPFELECPVKYCANRPHVTWCKLNGTTCVKLEDRQTSWKEEKNISFFILHFEPVLPNDNGSYRCSANFQSNLIESHSTTLYVTDVKSASERPSKDEMASRPWLLYR

SEQ ID NO: 2100 - protein, 242 aa, synthetic construct
  REGION 1..242: note = BTN1A1 (Q13410) SP+PP+ECD
MAVFPSSGLPRCLLTLILLQLPKLDSAPFDVIGPPEPILAVVGEDAELPCRLSPNASAEHLELRWFRKKVSPAVLVHRDGREQEAEQMPEYRGRATLVQDGIAKGRVALRIRGVRVSDDGEYTCFFREDGSYEEALVHLKVAALGSDPHISMQVQENGEICLECTSVGWYPEPQVQWRTSKGEKFPSTSESRNPDEEGLFTVAASVIIRDTSAKNVSCYIQNLLLGQEKKVEISIPASSLPR

SEQ ID NO: 2101 - protein, 248 aa, synthetic construct
  REGION 1..248: note = BTN2A1 (Q7KYR7) SP+PP+ECD
MESAAALHFSRPASLLLLLLSLCALVSAQFIVVGPTDPILATVGENTTLRCHLSPEKNAEDMEVRWFRSQFSPAVFVYKGGRERTEEQMEEYRGRTTFVSKDISRGSVALVIHNITAQENGTYRCYFQEGRSYDEAILHLVVAGLGSKPLISMRGHEDGGIRLECISRGWYPKPLTVWRDPYGGVAPALKEVSMPDADGLFMVTTAVIIRDKSVRNMSCSINNTLLGQKKESVIFIPESFMPSVSPCA

SEQ ID NO: 2102 - protein, 265 aa, synthetic construct
  REGION 1..265: note = BTN2A2 (Q8WVV5) SP+PP+ECD
MEPAAALHFSLPASLLLLLLLLLLSLCALVSAQFTVVGPANPILAMVGENTTLRCHLSPEKNAEDMEVRWFRSQFSPAVFVYKGGRERTEEQMEEYRGRITFVSKDINRGSVALVIHNVTAQENGIYRCYFQEGRSYDEAILRLVVAGLGSKPLIEIKAQEDGSIWLECISGGWYPEPLTVWRDPYGEVVPALKEVSIADADGLFMVTTAVIIRDKYVRNVSCSVNNTLLGQEKETVIFIPESFMPSASPWMVALAVILTASPWM

SEQ ID NO: 2103 - protein, 246 aa, synthetic construct
  REGION 1..246: note = BTN2A3P (Q96KV6) SP+PP+ECD
MEPAAALHFSRPASLLLLLSLCALVSAQVTVVGPTDPILAMVGENTTLRCCLSPEENAEDMEVRWFQSQFSPAVFVYKGGRERTEEQKEEYRGRTTFVSKDSRGSVALIIHNVTAEDNGIYQCYFQEGRSCNEAILHLVVAGLDSEPVIEMRDHEDGGIQLECISGGWYPKPLTVWRDPYGEVVPALKEVSTPDADSLFMVTTAVIIRDKSVRNVSCSINDTLLGQKKESVIFIPESFMPSRSPCV

SEQ ID NO: 2104 - protein, 254 aa, synthetic construct
  REGION 1..254: note = BTN3A1 (O00481) SP+PP+ECD
MKMASFLAFLLLNFRVCLLLLQLLMPHSAQFSVLGPSGPILAMVGEDADLPCHLFPTMSAETMELKWVSSSLRQVVNVYADGKEVEDRQSAPYRGRTSILRDGITAGKAALRIHNVTASDSGKYLCYFQDGDFYEKALVELKVAALGSDLHVDVKGYKDGGIHLECRSTGWYPQPQIQWSNNKGENIPTVEAPVVADGVGLYAVAASVIMRGSSGEGVSCTIRSSLLGLEKTASISIADPFFRSAQRWIAALAG

SEQ ID NO: 2105 - protein, 248 aa, synthetic construct
  REGION 1..248: note = BTN3A2 (P78410) SP+PP+ECD
MKMASSLAFLLLNFHVSLLLVQLLTPCSAQFSVLGPSGPILAMVGEDADLPCHLFPTMSAETMELKWVSSSLRQVVNVYADGKEVEDRQSAPYRGRTSILRDGITAGKAALRIHNVTASDSGKYLCYFQDGDFYEKALVELKVAALGSNLHVEVKGYEDGGIHLECRSTGWYPQPQIQWSNAKGENIPAVEAPVVADGVGLYEVAASVIMRGGSGEGVSCIIRNSLLGLEKTASISIADPFFRSAQPW

SEQ ID NO: 2106 - protein, 248 aa, synthetic construct
  REGION 1..248: note = BTN3A3 (O00478) SP+PP+ECD
MKMASSLAFLLLNFHVSLFLVQLLTPCSAQFSVLGPSGPILAMVGEDADLPCHLFPTMSAETMELRWVSSSLRQVVNVYADGKEVEDRQSAPYRGRTSILRDGITAGKAALRIHNVTASDSGKYLCYFQDGDFYEKALVELKVAALGSDLHIEVKGYEDGGIHLECRSTGWYPQPQIKWSDTKGENIPAVEAPVVADGVGLYAVAASVIMRGSSGGGVSCIIRNSLLGLEKTASISIADPFFRSAQPW

SEQ ID NO: 2107 - protein, 254 aa, synthetic construct
  REGION 1..254: note = BTNL10 (A8MVZ5) SP+PP+ECD
MAVTCDPEAFLSICFVTLVFLQLPLASIWKADFDVTGPHAPILAMAGGHVELQCQLFPNISAEDMELRWYRCQPSLAVHMHERGMDMDGEQKWQYRGRTTFMSDHVARGKAMVRSHRVTTFDNRTYCCRFKDGVKFGEATVQVQVAGLGREPRIQVTDQQDGVRAECTSAGCFPKSWVERRDFRGQARPAVTNLSASATTRLWAVASSLTLWDRAVEGLSCSISSPLLPERRKVAESHLPATFSRSSQFTAWKA

SEQ ID NO: 2108 - protein, 237 aa, synthetic construct
  REGION 1..237: note = BTNL3 (Q6UXE8) SP+PP+ECD
MAFVLILVLSFYELVSGQWQVTGPGKFVQALVGEDAVFSCSLFPETSAEAMEVRFFRNQFHAVVHLYRDGEDWESKQMPQYRGRTEFVKDSIAGGRVSLRLKNITPSDIGLYGCWFSSQIYDEEATWELRVAALGSLPLISIVGYVDGGIQLLCLSSGWFPQPTAKWKGPQGQDLSSDSRANADGYSLYDVEISIIVQENAGSILCSIHLAEQSHEVESKVLIGETFFQPSPWRLAS

SEQ ID NO: 2109 - protein, 256 aa, synthetic construct
  REGION 1..256: note = BTNL9 (Q6UXG8) SP+PP+ECD
MVDLSVSPDSLKPVSLTSSLVFLMHLLLLQPGEPSSEVKVLGPEYPILALVGEEVEFPCHLWPQLDAQQMEIRWFRSQTFNVVHLYQEQQELPGRQMPAFRNRTKLVKDDIAYGSVVLQLHSIIPSDKGTYGCRFHSDNFSGEALWELEVAGLGSDPHLSLEGFKEGGIQLRLRSSGWYPKPKVQWRDHQGQCLPPEFEAIVWDAQDLFSLETSVVVRAGALSNVSVSIQNLLLSQKKELVVQIADVFVPGASAWK

SEQ ID NO: 2110 - protein, 194 aa, synthetic construct
  REGION 1..194: note = C10orf54 (Q9H7M9) SP+PP+ECD
MGVPTALEAGSWRWGSLLFALFLAASLGPVAAFKVATPYSLYVCPEGQNVTLTCRLLGPVDKGHDVTFYKTWYRSSRGEVQTCSERRPIRNLTFQDLHLHHGGHQAANTSHDLAQRHGLESASDHHGNFSITMRNLTLLDSGLYCCLVVEIRHHHSEHRVHGAMELQVQTGKDAPSNCVVYPSSSQDSENITAA

SEQ ID NO: 2111 - protein, 400 aa, synthetic construct
  REGION 1..400: note = C11orf24 (Q96F05) SP+PP+ECD
MWTALVLIWIFSLSLSESHAASNDPRNFVPNKMWKGLVKRNASVETVDNKTSEDVTMAAASPVTLTKGTSAAHLNSMEVTTEDTSRTDVSEPATSGGAADGVTSIAPTAVASSTTAASITTAASSMTVASSAPTTAASSTTVASIAPTTAASSMTAASSTPMTLALPAPTSTSTGRTPSTTATGHPSLSTALAQVPKSSALPRTATLATLATRAQTVATTANTSSPMSTRPSPSKHMPSDTAASPVPPMRPQAQGPISQVSVDQPVVNTTNKSTPMPSNTTPEPAPTPTVVTTTKAQAREPTASPVPVPHTSPIPEMEAMSPTTQPSPMPYTQRAAGPGTSQAPEQVETEATPGTDSTGPTPRSSGGTKMPATDSCQPSTQGQYMVVTTEPLTQAVVDKT

SEQ ID NO: 2112 - protein, 61 aa, synthetic construct
  REGION 1..61: note = C11orf87 (Q6NUJ2) SP+PP+ECD
MSARAPKELRLALPPCLLNRTFASPNASGSGNTGARGPGAVGSGTCITQVGQQLFQSFSST

SEQ ID NO: 2113 - protein, 57 aa, synthetic construct; identical to SEQ ID NO: 1009
  REGION 1..57: note = C14orf132 (Q9NPU4) SP+PP+ECD

SEQ ID NO: 2114 - protein, 714 aa, synthetic construct
  REGION 1..714: note = C14orf37 (Q86TY3) SP+PP+ECD
MRGPIVLHICLAFCSLLLFSVATQCLAFPKIERRREIAHVHAEKGQSDKMNTDDLENSSVTSKQTPQLVVSEDPMMMSAVPSATSLNKAFSINKETQPGQAGLMQTERPGVSTPTESGVPSAEEVFGSSQPERISPESGLAKAMLTIAITATPSLTVDEKEELLTSTNFQPIVEEITETTKGFLKYMDNQSFATESQEGVGLGHSPSSYVNTKEMLTTNPKTEKFEADTDHRTTSFPGAESTAGSEPGSLTPDKEKPSQMTADNTQAAATKQPLETSEYTLSVEPETDSLLGAPEVTVSVSTAVPAASALSDEWDDTKLESVSRIRTPKLGDNEETQVRTEMSQTAQVSHEGMEGGQPWTEAAQVALGLPEGETHTGTALLIAHGNERSPAFTDQSSFTPTSLMEDMKVSIVNLLQSTGDFTESTKENDALFFLETTVSVSVYESEADQLLGNTMKDIITQEMTTAVQEPDATLSMVTQEQVATLELIRDSGKTEEEKEDPSPVSDVPGVTQLSRRWEPLATTISTTVVPLSFEVTPTVEEQMDTVTGPNEEFTPVLGSPVTPPGIMVGEPSISPALPALEASSERRTVVPSITRVNTAASYGLDQLESEEGQEDEDEEDEEDEDEEEEDEEEDEEDKDADSLDEGLDGDTELPGFTLPGITSQEPGLEEGNMDLLEGATYQVPDALEWEQQNQGLVRSWMEKLKDKAGYMSGM

SEQ ID NO: 2115 - protein, 100 aa, synthetic construct
  REGION 1..100: note = C19orf18 (Q8NEA5) SP+PP+ECD
MDKVQSGFLILFLFLMECQLHLCLPYADGLHPTGNITGLPGSKRSQPPRNITKEPKVFFHKTQLPGIQGAASRSTAASPTNPMKFLRNKAIIRHRPALVK

SEQ ID NO: 2116 - protein, 903 aa, synthetic construct
  REGION 1..903: note = C1orf101 (Q5SY80) SP+PP+ECD
MSAREVAVLLLWLSCYGSALWRYSTNSPNYRIFSTRSTIKLEYEGTLFTEWSVPETCFVLNKSSPTTELRCSSPGVHAIKPIVTGPDEEERYLFVESSHTCFLWYYRVRHFFNNFTQLITVWAYDPESADPDELLGNAEEPSINSIVLSTQMATLGQKPVIHTVLKRKVYSSNEKMRRGTWRIVVPMTKDDALKEIRGNQVTFQDCFIADFLILLTFPLLTIPEIPGYLPISSPRGSQLMASWDACVVASAVLVTDMETFHTTDSFKSWTRIRVPPDILSDDERRSVAHVILSRDGIVFLINGVLYIKSFRGFIRLGGIVNLPDGGITGISSRKWCWVNYLLKAKGRRSTFAVWTENEIYLGSILLKFARLVTTTELKNILSLSVTATLTIDRVEYTGHPLEIAVFLNYCTVCNVTKKIFLVIYNEDTKQWVSQDFTLDAPIDSVTMPHFTFSALPGLLLWNKHSIYYCYHNFTFTGILQTPAGHGNLSMLSNDSIIHEVFIDYYGDILVKMENNVIFYSKINTRDAVKLHLWTNYTTRAFIFLSTSGQTYFLYALDDGTIQIQDYPLHLEAQSIAFTTKDKCPYMAFHNNVAHVFYFLDKGEALTVWTQIVYPENTGLYVIVESYGPKILQESHEISFEAAFGYCTKTLTLTFYQNVDYERISDYFETQDKHTGLVLVQFRPSEYSKACPIAQKVFQIAVGCDDKKFIAIKGFSKKGCHHHDFSYVIEKSYLRHQPSKNLRVRYIWGEYGCPLRLDFTEKFQPVVQLFDDNGYVKDVEANFIVWEIHGRDDYSFNNTMAQSGCLHEAQTWKSMIELNKHLPLEEVWGPENYKHCFSYAIGKPGDLNQPYEIINSSNGNHIFWPMGHSGMYVFRVKILDPNYSFCNLTAMFAIETFGLIPSPS

SEQ ID NO: 2117 - protein, 147 aa, synthetic construct
  REGION 1..147: note = C1orf159 (Q96HA4) SP+PP+ECD
MALRHLALLAGLLVGVASKSMENTVTRNSTAVINTQAEGTLSPPGLSSLPVVREWALTHTAQLPECCVDVVGVNASCPGASLCGPGCYRRWNADGSASCVRCGNGTLPAYNGSECRSFAGPGAPFPMNRSSGTPGRPHPGAPRVAAS

SEQ ID NO: 2118 - protein, 182 aa, synthetic construct
  REGION 1..182: note = C1orf233 (F2Z333) SP+PP+ECD
MRAPPLLLLLAACAPPPCAAAAPTPPGWEPTPDAPWCPYKVLPEGPEAGGGRLCFRSPARGFRCQAPGCVLHAPAGRSLRASVLRNRSVLLQWRLAPAAARRVRAFALNCSWRGAYTRFPCERVLLGASCRDYLLPDVHDSVLYRLCLQPLPLRAGPAAAAPETPEPAECVEFTAEPAGMQD

SEQ ID NO: 2119 - protein, 372 aa, synthetic construct
  REGION 1..372: note = C1orf85 (Q8WWB7) SP+PP+ECD
MRGSVECTWGWGHCAPSPLLLWTLLLFAAPFGLLGEKTRQVSLEVIPNWLGPLQNLLHIRAVGTNSTLHYVWSSLGPLAVVMVATNTPHSTLSVNWSLLLSPEPDGGLMVLPKDSIQFSSALVFTRLLEFDSTNVSDTAAKPLGRPYPPYSLADFSWNNITDSLDPATLSATFQGHPMNDPTRTFANGSLAFRVQAFSRSSRPAQPPRLLHTADTCQLEVALIGASPRGNRSLFGLEVATLGQGPDCPSMQEQHSIDDEYAPAVFQLDQLLWGSLPSGFAQWRPVAYSQKPGGRESALPCQASPLHPALAYSLPQSPIVRAFFGSQNNFCAFNLTFGASTGPGYWDQHYLSWSMLLGVGFPPVDGLSPLVLG

SEQ ID NO: 2120 - protein, 81 aa, synthetic construct
  REGION 1..81: note = C3orf80 (F5H4A9) SP+PP+ECD
MWGPGVTAEGLSVAPAPPPLLPLLLLLALALVAPSRGGGGCAELACGERERCCDATNATAVRCCKLPLHAFLDNVGWFVRK

SEQ ID NO: 2121 - protein, 301 aa, synthetic construct
  REGION 1..301: note = CA12 (O43570) SP+PP+ECD
MPRRSLHAAAVLLLVILKEQPSSPAPVNGSKWTYFGPDGENSWSKKYPSCGGLLQSPIDLHSDILQYDASLTPLEFQGYNLSANKQFLLTNNGHSVKLNLPSDMHIQGLQSRYSATQLHLHWGNPNDPHGSEHTVSGQHFAAELHIVHYNSDLYPDASTASNKSEGLAVLAVLIEMGSFNPSYDKIFSHLQHVKYKGQEAFVPGFNIEELLPERTAEYYRYRGSLTTPPCNPTVLWTVFRNPVQISQEQLLALETALYCTHMDDPSPREMINNFRQVQKFDERLVYTSFSQVQVCTAAGLS

SEQ ID NO: 2122 - protein, 290 aa, synthetic construct
  REGION 1..290: note = CA14 (Q9ULX7) SP+PP+ECD
MLFSALLLEVIWILAADGGQHWTYEGPHGQDHWPASYPECGNNAQSPIDIQTDSVTFDPDLPALQPHGYDQPGTEPLDLHNNGHTVQLSLPSTLYLGGLPRKYVAAQLHLHWGQKGSPGGSEHQINSEATFAELHIVHYDSDSYDSLSEAAERPQGLAVLGILIEVGETKNIAYEHILSHLHEVRHKDQKTSVPPFNLRELLPKQLGQYFRYNGSLTTPPCYQSVLWTVFYRRSQISMEQLEKLQGTLFSTEEEPSKLLVQNYRALQPLNQRMVFASFIQAGSSYTTGEM

SEQ ID NO: 2123 - protein, 1095 aa, synthetic construct
  REGION 1..1095: note = CACHD1 (Q5VU97) SP+PP+ECD
MARQPEEEETAVARARRPPLWLLCLVACWLLGAGAEADFSILDEAQVLASQMRRLAAEELGVVTMQRIFNSFVYTEKISNGESEVQQLAKKIREKFNRYLDVVNRNKQVVEASYTAHLTSPLTAIQDCCTIPPSMMEFDGNFNTNVSRTISCDRLSTTVNSRAFNPGRDLNSVLADNLKSNPGIKWQYFSSEEGIFTVFPAHKFRCKGSYEHRSRPIYVSTVRPQSKHIVVILDHGASVTDTQLQIAKDAAQVILSAIDEHDKISVLTVADTVRTCSLDQCYKTFLSPATSETKRKMSTFVSSVKSSDSPTQHAVGFQKAFQLIRSTNNNTKFQANTDMVIIYLSAGITSKDSSEEDKKATLQVINEENSFLNNSVMILTYALMNDGVTGLKELAFLRDLAEQNSGKYGVPDRMALPVIKGSMMVLNQLSNLETTVGRFYTNLPNRMIDEAVFSLPFSDEMGDGLIMTVSKPCYFGNLLLGIVGVDVNLAYILEDVTYYQDSLASYTFLIDDKGYTLMHPSLTRPYLLSEPPLHTDIIHYENIPKFELVRQNILSLPLGSQIIAVPVNSSLSWHINKLRETGKEAYNVSYAWKMVQDTSFILCIVVIQPEIPVKQLKNLNTVPSSKLLYHRLDLLGQPSACLHFKQLATLESPTIMLSAGSFSSPYEHLSQPETKRMVEHYTAYLSDNTRLIANPGLKFSVRNEVMATSHVTDEWMTQMEMSSLNTYIVRRYIATPNGVLRIYPGSLMDKAFDPTRRQWYLHAVANPGLISLTGPYLDVGGAGYVVTISHTIHSSSTQLSSGHTVAVMGIDFTLRYFYKVLMDLLPVCNQDGGNKIRCFIMEDRGYLVAHPTLIDPKGHAPVEQQHITHKEPLVANDILNHPNFVKKNLCNSFSDRTVQRFYKFNTSLAGDLTNLVHGSHCSKYRLARIPGTNAFVGIVNETCDSLAFCACSMVDRLCLNCHRMEQNECECPCECPLEVNECTGNLTNAENRNPSCEVHQEPVTYTAIDPGLQDALHQCVNSRCSQRLESGDCFGVLDCEWCMVDSDGKTHLDKPYCAPQKECFGGIVGAKSPYVDDMGAIGDEVITLNMIKSAP

SEQ ID NO: 2124 - protein, 374 aa, synthetic construct
  REGION 1..374: note = CADM1 (Q9BY67) SP+PP+ECD
MASVVLPSGSQCAAAAAAAAPPGLRLRLLLLLFSAAALIPTGDGQNLFTKDVTVIEGEVATISCQVNKSDDSVIQLLNPNRQTIYFRDFRPLKDSRFQLLNFSSSELKVSLTNVSISDEGRYFCQLYTDPPQESYTTITVLVPPRNLMIDIQKDTAVEGEEIEVNCTAMASKPATTIRWFKGNTELKGKSEVEEWSDMYTVTSQLMLKVHKEDDGVPVICQVEHPAVTGNLQTQRYLEVQYKPQVHIQMTYPLQGLTREGDALELTCEAIGKPQPVMVTWVRVDDEMPQHAVLSGPNLFINNLNKTDNGTYRCEASNIVGKAHSDYMLYVYDPPTTIPPPTTTTTTTTTTTTTILTIITDSRAGEEGSIRAVDH

SEQ ID NO: 2125 - protein, 367 aa, synthetic construct
  REGION 1..367: note = CADM2 (Q8N3J6) SP+PP+ECD
MIWKRSAVLRFYSVCGLLLQGSQGQFPLTQNVTVVEGGTAILTCRVDQNDNTSLQWSNPAQQTLYFDDKKALRDNRIELVRASWHELSISVSDVSLSDEGQYTCSLFTMPVKTSKAYLTVLGVPEKPQISGFSSPVMEGDLMQLTCKTSGSKPAADIRWFKNDKEIKDVKYLKEEDANRKTFTVSSTLDFRVDRSDDGVAVICRVDHESLNATPQVAMQVLEIHYTPSVKIIPSTPFPQEGQPLILTCESKGKPLPEPVLWTKDGGELPDPDRMVVSGRELNILFLNKTDNGTYRCEATNTIGQSSAEYVLIVHDVPNTLLPTTIIPSLTTATVTTTVAITTSPTTSATTSSIRDPNALAGQNGPDH

SEQ ID NO: 2126 - protein, 330 aa, synthetic construct
  REGION 1..330: note = CADM3 (Q8N126) SP+PP+ECD
MGAPAASLLLLLLLFACCWAPGGANLSQDDSQPWTSDETVVAGGTVVLKCQVKDHEDSSLQWSNPAQQTLYFGEKRALRDNRIQLVTSTPHELSISISNVALADEGEYTCSIFTMPVRTAKSLVTVLGIPQKPIITGYKSSLREKDTATLNCQSSGSKPAARLTWRKGDQELHGEPTRIQEDPNGKTFTVSSSVTFQVTREDDGASIVCSVNHESLKGADRSTSQRIEVLYTPTAMIRPDPPHPREGQKLLLHCEGRGNPVPQQYLWEKEGSVPPLKMTQESALIFPFLNKSDSGTYGCTATSNMGSYKAYYTLNVNDPSPVPSSSSTYH

SEQ ID NO: 2127 - protein, 324 aa, synthetic construct
  REGION 1..324: note = CADM4 (Q8NFZ8) SP+PP+ECD
MGRARRFQWPLLLLWAAAAGPGAGQEVQTENVTVAEGGVAEITCRLHQYDGSIVVIQNPARQTLFFNGTRALKDERFQLEEFSPRRVRIRLSDARLEDEGGYFCQLYTEDTHHQIATLTVLVAPENPVVEVREQAVEGGEVELSCLVPRSRPAATLRWYRDRKELKGVSSSQENGKVWSVASTVRFRVDRKDDGGIIICEAQNQALPSGHSKQTQYVLDVQYSPTARIHASQAVVREGDTLVLTCAVTGNPRPNQIRWNRGNESLPERAEAVGETLTLPGLVSADNGTYTCEASNKHGHARALYVLVVYDPGAVVEAQTSVPYA

SEQ ID NO: 2128 - protein, 718 aa, synthetic construct
  REGION 1..718: note = CATSPERD (Q86XM0) SP+PP+ECD
MLMLMLVAAVTMWLRPLVTAQLCRSRTVRTGKVFNLIQDVQGDRLYFHPTTTRLIKHPCEKNIALYLGKQVFFTMDNFETSLLPFTIPTSMQVGVPEVTSAHFAGSLLLLVVDQKVYIYDYENNSWSMSLGIKHPVTHVSGDNCCYTGSLFCVHVSNLVFAYFRGDQISQTYIYYSNTGGFSFWKYHYDRQAEIIGSLGGIFHFFSLSQVAMLVVNQGKGMFKYSDHPLNRSFGLSFDYNGTLDILIAPGQRGILLLWFENSLLFSHNAGQLVDTVRVKKGDQTLFSSIFEAKITIHNIAVTENELAVITREDNLYYGNLGIVPSSIIKFADQYIWSEDVALMFRSPGTLEILTPLRDTAFPAFDFQKCLVNIQALLMDPELHVGKCKIEFLTGEFIYRMYTIDMHSQLELTASLIPQPGTSLIPLVMVSNPHSLGFQATFYENGYTSDGNTKYKLDIFLKQQQHWGRTDSNFTSSLKKATMSTLTVDIANKEISCVDIKPLSTLISVGCDLDKKIVIQNKVSACSMGILDPLTLQDNYSFIIEKEFYDPGFQGQQSSEDLHVFYSYQQLGCPLLVYYDTLWKPVVELWRKDSFQEVIDAEYVLLEVNGQFSYSYSLTAQSAMCTSQPQNWTTMIKEFGGPFFWNRENYVSCHDPNNNAPLRWPDVQYQILGGRTANQIIFGHNGFYVFYISIVDPYYSYCQLETIFSIYVYGAFPVQ

SEQ ID NO: 2129 - protein, 1066 aa, synthetic construct
  REGION 1..1066: note = CATSPERG (Q6ZRH7) SP+PP+ECD
MCGPAMFPAGPPWPRVRVVQVLWALLAVLLASWRLWAIKDFQECTWQVVLNEFKRVGESGVSDSFFEQEPVDTVSSLFHMLVDSPIDPSEKYLGFPYYLKINYSCEEKPSEDLVRMGHLTGLKPLVLVTFQSPVNFYRWKIEQLQIQMEAAPFRSKEPCMAEEVCSMSWYTPMPIKKGSVVMRVDISSNGLGTFIPDKRFQMNINGFLKRDRDNNIQFTVGEELFNLMPQYFVGVSSRPLWHTVDQSPVLILGGIPNEKYVLMTDTSFKDFSLVELSIDSCWVGSFYCPHSGFTATIYDTIATESTLFIRQNQLVYYFTGTYTTLYERNRGSGSWIRVLASECIKKLCPVYFHSNGSEYIMALTTGKHEGYVHFGTIRDGQVSFEMLPRQWSVCEQIGVTTCSIIWSEYIAGEYTLLLLVESGYGNASKRFQVVSYNTASDDLELLYHIPEFIPEARGLEFLMILGTESYTSTAMAPKGIFCNPYNNLIFIWGNFLLQSSNKENFIYLADFPKELSIKYMARSFRGAVAIVTETEEIWYLLEGSYRVYQLFPSKGWQVHISLKLMQQSSLYASNETMLTLFYEDSKLYQLVYLMNNQKGQLVKRLVPVEQLLMYQQHTSHYDLERKGGYLMLSFIDFCPFSVMRLRSLPSPQRYTRQERYRARPPRVLERSGFHNENSLAIYQGLVYYLLWLHSVYDKPYADPVHDPTWRWWANNKQDQDYYFFLASNWRSAGGVSIEMDSYEKIYNLESAYELPERIFLDKGTEYSFAIFLSAQGHSFRTQSELGTAFQLHSQVDVGVVLADPGCIEASVKQEVLINRNSVLFSITLKDKKLCYDQGISGHHLMETSMTVNVVGSSGLCFQETHLGPHMQGNLMVPVFIGCPPGKRLAFDITYTLEYSRLKNKHYFDCVNVNPEMPCFLFRDIFYPFFLIQDLVTGDSGSFQGSYVLLVVGGGPTLDSLKDYSEDEIYRFNSPLDKTNSLIWTTRTTRTTKDSAFHIMSHESPGIEWLCLENAPCYDNVPQGIFAPEFFFKVLVSNRGVDTSTYCNYQLTFLLHIHGLPLSPKRA

SEQ ID NO: 2130 - protein, 954 aa, synthetic construct
  REGION 1..954: note = CD101 (Q93033) SP+PP+ECD
MAGISYVASFFLLLTKLSIGQREVTVQKGPLFRAEGYPVSIGCNVTGHQGPSEQHFQWSVYLPTNPTQEVQIISTKDAAFSYAVYTQRVRSGDVYVERVQGNSVLLHISKLQMKDAGEYECHTPNTDEKYYGSYSAKTNLIVIPDTLSATMSSQTLGKEEGEPLALTCEASKATAQHTHLSVTWYLTQDGGGSQATEIISLSKDFILVPGPLYTERFAASDVQLNKLGPTTFRLSIERLQSSDQGQLFCEATEWIQDPDETWMFITKKQTDQTTLRIQPAVKDFQVNITADSLFAEGKPLELVCLVVSSGRDPQLQGIWFFNGTEIAHIDAGGVLGLKNDYKERASQGELQVSKLGPKAFSLKIFSLGPEDEGAYRCVVAEVMKTRTGSWQVLQRKQSPDSHVHLRKPAARSVVMSTKNKQQVVWEGETLAFLCKAGGAESPLSVSWWHIPRDQTQPEFVAGMGQDGIVQLGASYGVPSYHGNTRLEKMDWATFQLEITFTAITDSGTYECRVSEKSRNQARDLSWTQKISVTVKSLESSLQVSLMSRQPQVMLTNTFDLSCVVRAGYSDLKVPLTVTWQFQPASSHIFHQLIRITHNGTIEWGNFLSRFQKKTKVSQSLFRSQLLVHDATEEETGVYQCEVEVYDRNSLYNNRPPRASAISHPLRIAVTLPESKLKVNSRSQVQELSINSNTDIECSILSRSNGNLQLAIIWYFSPVSTNASWLKILEMDQTNVIKTGDEFHTPQRKQKFHTEKVSQDLFQLHILNVEDSDRGKYHCAVEEWLLSTNGTWHKLGEKKSGLTELKLKPTGSKVRVSKVYWTENVTEHREVAIRCSLESVGSSATLYSVMWYWNRENSGSKLLVHLQHDGLLEYGEEGLRRHLHCYRSSSTDFVLKLHQVEMEDAGMYWCRVAEWQLHGHPSKWINQASDESQRMVLTVLPSEPTLPSRICSSAP

SEQ ID NO: 2131 - protein, 1050 aa, synthetic construct
  REGION 1..1050: note = CD163 (Q86VB7) SP+PP+ECD
MSKLRMVLLEDSGSADFRRHFVNLSPFTITVVLLLSACFVTSSLGGTDKELRLVDGENKCSGRVEVKVQEEWGTVCNNGWSMEAVSVICNQLGCPTAIKAPGWANSSAGSGRIWMDHVSCRGNESALWDCKHDGWGKHSNCTHQQDAGVTCSDGSNLEMRLTRGGNMCSGRIEIKFQGRWGTVCDDNFNIDHASVICRQLECGSAVSFSGSSNFGEGSGPIWFDDLICNGNESALWNCKHQGWGKHNCDHAEDAGVICSKGADLSLRLVDGVTECSGRLEVRFQGEWGTICDDGWDSYDAAVACKQLGCPTAVTAIGRVNASKGFGHIWLDSVSCQGHEPAIWQCKHHEWGKHYCNHNEDAGVTCSDGSDLELRLRGGGSRCAGTVEVEIQRLLGKVCDRGWGLKEADVVCRQLGCGSALKTSYQVYSKIQATNTWLFLSSCNGNETSLWDCKNWQWGGLTCDHYEEAKITCSAHREPRLVGGDIPCSGRVEVKHGDTWGSICDSDFSLEAASVLCRELQCGTVVSILGGAHFGEGNGQIWAEEFQCEGHESHLSLCPVAPRPEGTCSHSRDVGVVCSRYTEIRLVNGKTPCEGRVELKTLGAWGSLCNSHWDIEDAHVLCQQLKCGVALSTPGGARFGKGNGQIWRHMFHCTGTEQHMGDCPVTALGASLCPSEQVASVICSGNQSQTLSSCNSSSLGPTRPTIPEESAVACIESGQLRLVNGGGRCAGRVEIYHEGSWGTICDDSWDLSDAHVVCRQLGCGEAINATGSAHFGEGTGPIWLDEMKCNGKESRIWQCHSHGWGQQNCRHKEDAGVICSEFMSLRLTSEASREACAGRLEVFYNGAWGTVGKSSMSETTVGVVCRQLGCADKGKINPASLDKAMSIPMWVDNVQCPKGPDTLWQCPSSPWEKRLASPSEETWITCDNKIRLQEGPTSCSGRVEIWHGGSWGTVCDDSWDLDDAQVVCQQLGCGPALKAFKEAEFGQGTGPIWLNEVKCKGNESSLWDCPARRWGHSECGHKEDAAVNCTDISVQKTPQKATTGRSSRQSS

SEQ ID NO: 2132 - protein, 1359 aa, synthetic construct
  REGION 1..1359: note = CD163L1 (Q9NR16) SP+PP+ECD
MMLPQNSWHIDFGRCCCHQNLFSAVVTCILLLNSCFLISSFNGTDLELRLVNGDGPCSGTVEVKFQGQWGTVCDDGWNTTASTVVCKQLGCPFSFAMFRFGQAVTRHGKIWLDDVSCYGNESALWECQHREWGSHNCYHGEDVGVNCYGEANLGLRLVDGNNSCSGRVEVKFQERWGTICDDGWNLNTAAVVCRQLGCPSSFISSGVVNSPAVLRPIWLDDILCQGNELALWNCRHRGWGNHDCSHNEDVTLTCYDSSDLELRLVGGTNRCMGRVELKIQGRWGTVCHHKWNNAAADVVCKQLGCGTALHFAGLPHLQSGSDVVWLDGVSCSGNESFLWDCRHSGTVNFDCLHQNDVSVICSDGADLELRLADGSNNCSGRVEVRIHEQWWTICDQNWKNEQALVVCKQLGCPFSVFGSRRAKPSNEARDIWINSISCTGNESALWDCTYDGKAKRTCFRRSDAGVICSDKADLDLRLVGAHSPCYGRLEVKYQGEWGTVCHDRWSTRNAAVVCKQLGCGKPLHVFGMTYFKEASGPIWLDDVSCIGNESNIWDCEHSGWGKHNCVHREDVIVTCSGDATWGLRLVGGSNRCSGRLEVYFQGRWGTVCDDGWNSKAAAVVCSQLDCPSSIIGMGLGNASTGYGKIWLDDVSCDGDESDLWSCRNSGWGNNDCSHSEDVGVICSDASDMELRLVGGSSRCAGKVEVNVQGAVGILCANGWGMNIAEVVCRQLECGSAIRVSREPHFTERTLHILMSNSGCTGGEASLWDCIRWEWKQTACHLNMEASLICSAHRQPRLVGADMPCSGRVEVKHADTWRSVCDSDFSLHAANVLCRELNCGDAISLSVGDHFGKGNGLTWAEKFQCEGSETHLALCPIVQHPEDTCIHSREVGVVCSRYTDVRLVNGKSQCDGQVEINVLGHWGSLCDTHWDPEDARVLCRQLSCGTALSTTGGKYIGERSVRVWGHRFHCLGNESLLDNCQMTVLGAPPCIHGNTVSVICTGSLTQPLFPCLANVSDPYLSAVPEGSALICLEDKRLRLVDGDSRCAGRVEIYHDGFWGTICDDGWDLSDAHVVCQKLGCGVAFNATVSAHFGEGSGPIWLDDLNCTGMESHLWQCPSRGWGQHDCRHKEDAGVICSEFTALRLYSETETESCAGRLEVFYNGTWGSVGRRNITTAIAGIVCRQLGCGENGVVSLAPLSKTGSGFMWVDDIQCPKTHISIWQCLSAPWERRISSPAEETWITCEDRIRVRGGDTECSGRVEIWHAGSWGTVCDDSWDLAEAEVVCQQLGCGSALAALRDASFGQGTGTIWLDDMRCKGNESFLWDCHAKPWGQSDCGHKEDAGVRCSGQSLKSLNASSGH

SEQ ID NO: 2133 - protein, 162 aa, synthetic construct
  REGION 1..162: note = CD164 (Q04900) SP+PP+ECD
MSRLSRSLLWAATCLGVLCVLSADKNTTQHPNVTTLAPISNVTSAPVTSLPLVTTPAPETCEGRNSCVSCFNVSVVNTTCFWIECKDESYCSHNSTVSDCQVGNTTDFCSVSTATPVPTANSTAKPTVQPSPSTTSKTVTTSGTTNNTVTPTSQPVRKSTFD

SEQ ID NO: 2134 - protein, 141 aa, synthetic construct
  REGION 1..141: note = CD164L2 (Q6UWJ8) SP+PP+ECD
MEAPGPRALRTALCGGCCCLLLCAQLAVAGKGARGFGRGALIRLNIWPAVQGACKQLEVCEHCVEGDGARNLSSCVWEQCRPEEPGHCVAQSEVVKEGCSIYNRSEACPAAHHHPTYEPKTVTTGSPPVPEAHSPGFDGAS

SEQ ID NO: 2135 - protein, 626 aa, synthetic construct
  REGION 1..626: note = CD180 (Q99467) SP+PP+ECD
MAFDVSCFFWVVLFSAGCKVITSWDQMCIEKEANKTYNCENLGLSEIPDTLPNTTEFLEFSFNFLPTIHNRTFSRLMNLTFLDLTRCQINWIHEDTFQSHHQLSTLVLTGNPLIFMAETSLNGPKSLKHLFLIQTGISNLEFIPVHNLENLESLYLGSNHISSIKFPKDFPARNLKVLDFQNNAIHYISREDMRSLEQAINLSLNFNGNNVKGIELGAFDSTIFQSLNFGGTPNLSVIFNGLQNSTTQSLWLGTFEDIDDEDISSAMLKGLCEMSVESLNLQEHRFSDISSTTFQCFTQLQELDLTATHLKGLPSGMKGLNLLKKLVLSVNHFDQLCQISAANFPSLTHLYIRGNVKKLHLGVGCLEKLGNLQTLDLSHNDIEASDCCSLQLKNLSHLQTLNLSHNEPLGLQSQAFKECPQLELLDLAFTRLHINAPQSPFQNLHFLQVLNLTYCFLDTSNQHLLAGLPVLRHLNLKGNHFQDGTITKTNLLQTVGSLEVLILSSCGLLSIDQQAFHSLGKMSHVDLSHNSLTCDSIDSLSHLKGIYLNLAANSINIISPRLLPILSQQSTINLSHNPLDCTCSNIHFLTWYKENLHKLEGSEETTCANPPSLRGVKLSDVKLSCG

SEQ ID NO: 2136 - protein, 291 aa, synthetic construct
  REGION 1..291: note = CD19 (P15391) SP+PP+ECD
MPPPRLLFFLLFLTPMEVRPEEPLVVKVEEGDNAVLQCLKGTSDGPTQQLTWSRESPLKPFLKLSLGLPGLGIHMRPLAIWLFIFNVSQQMGGFYLCQPGPPSEKAWQPGWTVNVEGSGELFRWNVSDLGGLGCGLKNRSSEGPSSPSGKLMSPKLYVWAKDRPEIWEGEPPCLPPRDSLNQSLSQDLTMAPGSTLWLSCGVPPDSVSRGPLSWTHVHPKGPKSLLSLELKDDRPARDMWVMETGLLLPRATAQDAGKYYCHRGNLTMSFHLEITARPVLWHWLLRTGGWK

SEQ ID NO: 2137 - protein, 300 aa, synthetic construct
  REGION 1..300: note = CD1A (P06126) SP+PP+ECD
MLFLLLPLLAVLPGDGNADGLKEPLSFHVTWIASFYNHSWKQNLVSGWLSDLQTHTWDSNSSTIVFLCPWSRGNFSNEEWKELETLFRIRTIRSFEGIRRYAHELQFEYPFEIQVTGGCELHSGKVSGSFLQLAYQGSDFVSFQNNSWLPYPVAGNMAKHFCKVLNQNQHENDITHNLLSDTCPRFILGLLDAGKAHLQRQVKPEAWLSHGPSPGPGHLQLVCHVSGFYPKPVWVMWMRGEQEQQGTQRGDILPSADGTWYLRATLEVAAGEAADLSCRVKHSSLEGQDIVLYWEHHSSV

SEQ ID NO: 2138 - protein, 303 aa, synthetic construct
  REGION 1..303: note = CD1B (P29016) SP+PP+ECD
MLLLPFQLLAVLFPGGNSEHAFQGPTSFHVIQTSSFTNSTWAQTQGSGWLDDLQIHGWDSDSGTAIFLKPWSKGNFSDKEVAELEEIFRVYIFGFAREVQDFAGDFQMKYPFEIQGIAGCELHSGGAIVSFLRGALGGLDFLSVKNASCVPSPEGGSRAQKFCALIIQYQGIMETVRILLYETCPRYLLGVLNAGKADLQRQVKPEAWLSSGPSPGPGRLQLVCHVSGFYPKPVWVMWMRGEQEQQGTQLGDILPNANWTWYLRATLDVADGEAAGLSCRVKHSSLEGQDIILYWRNPTSIGS

SEQ ID NO: 2139 - protein, 302 aa, synthetic construct
  REGION 1..302: note = CD1C (P29017) SP+PP+ECD
MLFLQFLLLALLLPGGDNADASQEHVSFHVIQIFSFVNQSWARGQGSGWLDELQTHGWDSESGTIIFLHNWSKGNFSNEELSDLELLFRFYLFGLTREIQDHASQDYSKYPFEVQVKAGCELHSGKSPEGFFQVAFNGLDLLSFQNTTWVPSPGCGSLAQSVCHLLNHQYEGVTETVYNLIRSTCPRFLLGLLDAGKMYVHRQVRPEAWLSSRPSLGSGQLLLVCHASGFYPKPVWVTWMRNEQEQLGTKHGDILPNADGTWYLQVILEVASEEPAGLSCRVRHSSLGGQDIILYWGHHFSM

SEQ ID NO: 2140 - protein, 301 aa, synthetic construct
  REGION 1..301: note = CD1D (P15813) SP+PP+ECD
MGCLLFLLLWALLQAWGSAEVPQRLFPLRCLQISSFANSSWTRTDGLAWLGELQTHSWSNDSDTVRSLKPWSQGTFSDQQWETLQHIFRVYRSSFTRDVKEFAKMLRLSYPLELQVSAGCEVHPGNASNNFFHVAFQGKDILSFQGTSWEPTQEAPLWVNLAIQVLNQDKWTRETVQWLLNGTCPQFVSGLLESGKSELKKQVKPKAWLSRGPSPGPGRLLLVCHVSGFYPKPVWVKWMRGEQEQQGTQPGDILPNADETWYLRATLDVVAGEAAGLSCRVKHSSLEGQDIVLYWGGSYTS

SEQ ID NO: 2141 - protein, 304 aa, synthetic construct
  REGION 1..304: note = CD1E (P15812) SP+PP+ECD
MLLLFLLFEGLCCPGENTAAPQALQSYHLAAEEQLSFRMLQTSSFANHSWAHSEGSGWLGDLQTHGWDTVLGTIRFLKPWSHGNFSKQELKNLQSLFQLYFHSFIQIVQASAGQFQLEYPFEIQILAGCRMNAPQIFLNMAYQGSDFLSFQGISWEPSPGAGIRAQNICKVLNRYLDIKEILQSLLGHTCPRFLAGLMEAGESELKRKVKPEAWLSCGPSPGPGRLQLVCHVSGFYPKPVWVMWMRGEQEQRGTQRGDVLPNADETWYLRATLDVAAGEAAGLSCRVKHSSLGGHDLIIHWGGY

SEQ ID NO: 2142 - protein, 209 aa, synthetic construct
  REGION 1..209: note = CD2 (P06729) SP+PP+ECD
MSFPCKFVASFLLIFNVSSKGAVSKEITNALETWGALGQDINLDIPSFQMSDDIDDIKWEKTSDKKKIAQFRKEKETFKEKDTYKLFKNGTLKIKHLKTDDQDIYKVSIYDTKGKNVLEKIFDLKIQERVSKPKISWTCINTTLTCEVMNGTDPELNLYQDGKHLKLSQRVITHKWTTSLSAKFKCTAGNKVSKESSVEPVSCPEKGLD

SEQ ID NO: 2143 - protein, 232 aa, synthetic construct
  REGION 1..232: note = CD200 (P41217) SP+PP+ECD
MERLVIRMPFSHLSTYSLVWVMAAVVLCTAQVQVVTQDEREQLYTPASLKCSLQNAQEALIVTWQKKKAVSPENMVTFSENHGVVIQPAYKDKINITQLGLQNSTITFWNITLEDEGCYMCLFNTFGFGKISGTACLTVYVQPIVSLHYKFSEDHLNITCSATARPAPMVFWKVPRSGIENSTVTLSHPNGTTSVTSILHIKDPKNQVGKEVICQVLHLGTVTDFKQTVNKG

SEQ ID NO: 2144 - protein, 243 aa, synthetic construct
  REGION 1..243: note = CD200R1 (Q8TD46) SP+PP+ECD
MLCPWRTANLGLLLILTIFLVAASSSLCMDEKQITQNYSKVLAEVNTSWPVKMATNAVLCCPPIALRNLIIITWEIILRGQPSCTKAYRKETNETKETNCTDERITWVSRPDQNSDLQIRPVAITHDGYYRCIMVTPDGNFHRGYHLQVLVTPEVTLFQNRNRTAVCKAVAGKPAAQISWIPEGDCATKQEYWSNGTVTVKSTCHWEVHNVSTVTCHVSHLTGNKSLYIELLPVPGAKKSAKL

SEQ ID NO: 2145 - protein, 239 aa, synthetic construct
  REGION 1..239: note = CD200R1L (Q6Q8B3) SP+PP+ECD
MSAPRLLISIIIMVSASSSSCMGGKQMTQNYSTIFAEGNISQPVLMDINAVLCCPPIALRNLIIITWEIILRGQPSCTKAYKKETNETKETNCTVERITWVSRPDQNSDLQIRPVDTTHDGYYRGIVVTPDGNFHRGYHLQVLVTPEVNLFQSRNITAVCKAVTGKPAAQISWIPEGSILATKQEYWGNGTVTVKSTCPWEGHKSTVTCHVSHLTGNKSLSVKLNSGLRTSGSPALSLL

SEQ ID NO: 2146 - protein, 687 aa, synthetic construct
  REGION 1..687: note = CD22 (P20273) SP+PP+ECD
MHLLGPWLLLLVLEYLAFSDSSKWVFEHPETLYAWEGACVWIPCTYRALDGDLESFILFHNPEYNKNTSKFDGTRLYESTKDGKVPSEQKRVQFLGDKNKNCTLSIHPVHLNDSGQLGLRMESKTEKWMERIHLNVSERPFPPHIQLPPEIQESQEVTLTCLLNFSCYGYPIQLQWLLEGVPMRQAAVTSTSLTIKSVFTRSELKFSPQWSHHGKIVTCQLQDADGKFLSNDTVQLNVKHTPKLEIKVTPSDAIVREGDSVTMTCEVSSSNPEYTTVSWLKDGTSLKKQNTFTLNLREVTKDQSGKYCCQVSNDVGPGRSEEVFLQVQYAPEPSTVQILHSPAVEGSQVEFLCMSLANPLPTNYTWYHNGKEMQGRTEEKVHIPKILPWHAGTYSCVAENILGTGQRGPGAELDVQYPPKKVTTVIQNPMPIREGDTVTLSCNYNSSNPSVTRYEWKPHGAWEEPSLGVLKIQNVGWDNTTIACAACNSWCSWASPVALNVQYAPRDVRVRKIKPLSEIHSGNSVSLQCDFSSSHPKEVQFFWEKNGRLLGKESQLNFDSISPEDAGSYSCWVNNSIGQTASKAWTLEVLYAPRRLRVSMSPGDQVMEGKSATLTCESDANPPVSHYTWFDWNNQSLPYHSQKLRLEPVKVQHSGAYWCQGTNSVGKGRSPLSTLTVYYSPETIGRR

SEQ ID NO: 2147 - protein, 254 aa, synthetic construct
  REGION 1..254: note = CD226 (Q15762) SP+PP+ECD
MDYPTLLLALLHVYRALCEEVLWHTSVPFAENMSLECVYPSMGILTQVEWFKIGTQQDSIAIFSPTHGMVIRKPYAERVYFLNSTMASNNMTLFFRNASEDDVGYYSCSLYTYPQGTWQKVIQVVQSDSFEAAVPSNSHIVSEPGKNVTLTCQPQMTWPVQAVRWEKIQPRQIDLLTYCNLVHGRNFTSKFPRQIVSNCSHGRWSVIVIPDVTVSDSGLYRCYLQASAGENETFVMRLTVAEGKTDNQYTLFVA

SEQ ID NO: 2148 - protein, 229 aa, synthetic construct
  REGION 1..229: note = CD244 (Q9BZW8) SP+PP+ECD
MLGQVVTLILLLLLKVYQGKGCQGSADHVVSISGVPLQLQPNSIQTKVDSIAWKKLLPSQNGFHHILKWENGSLPSNTSNDRFSFIVKNLSLLIKAAQQQDSGLYCLEVTSISGKVQTATFQVFVFESLLPDKVEKPRLQGQGKILDRGRCQVALSCLVSRDGNVSYAWYRGSKLIQTAGNLTYLDEEVDINGTHTYTCNVSNPVSWESHTLNLTQDCQNAHQEFRFWP

SEQ ID NO: 2149 - protein, 687 aa, synthetic construct
  REGION 1..687: note = CD248 (Q9HCU0) SP+PP+ECD
MLLRLLLAWAAAGPTLGQDPWAAEPRAACGPSSCYALFPRRRTFLEAWRACRELGGDLATPRTPEEAQRVDSLVGAGPASRLLWIGLQRQARQCQLQRPLRGFTWTTGDQDTAFTNWAQPASGGPCPAQRCVALEASGEHRWLEGSCTLAVDGYLCQFGFEGACPALQDEAGQAGPAVYTTPFHLVSTEFEWLPFGSVAAVQCQAGRGASLLCVKQPEGGVGWSRAGPLCLGTGCSPDNGGCEHECVEEVDGHVSCRCTEGFRLAADGRSCEDPCAQAPCEQQCEPGGPQGYSCHCRLGFRPAEDDPHRCVDTDECQIAGVCQQMCVNYVGGFECYCSEGHELEADGISCSPAGAMGAQASQDLGDELLDDGEDEEDEDEAWKAFNGGWTEMPGILWMEPTQPPDFALAYRPSFPEDREPQIPYPEPTWPPPLSAPRVPYHSSVLSVTRPVVVSATHPTLPSAHQPPVIPATHPALSRDHQIPVIAANYPDLPSAYQPGILSVSHSAQPPAHQPPMISTKYPELFPAHQSPMFPDTRVAGTQTTTHLPGIPPNHAPLVTTLGAQLPPQAPDALVLRTQATQLPIIPTAQPSLTTTSRSPVSPAHQISVPAATQPAALPTLLPSQSPTNQTSPISPTHPHSKAPQIPREDGPSPKLALWLPSPAPTAAPTALGEAGLAEHSQRDDRWL

SEQ ID NO: 2150 - protein, 191 aa, synthetic construct
  REGION 1..191: note = CD27 (P26842) SP+PP+ECD
MARPHPWWLCVLGTLVGLSATPAPKSCPERHYWAQGKLCCQMCEPGTFLVKDCDQHRKAAQCDPCIPGVSFSPDHHTRPHCESCRHCNSGLLVRNCTITANAECACRNGWQCRDKECTECDPLPNPSLTARSSQALSPHPQPTHLPYVSEMLEARTAGHMQTLADFRQLPARTLSTHWPPQRSLCSSDFIR

SEQ ID NO: 2151 - protein, 238 aa, synthetic construct
  REGION 1..238: note = CD274 (Q9NZQ7) SP+PP+ECD
MRIFAVFIFMTYWHLLNAFTVTVPKDLYVVEYGSNMTIECKFPVEKQLDLAALIVYWEMEDKNIIQFVHGEEDLKVQHSSYRQRARLLKDQLSLGNAALQITDVKLQDAGVYRCMISYGGADYKRITVKVNAPYNKINQRILVVDPVTSEHELTCQAEGYPKAEVIWTSSDHQVLSGKTTTTNSKREEKLFNVTSTLRINTTTNEIFYCTFRRLDPEENHTAELVIPELPLAHPPNER

SEQ ID NO: 2152 - protein, 466 aa, synthetic construct
  REGION 1..466: note = CD276 (Q5ZPR3) SP+PP+ECD
MLRRRGSPGMGVHVGAALGALWFCLTGALEVQVPEDPVVALVGTDATLCCSFSPEPGFSLAQLNLIWQLTDTKQLVHSFAEGQDQGSAYANRTALFPDLLAQGNASLRLQRVRVADEGSFTCFVSIRDFGSAAVSLQVAAPYSKPSMTLEPNKDLRPGDTVTITCSSYQGYPEAEVFWQDGQGVPLTGNVTTSQMANEQGLFDVHSILRVVLGANGTYSCLVRNPVLQQDAHSSVTITPQRSPTGAVEVQVPEDPVVALVGTDATLRCSFSPEPGFSLAQLNLIWQLTDTKQLVHSFTEGRDQGSAYANRTALFPDLLAQGNASLRLQRVRVADEGSFTCFVSIRDFGSAAVSLQVAAPYSKPSMTLEPNKDLRPGDTVTITCSSYRGYPEAEVFWQDGQGVPLTGNVTTSQMANEQGLFDVHSVLRVVLGANGTYSCLVRNPVLQQDAHGSVTITGQPMTFPPEA

SEQ ID NO: 2153 - protein, 152 aa, synthetic construct
  REGION 1..152: note = CD28 (P10747) SP+PP+ECD
MLRLLLALNLFPSIQVTGNKILVKQSPMLVAYDNAVNLSCKYSYNLFSREFRASLHKGLDSAVEVCVVYGNYSQQLQVYSKTGFNCDGKLGNESVTFYLQNLYVNQTDIYFCKIEVMYPPPYLDNEKSNGTIIHVKGKHLCPSPLFPGPSKP

SEQ ID NO: 2154 - protein, 180 aa, synthetic construct
  REGION 1..180: note = CD300A (Q9UGN4) SP+PP+ECD
MWLPWALLLLWVPGCFALSKCRTVAGPVGGSLSVQCPYEKEHRTLNKYWCRPPQIFLCDKIVETKGSAGKRNGRVSIRDSPANLSFTVTLENLTEEDAGTYWCGVDTPWLRDFHDPVVEVEVSVFPASTSMTPASITAAKTSTITTAFPPVSSTTLFAVGATHSASIQEETEEVVNSQLP

SEQ ID NO: 2155 - protein, 183 aa, synthetic construct
  REGION 1..183: note = CD300C (Q08708) SP+PP+ECD
MTARAWASWRSSALLLLLVPGYFPLSHPMTVAGPVGGSLSVQCRYEKEHRTLNKFWCRPPQILRCDKIVETKGSAGKRNGRVSIRDSPANLSFTVTLENLTEEDAGTYWCGVDTPWLRDFHDPIVEVEVSVFPAGTTTASSPQSSMGTSGPPTKLPVHTWPSVTRKDSPEPSPHPGSLFSNVR

SEQ ID NO: 2156 - protein, 173 aa, synthetic construct
  REGION 1..173: note = CD300E (Q496F6) SP+PP+ECD
MWLLPALLLLCLSGCLSLKGPGSVTGTAGDSLTVWCQYESMYKGYNKYWCRGQYDTSCESIVETKGEEKVERNGRVSIRDHPEALAFTVTMQNLNEDDAGSYWCKIQTVWVLDSWSRDPSDLVRVYVSPAITTPRRTTHPATPPIFLVVNPGRNLSTGEVLTQNSGFRLSSPH

SEQ ID NO: 2157 - protein, 165 aa, synthetic construct
  REGION 1..165: note = CD300LD (Q6UXZ3) SP+PP+ECD
MWLSPSLLLLILPGYSIAAKITGPTTVNGSEQGSLTVQCAYGSGWETYLKWRCQGADWNYCNILVKTNGSEQEVKKNRVSIRDNQKNHVFTVTMENLKRDDADSYWCGTERPGIDLGVKVQVTINPGTQTAVSEWTTTTASLAFTAAATQKTSSPLTRSPLKSTH

SEQ ID NO: 2158 - protein, 156 aa, synthetic construct
  REGION 1..156: note = CD300LF (Q8TDQ1) SP+PP+ECD
MPLLTLYLLLFWLSGYSIVTQITGPTTVNGLERGSLTVQCVYRSGWETYLKWWCRGAIWRDCKILVKTSGSEQEVKRDRVSIKDNQKNRTFTVTMEDLMKTDADTYWCGIEKTGNDLGVTVQVTIDPAPVTQEETSSSPTLTGHHLDNRHKLLKLS

SEQ ID NO: 2159 - protein, 247 aa, synthetic construct
  REGION 1..247: note = CD300LG (Q6UXG3) SP+PP+ECD
MRLLVLLWGCLLLPGYEALEGPEEISGFEGDTVSLQCTYREELRDHRKYWCRKGGILFSRCSGTIYAEEEGQETMKGRVSIRDSRQELSLIVTLWNLTLQDAGEYWCGVEKRGPDESLLISLFVFPGPCCPPSPSPTFQPLATTRLQPKAKAQQTQPPGLTSPGLYPAATTAKQGKTGAEAPPLPGTSQYGHERTSQYTGTSPHPATSPPAGSSRPPMQLDSTSAEDTSPALSSGSSKPRVSIPMVR

SEQ ID NO: 2160 - protein, 168 aa, synthetic construct
  REGION 1..168: note = CD302 (Q8IX05) SP+PP+ECD
MLRAALPALLLPLLGLAAAAVADCPSSTWIQFQDSCYIFLQEAIKVESIEDVRNQCTDHGADMISIHNEEENAFILDTLKKQWKGPDDILLGMFYDTDDASFKWFDNSNMTFDKWTDQDDDEDLVDTCAFLHIKTGEWKKGNCEVSSVEGTLCKTAIPYKRKYLSDNH

SEQ ID NO: 2161 - protein, 229 aa, synthetic construct
  REGION 1..229: note = CD320 (Q9NPF0) SP+PP+ECD
MSGGWMAQVGAWRTGALGLALLLLLGLGLGLEAAASPLSTPTSAQAAGPSSGSCPPTKFQCRTSGLCVPLTWRCDRDLDCSDGSDEEECRIEPCTQKGQCPPPPGLPCPCTGVSDCSGGTDKKLRNCSRLACLAGELRCTLSDDCIPLTWRCDGHPDCPDSSDELGCGTNEILPEGDATTMGPPVTLESVTSLRNATTMGPPVTLESVPSVGNATSSSAGDQSGSPTAY

SEQ ID NO: 2162 - protein, 259 aa, synthetic construct
  REGION 1..259: note = CD33 (P20138) SP+PP+ECD
MPLLLLLPLLWAGALAMDPNFWLQVQESVTVQEGLCVLVPCTFFHPIPYYDKNSPVHGYWFREGAIISRDSPVATNKLDQEVQEETQGRFRLLGDPSRNNCSLSIVDARRRDNGSYFFRMERGSTKYSYKSPQLSVHVTDLTHRPKILIPGTLEPGHSKNLTCSVSWACEQGTPPIFSWLSAAPTSLGPRTTHSSVLIITPRPQDHGTNLTCQVKFAGAGVTTERTIQLNVTYVPQNPTTGIFPGDGSGKQETRAGVVH

SEQ ID NO: 2163 - protein, 290 aa, synthetic construct
  REGION 1..290: note = CD34 (P28906) SP+PP+ECD
MLVRRGARAGPRMPRGWTALCLLSLLPSGFMSLDNNGTATPELPTQGTFSNVSTNVSYQETTTPSTLGSTSLHPVSQHGNEATTNITETTVKFTSTSVITSVYGNTNSSVQSQTSVISTVFTTPANVSTPETTLKPSLSPGNVSDLSTTSTSLATSPTKPYTSSSPILSDIKAEIKCSGIREVKLTQGICLEQNKTSSCAEFKKDRGEGLARVLCGEEQADADAGAQVCSLLLAQSEVRPQCLLLVLANRTEISSKLQLMKKHQSDLKKLGILDFTEQDVASHQSYSQKT

SEQ ID NO: 2164 - protein, 105 aa, synthetic construct
  REGION 1..105: note = CD3D (P04234) SP+PP+ECD
MEHSTFLSGLVLATLLSQVSPFKIPIEELEDRVFVNCNTSITWVEGTVGTLLSDITRLDLGKRILDPRGIYRCNGTDIYKDKESTVQVHYRMCQSCVELDPATVA

SEQ ID NO: 2165 - protein, 116 aa, synthetic construct
  REGION 1..116: note = CD3G (P09693) SP+PP+ECD
MEQGKGLAVLILAIILLQGTLAQSIKGNHLVKVYDYQEDGSVLLTCDAEAKNITWFKDGKMIGFLTEDKKKWNLGSNAKDPRGMYQCKGSQNKSKPLQVYYRMCQNCIELNAATIS

SEQ ID NO: 2166 - protein, 396 aa, synthetic construct
  REGION 1..396: note = CD4 (P01730) SP+PP+ECD
MNRGVPFRHLLLVLQLALLPAATQGKKVVLGKKGDTVELTCTASQKKSIQFHWKNSNQIKILGNQGSFLTKGPSKLNDRADSRRSLWDQGNFPLIIKNLKIEDSDTYICEVEDQKEEVQLLVFGLTANSDTHLLQGQSLTLTLESPPGSSPSVQCRSPRGKNIQGGKTLSVSQLELQDSGTWTCTVLQNQKKVEFKIDIVVLAFQKASSIVYKKEGEQVEFSFPLAFTVEKLTGSGELWWQAERASSSKSWITFDLKNKEVSVKRVTQDPKLQMGKKLPLHLTLPQALPQYAGSGNLTLALEAKTGKLHQEVNLVVMRATQLQKNLTCEVWGPTSPKLMLSLKLENKEAKVSKREKAVWVLNPEAGMWQCLLSDSGQVLLESNIKVLPTWSTPVQP

SEQ ID NO: 2167 - protein, 193 aa, synthetic construct
  REGION 1..193: note = CD40 (P25942) SP+PP+ECD
MVRLPLQCVLWGCLLTAVHPEPPTACREKQYLINSQCCSLCQPGQKLVSDCTEFTETECLPCGESEFLDTWNRETHCHQHKYCDPNLGLRVQQKGTSETDTICTCEEGWHCTSEACESCVLHRSCSPGFGVKQIATGVSDTICEPCPVGFFSNVSSAFEKCHPWTSCETKDLVVQQAGTNKTDVVCGPQDRLR

SEQ ID NO: 2168 - protein, 649 aa, synthetic construct
  REGION 1..649: note = CD44 (P16070) SP+PP+ECD
MDKFWWHAAWGLCLVPLSLAQIDLNITCRFAGVFHVEKNGRYSISRTEAADLCKAFNSTLPTMAQMEKALSIGFETCRYGFIEGHVVIPRIHPNSICAANNTGVYILTSNTSQYDTYCFNASAPPEEDCTSVTDLPNAFDGPITITIVNRDGTRYVQKGEYRTNPEDIYPSNPTDDDVSSGSSSERSSTSGGYIFYTFSTVHPIPDEDSPWITDSTDRIPATTLMSTSATATETATKRQETWDWFSWLFLPSESKNHLHTTTQMAGTSSNTISAGWEPNEENEDERDRHLSFSGSGIDDDEDFISSTISTTPRAFDHTKQNQDWTQWNPSHSNPEVLLQTTTRMTDVDRNGTTAYEGNWNPEAHPPLIHHEHHEEEETPHSTSTIQATPSSTTEETATQKEQWFGNRWHEGYRQTPKEDSHSTTGTAAASAHTSHPMQGRTTPSPEDSSWTDFFNPISHPMGRGHQAGRRMDMDSSHSITLQPTANPNTGLVEDLDRTGPLSMTTQQSNSQSFSTSHEGLEEDKDHPTTSTLTSSNRNDVTGGRRDPNHSEGSTTLLEGYTSHYPHTKESRTFIPVTSAKTGSFGVTAVTVGDSNSNVNRSLSGDQDTFHPSGGSHTTHGSESDGHSHGSQEGGANTTSGPIRTPQIPE

SEQ ID NO: 2169 - protein, 343 aa, synthetic construct
  REGION 1..343: note = CD46 (P15529) SP+PP+ECD
MEPPGRRECPFPSWRFPGLLLAAMVLLLYSFSDACEEPPTFEAMELIGKPKPYYEIGERVDYKCKKGYFYIPPLATHTICDRNHTWLPVSDDACYRETCPYIRDPLNGQAVPANGTYEFGYQMHFICNEGYYLIGEEILYCELKGSVAIWSGKPPICEKVLCTPPPKIKNGKHTFSEVEVFEYLDAVTYSCDPAPGPDPFSLIGESTIYCGDNSVWSRAAPECKVVKCRFPVVENGKQISGFGKKFYYKATVMFECDKGFYLDGSDTIVCDSNSTWDPPVPKCLKVLPPSSTKPPALSHSVSTSSTTKSPASSASGPRPTYKPPVSNYPGYPKPEEGILDSLD

SEQ ID NO: 2170 - protein, 372 aa, synthetic construct
  REGION 1..372: note = CD5 (P06127) SP+PP+ECD
MPMGSLQPLATLYLLGMLVASCLGRLSWYDPDFQARLTRSNSKCQGQLEVYLKDGWHMVCSQSWGRSSKQWEDPSQASKVCQRLNCGVPLSLGPFLVTYTPQSSIICYGQLGSFSNCSHSRNDMCHSLGLTCLEPQKTTPPTTRPPPTTTPEPTAPPRLQLVAQSGGQHCAGVVEFYSGSLGGTISYEAQDKTQDLENFLCNNLQCGSFLKHLPETEAGRAQDPGEPREHQPLPIQWKIQNSSCTSLEHCFRKIKPQKSGRVLALLCSGFQPKVQSRLVGGSSICEGTVEVRQGAQWAALCDSSSARSSLRWEEVCREQQCGSVNSYRVLDAGDPTSRGLFCPHQKLSQCHELWERNSYCKKVFVTCQDPNP

SEQ ID NO: 2171 - protein, 215 aa, synthetic construct
  REGION 1..215: note = CD58 (P19256) SP+PP+ECD
MVAGSDAGRALGVLSVVCLLHCFGFISCFSQQIYGVVYGNVTFHVPSNVPLKEVLWKKQKDKVAELENSEFRAFSSFKNRVYLDTVSGSLTIYNLTSSDEDEYEMESPNITDTMKFFLYVLESLPSPTLTCALTNGSIEVQCMIPEHYNSHRGLIMYSWDCPMEQCKRNSTSIYFKMENDLPQKIQCTLSNPLFNTTSSIILTTCIPSSGHSRHR

SEQ ID NO: 2172 - protein, 402 aa, synthetic construct
  REGION 1..402: note = CD6 (P30203) SP+PP+ECD
MWLFFGITGLLTAALSGHPSPAPPDQLNTSSAESELWEPGERLPVRLTNGSSSCSGTVEVRLEASWEPACGALWDSRAAEAVCRALGCGGAEAASQLAPPTPELPPPPAAGNTSVAANATLAGAPALLCSGAEWRLCEVVEHACRSDGRRARVTCAENRALRLVDGGGACAGRVEMLEHGEWGSVCDDTWDLEDAHVVCRQLGCGWAVQALPGLHFTPGRGPIHRDQVNCSGAEAYLWDCPGLPGQHYCGHKEDAGAVCSEHQSWRLTGGADRCEGQVEVHFRGVWNTVCDSEWYPSEAKVLCQSLGCGTAVERPKGLPHSLSGRMYYSCNGEELTLSNCSWRFNNSNLCSQSLAARVLCSASRSLHNLSTPEVPASVQTVTIESSVTVKIENKESRELMLL

SEQ ID NO: 2173 - protein, 319 aa, synthetic construct
  REGION 1..319: note = CD68 (P34810) SP+PP+ECD
MRLAVLFSGALLGLLAAQGTGNDCPHKKSATLLPSFTVTPTVTESTGTTSHRTTKSHKTTTHRTTTTGTTSHGPTTATHNPTTTSHGNVTVHPTSNSTATSQGPSTATHSPATTSHGNATVHPTSNSTATSPGFTSSAHPEPPPPSPSPSPTSKETIGDYTWTNGSQPCVHLQAQIQIRVMYTTQGGGEAWGISVLNPNKTKVQGSCEGAHPHLLLSFPYGHLSFGFMQDLQQKVVYLSYMAVEYNVSFPHAAQWTFSAQNASLRDLQAPLGQSFSCSNSSIILSPAVHLDLLSLRLQAAQLPHTGVFGQSFSCPSDRS

SEQ ID NO: 2174 - protein, 180 aa, synthetic construct
  REGION 1..180: note = CD7 (P09564) SP+PP+ECD
MAGPPRLLLLPLLLALARGLPGALAAQEVQQSPHCTTVPVGASVNITCSTSGGLRGIYLRQLGPQPQDIIYYEDGVVPTTDRRFRGRIDFSGSQDNLTITMHRLQLSDTGTYTCQAITEVNVYGSGTLVLVTEEQSQGWHRCSDAPPRASALPAPPTGSALPDPQTASALPDPPAASALP

SEQ ID NO: 2175 - protein, 143 aa, synthetic construct
  REGION 1..143: note = CD79A (P11912) SP+PP+ECD
MPGGPGVLQALPATIFLLFLLSAVYLGPGCQALWMHKVPASLMVSLGEDAHFQCPHNSSNNANVTWWRVLHGNYTWPPEFLGPGEDPNGTLIIQNVNKSHGGIYVCRVQEGNESYQQSCGTYLRVRQPPPRPFLDMGEGTKNR

SEQ ID NO: 2176 - protein, 159 aa, synthetic construct
  REGION 1..159: note = CD79B (P40259) SP+PP+ECD
MARLALSPVPSHWMVALLLLLSAEPVPAARSEDRYRNPKGSACSRIWQSPRFIARKRGFTVKMHCYMNSASGNVSWLWKQEMDENPQQLKLEKGRMEESQNESLATLTIQGIRFEDNGIYFCQQKCNNTSEVYQGCGTELRVMGFSTLAQLKQRNTLKD

SEQ ID NO: 2177 - protein, 242 aa, synthetic construct
  REGION 1..242: note = CD80 (P33681) SP+PP+ECD
MGHTRRQGTSPSKCPYLNFFQLLVLAGLSHFCSGVIHVTKEVKEVATLSCGHNVSVEELAQTRIYWQKEKKMVLTMMSGDMNIWPEYKNRTIFDITNNLSIVILALRPSDEGTYECVVLKYEKDAFKREHLAEVTLSVKADFPTPSISDFEIPTSNIRRIICSTSGGFPEPHLSWLENGEELNAINTTVSQDPETELYAVSSKLDFNMTTNHSFMCLIKYGHLRVNQTFNWNTTKQEHFPDN

SEQ ID NO: 2178 - protein, 144 aa, synthetic construct
  REGION 1..144: note = CD83 (Q01151) SP+PP+ECD
MSRGLQLLLLSCAYSLAPATPEVKVACSEDVDLPCTAPWDPQVPYTVSWVKLLEGGEERMETPQEDHLRGQHYHQKGQNGSFDAPNERPYSLKIRNTTSCNSGTYRCTLQDPDGQRNLSGKVILRVTGCPAQRKEETFKKYRAE

SEQ ID NO: 2179 - protein, 225 aa, synthetic construct
  REGION 1..225: note = CD84 (Q9UIB8) SP+PP+ECD
MAQHHLWILLLCLQTWPEAAGKDSEIFTVNGILGESVTFPVNIQEPRQVKIIAWTSKTSVAYVTPGDSETAPVVTVTHRNYYERIHALGPNYNLVISDLRMEDAGDYKADINTQADPYTTTKRYNLQIYRRLGKPKITQSLMASVNSTCNVTLTCSVEKEEKNVTYNWSPLGEEGNVLQIFQTPEDQELTYTCTAQNPVSNNSDSISARQLCADIAMGFRTHHTG

SEQ ID NO: 2180 - protein, 247 aa, synthetic construct
  REGION 1..247: note = CD86 (P42081) SP+PP+ECD
MDPQCTMGLSNILFVMAFLLSGAAPLKIQAYFNETADLPCQFANSQNQSLSELVVFWQDQENLVLNEVYLGKEKFDSVHSKYMGRTSFDSDSWTLRLHNLQIKDKGLYQCIIHHKKPTGMIRIHQMNSELSVLANFSQPEIVPISNITENVYINLTCSSIHGYPEPKKMSVLLRTKNSTIEYDGVMQKSQDNVTELYDVSISLSVSFPDVTSNMTIFCILETDKTRLLSSPFSIELEDPQPPPDHIP

SEQ ID NO: 2181 - protein, 182 aa, synthetic construct
  REGION 1..182: note = CD8A (P01732) SP+PP+ECD
MALPVTALLLPLALLLHAARPSQFRVSPLDRTWNLGETVELKCQVLLSNPTSGCSWLFQPRGAAASPTFLLYLSQNKPKAAEGLDTQRFSGKRLGDTFVLTLSDFRRENEGYYFCSALSNSIMYFSHFVPVFLPAKPTTTPAPRPPTPAPTIASQPLSLRPEACRPAAGGAVHTRGLDFACD

SEQ ID NO: 2182 - protein, 170 aa, synthetic construct
  REGION 1..170: note = CD8B (P10966) SP+PP+ECD
MRPRLWLLLAAQLTVLHGNSVLQQTPAYIKVQTNKMVMLSCEAKISLSNMRIYWLRQRQAPSSDSHHEFLALWDSAKGTIHGEEVEQEKIAVFRDASRFILNLTSVKPEDSGIYFCMIVGSPELTFGKGTQLSVVDFLPTTAQPTKKSTLKKRVCRLPRPETQKGPLCSP

SEQ ID NO: 2183 - protein, 170 aa, synthetic construct
  REGION 1..170: note = CD8BP (A6NJW9) SP+PP+ECD
MRPRLWLLLAAQLTVLHGNSVLQQTPAYIKVQTNKMVMLSCEAKISLSNMCIYWLRQRQAPSSDSHHEFLTLWDSAKGTIHGEEVEQEKIAVFRDASRFILNLTSVKPEDSGIYFCMIVGSPELTFGKGTQLSVVDFLPTTAQPTKKSTLKKRVCRLPRPETQKGPLCSP

SEQ ID NO: 2184 - protein, 580 aa, synthetic construct
  REGION 1..580: note = CD93 (Q9NPY3) SP+PP+ECD
MATSMGLLLLLLLLLTQPGAGTGADTEAVVCVGTACYTAHSGKLSAAEAQNHCNQNGGNLATVKSKEEAQHVQRVLAQLLRREAALTARMSKFWIGLQREKGKCLDPSLPLKGFSWVGGGEDTPYSNWHKELRNSCISKRCVSLLLDLSQPLLPSRLPKWSEGPCGSPGSPGSNIEGFVCKFSFKGMCRPLALGGPGQVTYTTPFQTTSSSLEAVPFASAANVACGEGDKDETQSHYFLCKEKAPDVFDWGSSGPLCVSPKYGCNFNNGGCHQDCFEGGDGSFLCGCRPGFRLLDDLVTCASRNPCSSSPCRGGATCVLGPHGKNYTCRCPQGYQLDSSQLDCVDVDECQDSPCAQECVNTPGGFRCECWVGYEPGGPGEGACQDVDECALGRSPCAQGCTNTDGSFHCSCEEGYVLAGEDGTQCQDVDECVGPGGPLCDSLCFNTQGSFHCGCLPGWVLAPNGVSCTMGPVSLGPPSGPPDEEDKGEKEGSTVPRAATASPTRGPEGTPKATPTTSRPSLSSDAPITSAPLKMLAPSGSPGVWREPSIHHATAASGPQEPAGGDSSVATQNNDGTDGQK

SEQ ID NO: 2185 - protein, 519 aa, synthetic construct
  REGION 1..519: note = CD96 (P40200) SP+PP+ECD
MEKKWKYCAVYYIIQIHFVKGVWEKTVNTEENVYATLGSDVNLTCQTQTVGFFVQMQWSKVTNKIDLIAVYHPQYGFYCAYGRPCESLVTFTETPENGSKWTLHLRNMSCSVSGRYECMLVLYPEGIQTKIYNLLIQTHVTADEWNSNHTIEIEINQTLEIPCFQNSSSKISSEFTYAWSVENSSTDSWVLLSKGIKEDNGTQETLISQNHLISNSTLLKDRVKLGTDYRLHLSPVQIFDDGRKFSCHIRVGPNKILRSSTTVKVFAKPEIPVIVENNSTDVLVERRFTCLLKNVFPKANITWFIDGSFLHDEKEGIYITNEERKGKDGFLELKSVLTRVHSNKPAQSDNLTIWCMALSPVPGNKVWNISSEKITFLLGSEISSTDPPLSVTESTLDTQPSPASSVSPARYPATSSVTLVDVSALRPNTTPQPSNSSMTTRGFNYPWTSSGTDTKKSVSRIPSETYSSSPSGAGSTLHDNVFTSTARAFSEVPTTANGSTKTNHVHITGIVVNKPKDGM

SEQ ID NO: 2186 - protein, 667 aa, synthetic construct
  REGION 1..667: note = CDCP1 (Q9H5V8) SP+PP+ECD
MAGLNCGVSIALLGVLLLGAARLPRGAEAFEIALPRESNITVLIKLGTPTLLAKPCYIVISKRHITMLSIKSGERIVFTFSCQSPENHFVIEIQKNIDCMSGPCPFGEVQLQPSTSLLPTLNRTFIWDVKAHKSIGLELQFSIPRLRQIGPGESCPDGVTHSISGRIDATVVRIGTFCSNGTVSRIKMQEGVKMALHLPWFHPRNVSGFSIANRSSIKRLCIIESVFEGEGSATLMSANYPEGFPEDELMTWQFVVPAHLRASVSFLNFNLSNCERKEERVEYYIPGSTTNPEVFKLEDKQPGNMAGNFNLSLQGCDQDAQSPGILRLQFQVLVQHPQNESNKIYVVDLSNERAMSLTIEPRPVKQSRKFVPGCFVCLESRTCSSNLTLTSGSKHKISFLCDDLTRLWMNVEKTISCTDHRYCQRKSYSLQVPSDILHLPVELHDFSWKLLVPKDRLSLVLVPAQKLQQHTHEKPCNTSFSYLVASAIPSQDLYFGSFCPGGSIKQIQVKQNISVTLRTFAPSFQQEASRQGLTVSFIPYFKEEGVFTVTPDTKSKVYLRTPNWDRGLPSLTSVSWNISVPRDQVACLTFFKERSGVVCQTGRAFMIIQEQRTRAEEIFSLDEDVLPKPSFHHHSFWVNISNCSPTSGKQLDLLFSVTLTPRTVDLT

SEQ ID NO: 2187 - protein, 709 aa, synthetic construct
  REGION 1..709: note = CDH1 (P12830) SP+PP+ECD
MGPWSRSLSALLLLLQVSSWLCQEPEPCHPGFDAESYTFTVPRRHLERGRVLGRVNFEDCTGRQRTAYFSLDTRFKVGTDGVITVKRPLRFHNPQIHFLVYAWDSTYRKFSTKVTLNTVGHHHRPPPHQASVSGIQAELLTFPNSSPGLRRQKRDWVIPPISCPENEKGPFPKNLVQIKSNKDKEGKVFYSITGQGADTPPVGVFIIERETGWLKVTEPLDRERIATYTLFSHAVSSNGNAVEDPMEILITVTDQNDNKPEFTQEVFKGSVMEGALPGTSVMEVTATDADDDVNTYNAAIAYTILSQDPELPDKNMFTINRNTGVISVVTTGLDRESFPTYTLVVQAADLQGEGLSTTATAVITVTDTNDNPPIFNPTTYKGQVPENEANVVITTLKVTDADAPNTPAWEAVYTILNDDGGQFVVTTNPVNNDGILKTAKGLDFEAKQQYILHVAVTNVVPFEVSLTTSTATVTVDVLDVNEAPIFVPPEKRVEVSEDFGVGQEITSYTAQEPDTFMEQKITYRIWRDTANWLEINPDTGAISTRAELDREDFEHVKNSTYTALIIATDNGSPVATGTGTLLLILSDVNDNAPIPEPRTIFFCERNPKPQVINIIDADLPPNTSPFTAELTHGASANWTIQYNDPTQESIILKPKMALEVGDYKINLKLMDNQNKDQVTTLEVSVCDCEGAAGVCRKAQPVEAGLQIPA

SEQ ID NO: 2188 - protein, 613 aa, synthetic construct
  REGION 1..613: note = CDH10 (Q9Y6N8) SP+PP+ECD
MTIHQFLLLFLFWVCLPHFCSPEIMFRRTPVPQQRILSSRVPRSDGKILHRQKRGWMWNQFFLLEEYTGSDYQYVGKLHSDQDKGDGSLKYILSGDGAGTLFIIDEKTGDIHATRRIDREEKAFYTLRAQAINRRTLRPVEPESEFVIKIHDINDNEPTFPEEIYTASVPEMSVVGTSVVQVTATDADDPSYGNSARVIYSILQGQPYFSVEPETGIIRTALPNMNRENREQYQVVIQAKDMGGQMGGLSGTTTVNITLTDVNDNPPRFPQNTIHLRVLESSPVGTAIGSVKATDADTGKNAEVEYRIIDGDGTDMFDIVTEKDTQEGIITVKKPLDYESRRLYTLKVEAENTHVDPRFYYLGPFKDTTIVKISIEDVDEPPVFSRSSYLFEVHEDIEVGTIIGTVMARDPDSISSPIRFSLDRHTDLDRIFNIHSGNGSLYTSKPLDRELSQWHNLTVIAAEINNPKETTRVAVFVRILDVNDNAPQFAVFYDTFVCENARPGQLIQTISAVDKDDPLGGQKFFFSLAAVNPNFTVQDNEDNTARILTRKNGFNRHEISTYLLPVVISDNDYPIQSSTGTLTIRVCACDSQGNMQSCSAEALLLPAGLSTGA

SEQ ID NO: 2189 - protein, 617 aa, synthetic construct
  REGION 1..617: note = CDH11 (P55287) SP+PP+ECD
MKENYCLQAALVCLGMLCHSHAFAPERRGHLRPSFHGHHEKGKEGQVLQRSKRGWVWNQFFVIEEYTGPDPVLVGRLHSDIDSGDGNIKYILSGEGAGTIFVIDDKSGNIHATKTLDREERAQYTLMAQAVDRDTNRPLEPPSEFIVKVQDINDNPPEFLHETYHANVPERSNVGTSVIQVTASDADDPTYGNSAKLVYSILEGQPYFSVEAQTGIIRTALPNMDREAKEEYHVVIQAKDMGGHMGGLSGTTKVTITLTDVNDNPPKFPQSVYQMSVSEAAVPGEEVGRVKAKDPDIGENGLVTYNIVDGDGMESFEITTDYETQEGVIKLKKPVDFETKRAYSLKVEAANVHIDPKFISNGPFKDTVTVKISVEDADEPPMFLAPSYIHEVQENAAAGTVVGRVHAKDPDAANSPIRYSIDRHTDLDRFFTINPEDGFIKTTKPLDREETAWLNITVFAAEIHNRHQEAKVPVAIRVLDVNDNAPKFAAPYEGFICESDQTKPLSNQPIVTISADDKDDTANGPRFIFSLPPEIIHNPNFTVRDNRDNTAGVYARRGGFSRQKQDLYLLPIVISDGGIPPMSSTNTLTIKVCGCDVNGALLSCNAEAYILNAGLST

SEQ ID NO: 2190 - protein, 609 aa, synthetic construct
  REGION 1..609: note = CDH12 (P55289) SP+PP+ECD
MLTRNCLSLLLWVLFDGGLLTPLQPQPQQTLATEPRENVIHLPGQRSHFQRVKRGWVWNQFFVLEEYVGSEPQYVGKLHSDLDKGEGTVKYTLSGDGAGTVFTIDETTGDIHAIRSLDREEKPFYTLRAQAVDIETRKPLEPESEFIIKVQDINDNEPKFLDGPYVATVPEMSPVGAYVLQVKATDADDPTYGNSARVVYSILQGQPYFSIDPKTGVIRTALPNMDREVKEQYQVLIQAKDMGGQLGGLAGTTIVNITLTDVNDNPPRFPKSIFHLKVPESSPIGSAIGRIRAVDPDFGQNAEIEYNIVPGDGGNLFDIVTDEDTQEGVIKLKKPLDFETKKAYTFKVEASNLHLDHRFHSAGPFKDTATVKISVLDVDEPPVFSKPLYTMEVYEDTPVGTIIGAVTAQDLDVGSSAVRYFIDWKSDGDSYFTIDGNEGTIATNELLDRESTAQYNFSIIASKVSNPLLTSKVNILINVLDVNEFPPEISVPYETAVCENAKPGQIIQIVSAADRDLSPAGQQFSFRLSPEAAIKPNFTVRDFRNNTAGIETRRNGYSRRQQELYFLPVVIEDSSYPVQSSTNTMTIRVCRCDSDGTILSCNVEAIFLP

SEQ ID NO: 2191 - protein, 606 aa, synthetic construct
  REGION 1..606: note = CDH15 (P55291) SP+PP+ECD
MDAAFLLVLGLLAQSLCLSLGVPGWRRPTTLYPWRRAPALSRVRRAWVIPPISVSENHKRLPYPLVQIKSDKQQLGSVIYSIQGPGVDEEPRGVFSIDKFTGKVFLNAMLDREKTDRFRLRAFALDLGGSTLEDPTDLEIVVVDQNDNRPAFLQEAFTGRVLEGAVPGTYVTRAEATDADDPETDNAALRFSILQQGSPELFSIDELTGEIRTVQVGLDREVVAVYNLTLQVADMSGDGLTATASAIITLDDINDNAPEFTRDEFFMEAIEAVSGVDVGRLEVEDRDLPGSPNWVARFTILEGDPDGQFTIRTDPKTNEGVLSIVKALDYESCEHYELKVSVQNEAPLQAAALRAERGQAKVRVHVQDTNEPPVFQENPLRTSLAEGAPPGTLVATFSARDPDTEQLQRLSYSKDYDPEDWLQVDAATGRIQTQHVLSPASPFLKGGWYRAIVLAQDDASQPRTATGTLSIEILEVNDHAPVLAPPPPGSLCSEPHQGPGLLLGATDEDLPPHGAPFHFQLSPRLPELGRNWSLSQVNVSHARLRPRHQVPEGLHRLSLLLRDSGQPPQQREQPLNVTVCRCGKDGVCLPGAAALLAGGTGLSLGA

SEQ ID NO: 2192 - protein, 786 aa, synthetic construct
  REGION 1..786: note = CDH16 (O75309) SP+PP+ECD
MVPAWLWLLCVSVPQALPKAQPAELSVEVPENYGGNFPLYLTKLPLPREGAEGQIVLSGDSGKATEGPFAMDPDSGFLLVTRALDREEQAEYQLQVTLEMQDGHVLWGPQPVLVHVKDENDQVPHFSQAIYRARLSRGTRPGIPFLFLEASDRDEPGTANSDLRFHILSQAPAQPSPDMFQLEPRLGALALSPKGSTSLDHALERTYQLLVQVKDMGDQASGHQATATVEVSIIESTWVSLEPIHLAENLKVLYPHHMAQVHWSGGDVHYHLESHPPGPFEVNAEGNLYVTRELDREAQAEYLLQVRAQNSHGEDYAAPLELHVLVMDENDNVPICPPRDPTVSIPELSPPGTEVTRLSAEDADAPGSPNSHVVYQLLSPEPEDGVEGRAFQVDPTSGSVTLGVLPLRAGQNILLLVLAMDLAGAEGGFSSTCEVEVAVTDINDHAPEFITSQIGPISLPEDVEPGTLVAMLTAIDADLEPAFRLMDFAIERGDTEGTFGLDWEPDSGHVRLRLCKNLSYEAAPSHEVVVVVQSVAKLVGPGPGPGATATVTVLVERVMPPPKLDQESYEASVPISAPAGSFLLTIQPSDPISRTLRFSLVNDSEGWLCIEKFSGEVHTAQSLQGAQPGDTYTVLVEAQDTDEPRLSASAPLVIHFLKAPPAPALTLAPVPSQYLCTPRQDHGLIVSGPSKDPDLASGHGPYSFTLGPNPTVQRDWRLQTLNGSHAYLTLALHWVEPREHIIPVVVSHNAQMWQLLVRVIVCRCNVEGQCMRKVGRMKGMPTKLSA

SEQ ID NO: 2193 - protein, 787 aa, synthetic construct
  REGION 1..787: note = CDH17 (Q12864) SP+PP+ECD
MILQAHLHSLCLLMLYLATGYGQEGKFSGPLKPMTFSIYEGQEPSQIIFQFKANPPAVTFELTGETDNIFVIEREGLLYYNRALDRETRSTHNLQVAALDANGIIVEGPVPITIKVKDINDNRPTFLQSKYEGSVRQNSRPGKPFLYVNATDLDDPATPNGQLYYQIVIQLPMINNVMYFQINNKTGAISLTREGSQELNPAKNPSYNLVISVKDMGGQSENSFSDTTSVDIIVTENIWKAPKPVEMVENSTDPHPIKITQVRWNDPGAQYSLVDKEKLPRFPFSIDQEGDIYVTQPLDREEKDAYVFYAVAKDEYGKPLSYPLEIHVKVKDINDNPPTCPSPVTVFEVQENERLGNSIGTLTAHDRDEENTANSFLNYRIVEQTPKLPMDGLFLIQTYAGMLQLAKQSLKKQDTPQYNLTIEVSDKDFKTLCFVQINVIDINDQIPIFEKSDYGNLTLAEDTNIGSTILTIQATDADEPFTGSSKILYHIIKGDSEGRLGVDTDPHTNTGYVIIKKPLDFETAAVSNIVFKAENPEPLVFGVKYNASSFAKFTLIVTDVNEAPQFSQHVFQAKVSEDVAIGTKVGNVTAKDPEGLDISYSLRGDTRGWLKIDHVTGEIFSVAPLDREAGSPYRVQVVATEVGGSSLSSVSEFHLILMDVNDNPPRLAKDYTGLFFCHPLSAPGSLIFEATDDDQHLFRGPHFTFSLGSGSLQNDWEVSKINGTHARLSTRHTEFEEREYVVLIRINDGGRPPLEGIVSLPVTFCSCVEGSCFRPAGHQTGIPTVGM

SEQ ID NO: 2194 - protein, 608 aa, synthetic construct
  REGION 1..608: note = CDH18 (Q13634) SP+PP+ECD
MKITSTSCICPVLVCLCFVQRCYGTAHHSSIKVMRNQTKHIEGETEVHHRPKRGWVWNQFFVLEEHMGPDPQYVGKLHSNSDKGDGSVKYILTGEGAGTIFIIDDTTGDIHSTKSLDREQKTHYVLHAQAIDRRTNKPLEPESEFIIKVQDINDNAPKFTDGPYIVTVPEMSDMGTSVLQVTATDADDPTYGNSARVVYSILQGQPYFSVDPKTGVIRTALHNMDREAREHYSVVIQAKDMAGQVGGLSGSTTVNITLTDVNDNPPRFPQKHYQLYVPESAQVGSAVGKIKANDADTGSNADMTYSIINGDGMGIFSISTDKETREGILSLKKPLNYEKKKSYTLNIEGANTHLDFRFSHLGPFKDATMLKIIVGDVDEPPLFSMPSYLMEVYENAKIGTVVGTVLAQDPDSTNSLVRYFINYNVEDDRFFNIDANTGTIRTTKVLDREETPWYNITVTASEIDNPDLLSHVTVGIRVLDVNDNPPELAREYDIIVCENSKPGQVIHTISATDKDDFANGPRFNFFLDERLPVNPNFTLKDNEDNTASILTRRRRFSRTVQDVYYLPIMISDGGIPSLSSSSTLTIRVCACERDGRVRTCHAEAFLSS

SEQ ID NO: 2195 - protein, 596 aa, synthetic construct
  REGION 1..596: note = CDH19 (Q9H159) SP+PP+ECD
MNCYLLLRFMLGIPLLWPCLGATENSQTKKVKQPVRSHLRVKRGWVWNQFFVPEEMNTTSHHIGQLRSDLDNGNNSFQYKLLGAGAGSTFIIDERTGDIYAIQKLDREERSLYILRAQVIDIATGRAVEPESEFVIKVSDINDNEPKFLDEPYEAIVPEMSPEGTLVIQVTASDADDPSSGNNARLLYSLLQGQPYFSVEPTTGVIRISSKMDRELQDEYWVIIQAKDMIGQPGALSGTTSVLIKLSDVNDNKPIFKESLYRLTVSESAPTGTSIGTIMAYDNDIGENAEMDYSIEEDDSQTFDIITNHETQEGIVILKKKVDFEHQNHYGIRAKVKNHHVPEQLMKYHTEASTTFIKIQVEDVDEPPLFLLPYYVFEVFEETPQGSFVGVVSATDPDNRKSPIRYSITRSKVFNINDNGTITTSNSLDREISAWYNLSITATEKYNIEQISSIPLYVQVLNINDHAPEFSQYYETYVCENAGSGQVIQTISAVDRDESIEEHHFYFNLSVEDTNNSSFTIIDNQDNTAVILTNRTGFNLQEEPVFYISILIADNGIPSLTSTNTLTIHVCDCGDSGSTQTCQYQELVLSMGFKTE

SEQ ID NO: 2196 - protein, 724 aa, synthetic construct
  REGION 1..724: note = CDH2 (P19022) SP+PP+ECD
MCRIAGALRTLLPLLAALLQASVEASGEIALCKTGFPEDVYSAVLSKDVHEGQPLLNVKFSNCNGKRKVQYESSEPADFKVDEDGMVYAVRSFPLSSEHAKFLIYAQDKETQEKWQVAVKLSLKPTLTEESVKESAEVEEIVFPRQFSKHSGHLQRQKRDWVIPPINLPENSRGPFPQELVRIRSDRDKNLSLRYSVTGPGADQPPTGIFIINPISGQLSVTKPLDREQIARFHLRAHAVDINGNQVENPIDIVINVIDMNDNRPEFLHQVWNGTVPEGSKPGTYVMTVTAIDADDPNALNGMLRYRIVSQAPSTPSPNMFTINNETGDIITVAAGLDREKVQQYTLIIQATDMEGNPTYGLSNTATAVITVTDVNDNPPEFTAMTFYGEVPENRVDIIVANLTVTDKDQPHTPAWNAVYRISGGDPTGRFAIQTDPNSNDGLVTVVKPIDFETNRMFVLTVAAENQVPLAKGIQHPPQSTATVSVTVIDVNENPYFAPNPKIIRQEEGLHAGTMLTTFTAQDPDRYMQQNIRYTKLSDPANWLKIDPVNGQITTIAVLDRESPNVKNNIYNATFLASDNGIPPMSGTGTLQIYLLDINDNAPQVLPQEAETCETPDPNSINITALDYDIDPNAGPFAFDLPLSPVTIKRNWTITRLNGDFAQLNLKIKFLEAGIYEVPIIITDSGNPPKSNISILRVKVCQCDSNGDCTDVDRIVGAGLGTGA

SEQ ID NO: 2197 - protein, 619 aa, synthetic construct
  REGION 1..619: note = CDH20 (Q9HBT6) SP+PP+ECD
MWTSGRMSNAKNWLGLGMSLYFWGLMDLTTTVLSDTPTPQGELEALLSDKPQSHQRTKRSWVWNQFFVLEEYTGTDPLYVGKLHSDMDRGDGSIKYILSGEGAGIVFTIDDTTGDIHAIQRLDREERAQYTLRAQALDRRTGRPMEPESEFIIKIQDINDNEPKFLDGPYVATVPEMSPVGTSVIQVTATDADDPTYGNSARVVYSILQGQPYFSVDSKTGVIRTALMNMDREAKEYYEVIIQAKDMGGQLGGLAGTTTVNITLSDVNDNPPRFPQKHYQMSVLESAPISSTVGRVFAKDLDEGINAEMKYTIVDGDGADAFDISTDPNFQVGIITVKKPLSFESKKSYTLKVEGANPHLEMRFLNLGPFQDTTTVHISVEDVDEPPVFEPGFYFVEVPEDVAIGTTIQIISAKDPDVTNNSIRYSIDRSSDPGRFFYVDITTGALMTARPLDREEFSWHNITVLAMEMNNPSQVGSVPVTIKVLDVNDNAPEFPRFYEAFVCENAKAGQLIQTVSAVDQDDPRNGQHFYYSLAPEAANNPNFTIRDNQDNTARILTRRSGFRQQEQSVFHLPILIADSGQPVLSSTGTLTIQVCSCDDDGHVMSCSPEAYMLPVSLSR

SEQ ID NO: 2198 - protein, 624 aa, synthetic construct
  REGION 1..624: note = CDH22 (Q9UJ99) SP+PP+ECD
MRPRPEGRGLRAGVALSPALLLLLLLPPPPTLLGRLWAAGTPSPSAPGARQDGALGAGRVKRGWVWNQFFVVEEYTGTEPLYVGKIHSDSDEGDGAIKYTISGEGAGTIFLIDELTGDIHAMERLDREQKTFYTLRAQARDRATNRLLEPESEFIIKVQDINDSEPRFLHGPYIGSVAELSPTGTSVMQVMASDADDPTYGSSARLVYSVLDGEHHFTVDPKTGVIRTAVPDLDRESQERYEVVIQATDMAGQLGGLSGSTTVTIVVTDVNDNPPRFPQKMYQFSIQESAPIGTAVGRVKAEDSDVGENTDMTYHLKDESSSGGDVFKVTTDSDTQEAIIVVQKRLDFESQPVHTVILEALNKFVDPRFADLGTFRDQAIVRVAVTDVDEPPEFRPPSGLLEVQEDAQVGSLVGVVTARDPDAANRPVRYAIDRESDLDQIFDIDADTGAIVTGKGLDRETAGWHNITVLAMEADNHAQLSRASLRIRILDVNDNPPELATPYEAAVCEDAKPGQLIQTISVVDRDEPQGGHRFYFRLVPEAPSNPHFSLLDIQDNTAAVHTQHVGFNRQEQDVFFLPILVVDSGPPTLSSTGTLTIRICGCDSSGTIQSCNTTAFVMAASLSP

SEQ ID NO: 2199 - protein, 3064 aa, synthetic construct
  REGION 1..3064: note = CDH23 (Q9H251) SP+PP+ECD
MGRHVATSCHVAWLLVLISGCWGQVNRLPFFTNHFFDTYLLISEDTPVGSSVTQLLAQDMDNDPLVFGVSGEEASRFFAVEPDTGVVWLRQPLDRETKSEFTVEFSVSDHQGVITRKVNIQVGDVNDNAPTFHNQPYSVRIPENTPVGTPIFIVNATDPDLGAGGSVLYSFQPPSQFFAIDSARGIVTVIRELDYETTQAYQLTVNATDQDKTRPLSTLANLAIIITDVQDMDPIFINLPYSTNIYEHSPPGTTVRIITAIDQDKGRPRGIGYTIVSGNTNSIFALDYISGVLTLNGLLDRENPLYSHGFILTVKGTELNDDRTPSDATVTTTFNILVIDINDNAPEFNSSEYSVAITELAQVGFALPLFIQVVDKDENLGLNSMFEVYLVGNNSHHFIISPTSVQGKADIRIRVAIPLDYETVDRYDFDLFANESVPDHVGYAKVKITLINENDNRPIFSQPLYNISLYENVTVGTSVLTVLATDNDAGTFGEVSYFFSDDPDRFSLDKDTGLIMLIARLDYELIQRFTLTIIARDGGGEETTGRVRINVLDVNDNVPTFQKDAYVGALRENEPSVTQLVRLRATDEDSPPNNQITYSIVSASAFGSYFDISLYEGYGVISVSRPLDYEQISNGLIYLTVMAMDAGNPPLNSTVPVTIEVFDENDNPPTFSKPAYFVSVVENIMAGATVLFLNATDLDRSREYGQESIIYSLEGSTQFRINARSGEITTTSLLDRETKSEYILIVRAVDGGVGHNQKTGIATVNITLLDINDNHPTWKDAPYYINLVEMTPPDSDVTTVVAVDPDLGENGTLVYSIQPPNKFYSLNSTTGKIRTTHAMLDRENPDPHEAELMRKIVVSVTDCGRPPLKATSSATVFVNLLDLNDNDPTFQNLPFVAEVLEGIPAGVSIYQVVAIDLDEGLNGLVSYRMPVGMPRMDFLINSSSGVVVTTTELDRERIAEYQLRVVASDAGTPTKSSTSTLTIHVLDVNDETPTFFPAVYNVSVSEDVPREFRVVWLNCTDNDVGLNAELSYFITGGNVDGKFSVGYRDAVVRTVVGLDRETTAAYMLILEAIDNGPVGKRHTGTATVFVTVLDVNDNRPIFLQSSYEASVPEDIPEGHSILQLKATDADEGEFGRVWYRILHGNHGNNFRIHVSNGLLMRGPRPLDRERNSSHVLIVEAYNHDLGPMRSSVRVIVYVEDINDEAPVFTQQQYSRLGLRETAGIGTSVIVVQATDRDSGDGGLVNYRILSGAEGKFEIDESTGLIITVNYLDYETKTSYMMNVSATDQAPPFNQGFCSVYITLLNELDEAVQFSNASYEAAILENLALGTEIVRVQAYSIDNLNQITYRFNAYTSTQAKALFKIDAITGVITVQGLVDREKGDFYTLTVVADDGGPKVDSTVKVYITVLDENDNSPRFDFTSDSAVSIPEDCPVGQRVATVKAWDPDAGSNGQVVFSLASGNIAGAFEIVTTNDSIGEVFVARPLDREELDHYILQVVASDRGTPPRKKDHILQVTILDINDNPPVIESPFGYNVSVNENVGGGTAVVQVRATDRDIGINSVLSYYITEGNKDMAFRMDRISGEIATRPAPPDRERQSFYHLVATVEDEGTPTLSATTHVYVTIVDENDNAPMFQQPHYEVLLDEGPDTLNTSLITIQALDLDEGPNGTVTYAIVAGNIVNTFRIDRHMGVITAAKELDYEISHGRYTLIVTATDQCPILSHRLTSTTTVLVNVNDINDNVPTFPRDYEGPFEVTEGQPGPRVWTFLAHDRDSGPNGQVEYSIMDGDPLGEFVISPVEGVLRVRKDVELDRETIAFYNLTICARDRGMPPLSSTMLVGIRVLDINDNDPVLLNLPMNITISENSPVSSFVAHVLASDADSGCNARLTFNITAGNRERAFFINATTGIVTVNRPLDRERIPEYKLTISVKDNPENPRIARRDYDLLLIFLSDENDNHPLFTKSTYQAEVMENSPAGTPLTVLNGPILALDADQDIYAVVTYQLLGAQSGLFDINSSTGVVTVRSGVIIDREAFSPPILELLLLAEDIGLLNSTAHLLITILDDNDNRPTFSPATLTVHLLENCPPGFSVLQVTATDEDSGLNGELVYRIEAGAQDRFLIHLVTGVIRVGNATIDREEQESYRLTVVATDRGTVPLSGTAIVTILIDDINDSRPEFLNPIQTVSVLESAEPGTVIANITAIDHDLNPKLEYHIVGIVAKDDTDRLVPNQEDAFAVNINTGSVMVKSPMNRELVATYEVTLSVIDNASDLPERSVSVPNAKLTVNVLDVNDNTPQFKPFGITYYMERILEGATPGTTLIAVAAVDPDKGLNGLVTYTLLDLVPPGYVQLEDSSAGKVIANRTVDYEEVHWLNFTVRASDNGSPPRAAEIPVYLEIVDINDNNPIFDQPSYQEAVFEDVPVGTIILTVTATDADSGNFALIEYSLGDGESKFAINPTTGDIYVLSSLDREKKDHYILTALAKDNPGDVASNRRENSVQVVIQVLDVNDCRPQFSKPQFSTSVYENEPAGTSVITMMATDQDEGPNGELTYSLEGPGVEAFHVDMDSGLVTTQRPLQSYEKFSLTVVATDGGEPPLWGTTMLLVEVIDVNDNRPVFVRPPNGTILHIREEIPLRSNVYEVYATDKDEGLNGAVRYSFLKTAGNRDWEFFIIDPISGLIQTAQRLDRESQAVYSLILVASDLGQPVPYETMQPLQVALEDIDDNEPLFVRPPKGSPQYQLLTVPEHSPRGTLVGNVTGAVDADEGPNAIVYYFIAAGNEEKNFHLQPDGCLLVLRDLDREREAIFSFIVKASSNRSWTPPRGPSPTLDLVADLTLQEVRVVLEDINDQPPRFTKAEYTAGVATDAKVGSELIQVLALDADIGNNSLVFYSILAIHYFRALANDSEDVGQVFTMGSMDGILRTFDLFMAYSPGYFVVDIVARDLAGHNDTAIIGIYILRDDQRVKIVINEIPDRVRGFEEEFIHLLSNITGAIVNTDNVQFHVDKKGRVNFAQTELLIHVVNRDTNRILDVDRVIQMIDENKEQLRNLFRNYNVLDVQPAISVRLPDDMSA

SEQ ID NO: 2200 - protein, 641 aa, synthetic construct
  REGION 1..641: note = CDH24 (Q86UP0) SP+PP+ECD
MWGLVRLLLAWLGGWGCMGLAAPARAWAGSREHPGPALLRTRRSSWVWNQFFVIEEYAGPEPVLIGKLHSDVDRGEGRTKYLLTGEGAGTVFVIDEATGNIHVTKSLDREEKAQYVLLAQAVDRASNRPLEPPSEFIIKVQDINDNPPIFPLGPYHATVPEMSNVGTSVIQVTAHDADDPSYGNSAKLVYTVLDGLPFFSVDPQTGVVRTAIPNMDRETQEEFLVVIQAKDMGGHMGGLSGSTTVTVTLSDVNDNPPKFPQSLYQFSVVETAGPGTLVGRLRAQDPDLGDNALMAYSILDGEGSEAFSISTDLQGRDGLLTVRKPLDFESQRSYSFRVEATNTLIDPAYLRRGPFKDVASVRVAVQDAPEPPAFTQAAYHLTVPENKAPGTLVGQISAADLDSPASPIRYSILPHSDPERCFSIQPEEGTIHTAAPLDREARAWHNLTVLATELGWSWGPERGWVPLLVAEWSAPAAPPQRSPVGSAVGIPQDSSAQASRVQVAIQTLDENDNAPQLAEPYDTFVCDSAAPGQLIQVIRALDRDEVGNSSHVSFQGPLGPDANFTVQDNRDGSASLLLPSRPAPPRHAPYLVPIELWDWGQPALSSTATVTVSVCRCQPDGSVASCWPEAHLSAAGLSTGA

SEQ ID NO: 2201 - protein, 614 aa, synthetic construct
  REGION 1..614: note = CDH26 (Q8IXH8) SP+PP+ECD
MAMRSGRHPSLLLLLVLLLWLLQVSIIDSVQQETDDLTKQTKEKIYQPLRRSKRRWVITTLELEEEDPGPFPKLIGELFNNMSYNMSLMYLISGPGVDEYPEIGLFSLEDHENGRIYVHRPVDREMTPSFTVYFDVVERSTGKIVDTSLIFNIRISDVNDHAPQFPEKEFNITVQENQSAGQPIFQMLAVDLDEENTPNSQVLYFLISQTPLLKESGFRVDRLSGEIRLSGCLDYETAPQFTLLIRARDCGEPSLSSTTTVHVDVQEGNNHRPAFTQENYKVQIPEGRASQGVLRLLVQDRDSPFTSAWRAKFNILHGNEEGHFDISTDPETNEGILNVIKPLDYETRPAQSLIIVVENEERLVFCERGKLQPPRKAAASATVSVQVTDANDPPAFHPQSFIVNKEEGARPGTLLGTFNAMDPDSQIRYELVHDPANWVSVDKNSGVVITVEPIDRESPHVNNSFYVIIIHAVDDGFPPQTATGTLMLFLSDINDNVPTLRPRSRYMEVCESAVHEPLHIEAEDPDLEPFSDPFTFELDNTWGNAEDTWKLGRNWGQSVELLTLRSLPRGNYLVPLFIGDKQGLSQKQTVHVRICPCASGLTCVELADAEVGLH

SEQ ID NO: 2202 - protein, 654 aa, synthetic construct
  REGION 1..654: note = CDH3 (P22223) SP+PP+ECD
MGLPRGPLASLLLLQVCWLQCAASEPCRAVFREAEVTLEAGGAEQEPGQALGKVFMGCPGQEPALFSTDNDDFTVRNGETVQERRSLKERNPLKIFPSKRILRRHKRDWVVAPISVPENGKGPFPQRLNQLKSNKDRDTKIFYSITGPGADSPPEGVFAVEKETGWLLLNKPLDREEIAKYELFGHAVSENGASVEDPMNISIIVTDQNDHKPKFTQDTFRGSVLEGVLPGTSVMQVTATDEDDAIYTYNGVVAYSIHSQEPKDPHDLMFTIHRSTGTISVISSGLDREKVPEYTLTIQATDMDGDGSTTTAVAVVEILDANDNAPMFDPQKYEAHVPENAVGHEVQRLTVTDLDAPNSPAWRATYLIMGGDDGDHFTITTHPESNQGILTTRKGLDFEAKNQHTLYVEVTNEAPFVLKLPTSTATIVVHVEDVNEAPVFVPPSKVVEVQEGIPTGEPVCVYTAEDPDKENQKISYRILRDPAGWLAMDPDSGQVTAVGTLDREDEQFVRNNIYEVMVLAMDNGSPPTTGTGTLLLTLIDVNDHGPVPEPRQITICNQSPVRQVLNITDKDLSPHTSPFQAQLTDDSDIYWTAEVNEEGDTVVLSLKKFLKQDTYDVHLSLSDHGNKEQLTVIRATVCDCHGHVETCPGPWKGG

SEQ ID NO: 2203 - protein, 734 aa, synthetic construct
  REGION 1..734: note = CDH4 (P55283) SP+PP+ECD
MTAGAGVLLLLLSLSGALRAHNEDLTTRETCKAGFSEDDYTALISQNILEGEKLLQVKFSSCVGTKGTQYETNSMDFKVGADGTVFATRELQVPSEQVAFTVTAWDSQTAEKWDAVVRLLVAQTSSPHSGHKPQKGKKVVALDPSPPPKDTLLPWPQHQNANGLRRRKRDWVIPPINVPENSRGPFPQQLVRIRSDKDNDIPIRYSITGVGADQPPMEVFSIDSMSGRMYVTRPMDREEHASYHLRAHAVDMNGNKVENPIDLYIYVIDMNDNRPEFINQVYNGSVDEGSKPGTYVMTVTANDADDSTTANGMVRYRIVTQTPQSPSQNMFTINSETGDIVTVAAGLDREKVQQYTVIVQATDMEGNLNYGLSNTATAIITVTDVNDNPPEFTASTFAGEVPENRVETVVANLTVMDRDQPHSPNWNAVYRIISGDPSGHFSVRTDPVTNEGMVTVVKAVDYELNRAFMLTVMVSNQAPLASGIQMSFQSTAGVTISIMDINEAPYFPSNHKLIRLEEGVPPGTVLTTFSAVDPDRFMQQAVRYSKLSDPASWLHINATNGQITTAAVLDRESLYTKNNVYEATFLAADNGIPPASGTGTLQIYLIDINDNAPELLPKEAQICEKPNLNAINITAADADVDPNIGPYVFELPFVPAAVRKNWTITRLNGDYAQLSLRILYLEAGMYDVPIIVTDSGNPPLSNTSIIKVKVCPCDDNGDCTTIGAVAAAGLGTGA

SEQ ID NO: 2204 - protein, 599 aa, synthetic construct
  REGION 1..599: note = CDH5 (P33151) SP+PP+ECD
MQRLMMLLATSGACLGLLAVAAVAAAGANPAQRDTHSLLPTHRRQKRDWIWNQMHIDEEKNTSLPHHVGKIKSSVSRKNAKYLLKGEYVGKVFRVDAETGDVFAIERLDRENISEYHLTAVIVDKDTGENLETPSSFTIKVHDVNDNWPVFTHRLFNASVPESSAVGTSVISVTAVDADDPTVGDHASVMYQILKGKEYFAIDNSGRIITITKSLDREKQARYEIVVEARDAQGLRGDSGTATVLVTLQDINDNFPFFTQTKYTFVVPEDTRVGTSVGSLFVEDPDEPQNRMTKYSILRGDYQDAFTIETNPAHNEGIIKPMKPLDYEYIQQYSFIVEATDPTIDLRYMSPPAGNRAQVIINITDVDEPPIFQQPFYHFQLKENQKKPLIGTVLAMDPDAARHSIGYSIRRTSDKGQFFRVTKKGDIYNEKELDREVYPWYNLTVEAKELDSTGTPTGKESIVQVHIEVLDENDNAPEFAKPYQPKVCENAVHGQLVLQISAIDKDITPRNVKFKFILNTENNFTLTDNHDNTANITVKYGQFDREHTKVHFLPVVISDNGMPSRTGTSTLTVAVCKCNEQGEFTFCEDMAAQVGVSIQ

SEQ ID NO: 2205 - protein, 615 aa, synthetic construct
  REGION 1..615: note = CDH6 (P55285) SP+PP+ECD
MRTYRYFLLLFWVGQPYPTLSTPLSKRTSGFPAKKRALELSGNSKNELNRSKRSWMWNQFFLLEEYTGSDYQYVGKLHSDQDRGDGSLKYILSGDGAGDLFIINENTGDIQATKRLDREEKPVYILRAQAINRRTGRPVEPESEFIIKIHDINDNEPIFTKEVYTATVPEMSDVGTFVVQVTATDADDPTYGNSAKVVYSILQGQPYFSVESETGIIKTALLNMDRENREQYQVVIQAKDMGGQMGGLSGTTTVNITLTDVNDNPPRFPQSTYQFKTPESSPPGTPIGRIKASDADVGENAEIEYSITDGEGLDMFDVITDQETQEGIITVKKLLDFEKKKVYTLKVEASNPYVEPRFLYLGPFKDSATVRIVVEDVDEPPVFSKLAYILQIREDAQINTTIGSVTAQDPDAARNPVKYSVDRHTDMDRIFNIDSGNGSIFTSKLLDRETLLWHNITVIATEINNPKQSSRVPLYIKVLDVNDNAPEFAEFYETFVCEKAKADQLIQTLHAVDKDDPYSGHQFSFSLAPEAASGSNFTIQDNKDNTAGILTRKNGYNRHEMSTYLLPVVISDNDYPVQSSTGTVTVRVCACDHHGNMQSCHAEALIHPTGLSTGA

SEQ ID NO: 2206 - protein, 607 aa, synthetic construct
  REGION 1..607: note = CDH7 (Q9ULB5) SP+PP+ECD
MKLGKVEFCHFLQLIALFLCFSGMSQAELSRSRSKPYFQSGRSRTKRSWVWNQFFVLEEYMGSDPLYVGKLHSDVDKGDGSIKYILSGEGASSIFIIDENTGDIHATKRLDREEQAYYTLRAQALDRLTNKPVEPESEFVIKIQDINDNEPKFLDGPYTAGVPEMSPVGTSVVQVTATDADDPTYGNSARVVYSILQGQPYFSVEPKTGVIKTALPNMDREAKDQYLLVIQAKDMVGQNGGLSGTTSVTVTLTDVNDNPPRFPRRSYQYNVPESLPVASVVARIKAADADIGANAEMEYKIVDGDGLGIFKISVDKETQEGIITIQKELDFEAKTSYTLRIEAANKDADPRFLSLGPFSDTTTVKIIVEDVDEPPVFSSPLYPMEVSEATQVGNIIGTVAAHDPDSSNSPVRYSIDRNTDLERYFNIDANSGVITTAKSLDRETNAIHNITVLAMESQNPSQVGRGYVAITILDINDNAPEFAMDYETTVCENAQPGQVIQKISAVDKDEPSNGHQFYFSLTTDATNNHNFSLKDNKDNTASILTRRNGFRRQEQSVYYLPIFIVDSGSPSLSSTNTLTIRVCDCDADGVAQTCNAEAYVLPAGLST

SEQ ID NO: 2207 - protein, 621 aa, synthetic construct
  REGION 1..621: note = CDH8 (P55286) SP+PP+ECD
MPERLAEMLLDLWTPLIILWITLPPCIYMAPMNQSQVLMSGSPLELNSLGEEQRILNRSKRGWVWNQMFVLEEFSGPEPILVGRLHTDLDPGSKKIKYILSGDGAGTIFQINDVTGDIHAIKRLDREEKAEYTLTAQAVDWETSKPLEPPSEFIIKVQDINDNAPEFLNGPYHATVPEMSILGTSVTNVTATDADDPVYGNSAKLVYSILEGQPYFSIEPETAIIKTALPNMDREAKEEYLVVIQAKDMGGHSGGLSGTTTLTVTLTDVNDNPPKFAQSLYHFSVPEDVVLGTAIGRVKANDQDIGENAQSSYDIIDGDGTALFEITSDAQAQDGIIRLRKPLDFETKKSYTLKVEAANVHIDPRFSGRGPFKDTATVKIVVEDADEPPVFSSPTYLLEVHENAALNSVIGQVTARDPDITSSPIRFSIDRHTDLERQFNINADDGKITLATPLDRELSVWHNITIIATEIRNHSQISRVPVAIKVLDVNDNAPEFASEYEAFLCENGKPGQVIQTVSAMDKDDPKNGHYFLYSLLPEMVNNPNFTIKKNEDNSLSILAKHNGFNRQKQEVYLLPIIISDSGNPPLSSTSTLTIRVCGCSNDGVVQSCNVEAYVLPIGLSM

SEQ ID NO: 2208 - protein, 615 aa, synthetic construct
  REGION 1..615: note = CDH9 (Q9ULB4) SP+PP+ECD
MRTYHYIPLFIWTYMFHTVDTILLQEKPNSYLSSKKIAGLTKDDGKMLRRTKRGWMWNQFFLLEEYTGTDTQYVGKLHTDQDKGDGNLKYILTGDGAGSLFVIDENTGDIHAAKKLDREEKSLYILRAKAIDRKTGRQVEPESEFIIKIHDINDNEPKFTKDLYTASVPEMSGVGTSVIQVTATDADDANYGNSAKVVYSILQGQPYFSVDPESGIIKTALPDMSRENREQYQVVIQAKDMGGQMGGLSGTTTVNITLTDVNNNPPRFPQSTYQFNSPESVPLGTHLGRIKANDPDVGENAEMEYSIAEGDGADMFDVITDKDTQEGIITVKQNLDFENQMLYTLRVDASNTHPDPRFLHLGPFKDTAVVKISVEDIDEPPVFTKVSYLIEVDEDVKEGSIIGQVTAYDPDARNNLIKYSVDRHTDMDRIFGIHSENGSIFTLKALDRESSPWHNITVTATEINNPKQSSHIPVFIRILDINDHAPEFAMYYETFVCENAKPGQLIQTVSVMDKDDPPRGHKFFFEPVPEFTLNPNFTIVDNKDNTAGIMTRKDGYSRNKMSTYLLPILIFDNDYPIQSSTGTLTIRVCACDNQGNMQSCTAEALILSAGLSTGA

SEQ ID NO: 2209 - protein, 700 aa, synthetic construct
  REGION 1..700: note = CDHR1 (Q96JP9) SP+PP+ECD
MRRCRWAALALGLLRLCLAQANFAPHFFDNGVGSTNGNMALFSLPEDTPVGSHVYTLNGTDPEGDPISYHISFDPSTRSVFSVDPTFGNITLVEELDREREDEIEAIISISDGLNLVAEKVVILVTDANDEAPRFIQEPYVALVPEDIPAGSIIFKVHAVDRDTGSGGSVTYFLQNLHSPFAVDRHSGVLRLQAGATLDYERSRTHYITVVAKDGGGRLHGADVVFSATTTVTVNVEDVQDMAPVFVGTPYYGYVYEDTLPGSEVLKVVAMDGDRGKPNRILYSLVNGNDGAFEINETSGAISITQSPAQLQREVYELHVQVTEMSPAGSPAAQATVPVTIRIVDLNNHPPTFYGESGPQNRFELSMNEHPPQGEILRGLKITVNDSDQGANAKFNLQLVGPRGIFRVVPQTVLNEAQVTIIVENSAAIDFEKSKVLTFKLLAVEVNTPEKFSSTADVVIQLLDTNDNVPKFDSLYYVARIPENAPGGSSVVAVTAVDPDTGPWGEVKYSTYGTGADLFLIHPSTGLIYTQPWASLDAEATARYNFYVKAEDMEGKYSVAEVFITLLDVNDHPPQFGKSVQKKTMVLGTPVKIEAIDEDAEEPNNLVDYSITHAEPANVFDINSHTGEIWLKNSIRSLDALHNITPGRDCLWSLEVQAKDRGSPSFSTTALLKIDITDAETLSRSPMAAFLIQTKDNPMK

SEQ ID NO: 2210 - protein, 1154 aa, synthetic construct
  REGION 1..1154: note = CDHR2 (Q9BYE9) SP+PP+ECD
MAQLWLSCFLLPALVVSVAANVAPKFLANMTSVILPEDLPVGAQAFWLVAEDQDNDPLTYGMSGPNAYFFAVTPKTGEVKLASALDYETLYTFKVTISVSDPYIQVQREMLVIVEDRNDNAPVFQNTAFSTSINETLPVGSVVFSVLAVDKDMGSAGMVVYSIEKVIPSTGDSEHLFRILANGSIVLNGSLSYNNKSAFYQLELKACDLGGMYHNTFTIQCSLPVFLSISVVDQPDLDPQFVREFYSASVAEDAAKGTSVLTVEAVDGDKGINDPVIYSISYSTRPGWFDIGADGVIRVNGSLDREQLLEADEEVQLQVTATETHLNIYGQEAKVSIWVTVRVMDVNDHKPEFYNCSLPACTFTPEEAQVNFTGYVDEHASPRIPIDDLTMVVYDPDKGSNGTFLLSLGGPDAEAFSVSPERAVGSASVQVLVRVSALVDYERQTAMAVQVVATDSVSQNFSVAMVTIHLRDINDHRPTFPQSLYVLTVPEHSATGSVVTDSIHATDPDTGAWGQITYSLLPGNGADLFQVDPVSGTVTVRNGELLDRESQAVYYLTLQATDGGNLSSSTTLQIHLLDINDNAPVVSGSYNIFVQEEEGNVSVTIQAHDNDEPGTNNSRLLFNLLPGPYSHNFSLDPDTGLLRNLGPLDREAIDPALEGRIVLTVLVSDCGEPVLGTKVNVTITVEDINDNLPIFNQSSYNFTVKEEDPGVLVGVVKAWDADQTEANNRISFSLSGSGANYFMIRGLVLGAGWAEGYLRLPPDVSLDYETQPVFNLTVSAENPDPQGGETIVDVCVNVKDVNDNPPTLDVASLRGIRVAENGSQHGQVAVVVASDVDTSAQLEIQLVNILCTKAGVDVGSLCWGWFSVAANGSVYINQSKAIDYEACDLVTLVVRACDLATDPGFQAYSNNGSLLITIEDVNDNAPYFLPENKTFVIIPELVLPNREVASVRARDDDSGNNGVILFSILRVDFISKDGATIPFQGVFSIFTSSEADVFAGSIQPVTSLDSTLQGTYQVTVQARDRPSLGPFLEATTTLNLFTVDQSYRSRLQFSTPKEEVGANRQAINAALTQATRTTVYIVDIQDIDSAARARPHSYLDAYFVFPNGSALTLDELSVMIRNDQDSLTQLLQLGLVVLGSQESQESDLSKQLIS

SEQ ID NO: 2211 - protein, 713 aa, synthetic construct
  REGION 1..713: note = CDHR3 (Q6ZTQ4) SP+PP+ECD
MQEAIILLALLGAMSGGEALHLILLPATGNVAENSPPGTSVHKFSVKLSASLSPVIPGFPQIVNSNPLTEAFRVNWLSGTYFEVVTTGMEQLDFETGPNIFDLQIYVKDEVGVTDLQVLTVQVTDVNEPPQFQGNLAEGLHLYIVERANPGFIYQVEAFDPEDTSRNIPLSYFLISPPKSFRMSANGTLFSTTELDFEAGHRSFHLIVEVRDSGGLKASTELQVNIVNLNDEVPRFTSPTRVYTVLEELSPGTIVANITAEDPDDEGFPSHLLYSITTVSKYFMINQLTGTIQVAQRIDRDAGELRQNPTISLEVLVKDRPYGGQENRIQITFIVEDVNDNPATCQKFTFSIMVPERTAKGTLLLDLNKFCFDDDSEAPNNRFNFTMPSGVGSGSRFLQDPAGSGKIVLIGDLDYENPSNLAAGNKYTVIIQVQDVAPPYYKNNVYVYILTSPENEFPLIFDRPSYVFDVSERRPARTRVGQVRATDKDLPQSSLLYSISTGGASLQYPNVFWINPKTGELQLVTKVDCETTPIYILRIQATNNEDTSSVTVTVNILEENDEKPICTPNSYFLALPVDLKVGTNIQNFKLTCTDLDSSPRSFRYSIGPGNVNNHFTFSPNAGSNVTRLLLTSRFDYAGGFDKIWDYKLLVYVTDDNLMSDRKKAEALVETGTVTLSIKVIPHPTTIITTTPRPRVTYQVLRKNVYSPSAWYVP

SEQ ID NO: 2212 - protein, 686 aa, synthetic construct
  REGION 1..686: note = CDHR4 (A6H8M9) SP+PP+ECD
MVLLRLLVFLFAPVVSDLCSLPCFINVSESQGPGTVLQFLSFNCSSYTPTPTLELLNVQPPTTFFNPPSLARWQGTYVGKLTLSSSAQLDALMVNHYKVQLKFTCGNHVMEGSLSVDVQRDLSHIQCAGQFASPAGEMIQVPETVTPGARLYTLLLPGLELHGAQMSIISAQDLPHFPGPFSINEQGWLQAPSQGLLGQAQKVFQLQISVSFGQRQSCQGMVIVKVLPVPSSQVSFLEQAQNITIPENLAPGSEVVQVQARGVDLRYEILSPVPSPLFSIGRADGVVRTTTPLELARTSGTAVSRLQVKAFEQGQLWASAKLNLTMNVQLVNLWPPRCLPALLVSQIPETAPVGTVLNTLTCEDPDSVGATLDYKLWFRSSSNPASLCLYDRVLEVNATLDCDTPGACFQHAASILVLDGGQPQMTTEVPVLVMVTPINEFSPACAPRTFRVQEDAAPHTLLGSVVGTDMDYPHDNIEYYTSGGPTTFAVDRLSGEVHLLGPLDYEQQRLYRLTVLVIDHGQDQNPNHHLSGSCTITIEVEDVNDHAPECEPPFQELTIYAPLGRSVEVTKMSCQIPQEPQRLIYSYSIVGGNSQNRFILQGAILVHSDLVLGPFWPEQPRTYELLICVADAGPSTPHLSTTATIIVHLVPRRASTVATSTHRTTVPSTMTPMLVTDTEAFWQPQP

SEQ ID NO: 2213 - protein, 669 aa, synthetic construct
  REGION 1..669: note = CDHR5 (Q9HBB8) SP+PP+ECD
MGSWALLWPPLLFTGLLVRPPGTMAQAQYCSVNKDIFEVEENTNVTEPLVDIHVPEGQEVTLGALSTPFAFRIQGNQLFLNVTPDYEEKSLLEAQLLCQSGGTLVTQLRVFVSVLDVNDNAPEFPFKTKEIRVEEDTKVNSTVIPETQLQAEDRDKDDILFYTLQEMTAGASDYFSLVSVNRPALRLDRPLDFYERPNMTFWLLVRDTPGENVEPSHTATATLVLNVVPADLRPPWFLPCTFSDGYVCIQAQYHGAVPTGHILPSPLVLRPGPIYAEDGDRGINQPIIYSIFRGNVNGTFIIHPDSGNLTVARSVPSPMTFLLLVKGQQADLARYSVTQVTVEAVAAAGSPPRFPQRLYRGTVARGAGAGVVVKDAAAPSQPLRIQAQDPEFSDLNSAITYRITNHSHFRMEGEVVLTTTTLAQAGAFYAEVEAHNTVTSGTATTVIEIQVSEQEPPSTDVPPSPEAGGTTGPWTSTTSEVPRPPEPSQGPSTTSSGGGTGPHPPSGTTLRPPTSSTPGGPPGAENSTSHQPATPGGDTAQTPKPGTSQPMPPGVGTSTSHQPATPSGGTAQTPEPGTSQPMPPSMGTSTSHQPATPGGGTAQTPEAGTSQPMPPGMGTSTSHQPTTPGGGTAQTPEPGTSQPMPLSKSTPSSGGGPSEDKRFSVVDMA

SEQ ID NO: 2214 - protein, 963 aa, synthetic construct
  REGION 1..963: note = CDON (Q4KMG0) SP+PP+ECD
MHPDLGPLCTLLYVTLTILCSSVSSDLAPYFTSEPLSAVQKLGGPVVLHCSAQPVTTRISWLHNGKTLDGNLEHVKIHQGTLTILSLNSSLLGYYQCLANNSIGAIVSGPATVSVAVLGDFGSSTKHVITAEEKSAGFIGCRVPESNPKAEVRYKIRGKWLEHSTENYLILPSGNLQILNVSLEDKGSYKCAAYNPVTHQLKVEPIGRKLLVSRPSSDDVHILHPTHSQALAVLSRSPVTLECVVSGVPAPQVYWLKDGQDIAPGSNWRRLYSHLATDSVDPADSGNYSCMAGNKSGDVKYVTYMVNVLEHASISKGLQDQIVSLGATVHFTCDVHGNPAPNCTWFHNAQPIHPSARHLTAGNGLKISGVTVEDVGMYQCVADNGIGFMHSTGRLEIENDGGFKPVIITAPVSAKVADGDFVTLSCNASGLPVPVIRWYDSHGLITSHPSQVLRSKSRKSQLSRPEGLNLEPVYFVLSQAGASSLHIQAVTQEHAGKYICEAANEHGTTQAEASLMVVPFETNTKAETVTLPDAAQNDDRSKRDGSETGLLSSFPVKVHPSAVESAPEKNASGISVPDAPIILSPPQTHTPDTYNLVWRAGKDGGLPINAYFVKYRKLDDGVGMLGSWHTVRVPGSENELHLAELEPSSLYEVLMVARSAAGEGQPAMLTFRTSKEKTASSKNTQASSPPVGIPKYPVVSEAANNNFGVVLTDSSRHSGVPEAPDRPTISTASETSVYVTWIPRANGGSPITAFKVEYKRMRTSNWLVAAEDIPPSKLSVEVRSLEPGSTYKFRVIAINHYGESFRSSASRPYQVVGFPNRFSSRPITGPHIAYTEAVSDTQIMLKWTYIPSSNNNTPIQGFYIYYRPTDSDNDSDYKRDVVEGSKQWHMIGHLQPETSYDIKMQCFNEGGESEFSNVMICETKVKRVPGASEYPVKDLSTPPNSLGSGGNVGPATSPARSSD

SEQ ID NO: 2215 - protein, 428 aa, synthetic construct
  REGION 1..428: note = CEACAM1 (P13688) SP+PP+ECD
MGHLSAPLHRVRVPWQGLLLTASLLTFWNPPTTAQLTTESMPFNVAEGKEVLLLVHNLPQQLFGYSWYKGERVDGNRQIVGYAIGTQQATPGPANSGRETIYPNASLLIQNVTQNDTGFYTLQVIKSDLVNEEATGQFHVYPELPKPSISSNNSNPVEDKDAVAFTCEPETQDTTYLWWINNQSLPVSPRLQLSNGNRTLTLLSVTRNDTGPYECEIQNPVSANRSDPVTLNVTYGPDTPTISPSDTYYRPGANLSLSCYAASNPPAQYSWLINGTFQQSTQELFIPNITVNNSGSYTCHANNSVTGCNRTTVKTIIVTELSPVVAKPQIKASKTTVTGDKDSVNLTCSTNDTGISIRWFFKNQSLPSSERMKLSQGNTTLSINPVKREDAGTYWCEVFNPISKNQSDPIMLNVNYNALPQENGLSPG

SEQ ID NO: 2216 - protein, 157 aa, synthetic construct
  REGION 1..157: note = CEACAM19 (Q7Z692) SP+PP+ECD
MEIPMGTQGCFSKSLLLSASILVLWMLQGSQAALYIQKIPEQPQKNQDLLLSVQGVPDTFQDFNWYLGEETYGGTRLFTYIPGIQRPQRDGSAMGQRDIVGFPNGSMLLRRAQPTDSGTYQVAITINSEWTMKAKTEVQVAEKNKELPSTHLPTNAG

SEQ ID NO: 2217 - protein, 450 aa, synthetic construct
  REGION 1..450: note = CEACAM20 (Q6UY09) SP+PP+ECD
MGPADSWGHHWMGILLSASLCTVWSPPAAAQLTLNANPLDATQSEDVVLPVFGTPRTPQIHGRSRELAKPSIAVSPGTAIEQKDMVTFYCTTKDVNITIHWVSNNLSIVFHERMQLSKDGKILTILIVQREDSGTYQCEARDALLSQRSDPIFLDVKYGPDPVEIKLESGVASGEVVEVMEGSSMTFLAETKSHPPCAYTWFLLDSILSHTTRTFTIHAVSREHEGLYRCLVSNSATHLSSLGTLKVRVLETLTMPQVVPSSLNLVENARSVDLTCQTVNQSVNVQWFLSGQPLLPSEHLQLSADNRTLIIHGLQRNDTGPYACEVWNWGSRARSEPLELTINYGPDQVHITRESASEMISTIEAELNSSLTLQCWAESKPGAEYRWTLEHSTGEHLGEQLIIRALTWEHDGIYNCTASNSLTGLARSTSVLVKVVGPQSSSLSSGAIAG

SEQ ID NO: 2218 - protein, 240 aa, synthetic construct
  REGION 1..240: note = CEACAM21 (Q3KPI0) SP+PP+ECD
MGPPSACPHRECIPWQGLLLTASLLTFWNAPTTAWLFIASAPFEVAEGENVHLSVVYLPENLYSYGWYKGKTVEPNQLIAAYVIDTHVRTPGPAYSGRETISPSGDLHFQNVTLEDTGYYTLQVTYRNSQIEQASHHLRVYESVAQPSIQASSTTVTEKGSVVLTCHTNNTGTSFQWIFNNQRLQVTKRMKLSWFNHMLTIDPIRQEDAGEYQCEVSNPVSSNRSDPLKLTVKSDDNTLG

SEQ ID NO: 2219 - protein, 155 aa, synthetic construct
  REGION 1..155: note = CEACAM3 (P40198) SP+PP+ECD
MGPPSASPHRECIPWQGLLLTASLLNFWNPPTTAKLTIESMPLSVAEGKEVLLLVHNLPQHLFGYSWYKGERVDGNSLIVGYVIGTQQATPGAAYSGRETIYTNASLLIQNVTQNDIGFYTLQVIKSDLVNEEATGQFHVYQENAPGLPVGAVAG

SEQ ID NO: 2220 - protein, 155 aa, synthetic construct
  REGION 1..155: note = CEACAM4 (O75871) SP+PP+ECD
MGPPSAAPRGGHRPWQGLLITASLLTFWHPPTTVQFTIEALPSSAAEGKDVLLLACNISETIQAYYWHKGKTAEGSPLIAGYITDIQANIPGAAYSGRETVYPNGSLLFQNITLEDAGSYTLRTINASYDSDQATGQLHVHQNNVPGLPVGAVAG

SEQ ID NO: 2221 - protein, 1082 aa, synthetic construct
  REGION 1..1082: note = CHL1 (O00533) SP+PP+ECD
MEPLLLGRGLIVYLMFLLLKFSKAIEIPSSVQQVPTIIKQSKVQVAFPFDEYFQIECEAKGNPEPTFSWTKDGNPFYFTDHRIIPSNNSGTFRIPNEGHISHFQGKYRCFASNKLGIAMSEEIEFIVPSVPKFPKEKIDPLEVEEGDPIVLPCNPPKGLPPLHIYWMNIELEHIEQDERVYMSQKGDLYFANVEEKDSRNDYCCFAAFPRLRTIVQKMPMKLTVNSSNSIKQRKPKLLLPPTESGSESSITILKGEILLLECFAEGLPTPQVDWNKIGGDLPKGRETKENYGKTLKIENVSYQDKGNYRCTASNFLGTATHDFHVIVEEPPRWTKKPQSAVYSTGSNGILLCEAEGEPQPTIKWRVNGSPVDNHPFAGDVVFPREISFTNLQPNHTAVYQCEASNVHGTILANANIDVVDVRPLIQTKDGENYATVVGYSAFLHCEFFASPEAVVSWQKVEEVKPLEGRRYHIYENGTLQINRTTEEDAGSYSCWVENAIGKTAVTANLDIRNATKLRVSPKNPRIPKLHMLELHCESKCDSHLKHSLKLSWSKDGEAFEINGTEDGRIIIDGANLTISNVTLEDQGIYCCSAHTALDSAADITQVTVLDVPDPPENLHLSERQNRSVRLTWEAGADHNSNISEYIVEFEGNKEEPGRWEELTRVQGKKTTVILPLAPFVRYQFRVIAVNEVGRSQPSQPSDHHETPPAAPDRNPQNIRVQASQPKEMIIKWEPLKSMEQNGPGLEYRVTWKPQGAPVEWEEETVTNHTLRVMTPAVYAPYDVKVQAINQLGSGPDPQSVTLYSGEDYPDTAPVIHGVDVINSTLVKVTWSTVPKDRVHGRLKGYQINWWKTKSLLDGRTHPKEVNILRFSGQRNSGMVPSLDAFSEFHLTVLAYNSKGAGPESEPYIFQTPEGVPEQPTFLKVIKVDKDTATLSWGLPKKLNGNLTGYLLQYQIINDTYEIGELNDINITTPSKPSWHLSNLNATTKYKFYLRACTSQGCGKPITEESSTLGEGSKGIGKISGVNLTQKTHPIEVFEPGAEHIVRLMTKNWGDNDSIFQDVIETRGREYAGLYDDISTQGW

SEQ ID NO: 2222 - protein, 216 aa, synthetic construct
  REGION 1..216: note = CHODL (Q9H9P2) SP+PP+ECD
MSRVVSLLLGAALLCGHGAFCRRVVSGQKVCFADFKHPCYKMAYFHELSSRVSFQEARLACESEGGVLLSLENEAEQKLIESMLQNLTKPGTGISDGDFWIGLWRNGDGQTSGACPDLYQWSDGSNSQYRNWYTDEPSCGSEKCVVMYHQPTANPGLGGPYLYQWNDDRCNMKHNYICKYEPEINPTAPVEKPYLTNQPGDTHQNVVVTEAGIIPN

SEQ ID NO: 2223 - protein, 901 aa, synthetic construct
  REGION 1..901: note = CLCA2 (Q9UQC9) SP+PP+ECD
MTQRSIAGPICNLKFVTLLVALSSELPFLGAGVQLQDNGYNGLLIAINPQVPENQNLISNIKEMITEASFYLFNATKRRVFFRNIKILIPATWKANNNSKIKQESYEKANVIVTDWYGAHGDDPYTLQYRGCGKEGKYIHFTPNFLLNDNLTAGYGSRGRVFVHEWAHLRWGVFDEYNNDKPFYINGQNQIKVTRCSSDITGIFVCEKGPCPQENCIISKLFKEGCTFIYNSTQNATASIMFMQSLSSVVEFCNASTHNQEAPNLQNQMCSLRSAWDVITDSADFHHSFPMNGTELPPPPTFSLVQAGDKVVCLVLDVSSKMAEADRLLQLQQAAEFYLMQIVEIHTFVGIASFDSKGEIRAQLHQINSNDDRKLLVSYLPTTVSAKTDISICSGLKKGFEVVEKLNGKAYGSVMILVTSGDDKLLGNCLPTVLSSGSTIHSIALGSSAAPNLEELSRLTGGLKFFVPDISNSNSMIDAFSRISSGTGDIFQQHIQLESTGENVKPHHQLKNTVTVDNTVGNDTMFLVTWQASGPPEIILFDPDGRKYYTNNFITNLTFRTASLWIPGTAKPGHWTYTLNNTHHSLQALKVTVTSRASNSAVPPATVEAFVERDSLHFPHPVMIYANVKQGFYPILNATVTATVEPETGDPVTLRLLDDGAGADVIKNDGIYSRYFFSFAANGRYSLKVHVNHSPSISTPAHSIPGSHAMYVPGYTANGNIQMNAPRKSVGRNEEERKWGFSRVSSGGSFSVLGVPAGPHPDVFPPCKIIDLEAVKVEEELTLSWTAPGEDFDQGQATSYEIRMSKSLQNIQDDFNNAILVNTSKRNPQQAGIREIFTFSPQISTNGPEHQPNGETHESHRIYVAIRAMDRNSLQSAVSNIAQAPLFIPPNSDPVPARDYL

SEQ ID NO: 2224 - protein, 894 aa, synthetic construct
  REGION 1..894: note = CLCA4 (Q14CN2) SP+PP+ECD
MGLFRGFVFLLVLCLLHQSNTSFIKLNNNGFEDIVIVIDPSVPEDEKIIEQIEDMVTTASTYLFEATEKRFFFKNVSILIPENWKENPQYKRPKHENHKHADVIVAPPTLPGRDEPYTKQFTECGEKGEYIHFTPDLLLGKKQNEYGPPGKLFVHEWAHLRWGVFDEYNEDQPFYRAKSKKIEATRCSAGISGRNRVYKCQGGSCLSRACRIDSTTKLYGKDCQFFPDKVQTEKASIMFMQSIDSVVEFCNEKTHNQEAPSLQNIKCNFRSTWEVISNSEDFKNTIPMVTPPPPPVFSLLKISQRIVCLVLDKSGSMGGKDRLNRMNQAAKHFLLQTVENGSWVGMVHFDSTATIVNKLIQIKSSDERNTLMAGLPTYPLGGTSICSGIKYAFQVIGELHSQLDGSEVLLLTDGEDNTASSCIDEVKQSGAIVHFIALGRAADEAVIEMSKITGGSHFYVSDEAQNNGLIDAFGALTSGNTDLSQKSLQLESKGLTLNSNAWMNDTVIIDSTVGKDTFFLITWNSLPPSISLWDPSGTIMENFTVDATSKMAYLSIPGTAKVGTWAYNLQAKANPETLTITVTSRAANSSVPPITVNAKMNKDVNSFPSPMIVYAEILQGYVPVLGANVTAFIESQNGHTEVLELLDNGAGADSFKNDGVYSRYFTAYTENGRYSLKVRAHGGANTARLKLRPPLNRAAYIPGWVVNGEIEANPPRPEIDEDTQTTLEDFSRTASGGAFVVSQVPSLPLPDQYPPSQITDLDATVHEDKIILTWTAPGDNFDVGKVQRYIIRISASILDLRDSFDDALQVNTTDLSPKEANSKESFAFKPENISEENATHIFIAIKSIDKSNLTSKVSNIAQVTLFIPQANPDDIDPTPTPTPTPTPDKSHNSG

SEQ ID NO: 2225 - protein, 397 aa, synthetic construct
  REGION 1..397: note = CLEC14A (Q86T13) SP+PP+ECD
MRPAFALCLLWQALWPGPGGGEHPTADRAGCSASGACYSLHHATMKRQAAEEACILRGGALSTVRAGAELRAVLALLRAGPGPGGGSKDLLFWVALERRRSHCTLENEPLRGFSWLSSDPGGLESDTLQWVEEPQRSCTARRCAVLQATGGVEPAGWKEMRCHLRANGYLCKYQFEVLCPAPRPGAASNLSYRAPFQLHSAALDFSPPGTEVSALCRGQLPISVTCIADEIGARWDKLSGDVLCPCPGRYLRAGKCAELPNCLDDLGGFACECATGFELGKDGRSCVTSGEGQPTLGGTGVPTRRPPATATSPVPQRTWPIRVDEKLGETPLVPEQDNSVTSIPEIPRWGSQSTMSTLQMSLQAESKATITPSGSVISKFNSTTSSATPQAFDSSSA

SEQ ID NO: 2226 - protein, 235 aa, synthetic construct
  REGION 1..235: note = CLMP (Q9H6B4) SP+PP+ECD
MSLLLLLLLVSYYVGTLGTHTEIKRVAEEKVTLPCHHQLGLPEKDTLDIEWLLTDNEGNQKVVITYSSRHVYNNLTEEQKGRVAFASNFLAGDASLQIEPLKPSDEGRYTCKVKNSGRYVWSHVILKVLVRPSKPKCELEGELTEGSDLTLQCESSSGTEPIVYYWQRIREKEGEDERLPPKSRIDYNHPGRVLLQNLTMSYSGLYQCTAGNEAGKESCVVRVTVQYVQSIGMVA

SEQ ID NO: 2227 - protein, 859 aa, synthetic construct
  REGION 1..859: note = CLSTN1 (O94985) SP+PP+ECD
MLRRPAPALAPAARLLLAGLLCGGGVWAARVNKHKPWLEPTYHGIVTENDNTVLLDPPLIALDKDAPLRFAESFEVTVTKEGEICGFKIHGQNVPFDAVVVDKSTGEGVIRSKEKLDCELQKDYSFTIQAYDCGKGPDGTNVKKSHKATVHIQVNDVNEYAPVFKEKSYKATVIEGKQYDSILRVEAVDADCSPQFSQICSYEIITPDVPFTVDKDGYIKNTEKLNYGKEHQYKLTVTAYDCGKKRATEDVLVKISIKPTCTPGWQGWNNRIEYEPGTGALAVFPNIHLETCDEPVASVQATVELETSHIGKGCDRDTYSEKSLHRLCGAAAGTAELLPSPSGSLNWTMGLPTDNGHDSDQVFEFNGTQAVRIPDGVVSVSPKEPFTISVWMRHGPFGRKKETILCSSDKTDMNRHHYSLYVHGCRLIFLFRQDPSEEKKYRPAEFHWKLNQVCDEEWHHYVLNVEFPSVTLYVDGTSHEPFSVTEDYPLHPSKIETQLVVGACWQEFSGVENDNETEPVTVASAGGDLHMTQFFRGNLAGLTLRSGKLADKKVIDCLYTCKEGLDLQVLEDSGRGVQIQAHPSQLVLTLEGEDLGELDKAMQHISYLNSRQFPTPGIRRLKITSTIKCFNEATCISVPPVDGYVMVLQPEEPKISLSGVHHFARAASEFESSEGVFLFPELRIISTITREVEPEGDGAEDPTVQESLVSEEIVHDLDTCEVTVEGEELNHEQESLEVDMARLQQKGIEVSSSELGMTFTGVDTMASYEEVLHLLRYRNWHARSLLDRKFKLICSELNGRYISNEFKVEVNVIHTANPMEHANHMAAQPQFVHPEHRSFVDLSGHNLANPHPFAVVPST

SEQ ID NO: 2228 - protein, 831 aa, synthetic construct
  REGION 1..831: note = CLSTN2 (Q9H4D0) SP+PP+ECD
MLPGRLCWVPLLLALGVGSGSGGGGDSRQRRLLAAKVNKHKPWIETSYHGVITENNDTVILDPPLVALDKDAPVPFAGEICAFKIHGQELPFEAVVLNKTSGEGRLRAKSPIDCELQKEYTFIIQAYDCGAGPHETAWKKSHKAVVHIQVKDVNEFAPTFKEPAYKAVVTEGKIYDSILQVEAIDEDCSPQYSQICNYEIVTTDVPFAIDRNGNIRNTEKLSYDKQHQYEILVTAYDCGQKPAAQDTLVQVDVKPVCKPGWQDWTKRIEYQPGSGSMPLFPSIHLETCDGAVSSLQIVTELQTNYIGKGCDRETYSEKSLQKLCGASSGIIDLLPSPSAATNWTAGLLVDSSEMIFKFDGRQGAKVPDGIVPKNLTDQFTITMWMKHGPSPGVRAEKETILCNSDKTEMNRHHYALYVHNCRLVFLLRKDFDQADTFRPAEFHWKLDQICDKEWHYYVINVEFPVVTLYMDGATYEPYLVTNDWPIHPSHIAMQLTVGACWQGGEVTKPQFAQFFHGSLASLTIRPGKMESQKVISCLQACKEGLDINSLESLGQGIKYHFNPSQSILVMEGDDIGNINRALQKVSYINSRQFPTAGVRRLKVSSKVQCFGEDVCISIPEVDAYVMVLQAIEPRITLRGTDHFWRPAAQFESARGVTLFPDIKIVSTFAKTEAPGDVKTTDPKSEVLEEMLHNLDFCDILVIGGDLDPRQECLELNHSELHQRHLDATNSTAGYSIYGVGSMSRYEQVLHHIRYRNWRPASLEARRFRIKCSELNGRYTSNEFNLEVSILHEDQVSDKEHVNHLIVQPPFLQSVHHPESRSSIQHSSVVPS

SEQ ID NO: 2229 - protein, 847 aa, synthetic construct
  REGION 1..847: note = CLSTN3 (Q9BQT9) SP+PP+ECD
MTLLLLPLLLASLLASCSCNKANKHKPWIEAEYQGIVMENDNTVLLNPPLFALDKDAPLRYAGEICGFRLHGSGVPFEAVILDKATGEGLIRAKEPVDCEAQKEHTFTIQAYDCGEGPDGANTKKSHKATVHVRVNDVNEFAPVFVERLYRAAVTEGKLYDRILRVEAIDGDCSPQYSQICYYEILTPNTPFLIDNDGNIENTEKLQYSGERLYKFTVTAYDCGKKRAADDAEVEIQVKPTCKPSWQGWNKRIEYAPGAGSLALFPGIRLETCDEPLWNIQATIELQTSHVAKGCDRDNYSERALRKLCGAATGEVDLLPMPGPNANWTAGLSVHYSQDSSLIYWFNGTQAVQVPLGGPSGLGSGPQDSLSDHFTLSFWMKHGVTPNKGKKEEETIVCNTVQNEDGFSHYSLTVHGCRIAFLYWPLLESARPVKFLWKLEQVCDDEWHHYALNLEFPTVTLYTDGISFDPALIHDNGLIHPPRREPALMIGACWTEEKNKEKEKGDNSTDTTQGDPLSIHHYFHGYLAGFSVRSGRLESREVIECLYACREGLDYRDFESLGKGMKVHVNPSQSLLTLEGDDVETFNHALQHVAYMNTLRFATPGVRPLRLTTAVKCFSEESCVSIPEVEGYVVVLQPDAPQILLSGTAHFARPAVDFEGTNGVPLFPDLQITCSISHQVEAKKDESWQGTVTDTRMSDEIVHNLDGCEISLVGDDLDPERESLLLDTTSLQQRGLELTNTSAYLTIAGVESITVYEEILRQARYRLRHGAALYTRKFRLSCSEMNGRYSSNEFIVEVNVLHSMNRVAHPSHVLSSQQFLHRGHQPPPEMAGHSLASSHRNSMIPSA

SEQ ID NO: 2230 - protein, 1283 aa, synthetic construct
  REGION 1..1283: note = CNTNAP1 (P78357) SP+PP+ECD
MMHLRLFCILLAAVSGAEGWGYYGCDEELVGPLYARSLGASSYYSLLTAPRFARLHGISGWSPRIGDPNPWLQIDLMKKHRIRAVATQGSFNSWDWVTRYMLLYGDRVDSWTPFYQRGHNSTFFGNVNESAVVRHDLHFHFTARYIRIVPLAWNPRGKIGLRLGLYGCPYKADILYFDGDDAISYRFPRGVSRSLWDVFAFSFKTEEKDGLLLHAEGAQGDYVTLELEGAHLLLHMSLGSSPIQPRPGHTTVSAGGVLNDQHWHYVRVDRFGRDVNFTLDGYVQRFILNGDFERLNLDTEMFIGGLVGAARKNLAYRHNFRGCIENVIFNRVNIADLAVRRHSRITFEGKVAFRCLDPVPHPINFGGPHNFVQVPGFPRRGRLAVSFRFRTWDLTGLLLFSRLGDGLGHVELTLSEGQVNVSIAQSGRKKLQFAAGYRLNDGFWHEVNFVAQENHAVISIDDVEGAEVRVSYPLLIRTGTSYFFGGCPKPASRWDCHSNQTAFHGCMELLKVDGQLVNLTLVEGRRLGFYAEVLFDTCGITDRCSPNMCEHDGRCYQSWDDFICYCELTGYKGETCHTPLYKESCEAYRLSGKTSGNFTIDPDGSGPLKPFVVYCDIRENRAWTVVRHDRLWTTRVTGSSMERPFLGAIQYWNASWEEVSALANASQHCEQWIEFSCYNSRLLNTAGGYPYSFWIGRNEEQHFYWGGSQPGIQRCACGLDRSCVDPALYCNCDADQPQWRTDKGLLTFVDHLPVTQVVIGDTNRSTSEAQFFLRPLRCYGDRNSWNTISFHTGAALRFPPIRANHSLDVSFYFRTSAPSGVFLENMGGPYCQWRRPYVRVELNTSRDVVFAFDVGNGDENLTVHSDDFEFNDDEWHLVRAEINVKQARLRVDHRPWVLRPMPLQTYIWMEYDQPLYVGSAELKRRPFVGCLRAMRLNGVTLNLEGRANASEGTSPNCTGHCAHPRLPCFHGGRCVERYSYYTCDCDLTAFDGPYCNHDIGGFFEPGTWMRYNLQSALRSAAREFSHMLSRPVPGYEPGYIPGYDTPGYVPGYHGPGYRLPDYPRPGRPVPGYRGPVYNVTGEEVSFSFSTSSAPAVLLYVSSFVRDYMAVLIKDDGTLQLRYQLGTSPYVYQLTTRPVTDGQPHSINITRVYRNLFIQVDYFPLTEQKFSLLVDSQLDSPKALYLGRVMETGVIDPEIQRYNTPGFSGCLSGVRFNNVAPLKTHFRTPRPMTAELAEALRVQGELSESNCGAMPRLVSEVPPELDPWYLPPDFPYYHDEGWVA

SEQ ID NO: 2231 - protein, 1262 aa, synthetic construct
  REGION 1..1262: note = CNTNAP2 (Q9UHC6) SP+PP+ECD
MQAAPRAGCGAALLLWIVSSCLCRAWTAPSTSQKCDEPLVSGLPHVAFSSSSSISGSYSPGYAKINKRGGAGGWSPSDSDHYQWLQVDFGNRKQISAIATQGRYSSSDWVTQYRMLYSDTGRNWKPYHQDGNIWAFPGNINSDGVVRHELQHPIIARYVRIVPLDWNGEGRIGLRIEVYGCSYWADVINFDGHVVLPYRFRNKKMKTLKDVIALNFKTSESEGVILHGEGQQGDYITLELKKAKLVLSLNLGSNQLGPIYGHTSVMTGSLLDDHHWHSVVIERQGRSINLTLDRSMQHFRTNGEFDYLDLDYEITFGGIPFSGKPSSSSRKNFKGCMESINYNGVNITDLARRKKLEPSNVGNLSFSCVEPYTVPVFFNATSYLEVPGRLNQDLFSVSFQFRTWNPNGLLVFSHFADNLGNVEIDLTESKVGVHINITQTKMSQIDISSGSGLNDGQWHEVRFLAKENFAILTIDGDEASAVRTNSPLQVKTGEKYFFGGFLNQMNNSSHSVLQPSFQGCMQLIQVDDQLVNLYEVAQRKPGSFANVSIDMCAIIDRCVPNHCEHGGKCSQTWDSFKCTCDETGYSGATCHNSIYEPSCEAYKHLGQTSNYYWIDPDGSGPLGPLKVYCNMTEDKVWTIVSHDLQMQTPVVGYNPEKYSVTQLVYSASMDQISAITDSAEYCEQYVSYFCKMSRLLNTPDGSPYTWWVGKANEKHYYWGGSGPGIQKCACGIERNCTDPKYYCNCDADYKQWRKDAGFLSYKDHLPVSQVVVGDTDRQGSEAKLSVGPLRCQGDRNYWNAASFPNPSSYLHFSTFQGETSADISFYFKTLTPWGVFLENMGKEDFIKLELKSATEVSFSFDVGNGPVEIVVRSPTPLNDDQWHRVTAERNVKQASLQVDRLPQQIRKAPTEGHTRLELYSQLFVGGAGGQQGFLGCIRSLRMNGVTLDLEERAKVTSGFISGCSGHCTSYGTNCENGGKCLERYHGYSCDCSNTAYDGTFCNKDVGAFFEEGMWLRYNFQAPATNARDSSSRVDNAPDQQNSHPDLAQEEIRFSFSTTKAPCILLYISSFTTDFLAVLVKPTGSLQIRYNLGGTREPYNIDVDHRNMANGQPHSVNITRHEKTIFLKLDHYPSVSYHLPSSSDTLFNSPKSLFLGKVIETGKIDQEIHKYNTPGFTGCLSRVQFNQIAPLKAALRQTNASAHVHIQGELVESNCGASPLTLSPMSSATDPWHLDHLDSASADFPYNPGQGQAIRNGVNRNSA

SEQ ID NO: 2232 - protein, 1245 aa, synthetic construct
  REGION 1..1245: note = CNTNAP3 (Q9BZ76) SP+PP+ECD
MASVAWAVLKVLLLLPTQTWSPVGAGNPPDCDAPLASALPRSSFSSSSELSSSHGPGFSRLNRRDGAGGWTPLVSNKYQWLQIDLGERMEVTAVATQGGYGSSDWVTSYLLMFSDGGRNWKQYRREESIWGFPGNTNADSVVHYRLQPPFEARFLRFLPLAWNPRGRIGMRIEVYGCAYKSEVVYFDGQSALLYRLDKKPLKPIRDVISLKFKAMQSNGILLHREGQHGNHITLELIKGKLVFFLNSGNAKLPSTIAPVTLTLGSLLDDQHWHSVLIELLDTQVNFTVDKHTHHFQAKGDSSYLDLNFEISFGGIPTPGRSRAFRRKSFHGCLENLYYNGVDVTELAKKHKPQILMMGNVSFSCPQPQTVPVTFLSSRSYLALPGNSGEDKVSVTFQFRTWNRAGHLLFGELRRGSGSFVLFLKDGKLKLSLFQPGQSPRNVTAGAGLNDGQWHSVSFSAKWSHMNVVVDDDTAVQPLVAVLIDSGDTYYFGGCLDNSSGSGCKSPLGGFQGCLRLITIGDKAVDPILVQQGALGSFRDLQIDSCGITDRCLPSYCEHGGECSQSWDTFSCDCLGTGYTGETCHSSLYEQSCEAHKHRGNPSGLYYIDADGSGPLGPFLVYCNMTADAAWTVVQHGGPDAVTLRGAPSGHPRSAVSFAYAAGAGQLRSAVNLAERCEQRLALRCGTARRPDSRDGTPLSWWVGRTNETHTSWGGSLPDAQKCTCGLEGNCIDSQYYCNCDAGRNEWTSDTIVLSQKEHLPVTQIVMTDAGRPHSEAAYTLGPLLCRGDQSFWNSASFNTETSYLHFPAFHGELTADVCFFFKTTVSSGVFMENLGITDFIRIELRAPTEVTFSFDVGNGPCEVTVQSPTPFNDNQWHHVRAERNVKGASLQVDQLPQKMQPAPADGHVRLQLNSQLFIGGTATRQRGFLGCIRSLQLNGVALDLEERATVTPGVEPGCAGHCSTYGHLCRNGGRCREKRRGVTCDCAFSAYDGPFCSNEISAYFATGSSMTYHFQEHYTLSENSSSLVSSLHRDVTLTREMITLSFRTTRTPSLLLYVSSFYEEYLSVILANNGSLQIRYKLDRHQNPDAFTFDFKNMADGQLHQVKINREEAVVMVEVNQSTKKQVILSSGTEFNAVKSLILGKVLEAAGADPDTRRAATSGFTGCLSAVRFGRAAPLKAALRPSGPSRVTVRGHVAPMARCAAGAASGSPARELAPRLAGGAGRSGPADEGEPLVNADRRDSA

SEQ ID NO: 2233 - protein, 1245 aa, synthetic construct
  REGION 1..1245: note = CNTNAP3B (Q96NU0) SP+PP+ECD
MASVAWAVLKVLLLLPTQTWSPVGAGNPPDCDSPLASALPRSSFSSSSELSSSHGPGFSRLNRRDGAGGWTPLVSNKYQWLQIDLGERMEVTAVATQGGYGSSDWVTSYLLMFSDGGRNWKQYRREESIWGFPGNTNADSVVHYRLQPPFEARFLRFLPLAWNPRGRIGMRIEVYGCAYKSEVVYFDGQSALLYTLDKKPLKPIRDVISLKFKAMQSNGILLHREGQHGNHITLELIKGKLVFFLNSGNAKLPSTIAPVTLTLGSLLDDQHWHSVLIELLDTQVNFTVDKHTHHFQAKGDSSNLDLNFEISFGGILSPGRSRAFTRKSFHGCLENLYYNGVDVTELAKKHKPQILMMGNVSFSCPQPQTVPVTFLSSRSYLALPGNSGEDKVSVTFQFRTWNRAGHLLFGELQRGSGSFVLFLKDGKLKLSLFQAGQSPRNVTAGAGLNDGQWHSVSFSAKWSHMNVVVDDDTAVQPLVAVLIDSGDTYYFGGCLGNSSGSGCKSPLGGFQGCLRLITIGDKAVDPILVQQGALGSFRDLQIDSCGITDRCLPSYCEHGGECSQSWDTFSCDCLGTGYTGETCHSSLYEQSCEAHKHRGNPSGLYYIDADGSGPLGPFLVYCNMTADSAWTVVRHGGPDAVTLRGAPSGHPLSAVSFAYAAGAGQLRAAVNLAERCEQRLALRCGTARRPDSRDGTPLSWWVGRTNETHTSWGGSLPDAQKCTCGLEGNCIDSQYYCNCDAGQNEWTSDTIVLSQKEHLPVTQIVMTDTGQPHSEADYTLGPLLCRGDKSFWNSASFNTETSYLHFPAFHGELTADVCFFFKTTVSSGVFMENLGITDFIRIELRAPTEVTFSFDVGNGPCEVTVQSPTPFNDNQWHHVRAERNVKGASLQVDQLPQKMQPAPADGHVRLQLNSQLFIGGTATRQRGFLGCIRSLQLNGVALDLEERATVTPGVEPGCAGHCSTYGHLCRNGGRCREKRRGVTCDCAFSAYDGPFCSNEISAYFATGSSMTYHFQEHYTLSENSSSLVSSLHRDVTLTREMITLSFRTTRTPSLLLYVSSFYEEYLSVILANNGSLQIRYKLDRHQNPDAFTFDFKNMADGQLHQVKINREEAVVMVEVNQSAKKQVILSSGTEFNAVKSLILGKVLEAAGADPDTRRAATSGFTGCLSAVRFGCAAPLKAALRPSGPSRVTVRGHVAPMARCAAGAASGSPARELAPRLAGGAGRSGPVDEGEPLVNADRRDSA

SEQ ID NO: 2234 - protein, 1241 aa, synthetic construct
  REGION 1..1241: note = CNTNAP4 (Q9C0A0) SP+PP+ECD
MGSVTGAVLKTLLLLSTQNWNRVEAGNSYDCDDPLVSALPQASFSSSSELSSSHGPGFARLNRRDGAGGWSPLVSNKYQWLQIDLGERMEVTAVATQGGYGSSNWVTSYLLMFSDSGWNWKQYRQEDSIWGFSGNANADSVVYYRLQPSIKARFLRFIPLEWNPKGRIGMRIEVFGCAYRSEVVDLDGKSSLLYRFDQKSLSPIKDIISLKFKTMQSDGILLHREGPNGDHITLQLRRARLFLLINSGEAKLPSTSTLVNLTLGSLLDDQHWHSVLIQRLGKQVNFTVDEHRHHFHARGEFNLMNLDYEISFGGIPAPGKSVSFPHRNFHGCLENLYYNGVDIIDLAKQQKPQIIAMGNVSFSCSQPQSMPVTFLSSRSYLALPDFSGEEEVSATFQFRTWNKAGLLLFSELQLISGGILLFLSDGKLKSNLYQPGKLPSDITAGVELNDGQWHSVSLSAKKNHLSVAVDGQMASAAPLLGPEQIYSGGTYYFGGCPDKSFGSKCKSPLGGFQGCMRLISISGKVVDLISVQQGSLGNFSDLQIDSCGISDRCLPNYCEHGGECSQSWSTFHCNCTNTGYRGATCHNSIYEQSCEAYKHRGNTSGFYYIDSDGSGPLEPFLLYCNMTETAWTIIQHNGSDLTRVRNTNPENPYAGFFEYVASMEQLQATINRAEHCEQEFTYYCKKSRLVNKQDGTPLSWWVGRTNETQTYWGGSSPDLQKCTCGLEGNCIDSQYYCNCDADRNEWTNDTGLLAYKEHLPVTKIVITDTGRLHSEAAYKLGPLLCQGDRSFWNSASFDTEASYLHFPTFHGELSADVSFFFKTTASSGVFLENLGIADFIRIELRSPTVVTFSFDVGNGPFEISVQSPTHFNDNQWHHVRVERNMKEASLQVDQLTPKTQPAPADGHVLLQLNSQLFVGGTATRQRGFLGCIRSLQLNGMTLDLEERAQVTPEVQPGCRGHCSSYGKLCRNGGKCRERPIGFFCDCTFSAYTGPFCSNEISAYFGSGSSVIYNFQENYLLSKNSSSHAASFHGDMKLSREMIKFSFRTTRTPSLLLFVSSFYKEYLSVIIAKNGSLQIRYKLNKYQEPDVVNFDFKNMADGQLHHIMINREEGVVFIEIDDNRRRQVHLSSGTEFSAVKSLVLGRILEHSDVDQDTALAGAQGFTGCLSAVQLSHVAPLKAALHPSHPDPVTVTGHVTESSCMAQPGTDATSRERTHSFADHSGTIDDREPLANAIKSDSA

SEQ ID NO: 2235 - protein, 1237 aa, synthetic construct
  REGION 1..1237: note = CNTNAP5 (Q8WYK1) SP+PP+ECD
MDSLPRLTSVLTLLFSGLWHLGLTATNYNCDDPLASLLSPMAFSSSSDLTGTHSPAQLNWRVGTGGWSPADSNAQQWLQMDLGNRVEITAVATQGRYGSSDWVTSYSLMFSDTGRNWKQYKQEDSIWTFAGNMNADSVVHHKLLHSVRARFVRFVPLEWNPSGKIGMRVEVYGCSYKSDVADFDGRSSLLYRFNQKLMSTLKDVISLKFKSMQGDGVLFHGEGQRGDHITLELQKGRLALHLNLGDSKARLSSSLPSATLGSLLDDQHWHSVLIERVGKQVNFTVDKHTQHFRTKGETDALDIDYELSFGGIPVPGKPGTFLKKNFHGCIENLYYNGVNIIDLAKRRKHQIYTGNVTFSCSEPQIVPITFVNSSGSYLLLPGTPQIDGLSVSFQFRTWNKDGLLLSTELSEGSGTLLLSLEGGILRLVIQKMTERVAEILTGSNLNDGLWHSVSINARRNRITLTLDDEAAPPAPDSTWVQIYSGNSYYFGGCPDNLTDSQCLNPIKAFQGCMRLIFIDNQPKDLISVQQGSLGNFSDLHIDLCSIKDRCLPNYCEHGGSCSQSWTTFYCNCSDTSYTGATCHNSIYEQSCEVYRHQGNTAGFFYIDSDGSGPLGPLQVYCNITEDKIWTSVQHNNTELTRVRGANPEKPYAMALDYGGSMEQLEAVIDGSEHCEQEVAYHCRRSRLLNTPDGTPFTWWIGRSNERHPYWGGSPPGVQQCECGLDESCLDIQHFCNCDADKDEWTNDTGFLSFKDHLPVTQIVITDTDRSNSEAAWRIGPLRCYGDRRFWNAVSFYTEASYLHFPTFHAEFSADISFFFKTTALSGVFLENLGIKDFIRLEISSPSEITFAIDVGNGPVELVVQSPSLLNDNQWHYVRAERNLKETSLQVDNLPRSTRETSEEGHFRLQLNSQLFVGGTSSRQKGFLGCIRSLHLNGQKMDLEERAKVTSGVRPGCPGHCSSYGSICHNGGKCVEKHNGYLCDCTNSPYEGPFCKKEVSAVFEAGTSVTYMFQEPYPVTKNISLSSSAIYTDSAPSKENIALSFVTTQAPSLLLFINSSSQDFVVVLLCKNGSLQVRYHLNKEETHVFTIDADNFANRRMHHLKINREGRELTIQMDQQLRLSYNFSPEVEFRVIRSLTLGKVTENLGLDSEVAKANAMGFAGCMSSVQYNHIAPLKAALRHATVAPVTVHGTLTESSCGFMVDSDVNAVTTVHSSSDPFGKTDEREPLTNAVRSDS

SEQ ID NO: 2236 - protein, 1299 aa, synthetic construct
  REGION 1..1299: note = CPD (O75976) SP+PP+ECD
MASGRDERPPWRLGRLLLLMCLLLLGSSARAAHIKKAEATTTTTSAGAEAAEGQFDRYYHEEELESALREAAAAGLPGLARLFSIGRSVEGRPLWVLRLTAGLGSLIPEGDAGPDAAGPDAAGPLLPGRPQVKLVGNMHGDETVSRQVLIYLARELAAGYRRGDPRLVRLLNTTDVYLLPSLNPDGFERAREGDCGFGDGGPSGASGRDNSRGRDLNRSFPDQFSTGEPPALDEVPEVRALIEWIRRNKFVLSGNLHGGSVVASYPFDDSPEHKATGIYSKTSDDEVFKYLAKAYASNHPIMKTGEPHCPGDEDETFKDGITNGAHWYDVEGGMQDYNYVWANCFEITLELSCCKYPPASQLRQEWENNRESLITLIEKVHIGVKGFVKDSITGSGLENATISVAGINHNITTGRFGDFYRLLVPGTYNLTVVLTGYMPLTVTNVVVKEGPATEVDFSLRPTVTSVIPDTTEAVSTASTVAIPNILSGTSSSYQPIQPKDFHHHHFPDMEIFLRRFANEYPNITRLYSLGKSVESRELYVMEISDNPGVHEPGEPEFKYIGNMHGNEVVGRELLLNLIEYLCKNFGTDPEVTDLVHNTRIHLMPSMNPDGYEKSQEGDSISVIGRNNSNNFDLNRNFPDQFVQITDPTQPETIAVMSWMKSYPFVLSANLHGGSLVVNYPFDDDEQGLATYSKSPDDAVFQQIALSYSKENSQMFQGRPCKNMYPNEYFPHGITNGASWYNVPGGMQDWNYLQTNCFEVTIELGCVKYPLEKELPNFWEQNRRSLIQFMKQVHQGVRGFVLDATDGRGILNATISVAEINHPVTTYKTGDYWRLLVPGTYKITASARGYNPVTKNVTVKSEGAIQVNFTLVRSSTDSNNESKKGKGASSSTNDASDPTTKEFETLIKDLSAENGLESLMLRSSSNLALALYRYHSYKDLSEFLRGLVMNYPHITNLTNLGQSTEYRHIWSLEISNKPNVSEPEEPKIRFVAGIHGNAPVGTELLLALAEFLCLNYKKNPAVTQLVDRTRIVIVPSLNPDGRERAQEKDCTSKIGQTNARGKDLDTDFTNNASQPETKAIIENLIQKQDFSLSVALDGGSMLVTYPYDKPVQTVENKETLKHLASLYANNHPSMHMGQPSCPNKSDENIPGGVMRGAEWHSHLGSMKDYSVTYGHCPEITVYTSCCYFPSAARLPSLWADNKRSLLSMLVEVHKGVHGFVKDKTGKPISKAVIVLNEGIKVQTKEGGYFHVLLAPGVHNIIAIADGYQQQHSQVFVHHDAASSVVIVFDTDNRIFGLPRE

SEQ ID NO: 2237 - protein, 1971 aa, synthetic construct
  REGION 1..1971: note = CR1 (P17927) SP+PP+ECD
MGASSPRSPEPVGPPAPGLPFCCGGSLLAVVVLLALPVAWGQCNAPEWLPFARPTNLTDEFEFPIGTYLNYECRPGYSGRPFSIICLKNSVWTGAKDRCRRKSCRNPPDPVNGMVHVIKGIQFGSQIKYSCTKGYRLIGSSSATCIISGDTVIWDNETPICDRIPCGLPPTITNGDFISTNRENFHYGSVVTYRCNPGSGGRKVFELVGEPSIYCTSNDDQVGIWSGPAPQCIIPNKCTPPNVENGILVSDNRSLFSLNEVVEFRCQPGFVMKGPRRVKCQALNKWEPELPSCSRVCQPPPDVLHAERTQRDKDNFSPGQEVFYSCEPGYDLRGAASMRCTPQGDWSPAAPTCEVKSCDDFMGQLLNGRVLFPVNLQLGAKVDFVCDEGFQLKGSSASYCVLAGMESLWNSSVPVCEQIFCPSPPVIPNGRHTGKPLEVFPFGKTVNYTCDPHPDRGTSFDLIGESTIRCTSDPQGNGVWSSPAPRCGILGHCQAPDHFLFAKLKTQTNASDFPIGTSLKYECRPEYYGRPFSITCLDNLVWSSPKDVCKRKSCKTPPDPVNGMVHVITDIQVGSRINYSCTTGHRLIGHSSAECILSGNAAHWSTKPPICQRIPCGLPPTIANGDFISTNRENFHYGSVVTYRCNPGSGGRKVFELVGEPSIYCTSNDDQVGIWSGPAPQCIIPNKCTPPNVENGILVSDNRSLFSLNEVVEFRCQPGFVMKGPRRVKCQALNKWEPELPSCSRVCQPPPDVLHAERTQRDKDNFSPGQEVFYSCEPGYDLRGAASMRCTPQGDWSPAAPTCEVKSCDDFMGQLLNGRVLFPVNLQLGAKVDFVCDEGFQLKGSSASYCVLAGMESLWNSSVPVCEQIFCPSPPVIPNGRHTGKPLEVFPFGKAVNYTCDPHPDRGTSFDLIGESTIRCTSDPQGNGVWSSPAPRCGILGHCQAPDHFLFAKLKTQTNASDFPIGTSLKYECRPEYYGRPFSITCLDNLVWSSPKDVCKRKSCKTPPDPVNGMVHVITDIQVGSRINYSCTTGHRLIGHSSAECILSGNTAHWSTKPPICQRIPCGLPPTIANGDFISTNRENFHYGSVVTYRCNLGSRGRKVFELVGEPSIYCTSNDDQVGIWSGPAPQCIIPNKCTPPNVENGILVSDNRSLFSLNEVVEFRCQPGFVMKGPRRVKCQALNKWEPELPSCSRVCQPPPEILHGEHTPSHQDNFSPGQEVFYSCEPGYDLRGAASLHCTPQGDWSPEAPRCAVKSCDDFLGQLPHGRVLFPLNLQLGAKVSFVCDEGFRLKGSSVSHCVLVGMRSLWNNSVPVCEHIFCPNPPAILNGRHTGTPSGDIPYGKEISYTCDPHPDRGMTFNLIGESTIRCTSDPHGNGVWSSPAPRCELSVRAGHCKTPEQFPFASPTIPINDFEFPVGTSLNYECRPGYFGKMFSISCLENLVWSSVEDNCRRKSCGPPPEPFNGMVHINTDTQFGSTVNYSCNEGFRLIGSPSTTCLVSGNNVTWDKKAPICEIISCEPPPTISNGDFYSNNRTSFHNGTVVTYQCHTGPDGEQLFELVGERSIYCTSKDDQVGVWSSPPPRCISTNKCTAPEVENAIRVPGNRSFFSLTEIIRFRCQPGFVMVGSHTVQCQTNGRWGPKLPHCSRVCQPPPEILHGEHTLSHQDNFSPGQEVFYSCEPSYDLRGAASLHCTPQGDWSPEAPRCTVKSCDDFLGQLPHGRVLLPLNLQLGAKVSFVCDEGFRLKGRSASHCVLAGMKALWNSSVPVCEQIFCPNPPAILNGRHTGTPFGDIPYGKEISYACDTHPDRGMTFNLIGESSIRCTSDPQGNGVWSSPAPRCELSVPAACPHPPKIQNGHYIGGHVSLYLPGMTISYICDPGYLLVGKGFIFCTDQGIWSQLDHYCKEVNCSFPLFMNGISKELEMKKVYHYGDYVTLKCEDGYTLEGSPWSQCQADDRWDPPLAKCTSRTHD

SEQ ID NO: 2238 - protein, 971 aa, synthetic construct
  REGION 1..971: note = CR2 (P20023) SP+PP+ECD
MGAAGLLGVFLALVAPGVLGISCGSPPPILNGRISYYSTPIAVGTVIRYSCSGTFRLIGEKSLLCITKDKVDGTWDKPAPKCEYFNKYSSCPEPIVPGGYKIRGSTPYRHGDSVTFACKTNFSMNGNKSVWCQANNMWGPTRLPTCVSVFPLECPALPMIHNGHHTSENVGSIAPGLSVTYSCESGYLLVGEKIINCLSSGKWSAVPPTCEEARCKSLGRFPNGKVKEPPILRVGVTANFFCDEGYRLQGPPSSRCVIAGQGVAWTKMPVCEEIFCPSPPPILNGRHIGNSLANVSYGSIVTYTCDPDPEEGVNFILIGESTLRCTVDSQKTGTWSGPAPRCELSTSAVQCPHPQILRGRMVSGQKDRYTYNDTVIFACMFGFTLKGSKQIRCNAQGTWEPSAPVCEKECQAPPNILNGQKEDRHMVRFDPGTSIKYSCNPGYVLVGEESIQCTSEGVWTPPVPQCKVAACEATGRQLLTKPQHQFVRPDVNSSCGEGYKLSGSVYQECQGTIPWFMEIRLCKEITCPPPPVIYNGAHTGSSLEDFPYGTTVTYTCNPGPERGVEFSLIGESTIRCTSNDQERGTWSGPAPLCKLSLLAVQCSHVHIANGYKISGKEAPYFYNDTVTFKCYSGFTLKGSSQIRCKADNTWDPEIPVCEKETCQHVRQSLQELPAGSRVELVNTSCQDGYQLTGHAYQMCQDAENGIWFKKIPLCKVIHCHPPPVIVNGKHTGMMAENFLYGNEVSYECDQGFYLLGEKKLQCRSDSKGHGSWSGPSPQCLRSPPVTRCPNPEVKHGYKLNKTHSAYSHNDIVYVDCNPGFIMNGSRVIRCHTDNTWVPGVPTCIKKAFIGCPPPPKTPNGNHTGGNIARFSPGMSILYSCDQGYLLVGEALLLCTHEGTWSQPAPHCKEVNCSSPADMDGIQKGLEPRKMYQYGAVVTLECEDGYMLEGSPQSQCQSDHQWNPPLAVCRSR

SEQ ID NO: 2239 - protein, 1347 aa, synthetic construct
  REGION 1..1347: note = CRB1 (P82279) SP+PP+ECD
MALKNINYLLIFYLSFSLLIYIKNSFCNKNNTRCLSNSCQNNSTCKDFSKDNDCSCSDTANNLDKDCDNMKDPCFSNPCQGSATCVNTPGERSFLCKCPPGYSGTICETTIGSCGKNSCQHGGICHQDPIYPVCICPAGYAGRFCEIDHDECASSPCQNGAVCQDGIDGYSCFCVPGYQGRHCDLEVDECASDPCKNEATCLNEIGRYTCICPHNYSGVNCELEIDECWSQPCLNGATCQDALGAYFCDCAPGFLGDHCELNTDECASQPCLHGGLCVDGENRYSCNCTGSGFTGTHCETLMPLCWSKPCHNNATCEDSVDNYTCHCWPGYTGAQCEIDLNECNSNPCQSNGECVELSSEKQYGRITGLPSSFSYHEASGYVCICQPGFTGIHCEEDVNECSSNPCQNGGTCENLPGNYTCHCPFDNLSRTFYGGRDCSDILLGCTHQQCLNNGTCIPHFQDGQHGFSCLCPSGYTGSLCEIATTLSFEGDGFLWVKSGSVTTKGSVCNIALRFQTVQPMALLLFRSNRDVFVKLELLSGYIHLSIQVNNQSKVLLFISHNTSDGEWHFVEVIFAEAVTLTLIDDSCKEKCIAKAPTPLESDQSICAFQNSFLGGLPVGMTSNGVALLNFYNMPSTPSFVGCLQDIKIDWNHITLENISSGSSLNVKAGCVRKDWCESQPCQSRGRCINLWLSYQCDCHRPYEGPNCLREYVAGRFGQDDSTGYVIFTLDESYGDTISLSMFVRTLQPSGLLLALENSTYQYIRVWLERGRLAMLTPNSPKLVVKFVLNDGNVHLISLKIKPYKIELYQSSQNLGFISASTWKIEKGDVIYIGGLPDKQETELNGGFFKGCIQDVRLNNQNLEFFPNPTNNASLNPVLVNVTQGCAGDNSCKSNPCHNGGVCHSRWDDFSCSCPALTSGKACEEVQWCGFSPCPHGAQCQPVLQGFECIANAVFNGQSGQILFRSNGNITRELTNITFGFRTRDANVIILHAEKEPEFLNISIQDSRLFFQLQSGNSFYMLSLTSLQSVNDGTWHEVTLSMTDPLSQTSRWQMEVDNETPFVTSTIATGSLNFLKDNTDIYVGDRAIDNIKGLQGCLSTIEIGGIYLSYFENVHGFINKPQEEQFLKISTNSVVTGCLQLNVCNSNPCLHGGNCEDIYSSYHCSCPLGWSGKHCELNIDECFSNPCIHGNCSDRVAAYHCTCEPGYTGVNCEVDIDNCQSHQCANGATCISHTNGYSCLCFGNFTGKFCRQSRLPSTVCGNEKTNLTCYNGGNCTEFQTELKCMCRPGFTGEWCEKDIDECASDPCVNGGLCQDLLNKFQCLCDVAFAGERCEVDLADDLISDIFTT

SEQ ID NO: 2240 - protein, 1224 aa, synthetic construct
  REGION 1..1224: note = CRB2 (Q5IJ48) SP+PP+ECD
MALARPGTPDPQALASVLLLLLWAPALSLLAGTVPSEPPSACASDPCAPGTECQATESGGYTCGPMEPRGCATQPCHHGALCVPQGPDPTGFRCYCVPGFQGPRCELDIDECASRPCHHGATCRNLADRYECHCPLGYAGVTCEMEVDECASAPCLHGGSCLDGVGSFRCVCAPGYGGTRCQLDLDECQSQPCAHGGTCHDLVNGFRCDCAGTGYEGTHCEREVLECASAPCEHNASCLEGLGSFRCLCWPGYSGELCEVDEDECASSPCQHGGRCLQRSDPALYGGVQAAFPGAFSFRHAAGFLCHCPPGFEGADCGVEVDECASRPCLNGGHCQDLPNGFQCHCPDGYAGPTCEEDVDECLSDPCLHGGTCSDTVAGYICRCPETWGGRDCSVQLTGCQGHTCPLAATCIPIFESGVHSYVCHCPPGTHGPFCGQNTTFSVMAGSPIQASVPAGGPLGLALRFRTTLPAGTLATRNDTKESLELALVAATLQATLWSYSTTVLVLRLPDLALNDGHWHQVEVVLHLATLELRLWHEGCPARLCVASGPVALASTASATPLPAGISSAQLGDATFAGCLQDVRVDGHLLLPEDLGENVLLGCERREQCRPLPCVHGGSCVDLWTHFRCDCARPHRGPTCADEIPAATFGLGGAPSSASFLLQELPGPNLTVSFLLRTRESAGLLLQFANDSAAGLTVFLSEGRIRAEVPGSPAVVLPGRWDDGLRHLVMLSFGPDQLQDLGQHVHVGGRLLAADSQPWGGPFRGCLQDLRLDGCHLPFFPLPLDNSSQPSELGGRQSWNLTAGCVSEDMCSPDPCFNGGTCLVTWNDFHCTCPANFTGPTCAQQLWCPGQPCLPPATCEEVPDGFVCVAEATFREGPPAAFSGHNASSGRLLGGLSLAFRTRDSEAWLLRAAAGALEGVWLAVRNGSLAGGVRGGHGLPGAVLPIPGPRVADGAWHRVRLAMERPAATTSRWLLWLDGAATPVALRGLASDLGFLQGPGAVRILLAENFTGCLGRVALGGLPLPLARPRPGAAPGAREHFASWPGTPAPILGCRGAPVCAPSPCLHDGACRDLFDAFACACGPGWEGPRCEAHVDPCHSAPCARGRCHTHPDGRFECRCPPGFGGPRCRLPVPSKECSLNVTCLDGSPCEGGSPAANCSCLEGLAGQRCQVPTLPCEANPCLNGGTCRAAGGVSECICNARFSGQFCEVAKGLPLPLPFPLLE

SEQ ID NO: 2241 - protein, 59 aa, synthetic construct
  REGION 1..59: note = CRB3 (Q9BUF7) SP+PP+ECD
MANPGLGLLLALGLPFLLARWGRAWGQIQTTSANENSTVLPSSTSSSSDGNLRPEAITA

SEQ ID NO: 2242 - protein, 939 aa, synthetic construct
  REGION 1..939: note = CRIM1 (Q9NZV1) SP+PP+ECD
MYLVAGDRGLAGCGHLLVSLLGLLLLLARSGTRALVCLPCDESKCEEPRNCPGSIVQGVCGCCYTCASQRNESCGGTFGIYGTCDRGLRCVIRPPLNGDSLTEYEAGVCEDENWTDDQLLGFKPCNENLIAGCNIINGKCECNTIRTCSNPFEFPSQDMCLSALKRIEEEKPDCSKARCEVQFSPRCPEDSVLIEGYAPPGECCPLPSRCVCNPAGCLRKVCQPGNLNILVSKASGKPGECCDLYECKPVFGVDCRTVECPPVQQTACPPDSYETQVRLTADGCCTLPTRCECLSGLCGFPVCEVGSTPRIVSRGDGTPGKCCDVFECVNDTKPACVFNNVEYYDGDMFRMDNCRFCRCQGGVAICFTAQCGEINCERYYVPEGECCPVCEDPVYPFNNPAGCYANGLILAHGDRWREDDCTFCQCVNGERHCVATVCGQTCTNPVKVPGECCPVCEEPTIITVDPPACGELSNCTLTGKDCINGFKRDHNGCRTCQCINTEELCSERKQGCTLNCPFGFLTDAQNCEICECRPRPKKCRPIICDKYCPLGLLKNKHGCDICRCKKCPELSCSKICPLGFQQDSHGCLICKCREASASAGPPILSGTCLTVDGHHHKNEESWHDGCRECYCLNGREMCALITCPVPACGNPTIHPGQCCPSCADDFVVQKPELSTPSICHAPGGEYFVEGETWNIDSCTQCTCHSGRVLCETEVCPPLLCQNPSRTQDSCCPQCTDQPFRPSLSRNNSVPNYCKNDEGDIFLAAESWKPDVCTSCICIDSVISCFSESCPSVSCERPVLRKGQCCPYCIEDTIPKKVVCHFSGKAYADEERWDLDSCTHCYCLQGQTLCSTVSCPPLPCVEPINVEGSCCPMCPEMYVPEPTNIPIEKTNHRGEVDLEVPLWPTPSENDIVHLPRDMGHLQVDYRDNRLHPSEDSSLDS

SEQ ID NO: 2243 - protein, 231 aa, synthetic construct
  REGION 1..231: note = CRLF2 (Q9HC73) SP+PP+ECD
MGRLVLLWGAAVFLLGGWMALGQGGAAEGVQIQIIYFNLETVQVTWNASKYSRTNLTFHYRFNGDEAYDQCTNYLLQEGHTSGCLLDAEQRDDILYFSIRNGTHPVFTASRWMVYYLKPSSPKHVRFSWHQDAVTVTCSDLSYGDLLYEVQYRSPFDTEWQSKQENTCNVTIEGLDAEKCYSFWVRVKAMEDVYGPDTYPSDWSEVTCWQRGEIRDACAETPTPPKPKLSK

SEQ ID NO: 2244 - protein, 287 aa, synthetic construct
  REGION 1..287: note = CRTAM (O95727) SP+PP+ECD
MWWRVLSLLAWFPLQEASLTNHTETITVEEGQTLTLKCVTSLRKNSSLQWLTPSGFTIFLNEYPALKNSKYQLLHHSANQLSITVPNVTLQDEGVYKCLHYSDSVSTKEVKVIVLATPFKPILEASVIRKQNGEEHVVLMCSTMRSKPPPQITWLLGNSMEVSGGTLHEFETDGKKCNTTSTLIIHTYGKNSTVDCIIRHRGLQGRKLVAPFRFEDLVTDEETASDALERNSLSSQDPQQPTSTVSVTEDSSTSEIDKEEKEQTTQDPDLTTEANPQYLGLARKKSG

SEQ ID NO: 2245 - protein, 496 aa, synthetic construct
  REGION 1..496: note = CSF1 (P09603) SP+PP+ECD
MTAPGAAGRCPPTTWLGSLLLLVCLLASRSITEEVSEYCSHMIGSGHLQSLQRLIDSQMETSCQITFEFVDQEQLKDPVCYLKKAFLLVQDIMEDTMRFRDNTPNAIAIVQLQELSLRLKSCFTKDYEEHDKACVRTFYETPLQLLEKVKNVFNETKNLLDKDWNIFSKNCNNSFAECSSQDVVTKPDCNCLYPKAIPSSDPASVSPHQPLAPSMAPVAGLTWEDSEGTEGSSLLPGEQPLHTVDPGSAKQRPPRSTCQSFEPPETPVVKDSTIGGSPQPRPSVGAFNPGMEDILDSAMGTNWVPEEASGEASEIPVPQGTELSPSRPGGGSMQTEPARPSNFLSASSPLPASAKGQQPADVTGTALPRVGPVRPTGQDWNHTPQKTDHPSALLRDPPEPGSPRISSLRPQGLSNPSTLSAQPQLSRSHSSGSVLPLGELEGRRSTRDRRSPAEPEGGPASEGAARPLPRFNSVPLTDTGHERQSEGSFSPQLQES

SEQ ID NO: 2246 - protein, 517 aa, synthetic construct
  REGION 1..517: note = CSF1R (P07333) SP+PP+ECD
MGPGVLLLLLVATAWHGQGIPVIEPSVPELVVKPGATVTLRCVGNGSVEWDGPPSPHWTLYSDGSSSILSTNNATFQNTGTYRCTEPGDPLGGSAAIHLYVKDPARPWNVLAQEVVVFEDQDALLPCLLTDPVLEAGVSLVRVRGRPLMRHTNYSFSPWHGFTIHRAKFIQSQDYQCSALMGGRKVMSISIRLKVQKVIPGPPALTLVPAELVRIRGEAAQIVCSASSVDVNFDVFLQHNNTKLAIPQQSDFHNNRYQKVLTLNLDQVDFQHAGNYSCVASNVQGKHSTSMFFRVVESAYLNLSSEQNLIQEVTVGEGLNLKVMVEAYPGLQGFNWTYLGPFSDHQPEPKLANATTKDTYRHTFTLSLPRLKPSEAGRYSFLARNPGGWRALTFELTLRYPPEVSVIWTFINGSGTLLCAASGYPQPNVTWLQCSGHTDRCDEAQVLQVWDDPYPEVLSQEPFHKVTVQSLLTVETLEHNQTYECRAHNSVGSGSWAFIPISAGAHTHPPDEFLFTP

SEQ ID NO: 2247 - protein, 320 aa, synthetic construct
  REGION 1..320: note = CSF2RA (P15509) SP+PP+ECD
MLLLVTSLLLCELPHPAFLLIPEKSDLRTVAPASSLNVRFDSRTMNLSWDCQENTTFSKCFLTDKKNRVVEPRLSNNECSCTFREICLHEGVTFEVHVNTSQRGFQQKLLYPNSGREGTAAQNFSCFIYNADLMNCTWARGPTAPRDVQYFLYIRNSKRRREIRCPYYIQDSGTHVGCHLDNLSGLTSRNYFLVNGTSREIGIQFFDSLLDTKKIERFNPPSNVTVRCNTTHCLVRWKQPRTYQKLSYLDFQYQLDVHRKNTQPGTENLLINVSGDLENRYNFPSSEPRAKHSVKIRAADVRILNWSSWSEAIEFGSDDG

SEQ ID NO: 2248 - protein, 443 aa, synthetic construct
  REGION 1..443: note = CSF2RB (P32927) SP+PP+ECD
MVLAQGLLSMALLALCWERSLAGAEETIPLQTLRCYNDYTSHITCRWADTQDAQRLVNVTLIRRVNEDLLEPVSCDLSDDMPWSACPHPRCVPRRCVIPCQSFVVTDVDYFSFQPDRPLGTRLTVTLTQHVQPPEPRDLQISTDQDHFLLTWSVALGSPQSHWLSPGDLEFEVVYKRLQDSWEDAAILLSNTSQATLGPEHLMPSSTYVARVRTRLAPGSRLSGRPSKWSPEVCWDSQPGDEAQPQNLECFFDGAAVLSCSWEVRKEVASSVSFGLFYKPSPDAGEEECSPVLREGLGSLHTRHHCQIPVPDPATHGQYIVSVQPRRAEKHIKSSVNIQMAPPSLNVTKDGDSYSLRWETMKMRYEHIDHTFEIQYRKDTATWKDSKTETLQNAHSMALPALEPSTRYWARVRVRTSRTGYNGIWSEWSEARSWDTESVLPMW

SEQ ID NO: 2249 - protein, 627 aa, synthetic construct
  REGION 1..627: note = CSF3R (Q99062) SP+PP+ECD
MARLGNCSLTWAALIILLLPGSLEECGHISVSAPIVHLGDPITASCIIKQNCSHLDPEPQILWRLGAELQPGGRQQRLSDGTQESIITLPHLNHTQAFLSCCLNWGNSLQILDQVELRAGYPPAIPHNLSCLMNLTTSSLICQWEPGPETHLPTSFTLKSFKSRGNCQTQGDSILDCVPKDGQSHCCIPRKHLLLYQNMGIWVQAENALGTSMSPQLCLDPMDVVKLEPPMLRTMDPSPEAAPPQAGCLQLCWEPWQPGLHINQKCELRHKPQRGEASWALVGPLPLEALQYELCGLLPATAYTLQIRCIRWPLPGHWSDWSPSLELRTTERAPTVRLDTWWRQRQLDPRTVQLFWKPVPLEEDSGRIQGYVVSWRPSGQAGAILPLCNTTELSCTFHLPSEAQEVALVAYNSAGTSRPTPVVFSESRGPALTRLHAMARDPHSLWVGWEPPNPWPQGYVIEWGLGPPSASNSNKTWRMEQNGRATGFLLKENIRPFQLYEIIVTPLYQDTMGPSQHVYAYSQEMAPSHAPELHLKHIGKTWAQLEWVPEPPELGKSPLTHYTIFWTNAQNQSFSAILNASSRGFVLHGLEPASLYHIHLMAASQAGATNSTVLTLMTLTPEGSELH

SEQ ID NO: 2250 - protein, 3487 aa, synthetic construct
  REGION 1..3487: note = CSMD1 (Q96PZ7) SP+PP+ECD
MTAWRRFQSLLLLLGLLVLCARLLTAAKGQNCGGLVQGPNGTIESPGFPHGYPNYANCTWIIITGERNRIQLSFHTFALEEDFDILSVYDGQPQQGNLKVRLSGFQLPSSIVSTGSILTLWFTTDFAVSAQGFKALYEVLPSHTCGNPGEILKGVLHGTRFNIGDKIRYSCLPGYILEGHAILTCIVSPGNGASWDFPAPFCRAEGACGGTLRGTSSSISSPHFPSEYENNADCTWTILAEPGDTIALVFTDFQLEEGYDFLEISGTEAPSIWLTGMNLPSPVISSKNWLRLHFTSDSNHRRKGFNAQFQVKKAIELKSRGVKMLPSKDGSHKNSVLSQGGVALVSDMCPDPGIPENGRRAGSDFRVGANVQFSCEDNYVLQGSKSITCQRVTETLAAWSDHRPICRARTCGSNLRGPSGVITSPNYPVQYEDNAHCVWVITTTDPDKVIKLAFEEFELERGYDTLTVGDAGKVGDTRSVLYVLTGSSVPDLIVSMSNQMWLHLQSDDSIGSPGFKAVYQEIEKGGCGDPGIPAYGKRTGSSFLHGDTLTFECPAAFELVGERVITCQQNNQWSGNKPSCVFSCFFNFTASSGIILSPNYPEEYGNNMNCVWLIISEPGSRIHLIFNDFDVEPQFDFLAVKDDGISDITVLGTFSGNEVPSQLASSGHIVRLEFQSDHSTTGRGFNITYTTFGQNECHDPGIPINGRRFGDRFLLGSSVSFHCDDGFVKTQGSESITCILQDGNVVWSSTVPRCEAPCGGHLTASSGVILPPGWPGYYKDSLHCEWIIEAKPGHSIKITFDRFQTEVNYDTLEVRDGPASSSPLIGEYHGTQAPQFLISTGNFMYLLFTTDNSRSSIGFLIHYESVTLESDSCLDPGIPVNGHRHGGDFGIRSTVTFSCDPGYTLSDDEPLVCERNHQWNHALPSCDALCGGYIQGKSGTVLSPGFPDFYPNSLNCTWTIEVSHGKGVQMIFHTFHLESSHDYLLITEDGSFSEPVARLTGSVLPHTIKAGLFGNFTAQLRFISDFSISYEGFNITFSEYDLEPCDDPGVPAFSRRIGFHFGVGDSLTFSCFLGYRLEGATKLTCLGGGRRVWSAPLPRCVAECGASVKGNEGTLLSPNFPSNYDNNHECIYKIETEAGKGIHLRTRSFQLFEGDTLKVYDGKDSSSRPLGTFTKNELLGLILNSTSNHLWLEFNTNGSDTDQGFQLTYTSFDLVKCEDPGIPNYGYRIRDEGHFTDTVVLYSCNPGYAMHGSNTLTCLSGDRRVWDKPLPSCIAECGGQIHAATSGRILSPGYPAPYDNNLHCTWIIEADPGKTISLHFIVFDTEMAHDILKVWDGPVDSDILLKEWSGSALPEDIHSTFNSLTLQFDSDFFISKSGFSIQFSTSIAATCNDPGMPQNGTRYGDSREAGDTVTFQCDPGYQLQGQAKITCVQLNNRFFWQPDPPTCIAACGGNLTGPAGVILSPNYPQPYPPGKECDWRVKVNPDFVIALIFKSFNMEPSYDFLHIYEGEDSNSPLIGSYQGSQAPERIESSGNSLFLAFRSDASVGLSGFAIEFKEKPREACFDPGNIMNGTRVGTDFKLGSTITYQCDSGYKILDPSSITCVIGADGKPSWDQVLPSCNAPCGGQYTGSEGVVLSPNYPHNYTAGQICLYSITVPKEFVVFGQFAYFQTALNDLAELFDGTHAQARLLSSLSGSHSGETLPLATSNQILLRFSAKSGASARGFHFVYQAVPRTSDTQCSSVPEPRYGRRIGSEFSAGSIVRFECNPGYLLQGSTALHCQSVPNALAQWNDTIPSCVVPCSGNFTQRRGTILSPGYPEPYGNNLNCIWKIIVTEGSGIQIQVISFATEQNWDSLEIHDGGDVTAPRLGSFSGTTVPALLNSTSNQLYLHFQSDISVAAAGFHLEYKTVGLAACQEPALPSNSIKIGDRYMVNDVLSFQCEPGYTLQGRSHISCMPGTVRRWNYPSPLCIATCGGTLSTLGGVILSPGFPGSYPNNLDCTWRISLPIGYGAHIQFLNFSTEANHDFLEIQNGPYHTSPMIGQFSGTDLPAALLSTTHETLIHFYSDHSQNRQGFKLAYQAYELQNCPDPPPFQNGYMINSDYSVGQSVSFECYPGYILIGHPVLTCQHGINRNWNYPFPRCDAPCGYNVTSQNGTIYSPGFPDEYPILKDCIWLITVPPGHGVYINFTLLQTEAVNDYIAVWDGPDQNSPQLGVFSGNTALETAYSSTNQVLLKFHSDFSNGGFFVLNFHAFQLKKCQPPPAVPQAEMLTEDDDFEIGDFVKYQCHPGYTLVGTDILTCKLSSQLQFEGSLPTCEAQCPANEVRTGSSGVILSPGYPGNYFNSQTCSWSIKVEPNYNITIFVDTFQSEKQFDALEVFDGSSGQSPLLVVLSGNHTEQSNFTSRSNQLYLRWSTDHATSKKGFKIRYAAPYCSLTHPLKNGGILNRTAGAVGSKVHYFCKPGYRMVGHSNATCRRNPLGMYQWDSLTPLCQAVSCGIPESPGNGSFTGNEFTLDSKVVYECHEGFKLESSQQATAVCQEDGLWSNKGKPPTCKPVACPSIEAQLSEHVIWRLVSGSLNEYGAQVLLSCSPGYYLEGWRLLRCQANGTWNIGDERPSCRVISCGSLSFPPNGNKIGTLTVYGATAIFTCNTGYTLVGSHVRECLANGLWSGSETRCLAGHCGSPDPIVNGHISGDGFSYRDTVVYQCNPGFRLVGTSVRICLQDHKWSGQTPVCVPITCGHPGNPAHGFTNGSEFNLNDVVNFTCNTGYLLQGVSRAQCRSNGQWSSPLPTCRVVNCSDPGFVENAIRHGQQNFPESFEYGMSILYHCKKGFYLLGSSALTCMANGLWDRSLPKCLAISCGHPGVPANAVLTGELFTYGAVVHYSCRGSESLIGNDTRVCQEDSHWSGALPHCTGNNPGFCGDPGTPAHGSRLGDDFKTKSLLRFSCEMGHQLRGSPERTCLLNGSWSGLQPVCEAVSCGNPGTPTNGMIVSSDGILFSSSVIYACWEGYKTSGLMTRHCTANGTWTGTAPDCTIISCGDPGTLANGIQFGTDFTFNKTVSYQCNPGYVMEAVTSATIRCTKDGRWNPSKPVCKAVLCPQPPPVQNGTVEGSDFRWGSSISYSCMDGYQLSHSAILSCEGRGVWKGEIPQCLPVFCGDPGIPAEGRLSGKSFTYKSEVFFQCKSPFILVGSSRRVCQADGTWSGIQPTCIDPAHNTCPDPGTPHFGIQNSSRGYEVGSTVFFRCRKGYHIQGSTTRTCLANLTWSGIQTECIPHACRQPETPAHADVRAIDLPTFGYTLVYTCHPGFFLAGGSEHRTCKADMKWTGKSPVCKSKGVREVNETVTKTPVPSDVFFVNSLWKGYYEYLGKRQPATLTVDWFNATSSKVNATFSEASPVELKLTGIYKKEEAHLLLKAFQIKGQADIFVSKFENDNWGLDGYVSSGLERGGFTFQGDIHGKDFGKFKLERQDPLNPDQDSSSHYHGTSSGS

SEQ ID NO: 2251 - protein, 2224 aa, synthetic construct
  REGION 1..2224: note = CSPG4 (Q6UVK1) SP+PP+ECD
MQSGPRPPLPAPGLALALTLTMLARLASAASFFGENHLEVPVATALTDIDLQLQFSTSQPEALLLLAAGPADHLLLQLYSGRLQVRLVLGQEELRLQTPAETLLSDSIPHTVVLTVVEGWATLSVDGFLNASSAVPGAPLEVPYGLFVGGTGTLGLPYLRGTSRPLRGCLHAATLNGRSLLRPLTPDVHEGCAEEFSASDDVALGFSGPHSLAAFPAWGTQDEGTLEFTLTTQSRQAPLAFQAGGRRGDFIYVDIFEGHLRAVVEKGQGTVLLHNSVPVADGQPHEVSVHINAHRLEISVDQYPTHTSNRGVLSYLEPRGSLLLGGLDAEASRHLQEHRLGLTPEATNASLLGCMEDLSVNGQRRGLREALLTRNMAAGCRLEEEEYEDDAYGHYEAFSTLAPEAWPAMELPEPCVPEPGLPPVFANFTQLLTISPLVVAEGGTAWLEWRHVQPTLDLMEAELRKSQVLFSVTRGARHGELELDIPGAQARKMFTLLDVVNRKARFIHDGSEDTSDQLVLEVSVTARVPMPSCLRRGQTYLLPIQVNPVNDPPHIIFPHGSLMVILEHTQKPLGPEVFQAYDPDSACEGLTFQVLGTSSGLPVERRDQPGEPATEFSCRELEAGSLVYVHRGGPAQDLTFRVSDGLQASPPATLKVVAIRPAIQIHRSTGLRLAQGSAMPILPANLSVETNAVGQDVSVLFRVTGALQFGELQKQGAGGVEGAEWWATQAFHQRDVEQGRVRYLSTDPQHHAYDTVENLALEVQVGQEILSNLSFPVTIQRATVWMLRLEPLHTQNTQQETLTTAHLEATLEEAGPSPPTFHYEVVQAPRKGNLQLQGTRLSDGQGFTQDDIQAGRVTYGATARASEAVEDTFRFRVTAPPYFSPLYTFPIHIGGDPDAPVLTNVLLVVPEGGEGVLSADHLFVKSLNSASYLYEVMERPRHGRLAWRGTQDKTTMVTSFTNEDLLRGRLVYQHDDSETTEDDIPFVATRQGESSGDMAWEEVRGVFRVAIQPVNDHAPVQTISRIFHVARGGRRLLTTDDVAFSDADSGFADAQLVLTRKDLLFGSIVAVDEPTRPIYRFTQEDLRKRRVLFVHSGADRGWIQLQVSDGQHQATALLEVQASEPYLRVANGSSLVVPQGGQGTIDTAVLHLDTNLDIRSGDEVHYHVTAGPRWGQLVRAGQPATAFSQQDLLDGAVLYSHNGSLSPRDTMAFSVEAGPVHTDATLQVTIALEGPLAPLKLVRHKKIYVFQGEAAEIRRDQLEAAQEAVPPADIVFSVKSPPSAGYLVMVSRGALADEPPSLDPVQSFSQEAVDTGRVLYLHSRPEAWSDAFSLDVASGLGAPLEGVLVELEVLPAAIPLEAQNFSVPEGGSLTLAPPLLRVSGPYFPTLLGLSLQVLEPPQHGALQKEDGPQARTLSAFSWRMVEEQLIRYVHDGSETLTDSFVLMANASEMDRQSHPVAFTVTVLPVNDQPPILTTNTGLQMWEGATAPIPAEALRSTDGDSGSEDLVYTIEQPSNGRVVLRGAPGTEVRSFTQAQLDGGLVLFSHRGTLDGGFRFRLSDGEHTSPGHFFRVTAQKQVLLSLKGSQTLTVCPGSVQPLSSQTLRASSSAGTDPQLLLYRVVRGPQLGRLFHAQQDSTGEALVNFTQAEVYAGNILYEHEMPPEPFWEAHDTLELQLSSPPARDVAATLAVAVSFEAACPQRPSHLWKNKGLWVPEGQRARITVAALDASNLLASVPSPQRSEHDVLFQVTQFPSRGQLLVSEEPLHAGQPHFLQSQLAAGQLVYAHGGGGTQQDGFHFRAHLQGPAGASVAGPQTSEAFAITVRDVNERPPQPQASVPLRLTRGSRAPISRAQLSVVDPDSAPGEIEYEVQRAPHNGFLSLVGGGLGPVTRFTQADVDSGRLAFVANGSSVAGIFQLSMSDGASPPLPMSLAVDILPSAIEVQLRAPLEVPQALGRSSLSQQQLRVVSDREEPEAAYRLIQGPQYGHLLVGGRPTSAFSQFQIDQGEVVFAFTNFSSSHDHFRVLALARGVNASAVVNVTVRALLHVWAGGPWPQGATLRLDPTVLDAGELANRTGSVPRFRLLEGPRHGRVVRVPRARTEPGGSQLVEQFTQQDLEDGRLGLEVGRPEGRAPGPAGDSLTLELWAQGVPPAVASLDFATEPYNAARPYSVALLSVPEAARTEAGKPESSTPTGEPGPMASSPEPAVAKGGFLSFLEANMFS

SEQ ID NO: 2252 - protein, 423 aa, synthetic construct
  REGION 1..423: note = CSPG5 (O95196) SP+PP+ECD
MGRAGGGGPGRGPPPLLLFLGAALVLASGAVPAREAGSAVEAEELVKGSPAWEPPANDTREEAGPPAAGEDEASWTAPGGELAGPEEVLQESAAVTGTAWLEADSPGLGGVTAEAGSGDAQALPATLQAPHEVLGQSIMPPAIPEATEASGPPSPTPGDKLSPASELPKESPLEVWLNLGGSTPDPQGPELTYPFQGTLEPQPASDIIDIDYFEGLDGEGRGADLGSFPGSPGTSENHPDTEGETPSWSLLDLYDDFTPFDESDFYPTTSFYDDLDEEEEEEEDDKDAVGGGDLEDENELLVPTGKPGLGPGTGQPTSRWHAVPPQHTLGSVPGSSIALRPRPGEPGRDLASSENGTECRSGFVRHNGSCRSVCDLFPSYCHNGGQCYLVENIGAFCRCNTQDYIWHKGMRCESIITDFQVMC

SEQ ID NO: 2253 - protein, 161 aa, synthetic construct
  REGION 1..161: note = CTLA4 (P16410) SP+PP+ECD
MACLGFQRHKAQLNLATRTWPCTLLFFLLFIPVFCKAMHVAQPAVVLASSRGIASFVCEYASPGKATEVRVTVLRQADSQVTEVCAATYMMGNELTFLDDSICTGTSSGNQVNLTIQGLRAMDTGLYICKVELMYPPPYYLGIGNGTQIYVIDPEPCPDSD

SEQ ID NO: 2254 - protein, 568 aa, synthetic construct
  REGION 1..568: note = CUZD1 (Q86UP6) SP+PP+ECD
MELVRRLMPLTLLILSCLAELTMAEAEGNASCTVSLGGANMAETHKAMILQLNPSENCTWTIERPENKSIRIIFSYVQLDPDGSCESENIKVFDGTSSNGPLLGQVCSKNDYVPVFESSSSTLTFQIVTDSARIQRTVFVFYYFFSPNISIPNCGGYLDTLEGSFTSPNYPKPHPELAYCVWHIQVEKDYKIKLNFKEIFLEIDKQCKFDFLAIYDGPSTNSGLIGQVCGRVTPTFESSSNSLTVVLSTDYANSYRGFSASYTSIYAENINTTSLTCSSDRMRVIISKSYLEAFNSNGNNLQLKDPTCRPKLSNVVEFSVPLNGCGTIRKVEDQSITYTNIITFSASSTSEVITRQKQLQIIVKCEMGHNSTVEIIYITEDDVIQSQNALGKYNTSMALFESNSFEKTILESPYYVDLNQTLFVQVSLHTSDPNLVVFLDTCRASPTSDFASPTYDLIKSGCSRDETCKVYPLFGHYGRFQFNAFKFLRSMSSVYLQCKVLICDSSDHQSRCNQGCVSRSKRDISSYKWKTDSIIGPIRLKRDRSASGNSGFQHETHAEETPNQPFNS

SEQ ID NO: 2255 - protein, 341 aa, synthetic construct
  REGION 1..341: note = CX3CL1 (P78423) SP+PP+ECD
MAPISLSWLLRLATFCHLTVLLAGQHHGVTKCNITCSKMTSKIPVALLIHYQQNQASCGKRAIILETRQHRLFCADPKEQWVKDAMQHLDRQAAALTRNGGTFEKQIGEVKPRTTPAAGGMDESVVLEPEATGESSSLEPTPSSQEAQRALGTSPELPTGVTGSSGTRLPPTPKAQDGGPVGTELFRVPPVSTAATWQSSAPHQPGPSLWAEAKTSEAPSTQDPSTQASTASSPAPEENAPSEGQRVWGQGQSPRPENSLEREEMGPVPAHTDAFQDWGPGSMAHVSVVPVSSEGTPSREPVASGSWTPKAEEPIHATMDPQRLGVLITPVPDAQAATRRQ

SEQ ID NO: 2256 - protein, 237 aa, synthetic construct
  REGION 1..237: note = CXADR (P78310) SP+PP+ECD
MALLLCFVLLCGVVDFARSLSITTPEEMIEKAKGETAYLPCKFTLSPEDQGPLDIEWLISPADNQKVDQVIILYSGDKIYDDYYPDLKGRVHFTSNDLKSGDASINVTNLQLSDIGTYQCKVKKAPGVANKKIHLVVLVKPSGARCYVDGSEEIGSDFKIKCEPKEGSLPLQYEWQKLSDSQKMPTSWLAEMTSSVISVKNASSEYSGTYSCTVRNRVGSDQCLLRLNVVPPSNKAG

SEQ ID NO: 2257 - protein, 205 aa, synthetic construct
  REGION 1..205: note = CXCL16 (Q9H2A7) SP+PP+ECD
MGRDLRPGSRVLLLLLLLLLVYLTQPGNGNEGSVTGSCYCGKRISSDSPPSVQFMNRLRKHLRAYHRCLYYTRFQLLSWSVCGGNKDPWVQELMSCLDLKECGHAYSGIVAHQKHLLPTSPPISQASEGASSDIHTPAQMLLSTLQSTQRPTLPVGSLSSDKELTRPNETTIHTAGHSLAAGPEAGENQKQPEKNAGPTARTSAT

SEQ ID NO: 2258 - protein, 749 aa, synthetic construct
  REGION 1..749: note = DAG1 (Q14118) SP+PP+ECD
MRMSVGLSLLLPLSGRTFLLLLSVVMAQSHWPSEPSEAVRDWENQLEASMHSVLSDLHEAVPTVVGIPDGTAVVGRSFRVTIPTDLIASSGDIIKVSAAGKEALPSWLHWDSQSHTLEGLPLDTDKGVHYISVSATRLGANGSHIPQTSSVFSIEVYPEDHSELQSVRTASPDPGEVVSSACAADEPVTVLTVILDADLTKMTPKQRIDLLHRMRSFSEVELHNMKLVPVVNNRLFDMSAFMAGPGNAKKVVENGALLSWKLGCSLNQNSVPDIHGVEAPAREGAMSAQLGYPVVGWHIANKKPPLPKRVRRQIHATPTPVTAIGPPTTAIQEPPSRIVPTPTSPAIAPPTETMAPPVRDPVPGKPTVTIRTRGAIIQTPTLGPIQPTRVSEAGTTVPGQIRPTMTIPGYVEPTAVATPPTTTTKKPRVSTPKPATPSTDSTTTTTRRPTKKPRTPRPVPRVTTKVSITRLETASPPTRIRTTTSGVPRGGEPNQRPELKNHIDRVDAWVGTYFEVKIPSDTFYDHEDTTTDKLKLTLKLREQQLVGEKSWVQFNSNSQLMYGLPDSSHVGKHEYFMHATDKGGLSAVDAFEIHVHRRPQGDRAPARFKAKFVGDPALVLNDIHKKIALVKKLAFAFGDRNCSTITLQNITRGSIVVEWTNNTLPLEPCPKEQIAGLSRRIAEDDGKPRPAFSNALEPDFKATSITVTGSGSCRHLQFIPVVPPRRVPSEAPPTEVPDRDPEKSSEDDV

SEQ ID NO: 2259 - protein, 459 aa, synthetic construct
  REGION 1..459: note = DCBLD1 (Q8N8Z6) SP+PP+ECD
MVPGARGGGALARAAGRGLLALLLAVSAPLRLQAEELGDGCGHLVTYQDSGTMTSKNYPGTYPNHTVCEKTITVPKGKRLILRLGDLDIESQTCASDYLLFTSSSDQYGPYCGSMTVPKELLLNTSEVTVRFESGSHISGRGFLLTYASSDHPDLITCLERASHYLKTEYSKFCPAGCRDVAGDISGNMVDGYRDTSLLCKAAIHAGIIADELGGQISVLQRKGISRYEGILANGVLSRDGSLSDKRFLFTSNGCSRSLSFEPDGQIRASSSWQSVNESGDQVHWSPGQARLQDQGPSWASGDSSNNHKPREWLEIDLGEKKKITGIRTTGSTQSNFNFYVKSFVMNFKNNNSKWKTYKGIVNNEEKVFQGNSNFRDPVQNNFIPPIVARYVRVVPQTWHQRIALKVELIGCQITQGNDSLVWRKTSQSTSVSTKKEDETITRPIPSEETSTGINITTV

SEQ ID NO: 2260 - protein, 528 aa, synthetic construct
  REGION 1..528: note = DCBLD2 (Q96PD2) SP+PP+ECD
MASRAVVRARRCPQCPQVRAAAAAPAWAALPLSRSLPPCSNSSSFSMPLFLLLLLVLLLLLEDAGAQQGDGCGHTVLGPESGTLTSINYPQTYPNSTVCEWEIRVKMGERVRIKFGDFDIEDSDSCHFNYLRIYNGIGVSRTEIGKYCGLGLQMNHSIESKGNEITLLFMSGIHVSGRGFLASYSVIDKQDLITCLDTASNFLEPEFSKYCPAGCLLPFAEISGTIPHGYRDSSPLCMAGVHAGVVSNTLGGQISVVISKGIPYYESSLANNVTSVVGHLSTSLFTFKTSGCYGTLGMESGVIADPQITASSVLEWTDHTGQENSWKPKKARLKKPGPPWAAFATDEYQWLQIDLNKEKKITGIITTGSTMVEHNYYVSAYRILYSDDGQKWTVYREPGVEQDKIFQGNKDYHQDVRNNFLPPIIARFIRVNPTQWQQKIAMKMELLGCQFIPKGRPPKLTQPPPPRNSNDLKNTTAPPKIAKGRAPKFTQPLQPRSSNEFPAQTEQTTASPDIRNTTVTPNVTKDVA

SEQ ID NO: 2261 - protein, 1097 aa, synthetic construct
  REGION 1..1097: note = DCC (P43146) SP+PP+ECD
MENSLRCVWVPKLAFVLFGASLFSAHLQVTGFQIKAFTALRFLSEPSDAVTMRGGNVLLDCSAESDRGVPVIKWKKDGIHLALGMDERKQQLSNGSLLIQNILHSRHHKPDEGLYQCEASLGDSGSIISRTAKVAVAGPLRFLSQTESVTAFMGDTVLLKCEVIGEPMPTIHWQKNQQDLTPIPGDSRVVVLPSGALQISRLQPGDIGIYRCSARNPASSRTGNEAEVRILSDPGLHRQLYFLQRPSNVVAIEGKDAVLECCVSGYPPPSFTWLRGEEVIQLRSKKYSLLGGSNLLISNVTDDDSGMYTCVVTYKNENISASAELTVLVPPWFLNHPSNLYAYESMDIEFECTVSGKPVPTVNWMKNGDVVIPSDYFQIVGGSNLRILGVVKSDEGFYQCVAENEAGNAQTSAQLIVPKPAIPSSSVLPSAPRDVVPVLVSSRFVRLSWRPPAEAKGNIQTFTVFFSREGDNRERALNTTQPGSLQLTVGNLKPEAMYTFRVVAYNEWGPGESSQPIKVATQPELQVPGPVENLQAVSTSPTSILITWEPPAYANGPVQGYRLFCTEVSTGKEQNIEVDGLSYKLEGLKKFTEYSLRFLAYNRYGPGVSTDDITVVTLSDVPSAPPQNVSLEVVNSRSIKVSWLPPPSGTQNGFITGYKIRHRKTTRRGEMETLEPNNLWYLFTGLEKGSQYSFQVSAMTVNGTGPPSNWYTAETPENDLDESQVPDQPSSLHVRPQTNCIIMSWTPPLNPNIVVRGYIIGYGVGSPYAETVRVDSKQRYYSIERLESSSHYVISLKAFNNAGEGVPLYESATTRSITDPTDPVDYYPLLDDFPTSVPDLSTPMLPPVGVQAVALTHDAVRVSWADNSVPKNQKTSEVRLYTVRWRTSFSASAKYKSEDTTSLSYTATGLKPNTMYEFSVMVTKNRRSSTWSMTAHATTYEAAPTSAPKDLTVITREGKPRAVIVSWQPPLEANGKITAYILFYTLDKNIPIDDWIMETISGDRLTHQIMDLNLDTMYYFRIQARNSKGVGPLSDPILFRTLKVEHPDKMANDQGRHGDGGYWPVDTNLIDRSTLNEPPIGQMHPPHGSVTPQKNSN

SEQ ID NO: 2262 - protein, 2940 aa, synthetic construct
  REGION 1..2940: note = DCHS1 (Q96JQ0) SP+PP+ECD
MQKELGIVPSCPGMKSPRPHLLLPLLLLLLLLLGAGVPGAWGQAGSLDLQIDEEQPAGTLIGDISAGLPAGTAAPLMYFISAQEGSGVGTDLAIDEHSGVVRTARVLDREQRDRYRFTAVTPDGATVEVTVRVADINDHAPAFPQARAALQVPEHTAFGTRYPLEPARDADAGRLGTQGYALSGDGAGETFRLETRPGPDGTPVPELVVTGELDRENRSHYMLQLEAYDGGSPPRRAQALLDVTLLDINDHAPAFNQSRYHAVVSESLAPGSPVLQVFASDADAGVNGAVTYEINRRQSEGDGPFSIDAHTGLLQLERPLDFEQRRVHELVVQARDGGAHPELGSAFVTVHVRDANDNQPSMTVIFLSADGSPQVSEAAPPGQLVARISVSDPDDGDFAHVNVSLEGGEGHFALSTQDSVIYLVCVARRLDREERDAYNLRVTATDSGSPPLRAEAAFVLHVTDVNDNAPAFDRQLYRPEPLPEVALPGSFVVRVTARDPDQGTNGQVTYSLAPGAHTHWFSIDPTSGIITTAASLDYELEPQPQLIVVATDGGLPPLASSATVSVALQDVNDNEPQFQRTFYNASLPEGTQPGTCFLQVTATDADSGPFGLLSYSLGAGLGSSGSPPFRIDAHSGDVCTTRTLDRDQGPSSFDFTVTAVDGGGLKSMVYVKVFLSDENDNPPQFYPREYAASISAQSPPGTAVLRLRAHDPDQGSHGRLSYHILAGNSPPLFTLDEQSGLLTVAWPLARRANSVVQLEIGAEDGGGLQAEPSARVDISIVPGTPTPPIFEQLQYVFSVPEDVAPGTSVGIVQAHNPPGRLAPVTLSLSGGDPRGLFSLDAVSGLLQTLRPLDRELLGPVLELEVRAGSGVPPAFAVARVRVLLDDVNDNSPAFPAPEDTVLLPPNTAPGTPIYTLRALDPDSGVNSRVTFTLLAGGGGAFTVDPTTGHVRLMRPLGPSGGPAHELELEARDGGSPPRTSHFRLRVVVQDVGTRGLAPRFNSPTYRVDLPSGTTAGTQVLQVQAQAPDGGPITYHLAAEGASSPFGLEPQSGWLWVRAALDREAQELYILKVMAVSGSKAELGQQTGTATVRVSILNQNEHSPRLSEDPTFLAVAENQPPGTSVGRVFATDRDSGPNGRLTYSLQQLSEDSKAFRIHPQTGEVTTLQTLDREQQSSYQLLVQVQDGGSPPRSTTGTVHVAVLDLNDNSPTFLQASGAAGGGLPIQVPDRVPPGTLVTTLQAKDPDEGENGTILYTLTGPGSELFSLHPHSGELLTAAPLIRAERPHYVLTLSAHDQGSPPRSASLQLLVQVLPSARLAEPPPDLAERDPAAPVPVVLTVTAAEGLRPGSLLGSVAAPEPAGVGALTYTLVGGADPEGTFALDAASGRLYLARPLDFEAGPPWRALTVRAEGPGGAGARLLRVQVQVQDENEHAPAFARDPLALALPENPEPGAALYTFRASDADGPGPNSDVRYRLLRQEPPVPALRLDARTGALSAPRGLDRETTPALLLLVEATDRPANASRRRAARVSARVFVTDENDNAPVFASPSRVRLPEDQPPGPAALHVVARDPDLGEAARVSYRLASGGDGHFRLHSSTGALSVVRPLDREQRAEHVLTVVASDHGSPPRSATQVLTVSVADVNDEAPTFQQQEYSVLLRENNPPGTSLLTLRATDPDVGANGQVTYGGVSSESFSLDPDTGVLTTLRALDREEQEEINLTVYAQDRGSPPQLTHVTVRVAVEDENDHAPTFGSAHLSLEVPEGQDPQTLTMLRASDPDVGANGQLQYRILDGDPSGAFVLDLASGEFGTMRPLDREVEPAFQLRIEARDGGQPALSATLLLTVTVLDANDHAPAFPVPAYSVEVPEDVPAGTLLLQLQAHDPDAGANGHVTYYLGAGTAGAFLLEPSSGELRTAAALDREQCPSYTFSVSAVDGAAAGPLSTTVSVTITVRDVNDHAPTFPTSPLRLRLPRPGPSFSTPTLALATLRAEDRDAGANASILYRLAGTPPPGTTVDSYTGEIRVARSPVALGPRDRVLFIVATDLGRPARSATGVIIVGLQGEAERGPRFPRASSEATIRENAPPGTPIVSPRAVHAGGTNGPITYSILSGNEKGTFSIQPSTGAITVRSAEGLDFEVSPRLRLVLQAESGGAFAFTVLTLTLQDANDNAPRFLRPHYVAFLPESRPLEGPLLQVEADDLDQGSGGQISYSLAASQPARGLFHVDPTTGTITTTAILDREIWAETRLVLMATDRGSPALVGSATLTVMVIDTNDNRPTIPQPWELRVSEDALLGSEIAQVTGNDVDSGPVLWYVLSPSGPQDPFSVGRYGGRVSLTGPLDFEQCDRYQLQLLAHDGPHEGRANLTVLVEDVNDNAPAFSQSLYQVMLLEHTPPGSAILSVSATDRDSGANGHISYHLASPADGFSVDPNNGTLFTIVGTVALGHDGSGAVDVVLEARDHGAPGRAARATVHVQLQDQNDHAPSFTLSHYRVAVTEDLPPGSTLLTLEATDADGSRSHAAVDYSIISGNWGRVFQLEPRLAEAGESAGPGPRALGCLVLLEPLDFESLTQYNLTVAAADRGQPPQSSVVPVTVTVLDVNDNPPVFTRASYRVTVPEDTPVGAELLHVEASDADPGPHGLVRFTVSSGDPSGLFELDESSGTLRLAHALDCETQARHQLVVQAADPAGAHFALAPVTIEVQDVNDHGPAFPLNLLSTSVAENQPPGTLVTTLHAIDGDAGAFGRLRYSLLEAGPGPEGREAFALNSSTGELRARVPFDYEHTESFRLLVGAADAGNLSASVTVSVLVTGEDEYDPVFLAPAFHFQVPEGARRGHSLGHVQATDEDGGADGLVLYSLATSSPYFGINQTTGALYLRVDSRAPGSGTATSGGGGRTRREAPRELRLEVIARGPLPGSRSATVPVTVDITHTALGLAPDLNLLLVGA

SEQ ID NO: 2263 - protein, 472 aa, synthetic construct
  REGION 1..472: note = DCT (P40126) SP+PP+ECD
MSPLWWGFLLSCLGCKILPGAQGQFPRVCMTVDSLVNKECCPRLGAESANVCGSQQGRGQCTEVRADTRPWSGPYILRNQDDRELWPRKFFHRTCKCTGNFAGYNCGDCKFGWTGPNCERKKPPVIRQNIHSLSPQEREQFLGALDLAKKRVHPDYVITTQHWLGLLGPNGTQPQFANCSVYDFFVWLHYYSVRDTLLGPGRPYRAIDFSHQGPAFVTWHRYHLLCLERDLQRLIGNESFALPYWNFATGRNECDVCTDQLFGAARPDDPTLISRNSRFSSWETVCDSLDDYNHLVTLCNGTYEGLLRRNQMGRNSMKLPTLKDIRDCLSLQKFDNPPFFQNSTFSFRNALEGFDKADGTLDSQVMSLHNLVHSFLNGTNALPHSAANDPIFVVLHSFTDAIFDEWMKRFNPPADAWPQELAPIGHNRMYNMVPFFPPVTNEELFLTSDQLGYSYAIDLPVSVEETPGWPTT

SEQ ID NO: 2264 - protein, 417 aa, synthetic construct
  REGION 1..417: note = DDR1 (Q08345) SP+PP+ECD
MGPEALSSLLLLLLVASGDADMKGHFDPAKCRYALGMQDRTIPDSDISASSSWSDSTAARHSRLESSDGDGAWCPAGSVFPKEEEYLQVDLQRLHLVALVGTQGRHAGGLGKEFSRSYRLRYSRDGRRWMGWKDRWGQEVISGNEDPEGVVLKDLGPPMVARLVRFYPRADRVMSVCLRVELYGCLWRDGLLSYTAPVGQTMYLSEAVYLNDSTYDGHTVGGLQYGGLGQLADGVVGLDDFRKSQELRVWPGYDYVGWSNHSFSSGYVEMEFEFDRLRAFQAMQVHCNNMHTLGARLPGGVECRFRRGPAMAWEGEPMRHNLGGNLGDPRARAVSVPLGGRVARFLQCRFLFAGPWLLFSEISFISDVVNNSSPALGGTFPPAPWWPPGPPPTNFSSLELEPRGQQPVAKAEGSPTA

SEQ ID NO: 2265 - protein, 399 aa, synthetic construct
  REGION 1..399: note = DDR2 (Q16832) SP+PP+ECD
MILIPRMLLVLFLLLPILSSAKAQVNPAICRYPLGMSGGQIPDEDITASSQWSESTAAKYGRLDSEEGDGAWCPEIPVEPDDLKEFLQIDLHTLHFITLVGTQGRHAGGHGIEFAPMYKINYSRDGTRWISWRNRHGKQVLDGNSNPYDIFLKDLEPPIVARFVRFIPVTDHSMNVCMRVELYGCVWLDGLVSYNAPAGQQFVLPGGSIIYLNDSVYDGAVGYSMTEGLGQLTDGVSGLDDFTQTHEYHVWPGYDYVGWRNESATNGYIEIMFEFDRIRNFTTMKVHCNNMFAKGVKIFKEVQCYFRSEASEWEPNAISFPLVLDDVNPSARFVTVPLHHRMASAIKCQYHFADTWMMFSEITFQSDAAMYNNSEALPTSPMAPTTYDPMLKVDDSNTR

SEQ ID NO: 2266 - protein, 349 aa, synthetic construct
  REGION 1..349: note = DGCR2 (P98153) SP+PP+ECD
MVPKADSGAFLLLFLLVLTVTEPLRPELRCNPGQFACRSGTIQCIPLPWQCDGWATCEDESDEANCPEVTGEVRPHHGKEAVDPRQGRARGGDPSHFHAVNVAQPVRFSSFLGKCPTGWHHYEGTASCYRVYLSGENYWDAAQTCQRLNGSLATFSTDQELRFVLAQEWDQPERSFGWKDQRKLWVGYQYVITGRNRSLEGRWEVAFKGSSEVFLPPDPIFASAMSENDNVFCAQLQCFHFPTLRHHDLHSWHAESCYEKSSFLCKRSQTCVDIKDNVVDEGFYFTPKGDDPCLSCTCHGGEPEMCVAALCERPQGCQQYRKDPKECCKFMCLDPDGNSLFDSMASGMR

SEQ ID NO: 2267 - protein, 303 aa, synthetic construct
  REGION 1..303: note = DLK1 (P80370) SP+PP+ECD
MTATEALLRVLLLLLAFGHSTYGAECFPACNPQNGFCEDDNVCRCQPGWQGPLCDQCVTSPGCLHGLCGEPGQCICTDGWDGELCDRDVRACSSAPCANNRTCVSLDDGLYECSCAPGYSGKDCQKKDGPCVINGSPCQHGGTCVDDEGRASHASCLCPPGFSGNFCEIVANSCTPNPCENDGVCTDIGGDFRCRCPAGFIDKTCSRPVTNCASSPCQNGGTCLQHTQVSYECLCKPEFTGLTCVKKRALSPQQVTRLPSGYGLAYRLTPGVHELPVQQPEHRILKVSMKELNKKTPLLTEGQ

SEQ ID NO: 2268 - protein, 306 aa, synthetic construct
  REGION 1..306: note = DLK2 (Q6UY11) SP+PP+ECD
MPSGCRCLHLVCLLCILGAPGQPVRADDCSSHCDLAHGCCAPDGSCRCDPGWEGLHCERCVRMPGCQHGTCHQPWQCICHSGWAGKFCDKDEHICTTQSPCQNGGQCMYDGGGEYHCVCLPGFHGRDCERKAGPCEQAGSPCRNGGQCQDDQGFALNFTCRCLVGFVGARCEVNVDDCLMRPCANGATCLDGINRFSCLCPEGFAGRFCTINLDDCASRPCQRGARCRDRVHDFDCLCPSGYGGKTCELVLPVPDPPTTVDTPLGPTSAVVVPATGPAPHSAGAGLLRISVKEVVRRQEAGLGEPS

SEQ ID NO: 2269 - protein, 545 aa, synthetic construct
  REGION 1..545: note = DLL1 (O00548) SP+PP+ECD
MGSRCALALAVLSALLCQVWSSGVFELKLQEFVNKKGLLGNRNCCRGGAGPPPCACRTFFRVCLKHYQASVSPEPPCTYGSAVTPVLGVDSFSLPDGGGADSAFSNPIRFPFGFTWPGTFSLIIEALHTDSPDDLATENPERLISRLATQRHLTVGEEWSQDLHSSGRTDLKYSYRFVCDEHYYGEGCSVFCRPRDDAFGHFTCGERGEKVCNPGWKGPYCTEPICLPGCDEQHGFCDKPGECKCRVGWQGRYCDECIRYPGCLHGTCQQPWQCNCQEGWGGLFCNQDLNYCTHHKPCKNGATCTNTGQGSYTCSCRPGYTGATCELGIDECDPSPCKNGGSCTDLENSYSCTCPPGFYGKICELSAMTCADGPCFNGGRCSDSPDGGYSCRCPVGYSGFNCEKKIDYCSSSPCSNGAKCVDLGDAYLCRCQAGFSGRHCDDNVDDCASSPCANGGTCRDGVNDFSCTCPPGYTGRNCSAPVSRCEHAPCHNGATCHERGHRYVCECARGYGGPNCQFLLPELPPGPAVVDLTEKLEGQGGPFPW

SEQ ID NO: 2270 - protein, 492 aa, synthetic construct
  REGION 1..492: note = DLL3 (Q9NYJ7) SP+PP+ECD
MVSPRMSGLLSQTVILALIFLPQTRPAGVFELQIHSFGPGPGPGAPRSPCSARLPCRLFFRVCLKPGLSEEAAESPCALGAALSARGPVYTEQPGAPAPDLPLPDGLLQVPFRDAWPGTFSFIIETWREELGDQIGGPAWSLLARVAGRRRLAAGGPWARDIQRAGAWELRFSYRARCEPPAVGTACTRLCRPRSAPSRCGPGLRPCAPLEDECEAPLVCRAGCSPEHGFCEQPGECRCLEGWTGPLCTVPVSTSSCLSPRGPSSATTGCLVPGPGPCDGNPCANGGSCSETPRSFECTCPRGFYGLRCEVSGVTCADGPCFNGGLCVGGADPDSAYICHCPPGFQGSNCEKRVDRCSLQPCRNGGLCLDLGHALRCRCRAGFAGPRCEHDLDDCAGRACANGGTCVEGGGAHRCSCALGFGGRDCRERADPCAARPCAHGGRCYAHFSGLVCACAPGYMGARCEFPVHPDGASALPAAPPGLRPGDPQRYL

SEQ ID NO: 2271 - protein, 529 aa, synthetic construct
  REGION 1..529: note = DLL4 (Q9NR61) SP+PP+ECD
MAAASRSASGWALLLLVALWQQRAAGSGVFQLQLQEFINERGVLASGRPCEPGCRTFFRVCLKHFQAVVSPGPCTFGTVSTPVLGTNSFAVRDDSSGGGRNPLQLPFNFTWPGTFSLIIEAWHAPGDDLRPEALPPDALISKIAIQGSLAVGQNWLLDEQTSTLTRLRYSYRVICSDNYYGDNCSRLCKKRNDHFGHYVCQPDGNLSCLPGWTGEYCQQPICLSGCHEQNGYCSKPAECLCRPGWQGRLCNECIPHNGCRHGTCSTPWQCTCDEGWGGLFCDQDLNYCTHHSPCKNGATCSNSGQRSYTCTCRPGYTGVDCELELSECDSNPCRNGGSCKDQEDGYHCLCPPGYYGLHCEHSTLSCADSPCFNGGSCRERNQGANYACECPPNFTGSNCEKKVDRCTSNPCANGGQCLNRGPSRMCRCRPGFTGTYCELHVSDCARNPCAHGGTCHDLENGLMCTCPAGFSGRRCEVRTSIDACASSPCFNRATCYTDLSTDTFVCNCPYGFVGSRCEFPVGLPPSFPW

SEQ ID NO: 2272 - protein, 640 aa, synthetic construct
  REGION 1..640: note = DNER (Q8NFT8) SP+PP+ECD
MQPRRAQAPGAQLLPALALLLLLLGAGPRGSSLANPVPAAPLSAPGPCAAQPCRNGGVCTSRPEPDPQHPAPAGEPGYSCTCPAGISGANCQLVADPCASNPCHHGNCSSSSSSSSDGYLCICNEGYEGPNCEQALPSLPATGWTESMAPRQLQPVPATQEPDKILPRSQATVTLPTWQPKTGQKVVEMKWDQVEVIPDIACGNASSNSSAGGRLVSFEVPQNTSVKIRQDATASLILLWKVTATGFQQCSLIDGRSVTPLQASGGLVLLEEMLALGNNHFIGFVNDSVTKSIVALRLTLVVKVSTCVPGESHANDLECSGKGKCTTKPSEATFSCTCEEQYVGTFCEEYDACQRKPCQNNASCIDANEKQDGSNFTCVCLPGYTGELCQSKIDYCILDPCRNGATCISSLSGFTCQCPEGYFGSACEEKVDPCASSPCQNNGTCYVDGVHFTCNCSPGFTGPTCAQLIDFCALSPCAHGTCRSVGTSYKCLCDPGYHGLYCEEEYNECLSAPCLNAATCRDLVNGYECVCLAEYKGTHCELYKDPCANVSCLNGATCDSDGLNGTCICAPGFTGEECDIDINECDSNPCHHGGSCLDQPNGYNCHCPHGWVGANCEIHLQWKSGHMAESLTNMPRHSLY

SEQ ID NO: 2273 - protein, 448 aa, synthetic construct
  REGION 1..448: note = DPCR1 (Q3MIW9) SP+PP+ECD
MAQPVHSLCSAFGLQCCLLFLLASWGAGATTFQEYQKTGELSTSDHIFPLTPGLVYSIPFDHIVLHSGQRPPELPKSTEIHEQKRHCNTTRHSKPTDKPTGNSKTIDHKSSTDNHEAPPTSEENSSNQGKDPMIRNQRSVDPADSTTTHKESAGKKHITPAPKSKINCRKSTTGKSTVTRKSDKTGRPLEKSMSTLDKTSTSSHKTTTSFHNSGNSQTKQKSTSFPEKITAASKTTYKTTGTPEESEKTEDSRTTVASDKLLTKTTKNIQETISANELTQSLAEPTEHGGRTANENNTPSPAEPTENRERTANENKKTICTKGKNTPVPEKPTENLGNTTLTTETIKAPVKSTENPEKTAAVTKTIKPSVKVTGDKSLTTTSSHLNKTEVTHQVPTGSFTLITSRTKLSSITSEATGNESHPYLNKDGSQKGIHAGQMGENDSFPAWA

SEQ ID NO: 2274 - protein, 691 aa, synthetic construct
  REGION 1..691: note = DSC1 (Q08554) SP+PP+ECD
MALASAAPGSIFCKQLLFSLLVLTLLCDACQKVYLRVPSHLQAETLVGKVNLEECLKSASLIRSSDPAFRILEDGSIYTTHDLILSSERKSFSIFLSDGQRREQQEIKVVLSARENKSPKKRHTKDTALKRSKRRWAPIPASLMENSLGPFPQHVQQIQSDAAQNYTIFYSISGPGVDKEPFNLFYIEKDTGDIFCTRSIDREKYEQFALYGYATTADGYAPEYPLPLIIKIEDDNDNAPYFEHRVTIFTVPENCRSGTSVGKVTATDLDEPDTLHTRLKYKILQQIPDHPKHFSIHPDTGVITTTTPFLDREKCDTYQLIMEVRDMGGQPFGLFNTGTITISLEDENDNPPSFTETSYVTEVEENRIDVEILRMKVQDQDLPNTPHSKAVYKILQGNENGNFIISTDPNTNEGVLCVVKPLNYEVNRQVILQVGVINEAQFSKAASSQTPTMCTTTVTVKIIDSDEGPECHPPVKVIQSQDGFPAGQELLGYKALDPEISSGEGLRYQKLGDEDNWFEINQHTGDLRTLKVLDRESKFVKNNQYNISVVAVDAVGRSCTGTLVVHLDDYNDHAPQIDKEVTICQNNEDFAVLKPVDPDGPENGPPFQFFLDNSASKNWNIEEKDGKTAILRQRQNLDYNYYSVPIQIKDRHGLVATHMLTVRVCDCSTPSECRMKDKSTRDVRPNVILGR

SEQ ID NO: 2275 - protein, 694 aa, synthetic construct
  REGION 1..694: note = DSC2 (Q02487) SP+PP+ECD
MEAARPSGSWNGALCRLLLLTLAILIFASDACKNVTLHVPSKLDAEKLVGRVNLKECFTAANLIHSSDPDFQILEDGSVYTTNTILLSSEKRSFTILLSNTENQEKKKIFVFLEHQTKVLKKRHTKEKVLRRAKRRWAPIPCSMLENSLGPFPLFLQQVQSDTAQNYTIYYSIRGPGVDQEPRNLFYVERDTGNLYCTRPVDREQYESFEIIAFATTPDGYTPELPLPLIIKIEDENDNYPIFTEETYTFTIFENCRVGTTVGQVCATDKDEPDTMHTRLKYSIIGQVPPSPTLFSMHPTTGVITTTSSQLDRELIDKYQLKIKVQDMDGQYFGLQTTSTCIINIDDVNDHLPTFTRTSYVTSVEENTVDVEILRVTVEDKDLVNTANWRANYTILKGNENGNFKIVTDAKTNEGVLCVVKPLNYEEKQQMILQIGVVNEAPFSREASPRSAMSTATVTVNVEDQDEGPECNPPIQTVRMKENAEVGTTSNGYKAYDPETRSSSGIRYKKLTDPTGWVTIDENTGSIKVFRSLDREAETIKNGIYNITVLASDQGGRTCTGTLGIILQDVNDNSPFIPKKTVIICKPTMSSAEIVAVDPDEPIHGPPFDFSLESSTSEVQRMWRLKAINDTAARLSYQNDPPFGSYVVPITVRDRLGMSSVTSLDVTLCDCITENDCTHRVDPRIGGGGVQLGK

SEQ ID NO: 2276 - protein, 690 aa, synthetic construct
  REGION 1..690: note = DSC3 (Q14574) SP+PP+ECD
MAAAGPRRSVRGAVCLHLLLTLVIFSRAGEACKKVILNVPSKLEADKIIGRVNLEECFRSADLIRSSDPDFRVLNDGSVYTARAVALSDKKRSFTIWLSDKRKQTQKEVTVLLEHQKKVSKTRHTRETVLRRAKRRWAPIPCSMQENSLGPFPLFLQQVESDAAQNYTVFYSISGRGVDKEPLNLFYIERDTGNLFCTRPVDREEYDVFDLIAYASTADGYSADLPLPLPIRVEDENDNHPVFTEAIYNFEVLESSRPGTTVGVVCATDRDEPDTMHTRLKYSILQQTPRSPGLFSVHPSTGVITTVSHYLDREVVDKYSLIMKVQDMDGQFFGLIGTSTCIITVTDSNDNAPTFRQNAYEAFVEENAFNVEILRIPIEDKDLINTANWRVNFTILKGNENGHFKISTDKETNEGVLSVVKPLNYEENRQVNLEIGVNNEAPFARDIPRVTALNRALVTVHVRDLDEGPECTPAAQYVRIKENLAVGSKINGYKAYDPENRNGNGLRYKKLHDPKGWITIDEISGSIITSKILDREVETPKNELYNITVLAIDKDDRSCTGTLAVNIEDVNDNPPEILQEYVVICKPKMGYTDILAVDPDEPVHGAPFYFSLPNTSPEISRLWSLTKVNDTAARLSYQKNAGFQEYTIPITVKDRAGQAATKLLRVNLCECTHPTQCRATSRSTGVILGK

SEQ ID NO: 2277 - protein, 1595 aa, synthetic construct
  REGION 1..1595: note = DSCAM (O60469) SP+PP+ECD
MWILALSLFQSFANVFSEDLHSSLYFVNASLQEVVFASTTGTLVPCPAAGIPPVTLRWYLATGEEIYDVPGIRHVHPNGTLQIFPFPPSSFSTLIHDNTYYCTAENPSGKIRSQDVHIKAVLREPYTVRVEDQKTMRGNVAVFKCIIPSSVEAYITVVSWEKDTVSLVSGSRFLITSTGALYIKDVQNEDGLYNYRCITRHRYTGETRQSNSARLFVSDPANSAPSILDGFDHRKAMAGQRVELPCKALGHPEPDYRWLKDNMPLELSGRFQKTVTGLLIENIRPSDSGSYVCEVSNRYGTAKVIGRLYVKQPLKATISPRKVKSSVGSQVSLSCSVTGTEDQELSWYRNGEILNPGKNVRITGINHENLIMDHMVKSDGGAYQCFVRKDKLSAQDYVQVVLEDGTPKIISAFSEKVVSPAEPVSLMCNVKGTPLPTITWTLDDDPILKGGSHRISQMITSEGNVVSYLNISSSQVRDGGVYRCTANNSAGVVLYQARINVRGPASIRPMKNITAIAGRDTYIHCRVIGYPYYSIKWYKNSNLLPFNHRQVAFENNGTLKLSDVQKEVDEGEYTCNVLVQPQLSTSQSVHVTVKVPPFIQPFEFPRFSIGQRVFIPCVVVSGDLPITITWQKDGRPIPGSLGVTIDNIDFTSSLRISNLSLMHNGNYTCIARNEAAAVEHQSQLIVRVPPKFVVQPRDQDGIYGKAVILNCSAEGYPVPTIVWKFSKGAGVPQFQPIALNGRIQVLSNGSLLIKHVVEEDSGYYLCKVSNDVGADVSKSMYLTVKIPAMITSYPNTTLATQGQKKEMSCTAHGEKPIIVRWEKEDRIINPEMARYLVSTKEVGEEVISTLQILPTVREDSGFFSCHAINSYGEDRGIIQLTVQEPPDPPEIEIKDVKARTITLRWTMGFDGNSPITGYDIECKNKSDSWDSAQRTKDVSPQLNSATIIDIHPSSTYSIRMYAKNRIGKSEPSNELTITADEAAPDGPPQEVHLEPISSQSIRVTWKAPKKHLQNGIIRGYQIGYREYSTGGNFQFNIISVDTSGDSEVYTLDNLNKFTQYGLVVQACNRAGTGPSSQEIITTTLEDVPSYPPENVQAIATSPESISISWSTLSKEALNGILQGFRVIYWANLMDGELGEIKNITTTQPSLELDGLEKYTNYSIQVLAFTRAGDGVRSEQIFTRTKEDVPGPPAGVKAAAASASMVFVSWLPPLKLNGIIRKYTVFCSHPYPTVISEFEASPDSFSYRIPNLSRNRQYSVWVVAVTSAGRGNSSEIITVEPLAKAPARILTFSGTVTTPWMKDIVLPCKAVGDPSPAVKWMKDSNGTPSLVTIDGRRSIFSNGSFIIRTVKAEDSGYYSCIANNNWGSDEIILNLQVQVPPDQPRLTVSKTTSSSITLSWLPGDNGGSSIRGYILQYSEDNSEQWGSFPISPSERSYRLENLKCGTWYKFTLTAQNGVGPGRISEIIEAKTLGKEPQFSKEQELFASINTTRVRLNLIGWNDGGCPITSFTLEYRPFGTTVWTTAQRTSLSKSYILYDLQEATWYELQMRVCNSAGCAEKQANFATLNYDGSTIPPLIKSVVQNEEGLTTNEGLKM

SEQ ID NO: 2278 - protein, 1591 aa, synthetic construct
  REGION 1..1591: note = DSCAML1 (Q8TD84) SP+PP+ECD
MWLVTFLLLLDSLHKARPEDVGTSLYFVNDSLQQVTFSSSVGVVVPCPAAGSPSAALRWYLATGDDIYDVPHIRHVHANGTLQLYPFSPSAFNSFIHDNDYFCTAENAAGKIRSPNIRVKAVFREPYTVRVEDQRSMRGNVAVFKCLIPSSVQEYVSVVSWEKDTVSIIPEHRFFITYHGGLYISDVQKEDALSTYRCITKHKYSGETRQSNGARLSVTDPAESIPTILDGFHSQEVWAGHTVELPCTASGYPIPAIRWLKDGRPLPADSRWTKRITGLTISDLRTEDSGTYICEVTNTFGSAEATGILMVIDPLHVTLTPKKLKTGIGSTVILSCALTGSPEFTIRWYRNTELVLPDEAISIRGLSNETLLITSAQKSHSGAYQCFATRKAQTAQDFAIIALEDGTPRIVSSFSEKVVNPGEQFSLMCAAKGAPPPTVTWALDDEPIVRDGSHRTNQYTMSDGTTISHMNVTGPQIRDGGVYRCTARNLVGSAEYQARINVRGPPSIRAMRNITAVAGRDTLINCRVIGYPYYSIKWYKDALLLPDNHRQVVFENGTLKLTDVQKGMDEGEYLCSVLIQPQLSISQSVHVAVKVPPLIQPFEFPPASIGQLLYIPCVVSSGDMPIRITWRKDGQVIISGSGVTIESKEFMSSLQISSVSLKHNGNYTCIASNAAATVSRERQLIVRVPPRFVVQPNNQDGIYGKAGVLNCSVDGYPPPKVMWKHAKGSGNPQQYHPVPLTGRIQILPNSSLLIRHVLEEDIGYYLCQASNGVGTDISKSMFLTVKIPAMITSHPNTTIAIKGHAKELNCTARGERPIIIRWEKGDTVIDPDRVMRYAIATKDNGDEVVSTLKLKPADRGDSVFFSCHAINSYGEDRGLIQLTVQEPPDPPELEIREVKARSMNLRWTQRFDGNSIITGFDIEYKNKSDSWDFKQSTRNISPTINQANIVDLHPASVYSIRMYSFNKIGRSEPSKELTISTEEAAPDGPPMDVTLQPVTSQSIQVTWKAPKKELQNGVIRGYQIGYRENSPGSNGQYSIVEMKATGDSEVYTLDNLKKFAQYGVVVQAFNRAGTGPSSSEINATTLEDVPSQPPENVRALSITSDVAVISWSEPPRSTLNGVLKGYRVIFWSLYVDGEWGEMQNITTTRERVELRGMEKFTNYSVQVLAYTQAGDGVRSSVLYIQTKEDVPGPPAGIKAVPSSASSVVVSWLPPTKPNGVIRKYTIFCSSPGSGQPAPSEYETSPEQLFYRIAHLNRGQQYLLWVAAVTSAGRGNSSEKVTIEPAGKAPAKIISFGGTVTTPWMKDVRLPCNSVGDPAPAVKWTKDSEDSAIPVSMDGHRLIHTNGTLLLRAVKAEDSGYYTCTATNTGGFDTIIVNLLVQVPPDQPRLTVSKTSASSITLTWIPGDNGGSSIRGFVLQYSVDNSEEWKDVFISSSERSFKLDSLKCGTWYKVKLAAKNSVGSGRISEIIEAKTHGREPSFSKDQHLFTHINSTHARLNLQGWNNGGCPITAIVLEYRPKGTWAWQGLRANSSGEVFLTELREATWYELRMRACNSAGCGNETAQFATLDYDGSTIPPIKSAQGEGDDVKK

SEQ ID NO: 2279 - protein, 548 aa, synthetic construct
  REGION 1..548: note = DSG1 (Q02413) SP+PP+ECD
MDWSFFRVVAMLFIFLVVVEVNSEFRIQVRDYNTKNGTIKWHSIRRQKREWIKFAAACREGEDNSKRNPIAKIHSDCAANQQVTYRISGVGIDQPPYGIFVINQKTGEINITSIVDREVTPFFIIYCRALNSMGQDLERPLELRVRVLDINDNPPVFSMATFAGQIEENSNANTLVMILNATDADEPNNLNSKIAFKIIRQEPSDSPMFIINRNTGEIRTMNNFLDREQYGQYALAVRGSDRDGGADGMSAECECNIKILDVNDNIPYMEQSSYTIEIQENTLNSNLLEIRVIDLDEEFSANWMAVIFFISGNEGNWFEIEMNERTNVGILKVVKPLDYEAMQSLQLSIGVRNKAEFHHSIMSQYKLKASAISVTVLNVIEGPVFRPGSKTYVVTGNMGSNDKVGDFVATDLDTGRPSTTVRYVMGNNPADLLAVDSRTGKLTLKNKVTKEQYNMLGGKYQGTILSIDDNLQRTCTGTININIQSFGNDDRTNTEPNTKITTNTGRQESTSSTNYDTSTTSTDSSQVYSSEPGNGAKDLLSDNVHFGP

SEQ ID NO: 2280 - protein, 609 aa, synthetic construct
  REGION 1..609: note = DSG2 (Q14126) SP+PP+ECD
MARSPGRAYALLLLLICFNVGSGLHLQVLSTRNENKLLPKHPHLVRQKRAWITAPVALREGEDLSKKNPIAKIHSDLAEERGLKITYKYTGKGITEPPFGIFVFNKDTGELNVTSILDREETPFFLLTGYALDARGNNVEKPLELRIKVLDINDNEPVFTQDVFVGSVEELSAAHTLVMKINATDADEPNTLNSKISYRIVSLEPAYPPVFYLNKDTGEIYTTSVTLDREEHSSYTLTVEARDGNGEVTDKPVKQAQVQIRILDVNDNIPVVENKVLEGMVEENQVNVEVTRIKVFDADEIGSDNWLANFTFASGNEGGYFHIETDAQTNEGIVTLIKEVDYEEMKNLDFSVIVANKAAFHKSIRSKYKPTPIPIKVKVKNVKEGIHFKSSVISIYVSESMDRSSKGQIIGNFQAFDEDTGLPAHARYVKLEDRDNWISVDSVTSEIKLAKLPDFESRYVQNGTYTVKIVAISEDYPRKTITGTVLINVEDINDNCPTLIEPVQTICHDAEYVNVTAEDLDGHPNSGPFSFSVIDKPPGMAEKWKIARQESTSVLLQQSEKKLGRSEIQFLISDNQGFSCPEKQVLTLTVCECLHGSGCREAQHDSYVG

SEQ ID NO: 2281 - protein, 615 aa, synthetic construct
  REGION 1..615: note = DSG3 (P32926) SP+PP+ECD
MMGLFPRTTGALAIFVVVILVHGELRIETKGQYDEEEMTMQQAKRRQKREWVKFAKPCREGEDNSKRNPIAKITSDYQATQKITYRISGVGIDQPPFGIFVVDKNTGDINITAIVDREETPSFLITCRALNAQGLDVEKPLILTVKILDINDNPPVFSQQIFMGEIEENSASNSLVMILNATDADEPNHLNSKIAFKIVSQEPAGTPMFLLSRNTGEVRTLTNSLDREQASSYRLVVSGADKDGEGLSTQCECNIKVKDVNDNFPMFRDSQYSARIEENILSSELLRFQVTDLDEEYTDNWLAVYFFTSGNEGNWFEIQTDPRTNEGILKVVKALDYEQLQSVKLSIAVKNKAEFHQSVISRYRVQSTPVTIQVINVREGIAFRPASKTFTVQKGISSKKLVDYILGTYQAIDEDTNKAASNVKYVMGRNDGGYLMIDSKTAEIKFVKNMNRDSTFIVNKTITAEVLAIDEYTGKTSTGTVYVRVPDFNDNCPTAVLEKDAVCSSSPSVVVSARTLNNRYTGPYTFALEDQPVKLPAVWSITTLNATSALLRAQEQIPPGVYHISLVLTDSQNNRCEMPRSLTLEVCQCDNRGICGTSYPTTSPGTRYGRPHSGR

SEQ ID NO: 2282 - protein, 631 aa, synthetic construct
  REGION 1..631: note = DSG4 (Q86SJ6) SP+PP+ECD
MDWLFFRNICLLIILMVVMEVNSEFIVEVKEFDIENGTTKWQTVRRQKREWIKFAAACREGEDNSKRNPIAKIRSDCESNQKITYRISGVGIDRPPYGVFTINPRTGEINITSVVDREITPLFLIYCRALNSRGEDLERPLELRVKVMDINDNAPVFSQSVYTASIEENSDANTLVVKLCATDADEENHLNSKIAYKIVSQEPSGAPMFILNRYTGEVCTMSSFLDREQHSMYNLVVRGSDRDGAADGLSSECDCRIKVLDVNDNFPTLEKTSYSASIEENCLSSELIRLQAIDLDEEGTDNWLAQYLILSGNDGNWFDIQTDPQTNEGILKVVKMLDYEQAPNIQLSIGVKNQADFHYSVASQFQMHPTPVRIQVVDVREGPAFHPSTMAFSVREGIKGSSLLNYVLGTYTAIDLDTGNPATDVRYIIGHDAGSWLKIDSRTGEIQFSREFDKKSKYIINGIYTAEILAIDDGSGKTATGTICIEVPDINDYCPNIFPERRTICIDSPSVLISVNEHSYGSPFTFCVVDEPPGIADMWDVRSTNATSAILTAKQVLSPGFYEIPILVKDSYNRACELAQMVQLYACDCDDNHMCLDSGAAGIYTEDITGDTYGPVTEDQAGVSNVGLGPA

SEQ ID NO: 2283 - protein, 124 aa, synthetic construct
  REGION 1..124: note = ECSCR (Q19T08) SP+PP+ECD
MGTAGAMQLCWVILGFLLFRGHNSQPTMTQTSSSQGGLGGLSLTTEPVSSNPGYIPSSEANRPSHLSSTGTPGAGVPSSGRDGGTSRDTFQTVPPNSTTMSLSMREDATILPSPTSETVLTVAA

SEQ ID NO: 2284 - protein, 187 aa, synthetic construct
  REGION 1..187: note = EDAR (Q9UNE0) SP+PP+ECD
MAHVGDCTQTPWLPVLVVSLMCSARAEYSNCGENEYYNQTTGLCQECPPCGPGEEPYLSCGYGTKDEDYGCVPCPAEKFSKGGYQICRRHKDCEGFFRATVLTPGDMENDAECGPCLPGYYMLENRPRNIYGMVCYSCLLAPPNTKECVGATSGASANFPGTSGSSTLSPFQHAHKELSGQGHLATA

SEQ ID NO: 2285 - protein, 237 aa, synthetic construct
  REGION 1..237: note = EFNB1 (P98172) SP+PP+ECD
MARPGQRWLGKWLVAMVVWALCRLATPLAKNLEPVSWSSLNPKFLSGKGLVIYPKIGDKLDIICPRAEAGRPYEYYKLYLVRPEQAAACSTVLDPNVLVTCNRPEQEIRFTIKFQEFSPNYMGLEFKKHHDYYITSTSNGSLEGLENREGGVCRTRTMKIIMKVGQDPNAVTPEQLTTSRPSKEADNTVKMATQAPGSRGSLGDSDGKHETVNQEEKSGPGASGGSSGDPDGFFNSK

SEQ ID NO: 2286 - protein, 229 aa, synthetic construct
  REGION 1..229: note = EFNB2 (P52799) SP+PP+ECD
MAVRRDSVWKYCWGVLMVLCRTAISKSIVLEPIYWNSSNSKFLPGQGLVLYPQIGDKLDIICPKVDSKTVGQYEYYKVYMVDKDQADRCTIKKENTPLLNCAKPDQDIKFTIKFQEFSPNLWGLEFQKNKDYYIISTSNGSLEGLDNQEGGVCQTRAMKILMKVGQDASSAGSTRNKDPTRRPELEAGTNGRSSTTSPFVKPNPGSSTDGNSAGHSGNNILGSEVALFA

SEQ ID NO: 2287 - protein, 226 aa, synthetic construct
  REGION 1..226: note = EFNB3 (Q15768) SP+PP+ECD
MGPPHSGPGGVRVGALLLLGVLGLVSGLSLEPVYWNSANKRFQAEGGYVLYPQIGDRLDLLCPRARPPGPHSSPNYEFYKLYLVGGAQGRRCEAPPAPNLLLTCDRPDLDLRFTIKFQEYSPNLWGHEFRSHHDYYIIATSDGTREGLESLQGGVCLTRGMKVLLRVGQSPRGGAVPRKPVSEMPMERDRGAAHSLEPGKENLPGDPTSNATSRGAEGPLPPPSMP

SEQ ID NO: 2288 - protein, 1032 aa, synthetic construct
  REGION 1..1032: note = EGF (P01133) SP+PP+ECD
MLLTLIILLPVVSKFSFVSLSAPQHWSCPEGTLAGNGNSTCVGPAPFLIFSHGNSIFRIDTEGTNYEQLVVDAGVSVIMDFHYNEKRIYWVDLERQLLQRVFLNGSRQERVCNIEKNVSGMAINWINEEVIWSNQQEGIITVTDMKGNNSHILLSALKYPANVAVDPVERFIFWSSEVAGSLYRADLDGVGVKALLETSEKITAVSLDVLDKRLFWIQYNREGSNSLICSCDYDGGSVHISKHPTQHNLFAMSLFGDRIFYSTWKMKTIWIANKHTGKDMVRINLHSSFVPLGELKVVHPLAQPKAEDDTWEPEQKLCKLRKGNCSSTVCGQDLQSHLCMCAEGYALSRDRKYCEDVNECAFWNHGCTLGCKNTPGSYYCTCPVGFVLLPDGKRCHQLVSCPRNVSECSHDCVLTSEGPLCFCPEGSVLERDGKTCSGCSSPDNGGCSQLCVPLSPVSWECDCFPGYDLQLDEKSCAASGPQPFLLFANSQDIRHMHFDGTDYGTLLSQQMGMVYALDHDPVENKIYFAHTALKWIERANMDGSQRERLIEEGVDVPEGLAVDWIGRRFYWTDRGKSLIGRSDLNGKRSKIITKENISQPRGIAVHPMAKRLFWTDTGINPRIESSSLQGLGRLVIASSDLIWPSGITIDFLTDKLYWCDAKQSVIEMANLDGSKRRRLTQNDVGHPFAVAVFEDYVWFSDWAMPSVMRVNKRTGKDRVRLQGSMLKPSSLVVVHPLAKPGADPCLYQNGGCEHICKKRLGTAWCSCREGFMKASDGKTCLALDGHQLLAGGEVDLKNQVTPLDILSKTRVSEDNITESQHMLVAEIMVSDQDDCAPVGCSMYARCISEGEDATCQCLKGFAGDGKLCSDIDECEMGVPVCPPASSKCINTEGGYVCRCSEGYQGDGIHCLDIDECQLGEHSCGENASCTNTEGGYTCMCAGRLSEPGLICPDSTPPPHLREDDHHYSVRNSDSECPLSHDGYCLHDGVCMYIEALDKYACNCVVGYIGERCQYRDLKWWELRHAGHGQQQK

SEQ ID NO: 2289 - protein, 645 aa, synthetic construct
  REGION 1..645: note = EGFR (P00533) SP+PP+ECD
MRPSGTAGAALLALLAALCPASRALEEKKVCQGTSNKLTQLGTFEDHFLSLQRMFNNCEVVLGNLEITYVQRNYDLSFLKTIQEVAGYVLIALNTVERIPLENLQIIRGNMYYENSYALAVLSNYDANKTGLKELPMRNLQEILHGAVRFSNNPALCNVESIQWRDIVSSDFLSNMSMDFQNHLGSCQKCDPSCPNGSCWGAGEENCQKLTKIICAQQCSGRCRGKSPSDCCHNQCAAGCTGPRESDCLVCRKFRDEATCKDTCPPLMLYNPTTYQMDVNPEGKYSFGATCVKKCPRNYVVTDHGSCVRACGADSYEMEEDGVRKCKKCEGPCRKVCNGIGIGEFKDSLSINATNIKHFKNCTSISGDLHILPVAFRGDSFTHTPPLDPQELDILKTVKEITGFLLIQAWPENRTDLHAFENLEIIRGRTKQHGQFSLAVVSLNITSLGLRSLKEISDGDVIISGNKNLCYANTINWKKLFGTSGQKTKIISNRGENSCKATGQVCHALCSPEGCWGPEPRDCVSCRNVSRGRECVDKCNLLEGEPREFVENSECIQCHPECLPQAMNITCTGRGPDNCIQCAHYIDGPHCVKTCPAGVMGENNTLVWKYADAGHVCHLCHPNCTYGCTGPGLEGCPTNGPKIPS

SEQ ID NO: 2290 - protein, 418 aa, synthetic construct
  REGION 1..418: note = ELFN1 (P0C7U0) SP+PP+ECD
MAGRGWGALWVCVAAATLLHAGGLARADCWLIEGDKGFVWLAICSQNQPPYEAIPQQINSTIVDLRLNENRIRSVQYASLSRFGNLTYLNLTKNEIGYIEDGAFSGQFNLQVLQLGYNRLRNLTEGMLRGLGKLEYLYLQANLIEVVMASSFWECPNIVNIDLSMNRIQQLNSGTFAGLAKLSVCELYSNPFYCSCELLGFLRWLAAFTNATQTYDRMQCESPPVYSGYYLLGQGRRGHRSILSKLQSVCTEDSYAAEVVGPPRPASGRSQPGRSPPPPPPPEPSDMPCADDECFSGDGTTPLVALPTLATQAEARPLIKVKQLTQNSATITVQLPSPFHRMYTLEHFNNSKASTVSRLTKAQEEIRLTNLFTLTNYTYCVVSTSAGLRHNHTCLTICLPRLPSPPGPVPSPSTATHY

SEQ ID NO: 2291 - protein, 397 aa, synthetic construct
  REGION 1..397: note = ELFN2 (Q5R3F8) SP+PP+ECD
MLRLGLCAAALLCVCRPGAVRADCWLIEGDKGYVWLAICSQNQPPYETIPQHINSTVHDLRLNENKLKAVLYSSLNRFGNLTDLNLTKNEISYIEDGAFLGQSSLQVLQLGYNKLSNLTEGMLRGMSRLQFLFVQHNLIEVVTPTAFSECPSLISIDLSSNRLSRLDGATFASLASLMVCELAGNPFNCECDLFGFLAWLVVFNNVTKNYDRLQCESPREFAGYPLLVPRPYHSLNAITVLQAKCRNGSLPARPVSHPTPYSTDAQREPDENSGFNPDEILSVEPPASSTTDASAGPAIKLHHVTFTSATLVVIIPHPYSKMYILVQYNNSYFSDVMTLKNKKEIVTLDKLRAHTEYTFCVTSLRNSRRFNHTCLTFTTRDPVPGDLAPSTSTTTHY

SEQ ID NO: 2292 - protein, 260 aa, synthetic construct
  REGION 1..260: note = EMB (Q6PCB8) SP+PP+ECD
MRALPGLLEARARTPRLLLLQCLLAAARPSSADGSAPDSPFTSPPLREEIMANNFSLESHNISLTEHSSMPVEKNITLERPSNVNLTCQFTTSGDLNAVNVTWKKDGEQLENNYLVSATGSTLYTQYRFTIINSKQMGSYSCFFREEKEQRGTFNFKVPELHGKNKPLISYVGDSTVLTCKCQNCFPLNWTWYSSNGSVKVPVGVQMNKYVINGTYANETKLKITQLLEEDGESYWCRALFQLGESEEHIELVVLSYLVP

SEQ ID NO: 2293 - protein, 190 aa, synthetic construct
  REGION 1..190: note = EMCN (Q9ULC0) SP+PP+ECD
MELLQVTILFLLPSICSSNSTGVLEAANNSLVVTTTKPSITTPNTESLQKNVVTPTTGTTPKGTITNELLKMSLMSTATFLTSKDEGLKATTTDVRKNDSIISNVTVTSVTLPNAVSTLQSSKPKTETQSSIKTTEIPGSVLQPDASPSKTGTLTSIPVTIPENTSQSQVIGTEGGKNASTSATSRSYSS

SEQ ID NO: 2294 - protein, 586 aa, synthetic construct
  REGION 1..586: note = ENG (P17813) SP+PP+ECD
MDRGTLPLAVALLLASCSLSPTSLAETVHCDLQPVGPERGEVTYTTSQVSKGCVAQAPNAILEVHVLFLEFPTGPSQLELTLQASKQNGTWPREVLLVLSVNSSVFLHLQALGIPLHLAYNSSLVTFQEPPGVNTTELPSFPKTQILEWAAERGPITSAAELNDPQSILLRLGQAQGSLSFCMLEASQDMGRTLEWRPRTPALVRGCHLEGVAGHKEAHILRVLPGHSAGPRTVTVKVELSCAPGDLDAVLILQGPPYVSWLIDANHNMQIWTTGEYSFKIFPEKNIRGFKLPDTPQGLLGEARMLNASIVASFVELPLASIVSLHASSCGGRLQTSPAPIQTTPPKDTCSPELLMSLIQTKCADDAMTLVLKKELVAHLKCTITGLTFWDPSCEAEDRGDKFVLRSAYSSCGMQVSASMISNEAVVNILSSSSPQRKKVHCLNMDSLSFQLGLYLSPHFLQASNTIEPGQQSFVQVRVSPSVSEFLLQLDSCHLDLGPEGGTVELIQGRAAKGNCVSLLSPSPEGDPRFSFLLHFYTVPIPKTGTLSCTVALRPKTGSQDQEVHRTVFMRLNIISPDLSGCTSKG

SEQ ID NO: 2295 - protein, 407 aa, synthetic construct
  REGION 1..407: note = ENPP4 (Q9Y6X5) SP+PP+ECD
MKLLVILLFSGLITGFRSDSSSSLPPKLLLVSFDGFRADYLKNYEFPHLQNFIKEGVLVEHVKNVFITKTFPNHYSIVTGLYEESHGIVANSMYDAVTKKHFSDSNDKDPFWWNEAVPIWVTNQLQENRSSAAAMWPGTDVPIHDTISSYFMNYNSSVSFEERLNNITMWLNNSNPPVTFATLYWEEPDASGHKYGPEDKENMSRVLKKIDDLIGDLVQRLKMLGLWENLNVIITSDHGMTQCSQDRLINLDSCIDHSYYTLIDLSPVAAILPKINRTEVYNKLKNCSPHMNVYLKEDIPNRFYYQHNDRIQPIILVADEGWTIVLNESSQKLGDHGYDNSLPSMHPFLAAHGPAFHKGYKHSTINIVDIYPMMCHILGLKPHPNNGTFGHTKCLLVDQWCINLPEA

SEQ ID NO: 2296 - protein, 431 aa, synthetic construct
  REGION 1..431: note = ENPP5 (Q9UJA9) SP+PP+ECD
MTSKFLLVSFILAALSLSTTFSLQPDQQKVLLVSFDGFRWDYLYKVPTPHFHYIMKYGVHVKQVTNVFITKTYPNHYTLVTGLFAENHGIVANDMFDPIRNKSFSLDHMNIYDSKFWEEATPIWITNQRAGHTSGAAMWPGTDVKIHKRFPTHYMPYNESVSFEDRVAKIIEWFTSKEPINLGLLYWEDPDDMGHHLGPDSPLMGPVISDIDKKLGYLIQMLKKAKLWNTLNLIITSDHGMTQCSEERLIELDQYLDKDHYTLIDQSPVAAILPKEGKFDEVYEALTHAHPNLTVYKKEDVPERWHYKYNSRIQPIIAVADEGWHILQNKSDDFLLGNHGYDNALADMHPIFLAHGPAFRKNFSKEAMNSTDLYPLLCHLLNITAMPHNGSFWNVQDLLNSAMPRVVPYTQSTILLPGSVKPAEYDQEGSY

SEQ ID NO: 2297 - protein, 265 aa, synthetic construct
  REGION 1..265: note = EPCAM (P16422) SP+PP+ECD
MAPPQVLAFGLLLAAATATFAAAQEECVCENYKLAVNCFVNNNRQCQCTSVGAQNTVICSKLAAKCLVMKAEMNGSKLGRRAKPEGALQNNDGLYDPDCDESGLFKAKQCNGTSMCWCVNTAGVRRTDKDTEITCSERVRTYWIIIELKHKAREKPYDSKSLRTALQKEITTRYQLDPKFITSILYENNVITIDLVQNSSQKTQNDVDIADVAYYFEKDVKGESLFHSKKMDLTVNGEQLDLDPGQTLIYYVDEKAPEFSMQGLK

SEQ ID NO: 2298 - protein, 110 aa, synthetic construct
  REGION 1..110: note = EPGN (Q6UW88) SP+PP+ECD
MALGVPISVYLLFNAMTALTEEAAVTVTPPITAQQGNWTVNKTEADNIEGPIALKFSHLCLEDHNSYCINGACAFHHELEKAICRCFTGYTGERCEHLTLTSYAVDSYEK

SEQ ID NO: 2299 - protein, 547 aa, synthetic construct
  REGION 1..547: note = EPHA1 (P21709) SP+PP+ECD
MERRWPLGLGLVLLLCAPLPPGARAKEVTLMDTSKAQGELGWLLDPPKDGWSEQQQILNGTPLYMYQDCPMQGRRDTDHWLRSNWIYRGEEASRVHVELQFTVRDCKSFPGGAGPLGCKETFNLLYMESDQDVGIQLRRPLFQKVTTVAADQSFTIRDLVSGSVKLNVERCSLGRLTRRGLYLAFHNPGACVALVSVRVFYQRCPETLNGLAQFPDTLPGPAGLVEVAGTCLPHARASPRPSGAPRMHCSPDGEWLVPVGRCHCEPGYEEGGSGEACVACPSGSYRMDMDTPHCLTCPQQSTAESEGATICTCESGHYRAPGEGPQVACTGPPSAPRNLSFSASGTQLSLRWEPPADTGGRQDVRYSVRCSQCQGTAQDGGPCQPCGVGVHFSPGARGLTTPAVHVNGLEPYANYTFNVEAQNGVSGLGSSGHASTSVSISMGHAESLSGLSLRLVKKEPRQLELTWAGSRPRSPGANLTYELHVLNQDEERYQMVLEPRVLLTELQPDTTYIVRVRMLTPLGPGPFSPDHEFRTSPPVSRGLTGGE

SEQ ID NO: 2300 - protein, 565 aa, synthetic construct
  REGION 1..565: note = EPHA10 (Q5JZY3) SP+PP+ECD
METCAGPHPLRLFLCRMQLCLALLLGPWRPGTAEEVILLDSKASQAELGWTALPSNGWEEISGVDEHDRPIRTYQVCNVLEPNQDNWLQTGWISRGRGQRIFVELQFTLRDCSSIPGAAGTCKETFNVYYLETEADLGRGRPRLGGSRPRKIDTIAADESFTQGDLGERKMKLNTEVREIGPLSRRGFHLAFQDVGACVALVSVRVYYKQCRATVRGLATFPATAAESAFSTLVEVAGTCVAHSEGEPGSPPRMHCGADGEWLVPVGRCSCSAGFQERGDFCEACPPGFYKVSPRRPLCSPCPEHSRALENASTFCVCQDSYARSPTDPPSASCTRPPSAPRDLQYSLSRSPLVLRLRWLPPADSGGRSDVTYSLLCLRCGREGPAGACEPCGPRVAFLPRQAGLRERAATLLHLRPGARYTVRVAALNGVSGPAAAAGTTYAQVTVSTGPGAPWEEDEIRRDRVEPQSVSLSWREPIPAGAPGANDTEYEIRYYEKGQSEQTYSMVKTGAPTVTVTNLKPATRYVFQIRAASPGPSWEAQSFNPSIEVQTLGEAASGSRDQSPA

SEQ ID NO: 2301 - protein, 537 aa, synthetic construct
  REGION 1..537: note = EPHA2 (P29317) SP+PP+ECD
MELQAARACFALLWGCALAAAAAAQGKEVVLLDFAAAGGELGWLTHPYGKGWDLMQNIMNDMPIYMYSVCNVMSGDQDNWLRTNWVYRGEAERIFIELKFTVRDCNSFPGGASSCKETFNLYYAESDLDYGTNFQKRLFTKIDTIAPDEITVSSDFEARHVKLNVEERSVGPLTRKGFYLAFQDIGACVALLSVRVYYKKCPELLQGLAHFPETIAGSDAPSLATVAGTCVDHAVVPPGGEEPRMHCAVDGEWLVPIGQCLCQAGYEKVEDACQACSPGFFKFEASESPCLECPEHTLPSPEGATSCECEEGFFRAPQDPASMPCTRPPSAPHYLTAVGMGAKVELRWTPPQDSGGREDIVYSVTCEQCWPESGECGPCEASVRYSEPPHGLTRTSVTVSDLEPHMNYTFTVEARNGVSGLVTSRSFRTASVSINQTEPPKVRLEGRSTTSLSVSWSIPPPQQSRVWKYEVTYRKKGDSNSYNVRRTEGFSVTLDDLAPDTTYLVQVQALTQEGQGAGSKVHEFQTLSPEGSGNLAV

SEQ ID NO: 2302 - protein, 541 aa, synthetic construct
  REGION 1..541: note = EPHA3 (P29320) SP+PP+ECD
MDCQLSILLLLSCSVLDSFGELIPQPSNEVNLLDSKTIQGELGWISYPSHGWEEISGVDEHYTPIRTYQVCNVMDHSQNNWLRTNWVPRNSAQKIYVELKFTLRDCNSIPLVLGTCKETFNLYYMESDDDHGVKFREHQFTKIDTIAADESFTQMDLGDRILKLNTEIREVGPVNKKGFYLAFQDVGACVALVSVRVYFKKCPFTVKNLAMFPDTVPMDSQSLVEVRGSCVNNSKEEDPPRMYCSTEGEWLVPIGKCSCNAGYEERGFMCQACRPGFYKALDGNMKCAKCPPHSSTQEDGSMNCRCENNYFRADKDPPSMACTRPPSSPRNVISNINETSVILDWSWPLDTGGRKDVTFNIICKKCGWNIKQCEPCSPNVRFLPRQFGLTNTTVTVTDLLAHTNYTFEIDAVNGVSELSSPPRQFAAVSITTNQAAPSPVLTIKKDRTSRNSISLSWQEPEHPNGIILDYEVKYYEKQEQETSYTILRARGTNVTISSLKPDTIYVFQIRARTAAGYGTNSRKFEFETSPDSFSISGESSQ

SEQ ID NO: 2303 - protein, 547 aa, synthetic construct
  REGION 1..547: note = EPHA4 (P54764) SP+PP+ECD
MAGIFYFALFSCLFGICDAVTGSRVYPANEVTLLDSRSVQGELGWIASPLEGGWEEVSIMDEKNTPIRTYQVCNVMEPSQNNWLRTDWITREGAQRVYIEIKFTLRDCNSLPGVMGTCKETFNLYYYESDNDKERFIRENQFVKIDTIAADESFTQVDIGDRIMKLNTEIRDVGPLSKKGFYLAFQDVGACIALVSVRVFYKKCPLTVRNLAQFPDTITGADTSSLVEVRGSCVNNSEEKDVPKMYCGADGEWLVPIGNCLCNAGHEERSGECQACKIGYYKALSTDATCAKCPPHSYSVWEGATSCTCDRGFFRADNDAASMPCTRPPSAPLNLISNVNETSVNLEWSSPQNTGGRQDISYNVVCKKCGAGDPSKCRPCGSGVHYTPQQNGLKTTKVSITDLLAHTNYTFEIWAVNGVSKYNPNPDQSVSVTVTTNQAAPSSIALVQAKEVTRYSVALAWLEPDRPNGVILEYEVKYYEKDQNERSYRIVRTAARNTDIKGLNPLTSYVFHVRARTAAGYGDFSEPLEVTTNTVPSRIIGDGANST

SEQ ID NO: 2304 - protein, 573 aa, synthetic construct
  REGION 1..573: note = EPHA5 (P54756) SP+PP+ECD
MRGSGPRGAGRRRPPSGGGDTPITPASLAGCYSAPRRAPLWTCLLLCAALRTLLASPSNEVNLLDSRTVMGDLGWIAFPKNGWEEIGEVDENYAPIHTYQVCKVMEQNQNNWLLTSWISNEGASRIFIELKFTLRDCNSLPGGLGTCKETFNMYYFESDDQNGRNIKENQYIKIDTIAADESFTELDLGDRVMKLNTEVRDVGPLSKKGFYLAFQDVGACIALVSVRVYYKKCPSVVRHLAVFPDTITGADSSQLLEVSGSCVNHSVTDEPPKMHCSAEGEWLVPIGKCMCKAGYEEKNGTCQVCRPGFFKASPHIQSCGKCPPHSYTHEEASTSCVCEKDYFRRESDPPTMACTRPPSAPRNAISNVNETSVFLEWIPPADTGGRKDVSYYIACKKCNSHAGVCEECGGHVRYLPRQSGLKNTSVMMVDLLAHTNYTFEIEAVNGVSDLSPGARQYVSVNVTTNQAAPSPVTNVKKGKIAKNSISLSWQEPDRPNGIILEYEIKYFEKDQETSYTIIKSKETTITAEGLKPASVYVFQIRARTAAGYGVFSRRFEFETTPVFAASSDQSQIP

SEQ ID NO: 2305 - protein, 550 aa, synthetic construct
  REGION 1..550: note = EPHA6 (Q9UF33) SP+PP+ECD
MGGCEVREFLLQFGFFLPLLTAWPGDCSHVSNNQVVLLDTTTVLGELGWKTYPLNGWDAITEMDEHNRPIHTYQVCNVMEPNQNNWLRTNWISRDAAQKIYVEMKFTLRDCNSIPWVLGTCKETFNLFYMESDESHGIKFKPNQYTKIDTIAADESFTQMDLGDRILKLNTEIREVGPIERKGFYLAFQDIGACIALVSVRVFYKKCPFTVRNLAMFPDTIPRVDSSSLVEVRGSCVKSAEERDTPKLYCGADGDWLVPLGRCICSTGYEEIEGSCHACRPGFYKAFAGNTKCSKCPPHSLTYMEATSVCQCEKGYFRAEKDPPSMACTRPPSAPRNVVFNINETALILEWSPPSDTGGRKDLTYSVICKKCGLDTSQCEDCGGGLRFIPRHTGLINNSVIVLDFVSHVNYTFEIEAMNGVSELSFSPKPFTAITVTTDQDAPSLIGVVRKDWASQNSIALSWQAPAFSNGAILDYEIKYYEKEHEQLTYSSTRSKAPSVIITGLKPATKYVFHIRVRTATGYSGYSQKFEFETGDETSDMAAEQGQILV

SEQ ID NO: 2306 - protein, 555 aa, synthetic construct
  REGION 1..555: note = EPHA7 (Q15375) SP+PP+ECD
MVFQTRYPSWIILCYIWLLRFAHTGEAQAAKEVLLLDSKAQQTELEWISSPPNGWEEISGLDENYTPIRTYQVCQVMEPNQNNWLRTNWISKGNAQRIFVELKFTLRDCNSLPGVLGTCKETFNLYYYETDYDTGRNIRENLYVKIDTIAADESFTQGDLGERKMKLNTEVREIGPLSKKGFYLAFQDVGACIALVSVKVYYKKCWSIIENLAIFPDTVTGSEFSSLVEVRGTCVSSAEEEAENAPRMHCSAEGEWLVPIGKCICKAGYQQKGDTCEPCGRGFYKSSSQDLQCSRCPTHSFSDKEGSSRCECEDGYYRAPSDPPYVACTRPPSAPQNLIFNINQTTVSLEWSPPADNGGRNDVTYRILCKRCSWEQGECVPCGSNIGYMPQQTGLEDNYVTVMDLLAHANYTFEVEAVNGVSDLSRSQRLFAAVSITTGQAAPSQVSGVMKERVLQRSVELSWQEPEHPNGVITEYEIKYYEKDQRERTYSTVKTKSTSASINNLKPGTVYVFQIRAFTAAGYGNYSPRLDVATLEEATGKMFEATAVSSEQNPV

SEQ ID NO: 2307 - protein, 542 aa, synthetic construct
  REGION 1..542: note = EPHA8 (P29322) SP+PP+ECD
MAPARGRLPPALWVVTAAAAAATCVSAARGEVNLLDTSTIHGDWGWLTYPAHGWDSINEVDESFQPIHTYQVCNVMSPNQNNWLRTSWVPRDGARRVYAEIKFTLRDCNSMPGVLGTCKETFNLYYLESDRDLGASTQESQFLKIDTIAADESFTGADLGVRRLKLNTEVRSVGPLSKRGFYLAFQDIGACLAILSLRIYYKKCPAMVRNLAAFSEAVTGADSSSLVEVRGQCVRHSEERDTPKMYCSAEGEWLVPIGKCVCSAGYEERRDACVACELGFYKSAPGDQLCARCPPHSHSAAPAAQACHCDLSYYRAALDPPSSACTRPPSAPVNLISSVNGTSVTLEWAPPLDPGGRSDITYNAVCRRCPWALSRCEACGSGTRFVPQQTSLVQASLLVANLLAHMNYSFWIEAVNGVSDLSPEPRRAAVVNITTNQAAPSQVVVIRQERAGQTSVSLLWQEPEQPNGIILEYEIKYYEKDKEMQSYSTLKAVTTRATVSGLKPGTRYVFQVRARTSAGCGRFSQAMEVETGKPRPRYDTRT

SEQ ID NO: 2308 - protein, 540 aa, synthetic construct
  REGION 1..540: note = EPHB1 (P54762) SP+PP+ECD
MALDYLLLLLLASAVAAMEETLMDTRTATAELGWTANPASGWEEVSGYDENLNTIRTYQVCNVFEPNQNNWLLTTFINRRGAHRIYTEMRFTVRDCSSLPNVPGSCKETFNLYYYETDSVIATKKSAFWSEAPYLKVDTIAADESFSQVDFGGRLMKVNTEVRSFGPLTRNGFYLAFQDYGACMSLLSVRVFFKKCPSIVQNFAVFPETMTGAESTSLVIARGTCIPNAEEVDVPIKLYCNGDGEWMVPIGRCTCKPGYEPENSVACKACPAGTFKASQEAEGCSHCPSNSRSPAEASPICTCRTGYYRADFDPPEVACTSVPSGPRNVISIVNETSIILEWHPPRETGGRDDVTYNIICKKCRADRRSCSRCDDNVEFVPRQLGLTECRVSISSLWAHTPYTFDIQAINGVSSKSPFPPQHVSVNITTNQAAPSTVPIMHQVSATMRSITLSWPQPEQPNGIILDYEIRYYEKEHNEFNSSMARSQTNTARIDGLRPGMVYVVQVRARTVAGYGKFSGKMCFQTLTDDDYKSELREQLP

SEQ ID NO: 2309 - protein, 543 aa, synthetic construct
  REGION 1..543: note = EPHB2 (P29323) SP+PP+ECD
MALRRLGAALLLLPLLAAVEETLMDSTTATAELGWMVHPPSGWEEVSGYDENMNTIRTYQVCNVFESSQNNWLRTKFIRRRGAHRIHVEMKFSVRDCSSIPSVPGSCKETFNLYYYEADFDSATKTFPNWMENPWVKVDTIAADESFSQVDLGGRVMKINTEVRSFGPVSRSGFYLAFQDYGGCMSLIAVRVFYRKCPRIIQNGAIFQETLSGAESTSLVAARGSCIANAEEVDVPIKLYCNGDGEWLVPIGRCMCKAGFEAVENGTVCRGCPSGTFKANQGDEACTHCPINSRTTSEGATNCVCRNGYYRADLDPLDMPCTTIPSAPQAVISSVNETSLMLEWTPPRDSGGREDLVYNIICKSCGSGRGACTRCGDNVQYAPRQLGLTEPRIYISDLLAHTQYTFEIQAVNGVTDQSPFSPQFASVNITTNQAAPSAVSIMHQVSRTVDSITLSWSQPDQPNGVILDYELQYYEKELSEYNATAIKSPTNTVTVQGLKAGAIYVFQVRARTVAGYGRYSGKMYFQTMTEAEYQTSIQEKLPL

SEQ ID NO: 2310 - protein, 559 aa, synthetic construct
  REGION 1..559: note = EPHB3 (P54753) SP+PP+ECD
MARARPPPPPSPPPGLLPLLPPLLLLPLLLLPAGCRALEETLMDTKWVTSELAWTSHPESGWEEVSGYDEAMNPIRTYQVCNVRESSQNNWLRTGFIWRRDVQRVYVELKFTVRDCNSIPNIPGSCKETFNLFYYEADSDVASASSPFWMENPYVKVDTIAPDESFSRLDAGRVNTKVRSFGPLSKAGFYLAFQDQGACMSLISVRAFYKKCASTTAGFALFPETLTGAEPTSLVIAPGTCIPNAVEVSVPLKLYCNGDGEWMVPVGACTCATGHEPAAKESQCRPCPPGSYKAKQGEGPCLPCPPNSRTTSPAASICTCHNNFYRADSDSADSACTTVPSPPRGVISNVNETSLILEWSEPRDLGGRDDLLYNVICKKCHGAGGASACSRCDDNVEFVPRQLGLTERRVHISHLLAHTRYTFEVQAVNGVSGKSPLPPRYAAVNITTNQAAPSEVPTLRLHSSSGSSLTLSWAPPERPNGVILDYEMKYFEKSEGIASTVTSQMNSVQLDGLRPDARYVVQVRARTVAGYGQYSRPAEFETTSERGSGAQQLQEQLPL

SEQ ID NO: 2311 - protein, 539 aa, synthetic construct
  REGION 1..539: note = EPHB4 (P54760) SP+PP+ECD
MELRVLLCWASLAAALEETLLNTKLETADLKWVTFPQVDGQWEELSGLDEEQHSVRTYEVCDVQRAPGQAHWLRTGWVPRRGAVHVYATLRFTMLECLSLPRAGRSCKETFTVFYYESDADTATALTPAWMENPYIKVDTVAAEHLTRKRPGAEATGKVNVKTLRLGPLSKAGFYLAFQDQGACMALLSLHLFYKKCAQLTVNLTRFPETVPRELVVPVAGSCVVDAVPAPGPSPSLYCREDGQWAEQPVTGCSCAPGFEAAEGNTKCRACAQGTFKPLSGEGSCQPCPANSHSNTIGSAVCQCRVGYFRARTDPRGAPCTTPPSAPRSVVSRLNGSSLHLEWSAPLESGGREDLTYALRCRECRPGGSCAPCGGDLTFDPGPRDLVEPWVVVRGLRPDFTYTFEVTALNGVSSLATGPVPFEPVNVTTDREVPPAVSDIRVTRSSPSSLSLAWAVPRAPSGAVLDYEVKYHEKGAEGPSSVRFLKTSENRAELRGLKRGASYLVQVRARSEAGYGPFGQEHHSQTQLDESEGWREQLA

SEQ ID NO: 2312 - protein, 594 aa, synthetic construct
  REGION 1..594: note = EPHB6 (O15197) SP+PP+ECD
MATEGAAQLGNRVAGMVCSLWVLLLVSSVLALEEVLLDTTGETSEIGWLTYPPGGWDEVSVLDDQRRLTRTFEACHVAGAPPGTGQDNWLQTHFVERRGAQRAHIRLHFSVRACSSLGVSGGTCRETFTLYYRQAEEPDSPDSVSSWHLKRWTKVDTIAADESFPSSSSSSSSSSSAAWAVGPHGAGQRAGLQLNVKERSFGPLTQRGFYVAFQDTGACLALVAVRLFSYTCPAVLRSFASFPETQASGAGGASLVAAVGTCVAHAEPEEDGVGGQAGGSPPRLHCNGEGKWMVAVGGCRCQPGYQPARGDKACQACPRGLYKSSAGNAPCSPCPARSHAPNPAAPVCPCLEGFYRASSDPPEAPCTGPPSAPQELWFEVQGSALMLHWRLPRELGGRGDLLFNVVCKECEGRQEPASGGGGTCHRCRDEVHFDPRQRGLTESRVLVGGLRAHVPYILEVQAVNGVSELSPDPPQAAAINVSTSHEVPSAVPVVHQVSRASNSITVSWPQPDQTNGNILDYQLRYYDQAEDESHSFTLTSETNTATVTQLSPGHIYGFQVRARTAAGHGPYGGKVYFQTLPQGELSSQLPERLS

SEQ ID NO: 2313 - protein, 250 aa, synthetic construct
  REGION 1..250: note = EPOR (P19235) SP+PP+ECD
MDHLGASLWPQVGSLCLLLAGAAWAPPPNLPDPKFESKAALLAARGPEELLCFTERLEDLVCFWEEAASAGVGPGNYSFSYQLEDEPWKLCRLHQAPTARGAVRFWCSLPTADTSSFVPLELRVTAASGAPRYHRVIHINEVVLLDAPVGLVARLADESGHVVLRWLPPPETPMTSHIRYEVDVSAGNGAGSVQRVEILEGRTECVLSNLRGRTRYTFAVRARMAEPSFGGFWSAWSEPVSLLTPSDLDP

SEQ ID NO: 2314 - protein, 181 aa, synthetic construct
  REGION 1..181: note = EQTN (Q9NQ60) SP+PP+ECD
MNFILFIFIPGVFSLKSSTLKPTIEALPNVLPLNEDVNKQEEKNEDHTPNYAPANEKNGNYYKDIKQYVFTTQNPNGTESEISVRATTDLNFALKNDKTVNATTYEKSTIEEETTTSEPSHKNIQRSTPNVPAFWTMLAKAINGTAVVMDDKDQLFHPIPESDVNATQGENQPDLEDLKIK

SEQ ID NO: 2315 - protein, 652 aa, synthetic construct
  REGION 1..652: note = ERBB2 (P04626) SP+PP+ECD
MELAALCRWGLLLALLPPGAASTQVCTGTDMKLRLPASPETHLDMLRHLYQGCQVVQGNLELTYLPTNASLSFLQDIQEVQGYVLIAHNQVRQVPLQRLRIVRGTQLFEDNYALAVLDNGDPLNNTTPVTGASPGGLRELQLRSLTEILKGGVLIQRNPQLCYQDTILWKDIFHKNNQLALTLIDTNRSRACHPCSPMCKGSRCWGESSEDCQSLTRTVCAGGCARCKGPLPTDCCHEQCAAGCTGPKHSDCLACLHFNHSGICELHCPALVTYNTDTFESMPNPEGRYTFGASCVTACPYNYLSTDVGSCTLVCPLHNQEVTAEDGTQRCEKCSKPCARVCYGLGMEHLREVRAVTSANIQEFAGCKKIFGSLAFLPESFDGDPASNTAPLQPEQLQVFETLEEITGYLYISAWPDSLPDLSVFQNLQVIRGRILHNGAYSLTLQGLGISWLGLRSLRELGSGLALIHHNTHLCFVHTVPWDQLFRNPHQALLHTANRPEDECVGEGLACHQLCARGHCWGPGPTQCVNCSQFLRGQECVEECRVLQGLPREYVNARHCLPCHPECQPQNGSVTCFGPEADQCVACAHYKDPPFCVARCPSGVKPDLSYMPIWKFPDEEGACQPCPINCTHSCVDLDDKGCPAEQRASPLT

SEQ ID NO: 2316 - protein, 643 aa, synthetic construct
  REGION 1..643: note = ERBB3 (P21860) SP+PP+ECD
MRANDALQVLGLLFSLARGSEVGNSQAVCPGTLNGLSVTGDAENQYQTLYKLYERCEVVMGNLEIVLTGHNADLSFLQWIREVTGYVLVAMNEFSTLPLPNLRVVRGTQVYDGKFAIFVMLNYNTNSSHALRQLRLTQLTEILSGGVYIEKNDKLCHMDTIDWRDIVRDRDAEIVVKDNGRSCPPCHEVCKGRCWGPGSEDCQTLTKTICAPQCNGHCFGPNPNQCCHDECAGGCSGPQDTDCFACRHFNDSGACVPRCPQPLVYNKLTFQLEPNPHTKYQYGGVCVASCPHNFVVDQTSCVRACPPDKMEVDKNGLKMCEPCGGLCPKACEGTGSGSRFQTVDSSNIDGFVNCTKILGNLDFLITGLNGDPWHKIPALDPEKLNVFRTVREITGYLNIQSWPPHMHNFSVFSNLTTIGGRSLYNRGFSLLIMKNLNVTSLGFRSLKEISAGRIYISANRQLCYHHSLNWTKVLRGPTEERLDIKHNRPRRDCVAEGKVCDPLCSSGGCWGPGPGQCLSCRNYSRGGVCVTHCNFLNGEPREFAHEAECFSCHPECQPMEGTATCNGSGSDTCAQCAHFRDGPHCVSSCPHGVLGAKGPIYKYPDVQNECRPCHENCTQGCKGPELQDCLGQTLVLIGKTHLT

SEQ ID NO: 2317 - protein, 651 aa, synthetic construct
  REGION 1..651: note = ERBB4 (Q15303) SP+PP+ECD
MKPATGLWVWVSLLVAAGTVQPSDSQSVCAGTENKLSSLSDLEQQYRALRKYYENCEVVMGNLEITSIEHNRDLSFLRSVREVTGYVLVALNQFRYLPLENLRIIRGTKLYEDRYALAIFLNYRKDGNFGLQELGLKNLTEILNGGVYVDQNKFLCYADTIHWQDIVRNPWPSNLTLVSTNGSSGCGRCHKSCTGRCWGPTENHCQTLTRTVCAEQCDGRCYGPYVSDCCHRECAGGCSGPKDTDCFACMNFNDSGACVTQCPQTFVYNPTTFQLEHNFNAKYTYGAFCVKKCPHNFVVDSSSCVRACPSSKMEVEENGIKMCKPCTDICPKACDGIGTGSLMSAQTVDSSNIDKFINCTKINGNLIFLVTGIHGDPYNAIEAIDPEKLNVFRTVREITGFLNIQSWPPNMTDFSVFSNLVTIGGRVLYSGLSLLILKQQGITSLQFQSLKEISAGNIYITDNSNLCYYHTINWTTLFSTINQRIVIRDNRKAENCTAEGMVCNHLCSSDGCWGPGPDQCLSCRRFSRGRICIESCNLYDGEFREFENGSICVECDPQCEKMEDGLLTCHGPGPDNCTKCSHFKDGPNCVEKCPDGLQGANSFIFKYADPDRECHPCHPNCTQGCNGPTSHDCIYYPWTGHSTLPQHARTP

SEQ ID NO: 2318 - protein, 119 aa, synthetic construct
  REGION 1..119: note = EREG (O14944) SP+PP+ECD
MTAGRRMEMLCAGRVPALLLCLGFHLLQAVLSTTVIPSCIPGESSDNCTALVQTEDNPRVAQVSITKCSSDMNGYCLHGQCIYLVDMSQNYCRCEVGYTGVRCEHFFLTVHQPLSKEYV

SEQ ID NO: 2319 - protein, 155 aa, synthetic construct
  REGION 1..155: note = ERMAP (Q96PL5) SP+PP+ECD
MEMASSAGSWLSGCLIPLVFLRLSVHVSGHAGDAGKFHVALLGGTAELLCPLSLWPGTVPKEVRWLRSPFPQRSQAVHIFRDGKDQDEDLMPEYKGRTVLVRDAQEGSVTLQILDVRLEDQGSYRCLIQVGNLSKEDTVILQVAAPSVGSLSPSA

SEQ ID NO: 2320 - protein, 518 aa, synthetic construct
  REGION 1..518: note = ERVFC1 (P60507) SP+PP+ECD
MARPSPLCLLLLLTLLTPIVPSNSLLTEPPFRWRFYLHETWTQGNRLSTVTLATVDCQPHGCQAQVTFNFTSFKSVLRGWSNPTICFVYDQTHSNCRDYWVDTNGGCPYAYCRMHVTQLHTAKKLQHTYRLTSDGRTTYFLTIPDPWDSRWVSGVTGRLYRWPTDSYPVGKLRIFLTYIRVIPQVLSNLKDQADNIKHQEEVINTLVQSHPKADMVTYDDKAEAGPFSWITLVRHGARLVNMAGLVNLSHCFLCTALSQPPLVAVPLPQAFNTSGNHTAHPSGVFSEQVPLFRDPLQPQFPFCYTTPNSSWCNQTYSGSLSNLSAPAGGYFWCNFTLTKHLNISSNNTLSRNLCLPISLVPRLTLYSEAELSSLVNPPMRQKRAVFPPLVIGVSLTSSLVASGLGTGAIVHFISSSQDLSIKLQMAIEASAESLASLQRQITSVAKVAMQNRRALDLLTADKGGTCMFLGEECCYYINESGLVETSLLTLDKIRDGLHRPSSTPNYGGGWWQSPLTTW

SEQ ID NO: 2321 - protein, 518 aa, synthetic construct; identical to SEQ ID NO: 2320
  REGION 1..518: note = ERVFRD-1 (P60508) SP+PP+ECD

SEQ ID NO: 2322 - protein, 632 aa, synthetic construct
  REGION 1..632: note = ERVK-19 (O71037) SP+PP+ECD
MNPSEMQRKAPPRRRRHRNRAPLTHKMNKMVTSEEQMKLPSTKKAEPPTWAQLKKLTQLATKYLENTKVTQTPESMLLAALMIVSMVVSLPMPAGAAAANYTYWAYVPFPPLIRAVTWMDNPIEVYVNDSVWVPGPTDDHCPAKPEEEGMMINISIGYRYPPICLGRAPGCLMPAVQNWLVEVPTVSPISRFTYHMVSGMSLRPRVNYLQDFSYQRSFKFRPKGKPCPKEIPKESKNTEVLVWEECVANSAVILQNNEFGTIIDWAPRGQFYHNCSGQTQSCPSAQVSPAVDSDLTESLDKHKHKKLQSFYPWEWGEKGISTPRPKIISPVSGPEHPELWRLTVASHHIRIWSGNQTLETRDRKPFYTVDLNSSVTVPLQSCIKPPYMLVVGNIVIKPDSQTITCENCRLLTCIDSTFNWQHRILLVRAREGVWIPVSMDRPWETSPSIHTLTEVLKGVLNRSKRFIFTLIAVIMGLIAVTATAAVAGVALHSSVQSVNFVNDWQKNSTRLWNSQSSIDQKLANQINDLRQTVIWMGDRLMSLEHRFQLQCDWNTSDFSITPQIYNESEHHWDMVRRHLQGREDNLTLDISKLKEQIFEASKAHLNLVPGTEAIAGVADGLANLNPVTWVKT

SEQ ID NO: 2323 - protein, 631 aa, synthetic construct
  REGION 1..631: note = ERVK-21 (P61565) SP+PP+ECD
MHPSEMQRKAPPRRRRHRNRAPLTHKMNKMVTSEQMKLPSTKKAEPPTWAQLKKLTQLATKYLENTKVTQTPESMLLAALMIVSMVVSLPMPAGAAAANYTNWAYVPFPPLIRAVTWMDNPIEVYVNDSVWVHGPIDDRCPAKPEEEGMMINISIGYHYPPICLGRAPGCLMPAVQNWLVEVPTVSPISRFTYNMVSGMSLRPRVNYLQDFSYQRSLKFRPKGKPCPKEIPKESKNTEVLVWEECVANSVVILQNNEFGTIIDWAPRGQFYHNCSGQTQSCPSAQVSPAVDSDLTESLDKHKHKKLQSFYPWEWGEKGISTPRPKIISPVSGPEHPELWRLTVASHHIRIWSGNQTLETRDRKPFYTVDLNSSLTVPLQSCVKPPYMLVVGNIVIKPDSQTITCENCRLLTCIDSTFNWQHRILLVRAREGVWIPVSMDRPWEASPSIHILTEVLKGVLNRSKRFIFTLIAVIMGLIAVTAMAAVAGVALHSFVQSVNFVNDWQKNSTRLWNSQSSIDQKLANQINDLRQTVIWMGDRLMSLEHRFQLQCDWNTSDFCITPQIYNESEHHWDMVRRHLQGREDNLTLDISKLKEQIFEASKAHLNLVPGTEAIAGVADGLANLNPVTWVKT

SEQ ID NO: 2324 - protein, 632 aa, synthetic construct
  REGION 1..632: note = ERVK-6 (Q69384) SP+PP+ECD
MNPSEMQRKAPPRRRRHRNRAPLTHKMNKMVTSEEQMKLPSTKKAEPPTWAQLKKLTQLATKYLENTKVTQTPESMLLAALMIVSMVVSLPMPAGAAAANYTYWAYVPFPPLIRAVTWMDNPTEVYVNDSVWVPGPIDDRCPAKPEEEGMMINISIGYHYPPICLGRAPGCLMPAVQNWLVEVPTVSPICRFTYHMVSGMSLRPRVNYLQDFSYQRSLKFRPKGKPCPKEIPKESKNTEVLVWEECVANSAVILQNNEFGTIIDWAPRGQFYHNCSGQTQSCPSAQVSPAVDSDLTESLDKHKHKKLQSFYPWEWGEKGISTPRPKIVSPVSGPEHPELWRLTVASHHIRIWSGNQTLETRDRKPFYTIDLNSSLTVPLQSCVKPPYMLVVGNIVIKPDSQTITCENCRLLTCIDSTFNWQHRILLVRAREGVWIPVSMDRPWEASPSVHILTEVLKGVLNRSKRFIFTLIAVIMGLIAVTATAAVAGVALHSSVQSVNFVNDWQKNSTRLWNSQSSIDQKLANQINDLRQTVIWMGDRLMSLEHRFQLQCDWNTSDFCITPQIYNESEHHWDMVRRHLQGREDNLTLDISKLKEQIFEASKAHLNLVPGTEAIAGVADGLANLNPVTWVKT

SEQ ID NO: 2325 - protein, 632 aa, synthetic construct
  REGION 1..632: note = ERVK-8 (Q902F8) SP+PP+ECD
MNPSEMQRKAPPRRRRHRNRAPLTHKMNKMVTSEEQMKLPSTKKAEPPTWAQLKKLTQLATKYLENTKVTQTPESMLLAALMIVSMVVSLPMPAGAAVANYTNWAYVPFPPLIRAVTWMDNPIEVYVNDSVWVPGPIDDRCPAKPEEEGMMINISIGYRYPPICLGRAPGCLMPAVQNWLVEVPTVSPISRFTYHMVSGMSLRPRVNYLQDFSYQRSLKFRPKGKPCPKEIPKESKNTEVLVWEECVANSAVILQNNEFGTIIDWAPRGQFYHNCSGQTQSCPSAQVSPAVDSDLTESLDKHKHKKLQSFYPWEWGEKRISTPRPKIVSPVSGPEHPELWRLTVASHHIRIWSGNQTLETRDRKPFYTVDLNSSLTLPLQSCVKPPYMLVVGNIVIKPDSQTITCENCRLLTCIDSTFNWQHRILLVRAREGVWIPVSMDRPWEASPSVHILTEVLKGVLNRSKRFIFTLIAVIMGLIAVTATAAVAGVALHSSVQSVNFVNDGQKNSTRLWNSQSSIDQKLANQINDLRQTVIWMGDRLMSLEHRFQLQCDWNTSDFCITPQIYNDSEHHWDMVRRHLQGREDNLTLDISKLKEQIFEASKAHLNLVPGTEAIAGVADGLANLNPVTWVKT

SEQ ID NO: 2326 - protein, 631 aa, synthetic construct
  REGION 1..631: note = ERVK-9 (Q9UKH3) SP+PP+ECD
MNPSEMQRKAPPRRRRHRNRAPLTHKMNKMVTSEEQMKLPSTKKAEPPTWAQLKKLTQLATKYLENTKVTQTPESMLLAALMIVSMVVSLPMPAGAAAANYTNWAYVPFPPLIRAVTWMDNPIEVYVNDSVWVPGPIDDRCPAKPEEEGMMINISIGYRYPICLGRAPGCLMPAVQNWLVEVPIVSPICRFTYHMVSGMSLRPRVNYLQDFSYQRSLKFRPKGKPCPKEIPKESKNTEVLVWEECVANSAVILQNNEFGTIIDWTPQGQFYHNCSGQTQSCPSAQVSPAVDSDLTESLDKHKHKKLQSFYPWEWGEKGISTPRPKIISPVSGPEHPELWRLTVASHHIRIWSGNQTLETRDRKPFYTVDLNSSLTLPLQSCVKPPYMLVVGNIVIKPDSQTITCENCRLLTCIDSTFNWQHRILLVRAREGVWIPVSMDRPWEASPSIHILTEVLKGVLNRSKRFIFTLIAVIMGLIAVTATAAVAGVALHSSVQSVNFVNDGQKNSTRLWNSQSSIDQKLANQINDLRQTVIWMGDRLMSLEHRFQLQCDWNTSDFCITPQIYNESEHHWDMVRRHLQGREDNLTLDISKLKEQIFEASKAHLNLVPGTEAIAGVADGLANLNPVTWVKT

SEQ ID NO: 2327 - protein, 488 aa, synthetic construct
  REGION 1..488: note = ERVMER34-1 (Q9H9K5) SP+PP+ECD
MGSLSNYALLQLTLTAFLTILVQPQHLLAPVFRTLSILTNQSNCWLCEHLDNAEQPELVFVPASASTWWTYSGQWMYERVWYPQAEVQNHSTSSYRKVTWHWEASMEAQGLSFAQVRLLEGNFSLCVENKNGSGPFLGNIPKQYCNQILWFDSTDGTFMPSIDVTNESRNDDDDTSVCLGTRQCSWFAGCTNRTWNSSAVPLIGLPNTQDYKWVDRNSGLTWSGNDTCLYSCQNQTKGLLYQLFRNLFCSYGLTEAHGKWRCADASITNDKGHDGHRTPTWWLTGSNLTLSVNNSGLFFLCGNGVYKGFPPKWSGRCGLGYLVPSLTRYLTLNASQITNLRSFIHKVTPHRCTQGDTDNPPLYCNPKDNSTIRALFPSLGTYDLEKAILNISKAMEQEFSATKQTLEAHQSKVSSLASASRKDHVLDIPTTQRQTACGTVGKQCCLYINYSEEIKSNIQRLHEASENLKNVPLLDWQGIFAKVGDWFR

SEQ ID NO: 2328 - protein, 451 aa, synthetic construct; identical to SEQ ID NO: 1224
  REGION 1..451: note = ERVPABLB-1 (P60509) SP+PP+ECD

SEQ ID NO: 2329 - protein, 575 aa, synthetic construct
  REGION 1..575: note = ERVS71-1 (P61550) SP+PP+ECD
MGPEAWVRPLKTAPKPGEAIRLILFIYLSCFFLPVMSSEPSYSFLLTSFTTGRVFANTTWRAGTSKEVSFAVDLCVLFPEPARTHEEQHNLPVIGAGSVDLAAGFGHSGSQTGCGSSKGAEKGLQNVDFYLCPGNHPDASCRDTYQFFCPDWTCVTLATYSGGSTRSSTLSISRVPHPKLCTRKNCNPLTITVHDPNAAQWYYGMSWGLRLYIPGFDVGTMFTIQKKILVSWSSPKPIGPLTDLGDPIFQKHPDKVDLTVPLPFLVPRPQLQQQHLQPSLMSILGGVHHLLNLTQPKLAQDCWLCLKAKPPYYVGLGVEATLKRGPLSCHTRPRALTIGDVSGNASCLISTGYNLSASPFQATCNQSLLTSISTSVSYQAPNNTWLACTSGLTRCINGTEPGPLLCVLVHVLPQVYVYSGPEGRQLIAPPELHPRLHQAVPLLVPLLAGLSIAGSAAIGTAALVQGETGLISLSQQVDADFSNLQSAIDILHSQVESLAEVVLQNCRCLDLLFLSQGGLCAALGESCCFYANQSGVIKGTVKKVRENLDRHQQERENNIPWYQSMFNWNPWLTTL

SEQ ID NO: 2330 - protein, 321 aa, synthetic construct
  REGION 1..321: note = ERVV-1 (B6SEH8) SP+PP+ECD
MTEKFLFLYLSLLPMPLLSQAQWNENSLVSFSKIIASGNHLSNCWICHNFITRSSSYQYILVRNFSLNLTFGSGIPEGQHKSVPLQVSLANSAHQVPCLDLTPPFNQSSKTSFYFYNCSSLNQTCCPCPEGHCDRKNTSEEGFPSPTIHPMSFSPAGCHPNLTHWCPAKQMNDYRDKSPQNRCAAWEGKELITWRVLYLLPKAHTVPTWPKSTVPLGGPLSPACNQTIPAGWKSQLHKWFDSHIPRWACTPPGYVFLCGPQKNKLPFDGSPKITYSTPPVANLYTCINNIQHTGECAVGLLGPRGIGVTIYNTTQPRQKRA

SEQ ID NO: 2331 - protein, 443 aa, synthetic construct
  REGION 1..443: note = ERVW-1 (Q9UQF0) SP+PP+ECD
MALPYHIFLFTVLLPSFTLTAPPPCRCMTSSSPYQEFLWRMQRPGNIDAPSYRSLSKGTPTFTAHTHMPRNCYHSATLCMHANTHYWTGKMINPSCPGGLGVTVCWTYFTQTGMSDGGGVQDQAREKHVKEVISQLTRVHGTSSPYKGLDLSKLHETLRTHTRLVSLFNTTLTGLHEVSAQNPTNCWICLPLNFRPYVSIPVPEQWNNFSTEINTTSVLVGPLVSNLEITHTSNLTCVKFSNTTYTTNSQCIRWVTPPTQIVCLPSGIFFVCGTSAYRCLNGSSESMCFLSFLVPPMTIYTEQDLYSYVISKPRNKRVPILPFVIGAGVLGALGTGIGGITTSTQFYYKLSQELNGDMERVADSLVTLQDQLNSLAAVVLQNRRALDLLTAERGGTCLFLGEECCYYVNQSGIVTEKVKEIRDRIQRRAEELRNTGPWGLLSQ

SEQ ID NO: 2332 - protein, 248 aa, synthetic construct
  REGION 1..248: note = ESAM (Q96AP7) SP+PP+ECD
MISLPGPLVTNLLRFLFLGLSALAPPSRAQLQLHLPANRLQAVEGGEVVLPAWYTLHGEVSSSQPWEVPFVMWFFKQKEKEDQVLSYINGVTTSKPGVSLVYSMPSRNLSLRLEGLQEKDSGPYSCSVNVQDKQGKSRGHSIKTLELNVLVPPAPPSCRLQGVPHVGANVTLSCQSPRSKPAVQYQWDRQLPSFQTFFAPALDVIRGSLSLTNLSSSMAGVYVCKAHNEVGTAQCNVTLEVSTGPGAA

SEQ ID NO: 2333 - protein, 322 aa, synthetic construct
  REGION 1..322: note = EVA1C (P58658) SP+PP+ECD
MLLPGRARQPPTPQPVQHPGLRRQVEPPGQLLRLFYCTVLVCSKEISALTDFSGYLTKLLQNHTTYACDGDYLNLQCPRHSTISVQSAFYGQDYQMCSSQKPASQREDSLTCVAATTFQKVLDECQNQRACHLLVNSRVFGPDLCPGSSKYLLVSFKCQPNELKNKTVCEDQELKLHCHESKFLNIYSATYGRRTQERDICSSKAERLPPFDCLSYSALQVLSRRCYGKQRCKIIVNNHHFGSPCLPGVKKYLTVTYACVPKNILTAIDPAIANLKPSLKQKDGEYGINFDPSGSKVLRKDGILVSNSLAAFAYIRAHPERA

SEQ ID NO: 2334 - protein, 300 aa, synthetic construct
  REGION 1..300: note = EVC2 (Q86UK5) SP+PP+ECD
MDPSGSRGRPTWVLAGGLLAVALALGGRGCLGASSRPRWRPLGAQPPRDPQVAPRSGPGLRIPPGRSGAGPESSTQDLPCMIWPKVECCHFKTAVEAPLGMKLDKKMEVFIPLSTSAASSGPWAHSLFAFIPSWPKKNLFKRESPITHRLYGDISREVQGTSENGVIFQKCALVSGSSEAQTARIWLLVNNTKTTSSANLSELLLLDSIAGLTIWDSVGNRTSEGFQAFSKKFLQVGDAFAVSYAATLQAGDLGNGESLKLPAQLTFQSSSRNRTQLKVLFSITAEENVTVLPHHGLHAA

SEQ ID NO: 2335 - protein, 133 aa, synthetic construct
  REGION 1..133: note = EVI2A (P22794) SP+PP+ECD
MPTDMEHTGHYLHLAFLMTTVFSLSPGTKANYTRLWANSTSSWDSVIQNKTGRNQNENINTNPITPEVDYKGNSTNMPETSHIVALTSKSEQELYIPSVVSNSPSTVQSIENTSKSHGEIFKKDVCAENNNNM

SEQ ID NO: 2336 - protein, 202 aa, synthetic construct
  REGION 1..202: note = EVI2B (P34910) SP+PP+ECD
MDPKYFILILFCGHLNNTFFSKTETITTEKQSQPTLFTSSMSQVLANSQNTTGNPLGQPTQFSDTFSGQSISPAKVTAGQPTPAVYTSSEKPEAHTSAGQPLAYNTKQPTPIANTSSQQAVFTSARQLPSARTSTTQPPKSFVYTFTQQSSSVQIPSRKQITVHNPSTQPTSTVKNSPRSTPGFILDTTSNKQTPQKNNYNS

SEQ ID NO: 2337 - protein, 238 aa, synthetic construct
  REGION 1..238: note = F11R (Q9Y624) SP+PP+ECD
MGTKAQVERKLLCLFILAILLCSLALGSVTVHSSEPEVRIPENNPVKLSCAYSGFSSPRVEWKFDQGDTTRLVCYNNKITASYEDRVTFLPTGITFKSVTREDTGTYTCMVSEEGGNSYGEVKVKLIVLVPPSKPTVNIPSSATIGNRAVLTCSEQDGSPPSEYTWFKDGIVMPTNPKSTRAFSNSSYVLNPTTGELVFDPLSASDTGEYSCEARNGYGTPMTSNAVRMEAVERNVGV

SEQ ID NO: 2338 - protein, 251 aa, synthetic construct
  REGION 1..251: note = F3 (P13726) SP+PP+ECD
METPAWPRVPRPETAVARTLLLGWVFAQVAGASGTTNTVAAYNLTWKSTNFKTILEWEPKPVNQVYTVQISTKSGDWKSKCFYTTDTECDLTDEIVKDVKQTYLARVFSYPAGNVESTGSAGEPLYENSPEFTPYLETNLGQPTIQSFEQVGTKVNVTVEDERTLVRRNNTFLSLRDVFGKDLIYTLYYWKSSSSGKKTAKTNTNEFLIDVDKGENYCFSVQAVIPSRTVNRKSTDSPVECMGQEKGEFRE

SEQ ID NO: 2339 - protein, 303 aa, synthetic construct
  REGION 1..303: note = FAM171A1 (Q5VUB5) SP+PP+ECD
MSRSATLLLCLLGCHVWKAVTKTLREPGAGAQEVTLKVHISDASTHQPVADALIEIFTNQASIASGTSGTDGVAFIKFQYKLGSQLIVTASKHAYVPNSAPWKPIRLPVFSSLSLGLLPERSATLMVYEDVVQIVSGFQGARPQPRVHFQRRALRLPENTSYSDLTAFLTAASSPSEVDSFPYLRGLDGNGTGNSTRHDLTPVTAVSVHLLSSNGTPVLVDGPIYVTVPLATQSSLRHNAYVAAWRFDQKLGTWLKSGLGLVHQEGSQLTWTYIAPQLGYWVAAMSPPIPGPVVTQDITTYHT

SEQ ID NO: 2340 - protein, 315 aa, synthetic construct
  REGION 1..315: note = FAM171A2 (A8MVW0) SP+PP+ECD
MPPASGPSVLARLLPLLGLLLGSASRAPGKSPPEPPSPQEILIKVQVYVSGELVPLARASVDVFGNRTLLAAGTTDSEGVATLPLSYRLGTWVLVTAARPGFLTNSVPWRVDKLPLYASVSLYLLPERPATLILYEDLVHILLGSPGARSQPLVQFQRRAARLPVSSTYSQLWASLTPASTQQEMRAFPAFLGTEASSSGNGSWLELMPLTAVSVHLLTGNGTEVPLSGPIHLSLPVPSETRALTVGTSIPAWRFDPKSGLWVRNGTGVIRKEGRQLYWTFVSPQLGYWVAAMASPTAGLVTITSGIQDIGTYHT

SEQ ID NO: 2341 - protein, 353 aa, synthetic construct
  REGION 1..353: note = FAM171B (Q6P995) SP+PP+ECD
MARLCRRVPCTLLLGLAVVLLKARLVPAAARAELSRSDLSLIQQQQQQQQQQQQQQKQLEEAEEERTEVPGATSTLTVPVSVFMLKVQVNDIISRQYLSQAVVEVFVNYTKTNSTVTKSNGAVLIKVPYKLGLSLTIIAYKDGYVLTPLPWKTRRMPIYSSVTLSLFPQSQANIWLFEDTVLITGKLADAKSQPSVQFSKALIKLPDNHHISNVTGYLTVLQQFLKVDNFLHTTGITLNKPGFENIELTPLAAICVKIYSGGKELKVNGSIQVSLPLLRLNDISAGDRIPAWTFDMNTGAWVNHGRGMVKEHNNHLIWTYDAPHLGYWIAAPLPGTRGSGINEDSKDITAYHT

SEQ ID NO: 2342 - protein, 123 aa, synthetic construct
  REGION 1..123: note = FAM174A (Q8TBP5) SP+PP+ECD
MKASQCCCCLSHLLASVLLLLLLPELSGPLAVLLQAAEAAPGLGPPDPRPRTLPPLPPGPTPAQQPGRGLAEAAGPRGSEGGNGSNPVAGLETDDHGGKAGEGSVGGGLAVSPNPGDKPMTQR

SEQ ID NO: 2343 - protein, 90 aa, synthetic construct
  REGION 1..90: note = FAM174B (Q3ZCQ3) SP+PP+ECD
MRAVPLPAPLLPLLLLALLAAPAARASRAESVSAPWPEPERESRPPPGPGPGNTTRFGSGAAGGSGSSSSNSSGDALVTRISILLRDLPT

SEQ ID NO: 2344 - protein, 335 aa, synthetic construct
  REGION 1..335: note = FAM187B (Q17R55) SP+PP+ECD
MPPMLWLLLHFAAPALGFYFSISCPSGKQCQQALLSGNDILLYCNSSGAHWYYLFTQGKKGRLTSLTNISNMEIMPEGSLLIKDPLPSQTGLYHCWNKNGRQVVQYEIDFQDVTTLHITHKDLGQRPLQNETLHLGSKQLIFTWWEPWQDCNRCEEPGECKRLGYRYIEEPLEEAMPCWLYLGEVLVWSSRLRPELQVEACHVQCTNNTQLRVDYVIFDNFRLDEKTEFVWLDCPLGSMYRPVNWRANDTPLTWESQLSGQDFTTFLDPSTGGRQLQVFQPAVYKCFVQQELVAQFKPAASLETLEAQWRENDAQWREARKALRGRADSVLKGLK

SEQ ID NO: 2345 - protein, 173 aa, synthetic construct
  REGION 1..173: note = FAS (P25445) SP+PP+ECD
MLGIWTLLPLVLTSVARLSSKSVNAQVTDINSKGLELRKTVTTVETQNLEGLHHDGQFCHKPCPPGERKARDCTVNGDEPDCVPCQEGKEYTDKAHFSSKCRRCRLCDEGHGLEVEINCTRTQNTKCRCKPNFFCNSTVCEHCDPCTKCEHGIIKECTLTSNTKCKEEGSRSN

SEQ ID NO: 2346 - protein, 4181 aa, synthetic construct
  REGION 1..4181: note = FAT1 (Q14517) SP+PP+ECD
MGRHLALLLLLLLLFQHFGDSDGSQRLEQTPLQFTHLEYNVTVQENSAAKTYVGHPVKMGVYITHPAWEVRYKIVSGDSENLFKAEEYILGDFCFLRIRTKGGNTAILNREVKDHYTLIVKALEKNTNVEARTKVRVQVLDTNDLRPLFSPTSYSVSLPENTAIRTSIARVSATDADIGTNGEFYYSFKDRTDMFAIHPTSGVIVLTGRLDYLETKLYEMEILAADRGMKLYGSSGISSMAKLTVHIEQANECAPVITAVTLSPSELDRDPAYAIVTVDDCDQGANGDIASLSIVAGDLLQQFRTVRSFPGSKEYKVKAIGGIDWDSHPFGYNLTLQAKDKGTPPQFSSVKVIHVTSPQFKAGPVKFEKDVYRAEISEFAPPNTPVVMVKAIPAYSHLRYVFKSTPGKAKFSLNYNTGLISILEPVKRQQAAHFELEVTTSDRKASTKVLVKVLGANSNPPEFTQTAYKAAFDENVPIGTTVMSLSAVDPDEGENGYVTYSIANLNHVPFAIDHFTGAVSTSENLDYELMPRVYTLRIRASDWGLPYRREVEVLATITLNNLNDNTPLFEKINCEGTIPRDLGVGEQITTVSAIDADELQLVQYQIEAGNELDFFSLNPNSGVLSLKRSLMDGLGAKVSFHSLRITATDGENFATPLYINITVAASHKLVNLQCEETGVAKMLAEKLLQANKLHNQGEVEDIFFDSHSVNAHIPQFRSTLPTGIQVKENQPVGSSVIFMNSTDLDTGFNGKLVYAVSGGNEDSCFMIDMETGMLKILSPLDRETTDKYTLNITVYDLGIPQKAAWRLLHVVVVDANDNPPEFLQESYFVEVSEDKEVHSEIIQVEATDKDLGPNGHVTYSIVTDTDTFSIDSVTGVVNIARPLDRELQHEHSLKIEARDQAREEPQLFSTVVVKVSLEDVNDNPPTFIPPNYRVKVREDLPEGTVIMWLEAHDPDLGQSGQVRYSLLDHGEGNFDVDKLSGAVRIVQQLDFEKKQVYNLTVRAKDKGKPVSLSSTCYVEVEVVDVNENLHPPVFSSFVEKGTVKEDAPVGSLVMTVSAHDEDARRDGEIRYSIRDGSGVGVFKIGEETGVIETSDRLDRESTSHYWLTVFATDQGVVPLSSFIEIYIEVEDVNDNAPQTSEPVYYPEIMENSPKDVSVVQIEAFDPDSSSNDKLMYKITSGNPQGFFSIHPKTGLITTTSRKLDREQQDEHILEVTVTDNGSPPKSTIARVIVKILDENDNKPQFLQKFYKIRLPEREKPDRERNARREPLYHVIATDKDEGPNAEISYSIEDGNEHGKFFIEPKTGVVSSKRFSAAGEYDILSIKAVDNGRPQKSSTTRLHIEWISKPKPSLEPISFEESFFTFTVMESDPVAHMIGVISVEPPGIPLWFDITGGNYDSHFDVDKGTGTIIVAKPLDAEQKSNYNLTVEATDGTTTILTQVFIKVIDTNDHRPQFSTSKYEVVIPEDTAPETEILQISAVDQDEKNKLIYTLQSSRDPLSLKKFRLDPATGSLYTSEKLDHEAVHQHTLTVMVRDQDVPVKRNFARIVVNVSDTNDHAPWFTASSYKGRVYESAAVGSVVLQVTALDKDKGKNAEVLYSIESGNIGNSFMIDPVLGSIKTAKELDRSNQAEYDLMVKATDKGSPPMSEITSVRIFVTIADNASPKFTSKEYSVELSETVSIGSFVGMVTAHSQSSVVYEIKDGNTGDAFDINPHSGTIITQKALDFETLPIYTLIIQGTNMAGLSTNTTVLVHLQDENDNAPVFMQAEYTGLISESASINSVVLTDRNVPLVIRAADADKDSNALLVYHIVEPSVHTYFAIDSSTGAIHTVLSLDYEETSIFHFTVQVHDMGTPRLFAEYAANVTVHVIDINDCPPVFAKPLYEASLLLPTYKGVKVITVNATDADSSAFSQLIYSITEGNIGEKFSMDYKTGALTVQNTTQLRSRYELTVRASDGRFAGLTSVKINVKESKESHLKFTQDVYSAVVKENSTEAETLAVITAIGNPINEPLFYHILNPDRRFKISRTSGVLSTTGTPFDREQQEAFDVVVEVTEEHKPSAVAHVVVKVIVEDQNDNAPVFVNLPYYAVVKVDTEVGHVIRYVTAVDRDSGRNGEVHYYLKEHHEHFQIGPLGEISLKKQFELDTLNKEYLVTVVAKDGGNPAFSAEVIVPITVMNKAMPVFEKPFYSAEIAESIQVHSPVVHVQANSPEGLKVFYSITDGDPFSQFTINFNTGVINVIAPLDFEAHPAYKLSIRATDSLTGAHAEVFVDIIVDDINDNPPVFAQQSYAVTLSEASVIGTSVVQVRATDSDSEPNRGISYQMFGNHSKSHDHFHVDSSTGLISLLRTLDYEQSRQHTIFVRAVDGGMPTLSSDVIVTVDVTDLNDNPPLFEQQIYEARISEHAPHGHFVTCVKAYDADSSDIDKLQYSILSGNDHKHFVIDSATGIITLSNLHRHALKPFYSLNLSVSDGVFRSSTQVHVTVIGGNLHSPAFLQNEYEVELAENAPLHTLVMEVKTTDGDSGIYGHVTYHIVNDFAKDRFYINERGQIFTLEKLDRETPAEKVISVRLMAKDAGGKVAFCTVNVILTDDNDNAPQFRATKYEVNIGSSAAKGTSVVKVLASDADEGSNADITYAIEADSESVKENLEINKLSGVITTKESLIGLENEFFTFFVRAVDNGSPSKESVVLVYVKILPPEMQLPKFSEPFYTFTVSEDVPIGTEIDLIRAEHSGTVLYSLVKGNTPESNRDESFVIDRQSGRLKLEKSLDHETTKWYQFSILARCTQDDHEMVASVDVSIQVKDANDNSPVFESSPYEAFIVENLPGGSRVIQIRASDADSGTNGQVMYSLDQSQSVEVIESFAINMETGWITTLKELDHEKRDNYQIKVVASDHGEKIQLSSTAIVDVTVTDVNDSPPRFTAEIYKGTVSEDDPQGGVIAILSTTDADSEEINRQVTYFITGGDPLGQFAVETIQNEWKVYVKKPLDREKRDNYLLTITATDGTFSSKAIVEVKVLDANDNSPVCEKTLYSDTIPEDVLPGKLIMQISATDADIRSNAEITYTLLGSGAEKFKLNPDTGELKTSTPLDREEQAVYHLLVRATDGGGRFCQASIVLTLEDVNDNAPEFSADPYAITVFENTEPGTLLTRVQATDADAGLNRKILYSLIDSADGQFSINELSGIIQLEKPLDRELQAVYTLSLKAVDQGLPRRLTATGTVIVSVLDINDNPPVFEYREYGATVSEDILVGTEVLQVYAASRDIEANAEITYSIISGNEHGKFSIDSKTGAVFIIENLDYESSHEYYLTVEATDGGTPSLSDVATVNVNVTDINDNTPVFSQDTYTTVISEDAVLEQSVITVMADDADGPSNSHIHYSIIDGNQGSSFTIDPVRGEVKVTKLLDRETISGYTLTVQASDNGSPPRVNTTTVNIDVSDVNDNAPVFSRGNYSVIIQENKPVGFSVLQLVVTDEDSSHNGPPFFFTIVTGNDEKAFEVNPQGVLLTSSAIKRKEKDHYLLQVKVADNGKPQLSSLTYIDIRVIEESIYPPAILPLEIFITSSGEEYSGGVIGKIHATDQDVYDTLTYSLDPQMDNLFSVSSTGGKLIAHKKLDIGQYLLNVSVTDGKFTTVADITVHIRQVTQEMLNHTIAIRFANLTPEEFVGDYWRNFQRALRNILGVRRNDIQIVSLQSSEPHPHLDVLLFVEKPGSAQISTKQLLHKINSSVTDIEEIIGVRILNVFQKLCAGLDCPWKFCDEKVSVDESVMSTHSTARLSFVTPRHHRAAVCLCKEGRCPPVHHGCEDDPCPEGSECVSDPWEEKHTCVCPSGRFGQCPGSSSMTLTGNSYVKYRLTENENKLEMKLTMRLRTYSTHAVVMYARGTDYSILEIHHGRLQYKFDCGSGPGIVSVQSIQVNDGQWHAVALEVNGNYARLVLDQVHTASGTAPGTLKTLNLDNYVFFGGHIRQQGTRHGRSPQVGNGFRGCMDSIYLNGQELPLNSKPRSYAHIEESVDVSPGCFLTATEDCASNPCQNGGVCNPSPAGGYYCKCSALYIGTHCEISVNPCSSKPCLYGGTCVVDNGGFVCQCRGLYTGQRCQLSPYCKDEPCKNGGTCFDSLDGAVCQCDSGFRGERCQSDIDECSGNPCLHGALCENTHGSYHCNCSHEYRGRHCEDAAPNQYVSTPWNIGLAE

SEQ ID NO: 2347 - protein, 4048 aa, synthetic construct
  REGION 1..4048: note = FAT2 (Q9NYQ8) SP+PP+ECD
MTIALLGFAIFLLHCATCEKPLEGILSSSAWHFTHSHYNATIYENSSPKTYVESFEKMGIYLAEPQWAVRYRIISGDVANVFKTEEYVVGNFCFLRIRTKSSNTALLNREVRDSYTLIIQATEKTLELEALTRVVVHILDQNDLKPLFSPPSYRVTISEDMPLKSPICKVTATDADLGQNAEFYYAFNTRSEMFAIHPTSGVVTVAGKLNVTWRGKHELQVLAVDRMRKISEGNGFGSLAALVVHVEPALRKPPAIASVVVTPPDSNDGTTYATVLVDANSSGAEVESVEVVGGDPGKHFKAIKSYARSNEFSLVSVKDINWMEYLHGFNLSLQARSGSGPYFYSQIRGFHLPPSKLSSLKFEKAVYRVQLSEFSPPGSRVVMVRVTPAFPNLQYVLKPSSENVGFKLNARTGLITTTKLMDFHDRAHYQLHIRTSPGQASTVVVIDIVDCNNHAPLFNRSSYDGTLDENIPPGTSVLAVTATDRDHGENGYVTYSIAGPKALPFSIDPYLGIISTSKPMDYELMKRIYTFRVRASDWGSPFRREKEVSIFLQLRNLNDNQPMFEEVNCTGSIRQDWPVGKSIMTMSAIDVDELQNLKYEIVSGNELEYFDLNHFSGVISLKRPFINLTAGQPTSYSLKITASDGKNYASPTTLNITVVKDPHFEVPVTCDKTGVLTQFTKTILHFIGLQNQESSDEEFTSLSTYQINHYTPQFEDHFPQSIDVLESVPINTPLARLAATDPDAGFNGKLVYVIADGNEEGCFDIELETGLLTVAAPLDYEATNFYILNVTVYDLGTPQKSSWKLLTVNVKDWNDNAPRFPPGGYQLTISEDTEVGTTIAELTTKDADSEDNGRVRYTLLSPTEKFSLHPLTGELVVTGHLDRESEPRYILKVEARDQPSKGHQLFSVTDLIITLEDVNDNSPQCITEHNRLKVPEDLPPGTVLTFLDASDPDLGPAGEVRYVLMDGAHGTFRVDLMTGALILERELDFERRAGYNLSLWASDGGRPLARRTLCHVEVIVLDVNENLHPPHFASFVHQGQVQENSPSGTQVIVVAAQDDDSGLDGELQYFLRAGTGLAAFSINQDTGMIQTLAPLDREFASYYWLTVLAVDRGSVPLSSVTEVYIEVTDANDNPPQMSQAVFYPSIQEDAPVGTSVLQLDAWDPDSSSKGKLTFNITSGNYMGFFMIHPVTGLLSTAQQLDRENKDEHILEVTVLDNGEPSLKSTSRVVVGILDVNDNPPIFSHKLFNVRLPERLSPVSPGPVYRLVASDLDEGLNGRVTYSIEDSDEEAFSIDLVTGVVSSSSTFTAGEYNILTIKATDSGQPPLSASVRLHIEWIPWPRPSSIPLAFDETYYSFTVMETDPVNHMVGVISVEGRPGLFWFNISGGDKDMDFDIEKTTGSIVIARPLDTRRRSNYNLTVEVTDGSRTIATQVHIFMIANINHHRPQFLETRYEVRVPQDTVPGVELLRVQAIDQDKGKSLIYTIHGSQDPGSASLFQLDPSSGVLVTVGKLDLGSGPSQHTLTVMVRDQEIPIKRNFVWVTIHVEDGNLHPPRFTQLHYEASVPDTIAPGTELLQVRAMDADRGVNAEVHYSLLKGNSEGFFNINALLGIITLAQKLDQANHAPHTLTVKAEDQGSPQWHDLATVIIHVYPSDRSAPIFSKSEYFVEIPESIPVGSPILLVSAMSPSEVTYELREGNKDGVFSMNSYSGLISTQKKLDHEKISSYQLKIRGSNMAGAFTDVMVVVDIIDENDNAPMFLKSTFVGQISEAAPLYSMIMDKNNNPFVIHASDSDKEANSLLVYKILEPEALKFFKIDPSMGTLTIVSEMDYESMPSFQFCVYVHDQGSPVLFAPRPAQVIIHVRDVNDSPPRFSEQIYEVAIVGPIHPGMELLMVRASDEDSEVNYSIKTGNADEAVTIHPVTGSISVLNPAFLGLSRKLTIRASDGLYQDTALVKISLTQVLDKSLQFDQDVYWAAVKENLQDRKALVILGAQGNHLNDTLSYFLLNGTDMFHMVQSAGVLQTRGVAFDREQQDTHELAVEVRDNRTPQRVAQGLVRVSIEDVNDNPPKFKHLPYYTIIQDGTEPGDVLFQVSATDEDLGTNGAVTYEFAEDYTYFRIDPYLGDISLKKPFDYQALNKYHLKVIARDGGTPSLQSEEEVLVTVRNKSNPLFQSPYYKVRVPENITLYTPILHTQARSPEGLRLIYNIVEEEPLMLFTTDFKTGVLTVTGPLDYESKTKHVFTVRATDTALGSFSEATVEVLVEDVNDNPPTFSQLVYTTSISEGLPAQTPVIQLLASDQDSGRNRDVSYQIVEDGSDVSKFFQINGSTGEMSTVQELDYEAQQHFHVKVRAMDKGDPPLTGETLVVVNVSDINDNPPEFRQPQYEANVSELATCGHLVLKVQAIDPDSRDTSRLEYLILSGNQDRHFFINSSSGIISMFNLCKKHLDSSYNLRVGASDGVFRATVPVYINTTNANKYSPEFQQHLYEAELAENAMVGTKVIDLLAIDKDSGPYGTIDYTIINKLASEKFSINPNGQIATLQKLDRENSTERVIAIKVMARDGGGRVAFCTVKIILTDENDNPPQFKASEYTVSIQSNVSKDSPVIQVLAYDADEGQNADVTYSVNPEDLVKDVIEINPVTGVVKVKDSLVGLENQTLDFFIKAQDGGPPHWNSLVPVRLQVVPKKVSLPKFSEPLYTFSAPEDLPEGSEIGIVKAVAAQDPVIYSLVRGTTPESNKDGVFSLDPDTGVIKVRKPMDHESTKLYQIDVMAHCLQNTDVVSLVSVNIQVGDVNDNRPVFEADPYKAVLTENMPVGTSVIQVTAIDKDTGRDGQVSYRLSADPGSNVHELFAIDSESGWITTLQELDCETCQTYHFHVVAYDHGQTIQLSSQALVQVSITDENDNAPRFASEEYRGSVVENSEPGELVATLKTLDADISEQNRQVTCYITEGDPLGQFGISQVGDEWRISSRKTLDREHTAKYLLRVTASDGKFQASVTVEIFVLDVNDNSPQCSQLLYTGKVHEDVFPGHFILKVSATDLDTDTNAQITYSLHGPGAHEFKLDPHTGELTTLTALDRERKDVFNLVAKATDGGGRSCQADITLHVEDVNDNAPRFFPSHCAVAVFDNTTVKTPVAVVFARDPDQGANAQVVYSLPDSAEGHFSIDATTGVIRLEKPLQVRPQAPLELTVRASDLGTPIPLSTLGTVTVSVVGLEDYLPVFLNTEHSVQVPEDAPPGTEVLQLATLTRPGAEKTGYRVVSGNEQGRFRLDARTGILYVNASLDFETSPKYFLSIECSRKSSSSLSDVTTVMVNITDVNEHRPQFPQDPYSTRVLENALVGDVILTVSATDEDGPLNSDITYSLIGGNQLGHFTIHPKKGELQVAKALDREQASSYSLKLRATDSGQPPLHEDTDIAIQVADVNDNPPRFFQLNYSTTVQENSPIGSKVLQLILSDPDSPENGPPYSFRITKGNNGSAFRVTPDGWLVTAEGLSRRAQEWYQLQIQASDSGIPPLSSLTSVRVHVTEQSHYAPSALPLEIFITVGEDEFQGGMVGKIHATDRDPQDTLTYSLAEEETLGRHFSVGAPDGKIIAAQGLPRGHYSFNVTVSDGTFTTTAGVHVYVWHVGQEALQQAMWMGFYQLTPEELVSDHWRNLQRFLSHKLDIKRANIHLASLQPAEAVAGVDVLLVFEGHSGTFYEFQELASIITHSAKEMEHSVGVQMRSAMPMVPCQGPTCQGQICHNTVHLDPKVGPTYSTARLSILTPRHHLQRSCSCNGTATRFSGQSYVRYRAPAARNWHIHFYLKTLQPQAILLFTNETASVSLKLASGVPQLEYHCLGGFYGNLSSQRHVNDHEWHSILVEEMDASIRLMVDSMGNTSLVVPENCRGLRPERHLLLGGLILLHSSSNVSQGFEGCLDAVVVNEEALDLLAPGKTVAGLLETQALTQCCLHSDYCSQNTCLNGGKCSWTHGAGYVCKCPPQFSGKHCEQGRENCTFAPCLEGGTCILSPKGASCNCPHPYTGDRCEMEARGCSEGHCLVTPEIQRGDWGQQE

SEQ ID NO: 2348 - protein, 4154 aa, synthetic construct
  REGION 1..4154: note = FAT3 (Q8TDW7) SP+PP+ECD
MDIIMGHCVGTRPPACCLILLLFKLLATVSQGLPGTGPLGFHFTHSIYNATVYENSAARTYVNSQSRMGITLIDLSWDIKYRIVSGDEEGFFKAEEVIIADFCFLRIRTKGGNSAILNREIQDNYLLIVKGSVRGEDLEAWTKVNIQVLDMNDLRPLFSPTTYSVTIAESTPLRTSVAQVTATDADIGSNGEFYYYFKNKVDLFSVHPTSGVISLSGRLNYDEKNRYDLEILAVDRGMKLYGNNGVSSTAKLYVHIERINEHAPTIHVVTHVPFSLEKEPTYAVVTVDDLDDGANGEIESVSIVAGDPLDQFFLAKEGKWLNEYKIKERKQIDWESFPYGYNLTLQAKDKGSPQKCSALKAVYIGNPTRDTVPIRFEKEVYDVSISEFSPPGVVVAIVKLSPEPIDVEYKLSPGEDAVYFKINPRSGLIVTARPLNTVKKEVYKLEVTNKEGDLKAQVTISIEDANDHTPEFQQPLYDAYVNESVPVGTSVLTVSASDKDKGENGYITYSIASLNLLPFVINQFTGVISTTEELDFESSPEIYRFIVRASDWGSPYRHESEVNVTIRIGNVNDNSPLFEKVACQGVISYDFPVGGHITAVSAIDIDELELVKYKIISGNELGFFYLNPDSGVLQLKKSLTNSGIKNGNFALRITATDGENLADPMSINISVLHGKVSSKSFSCRETRVAQKLAEKLLIKAKANGKLNLEDGFLDFYSINRQGPYFDKSFPSDVAVKEDLPVGANILKIKAYDADSGFNGKVLFTISDGNTDSCFNIDMETGQLKVLMPMDREHTDLYLLNITIYDLGNPQKSSWRLLTINVEDANDNSPVFIQDSYSVNILESSGIGTEIIQVEARDKDLGSNGEVTYSVLTDTQQFAINSSTGIVYVADQLDRESKANYSLKIEARDKAESGQQLFSVVTLKVFLDDVNDCSPAFIPSSYSVKVLEDLPVGTVIAWLETHDPDLGLGGQVRYSLVNDYNGRFEIDKASGAIRLSKELDYEKQQFYNLTVRAKDKGRPVSLSSVSFVEVEVVDVNENLHTPYFPDFAVVGSVKENSRIGTSVLQVTARDEDSGRDGEIQYSIRDGSGLGRFSIDDESGVITAADILDRETMGSYWLTVYATDRGVVPLYSTIEVYIEVEDVNDNAPLTSEPIYYPVVMENSPKDVSVIQIQAEDPDSSSNEKLTYRITSGNPQNFFAINIKTGLITTTSRKLDREQQAEHFLEVTVTDGGPSPKQSTIWVVVQVLDENDNKPQFPEKVYQIKLPERDRKKRGEPIYRAFAFDRDEGPNAEISYSIVDGNDDGKFFIDPKTGMVSSRKQFTAGSYDILTIKAVDNGRPQKSSTARLHIEWIKKPPPSPIPLTFDEPFYNFTVMESDRVTEIVGVVSVQPANTPLWFDIVGGNFDSAFDAEKGVGTIVIAKPLDAEQRSIYNMSVEVTDGTNVAVTQVFIKVLDNNDNGPEFSQPNYDVTISEDVLPDTEILQIEATDRDEKHKLSYTVHSSIDSISMRKFRIDPSTGVLYTAERLDHEAQDKHILNIMVRDQEFPYRRNLARVIVNVEDANDHSPYFTNPLYEASVFESAALGSAVLQVTALDKDKGENAELIYTIEAGNTGNMFKIEPVLGIITICKEPDMTTMGQFVLSIKVTDQGSPPMSATAIVRISVTMSDNSHPKFIHKDYQAEVNENVDIGTSVILISAISQSTLIYEVKDGDINGIFTINPYSGVITTQKALDYERTSSYQLIIQATNMAGMASNATVNIQIVDENDNAPVFLFSQYSGSLSEAAPINSIVRSLDNSPLVIRATDADSNRNALLVYQIVESTAKKFFTVDSSTGAIRTIANLDHETIAHFHFHVHVRDSGSPQLTAESPVEVNIEVTDVNDNPPVFTQAVFETILLLPTYVGVEVLKVSATDPDSEVPPELTYSLMEGSLDHFLIDSNSGVLTIKNNNLSKDHYMLIVKVSDGKFYSTSMVTIMVKEAMDSGLHFTQSFYSTSISENNTNITKVAIVNAVGNRLNEPLKYSILNPGNKFKIKSTSGVIQTTGVPFDREEQELYELVVEASRELDHLRVARVVVRVNIEDINDNSPVFVGLPYYAAVQVDAEPGTLIYQVTAIDKDKGPNGEVTYVLQDDYGHFEINPNSGNVILKEAFNSDLSNIEYGVTILAKDGGKPSLSTSVELPITIVNKAMPVFDKPFYTASVNEDIRMNTPILSINATSPEGQGIIYIIIDGDPFKQFNIDFDTGVLKVVSPLDYEVTSAYKLTIRASDALTGARAEVTVDLLVNDVNDNPPIFDQPTYNTTLSEASLIGTPVLQVVSIDADSENNKMVHYQIVQDTYNSTDYFHIDSSSGLILTARMLDHELVQHCTLKVRSIDSGFPSLSSEVLVHIYISDVNDNPPVFNQLIYESYVSELAPRGHFVTCVQASDADSSDFDRLEYSILSGNDRTSFLMDSKSGVITLSNHRKQRMEPLYSLNVSVSDGLFTSTAQVHIRVLGANLYSPAFSQSTYVAEVRENVAAGTKVIHVRATDGDPGTYGQISYAIINDFAKDRFLIDSNGQVITTERLDRENPLEGDVSIFVRALDGGGRTTFCTVRVIVVDENDNAPQFMTVEYRASVRADVGRGHLVTQVQAIDPDDGANSRITYSLYSEASVSVADLLEIDPDNGWMVTKGNFNQLKNTVLSFFVKAVDGGIPVKHSLIPVYIHVLPPETFLPSFTQSQYSFTIAEDTAIGSTVDTLRILPSQNVWFSTVNGERPENNKGGIFVIEQETGTIKLDKRLDRETSPAFHFKVAATIPLDKVDIVFTVDVDIKVLDLNDNKPVFETSSYDTIIMEGMPVGTKLTQVRAIDMDWGANGQVTYSLHSDSQPEKVMEAFNIDSNTGWISTLKDLDHETDPTFTFSVVASDLGEAFSLSSTALVSVRVTDINDNAPVFAQEVYRGNVKESDPPGEVVAVLSTWDRDTSDVNRQVSYHITGGNPRGRFALGLVQSEWKVYVKRPLDREEQDIYFLNITATDGLFVTQAMVEVSVSDVNDNSPVCDQVAYTALLPEDIPSNKIILKVSAKDADIGSNGYIRYSLYGSGNSEFFLDPESGELKTLALLDRERIPVYSLMAKATDGGGRFCQSNIHLILEDVNDNPPVFSSDHYNTCVYENTATKALLTRVQAVDPDIGINRKVVYSLADSAGGVFSIDSSSGIIILEQPLDREQQSSYNISVRATDQSPGQSLSSLTTVTITVLDINDNPPVFERRDYLVTVPEDTSPGTQVLAVFATSKDIGTNAEITYLIRSGNEQGKFKINPKTGGISVSEVLDYELCKRFYLVVEAKDGGTPALSAVATVNINLTDVNDNPPKFSQDVYSAVISEDALVGDSVILLIAEDVDSQPNGQIHFSIVNGDRDNEFTVDPVLGLVKVKKKLDRERVSGYSLLVQAVDSGIPAMSSTATVNIDISDVNDNSPVFTPANYTAVIQENKPVGTSILQLVVTDRDSFHNGPPFSFSILSGNEEEEFVLDPHGILRSAVVFQHTESLEYVLCVQAKDSGKPQQVSHTYIRVRVIEESTHKPTAIPLEIFIVTMEDDFPGGVIGKIHATDQDMYDVLTFALKSEQKSLFKVNSHDGKIIALGGLDSGKYVLNVSVSDGRFQVPIDVVVHVEQLVHEMLQNTVTIRFENVSPEDFVGLHMHGFRRTLRNAVLTQKQDSLRIISIQPVAGTNQLDMLFAVEMHSSEFYKPAYLIQKLSNARRHLENIMRISAILEKNCSGLDCQEQHCEQGLSLDSHALMTYSTARISFVCPRFYRNVRCTCNGGLCPGSNDPCVEKPCPGDMQCVSYEASRRPFLCQCPPGKLGECSGHTSLSFAGNSYIKYRLSENSKEEDFKLALRLRTLQSNGIIMYTRANPCIILKIVDGKLWFQLDCGSGPGILGISGRAVNDGSWHSVFLELNRNFTSLSLDDSYVERRRAPLYFQTLSTESSIYFGALVQADNIRSLTDTRVTQVLSGFQGCLDSVILNNNELPLQNKRSSFAEVVGLTELKLGCVLYPDACKRSPCQHGGSCTGLPSGGYQCTCLSQFTGRNCESEITACFPNPCRNGGSCDPIGNTFICNCKAGLTGVTCEEDINECEREECENGGSCVNVFGSFLCNCTPGYVGQYCGLRPVVVPNIQAGHSYVGKEE

SEQ ID NO: 2349 - protein, 4504 aa, synthetic construct
  REGION 1..4504: note = FAT4 (Q6V0I7) SP+PP+ECD
MDLAPDRATGRPWLPLHTLSVSQLLRVFWLLSLLPGQAWVHGAEPRQVFQVLEEQPPGTLVGTIQTRPGFTYRLSESHALFAINSSTGALYTTSTIDRESLPSDVINLVVLSSAPTYPTEVRVLVRDLNDNAPVFPDPSIVVTFKEDSSSGRQVILDTATDSDIGSNGVDHRSYRIIRGNEAGRFRLDITLNPSGEGAFLHLVSKGGLDREVTPQYQLLVEVEDKGEPKRRGYLQVNVTVQDINDNPPVFGSSHYQAGVPEDAVVGSSVLQVAAADADEGTNADIRYRLQDEGTPFQMDPETGLITVREPLDFEARRQYSLTVQAMDRGVPSLTGRAEALIQLLDVNDNDPVVKFRYFPATSRYASVDENAQVGTVVALLTVTDADSPAANGNISVQILGGNEQRHFEVQSSKVPNLSLIKVASALDRERIPSYNLTVSVSDNYGAPPGAAVQARSSVASLVIFVNDINDHPPVFSQQVYRVNLSEEAPPGSYVSGISATDGDSGLNANLRYSIVSGNGLGWFHISEHSGLVTTGSSGGLDRELASQIVLNISARDQGVHPKVSYAQLVVTLLDVNDEKPVFSQPEGYDVSVVENAPTGTELLMLRATDGDLGDNGTVRFSLQEAETDRRSFRLDPVSGRLSTISSLDREEQAFYSLLVLATDLGSPPQSSMARINVSLLDINDNSPVFYPVQYFAHIKENEPGGSYITTVSATDPDLGTNGTVKYSISAGDRSRFQVNAQSGVISTRMALDREEKTAYQLQIVATDGGNLQSPNQAIVTITVLDTQDNPPVFSQVAYSFVVFENVALGYHVGSVSASTMDLNSNISYLITTGDQKGMFAINQVTGQLTTANVIDREEQSFYQLKVVASGGTVTGDTMVNITVKDLNDNSPHFLQAIESVNVVENWQAGHSIFQAKAVDPDEGVNGMVLYSLKQNPKNLFAINEKNGTISLLGPLDVHAGSYQIEILASDMGVPQLSSSVILTVYVHDVNDNSPVFDQLSYEVTLSESEPVNSRFFKVQASDKDSGANGEIAYTIAEGNTGDAFGIFPDGQLYIKSELDRELQDRYVLMVVASDRAVEPLSATVNVTVILEDVNDNRPLFNSTNYTFYFEEEQRAGSFVGKVSAVDKDFGPNGEVRYSFEMVQPDFELHAISGEITNTHQFDRESLMRRRGTAVFSFTVIATDQGIPQPLKDQATVHVYMKDINDNAPKFLKDFYQATISESAANLTQVLRVSASDVDEGNNGLIHYSIIKGNEERQFAIDSTSGQVTLIGKLDYEATPAYSLVIQAVDSGTIPLNSTCTLNIDILDENDNTPSFPKSTLFVDVLENMRIGELVSSVTATDSDSGDNADLYYSITGTNNHGTFSISPNTGSIFLAKKLDFETQSLYKLNITAKDQGRPPRSSTMSVVIHVRDFNDNPPSFPPGDIFKSIVENIPIGTSVISVTAHDPDADINGQLSYTIIQQMPRGNHFTIDEVKGTIYTNAEIDREFANLFELTVKANDQAVPIETRRYALKNVTILVTDLNDNVPMFISQNALAADPSAVIGSVLTTIMAADPDEGANGEIEYEIINGDTDTFIVDRYSGDLRVASALVPSQLIYNLIVSATDLGPERRKSTTELTIILQGLDGPVFTQPKYITILKEGEPIGTNVISIEAASPRGSEAPVEYYIVSVRCEEKTVGRLFTIGRHTGIIQTAAILDREQGACLYLVDVYAIEKSTAFPRTQRAEVEITLQDINDNPPVFPTDMLDLTVEENIGDGSKIMQLTAMDADEGANALVTYTIISGADDSFRIDPESGDLIATRRLDRERRSKYSLLVRADDGLQSSDMRINITVSDVNDHTPKFSRPVYSFDIPEDTIPGSLVAAILATDDDSGVNGEITYIVNEDDEDGIFFLNPITGVFNLTRLLDYEVQQYYILTVRAEDGGGQFTTIRVYFNILDVNDNPPIFSLNSYSTSLMENLPVGSTVLVFNVTDADDGINSQLTYSIASGDSLGQFTVDKNGVLKVLKALDRESQSFYNLVVQVHDLPQIPASRFTSTAQVSIILLDVNDNPPTFLSPKLTYIPENTPIDTVVFKAQATDPDSGPNSYIEYTLLNPLGNKFSIGTIDGEVRLTGELDREEVSNYTLTVVATDKGQPSLSSSTEVVVMVLDINDNNPIFAQALYKVEINENTLTGTDIIQVFAADGDEGTNGQVRYGIVNGNTNQEFRIDSVTGAITVAKPLDREKTPTYHLTVQATDRGSTPRTDTSTVSIVLLDINDFVPVFELSPYSVNVPENLGTLPRTILQVVARDDDRGSNSKLSYVLFGGNEDNAFTLSASGELGVTQSLDRETKERFVLMITATDSGSPALTGTGTINVIVDDVNDNVPTFASKAYFTTIPEDAPTGTDVLLVNASDADASKNAVIRIIGGNSQFTINPSTGQIITSALLDRETKDNYTLVVVCSDAGSPEPLSSSTSVLVTVTDVNDNPPRFQHHPYVTHIPSPTLPGSFVFAVTVTDADIGPNSELHYSLSGRNSEKFHIDPLRGAIMAAGPLNGASEVTFSVHVKDGGSFPKTDSTTVTVRFVNKADFPKVRAKEQTFMFPENQPVSSLVTTITGSSLRGEPMSYYIASGNLGNTFQIDQLTGQVSISQPLDFEKIQKYVVWIEARDGGFPPFSSYEKLDITVLDVNDNAPIFKEDPFISEILENLSPRKILTVSAMDKDSGPNGQLDYEIVNGNMENSFSINHATGEIRSVRPLDREKVSHYVLTIKSSDKGSPSQSTSVKVMINILDENDNAPRFSQIFSAHVPENSPLGYTVTRVTTSDEDIGINAISRYSIMDASLPFTINPSTGDIVISRPLNREDTDRYRIRVSAHDSGWTVSTDVTIFVTDINDNAPRFSRTSYYLDCPELTEIGSKVTQVFATDPDEGSNGQVFYFIKSQSEYFRINATTGEIFNKQILKYQNVTGFSNVNINRHSFIVTSSDRGKPSLISETTVTINIVDSNDNAPQFLKSKYFTPVTKNVKVGTKLIRVTAIDDKDFGLNSEVEYFISNDNHLGKFKLDNDTGWISVASSLISDLNQNFFITVTAKDKGNPPLSSQATVHITVTEENYHTPEFSQSHMSATIPESHSIGSIVRTVSARDRDAAMNGLIKYSISSGNEEGIFAINSSTGILTLAKALDYELCQKHEMTISAIDGGWVARTGYCSVTVNVIDVNDNSPVFLSDDYFPTVLENAPSGTTVIHLNATDADSGTNAVIAYTVQSSDSDLFVIDPNTGVITTQGFLDFETKQSYHLTVKAFNVPDEERCSFATVNIQLKGTNEYVPRFVSKLYYFEISEAAPKGTIVGEVFASDRDLGTDGEVHYLIFGNSRKKGFQINKKTGQIYVSGILDREKEERVSLKVLAKNFGSIRGADIDEVTVNVTVLDANDPPIFTLNIYSVQISEGVPIGTHVTFVSAFDSDSIPSWSRFSYFIGSGNENGAFSINPQTGQITVTAELDRETLPIYNLSVLAVDSGTPSATGSASLLVTLEDINDNGPMLTVSEGEVMENKRPGTLVMTLQSTDPDLPPNQGPFTYYLLSTGPATSYFSLSTAGVLSTTREIDREQIADFYLSVVTKDSGVPQMSSTGTVHITVIDQNDNPSQSRTVEIFVNYYGNLFPGGILGSVKPQDPDVLDSFHCSLTSGVTSLFSIPGGTCDLNSQPRSTDGTFDLTVLSNDGVHSTVTSNIRVFFAGFSNATVDNSILLRLGVPTVKDFLTNHYLHFLRIASSQLTGLGTAVQLYSAYEENNRTFLLAAVKRNHNQYVNPSGVATFFESIKEILLRQSGVKVESVDHDSCVHGPCQNGGSCLRRLAVSSVLKSRESLPVIIVANEPLQPFLCKCLPGYAGSWCEIDIDECLPSPCHSGGTCHNLVGGFSCSCPDGFTGRACERDINECLQSPCKNGAICQNFPGSFNCVCKTGYTGKMCESSVNYCECNPCFNGGSCQSGVDSYYCHCPFGVFGKHCELNSYGFEELSYMEFPSLDPNNNYIYVKFATIKSHALLLYNYDNQTGDRAEFLALEIAEERLRFSYNLGSGTYKLTTMKKVSDGHFHTVIARRAGMAASLTVDSCSENQEPGYCTVSNVAVSDDWTLDVQPNRVTVGGIRSLEPILQRRGHVESHDFVGCIMEFAVNGRPLEPSQALAAQGILDQCPRLEGACTRSPCQHGGTCMDYWSWQQCHCKEGLTGKYCEKSVTPDTALSLEGKGRLDYHMSQNEKREYLLRQSLRGAMLEPFGVNSLEVKFRTRSENGVLIHIQESSNYTTVKIKNGKVYFTSDAGIAGKVERNIPEVYVADGHWHTFLIGKNGTATVLSVDRIYNRDIIHPTQDFGGLDVLTISLGGIPPNQAHRDAQTAGFDGCIASMWYGGESLPFSGKHSLASISKTDPSVKIGCRGPNICASNPCWGDLLCINQWYAYRCVPPGDCASHPCQNGGSCEPGLHSGFTCSCPDSHTGRTCEMVVACLGVLCPQGKVCKAGSPAGHVCVLSQGPEEISLPLWA

SEQ ID NO: 2350 - protein, 450 aa, synthetic construct
  REGION 1..450: note = FCAMR (Q8WWV6) SP+PP+ECD
MPLFLILCLLQGSSFALPQKRPHPRWLWEGSLPSRTHLRAMGTLRPSSPLCWREESSFAAPNSLKGSRLVSGEPGGAVTIQCHYAPSSVNRHQRKYWCRLGPPRWICQTIVSTNQYTHHRYRDRVALTDFPQRGLFVVRLSQLSPDDIGCYLCGIGSENNMLFLSMNLTISAGPASTLPTATPAAGELTMRSYGTASPVANRWTPGTTQTLGQGTAWDTVASTPGTSKTTASAEGRRTPGATRPAAPGTGSWAEGSVKAPAPIPESPPSKSRSMSNTTEGVWEGTRSSVTNRARASKDRREMTTTKADRPREDIEGVRIALDAAKKVLGTIGPPALVSETLAWEILPQATPVSKQQSQGSIGETTPAAGMWTLGTPAADVWILGTPAADVWTSMEAASGEGSAAGDLDAATGDRGPQATLSQTPAVGPWGPPGKESSVKRTFPEDESSSR

SEQ ID NO: 2351 - protein, 227 aa, synthetic construct
  REGION 1..227: note = FCAR (P24071) SP+PP+ECD
MDPKQTTLLCLVLCLGQRIQAQEGDFPMPFISAKSSPVIPLDGSVKIQCQAIREAYLTQLMIIKNSTYREIGRRLKFWNETDPEFVIDHMDANKAGRYQCQYRIGHYRFRYSDTLELVVTGLYGKPFLSADRGLVLMPGENISLTCSSAHIPFDRFSLAKEGELSLPQHQSGEHPANFSLGPVDLNVSGIYRCYGWYNRSPYLWSFPSNALELVVTDSIHQDYTTQN

SEQ ID NO: 2352 - protein, 205 aa, synthetic construct
  REGION 1..205: note = FCER1A (P12319) SP+PP+ECD
MAPAMESPTLLCVALLFFAPDGVLAVPQKPKVSLNPPWNRIFKGENVTLTCNGNNFFEVSSTKWFHNGSLSEETNSSLNIVNAKFEDSGEYKCQHQQVNESEPVYLEVFSDWLLLQASAEVVMEGQPLFLRCHGWRNWDVYKVIYYKDGEALKYWYENHNISITNATVEDSGTYYCTGKVWQLDYESEPLNITVIKAPREKYWLQ

SEQ ID NO: 2353 - protein, 292 aa, synthetic construct
  REGION 1..292: note = FCGR1A (P12314) SP+PP+ECD
MWFLTTLLLWVPVDGQVDTTKAVITLQPPWVSVFQEETVTLHCEVLHLPGSSSTQWFLNGTATQTSTPSYRITSASVNDSGEYRCQRGLSGRSDPIQLEIHRGWLLLQVSSRVFTEGEPLALRCHAWKDKLVYNVLYYRNGKAFKFFHWNSNLTILKTNISHNGTYHCSGMGKHRYTSAGISVTVKELFPAPVLNASVTSPLLEGNLVTLSCETKLLLQRPGLQLYFSFYMGSKTLRGRNTSSEYQILTARREDSGLYWCEAATEDGNVLKRSPELELQVLGLQLPTPVWFH

SEQ ID NO: 2354 - protein, 198 aa, synthetic construct
  REGION 1..198: note = FCGR1B (Q92637) SP+PP+ECD
MWFLTTLLLWVPVDGQVDTTKAVITLQPPWVSVFQEETVTLHCEVLHLPGSSSTQWFLNGTATQTSTPSYRITSASVNDSGEYRCQRGLSGRSDPIQLEIHRGWLLLQVSSRVFMEGEPLALRCHAWKDKLVYNVLYYRNGKAFKFFHWNSNLTILKTNISHNGTYHCSGMGKHRYTSAGISQYTVKGLQLPTPVWFH

SEQ ID NO: 2355 - protein, 217 aa, synthetic construct
  REGION 1..217: note = FCGR2A (P12318) SP+PP+ECD
MTMETQMSQNVCPRNLWLLQPLTVLLLLASADSQAAAPPKAVLKLEPPWINVLQEDSVTLTCQGARSPESDSIQWFHNGNLIPTHTQPSYRFKANNNDSGEYTCQTGQTSLSDPVHLTVLSEWLVLQTPHLEFQEGETIMLRCHSWKDKPLVKVTFFQNGKSQKFSHLDPTFSIPQANHSHSGDYHCTGNIGYTLFSSKPVTITVQVPSMGSSSPMG

SEQ ID NO: 2356 - protein, 217 aa, synthetic construct
  REGION 1..217: note = FCGR2B (P31994) SP+PP+ECD
MGILSFLPVLATESDWADCKSPQPWGHMLLWTAVLFLAPVAGTPAAPPKAVLKLEPQWINVLQEDSVTLTCRGTHSPESDSIQWFHNGNLIPTHTQPSYRFKANNNDSGEYTCQTGQTSLSDPVHLTVLSEWLVLQTPHLEFQEGETIVLRCHSWKDKPLVKVTFFQNGKSKKFSRSDPNFSIPQANHSHSGDYHCTGNIGYTLYSSKPVTITVQAP

SEQ ID NO: 2357 - protein, 223 aa, synthetic construct
  REGION 1..223: note = FCGR2C (P31995) SP+PP+ECD
MGILSFLPVLATESDWADCKSPQPWGHMLLWTAVLFLAPVAGTPAAPPKAVLKLEPQWINVLQEDSVTLTCRGTHSPESDSIQWFHNGNLIPTHTQPSYRFKANNNDSGEYTCQTGQTSLSDPVHLTVLSEWLVLQTPHLEFQEGETIVLRCHSWKDKPLVKVTFFQNGKSKKFSRSDPNFSIPQANHSHSGDYHCTGNIGYTLYSSKPVTITVQAPSSSPMG

SEQ ID NO: 2358 - protein, 208 aa, synthetic construct
  REGION 1..208: note = FCGR3A (P08637) SP+PP+ECD
MWQLLLPTALLLLVSAGMRTEDLPKAVVFLEPQWYRVLEKDSVTLKCQGAYSPEDNSTQWFHNESLISSQASSYFIDAATVDDSGEYRCQTNLSTLSDPVQLEVHIGWLLLQAPRWVFKEEDPIHLRCHSWKNTALHKVTYLQNGKGRKYFHHNSDFYIPKATLKDSGSYFCRGLFGSKNVSSETVNITITQGLAVSTISSFFPPGYQ

SEQ ID NO: 2359 - protein, 297 aa, synthetic construct
  REGION 1..297: note = FCGRT (P55899) SP+PP+ECD
MGVPRPQPWALGLLLFLLPGSLGAESHLSLLYHLTAVSSPAPGTPAFWVSGWLGPQQYLSYNSLRGEAEPCGAWVWENQVSWYWEKETTDLRIKEKLFLEAFKALGGKGPYTLQGLLGCELGPDNTSVPTAKFALNGEEFMNFDLKQGTWGGDWPEALAISQRWQQQDKAANKELTFLLFSCPHRLREHLERGRGNLEWKEPPSMRLKARPSSPGFSVLTCSAFSFYPPELQLRFLRNGLAAGTGQGDFGPNSDGSFHASSSLTVKSGDEHHYCCIVQHAGLAQPLRVELESPAKSS

SEQ ID NO: 2360 - protein, 307 aa, synthetic construct
  REGION 1..307: note = FCRL1 (Q96LA6) SP+PP+ECD
MLPRLLLLICAPLCEPAELFLIASPSHPTEGSPVTLTCKMPFLQSSDAQFQFCFFRDTRALGPGWSSSPKLQIAAMWKEDTGSYWCEAQTMASKVLRSRRSQINVHRVPVADVSLETQPPGGQVMEGDRLVLICSVAMGTGDITFLWYKGAVGLNLQSKTQRSLTAEYEIPSVRESDAEQYYCVAENGYGPSPSGLVSITVRIPVSRPILMLRAPRAQAAVEDVLELHCEALRGSPPILYWFYHEDITLGSRSAPSGGGASFNLSLTEEHSGNYSCEANNGLGAQRSEAVTLNFTVPTGARSNHLTS

SEQ ID NO: 2361 - protein, 401 aa, synthetic construct
  REGION 1..401: note = FCRL2 (Q96LA5) SP+PP+ECD
MLLWSLLVIFDAVTEQADSLTLVAPSSVFEGDSIVLKCQGEQNWKIQKMAYHKDNKELSVFKKFSDFLIQSAVLSDSGNYFCSTKGQLFLWDKTSNIVKIKVQELFQRPVLTASSFQPIEGGPVSLKCETRLSPQRLDVQLQFCFFRENQVLGSGWSSSPELQISAVWSEDTGSYWCKAETVTHRIRKQSLQSQIHVQRIPISNVSLEIRAPGGQVTEGQKLILLCSVAGGTGNVTFSWYREATGTSMGKKTQRSLSAELEIPAVKESDAGKYYCRADNGHVPIQSKVVNIPVRIPVSRPVLTLRSPGAQAAVGDLLELHCEALRGSPPILYQFYHEDVTLGNSSAPSGGGASFNLSLTAEHSGNYSCEANNGLGAQCSEAVPVSISGPDGYRRDLMTAGV

SEQ ID NO: 2362 - protein, 573 aa, synthetic construct
  REGION 1..573: note = FCRL3 (Q96P31) SP+PP+ECD
MLLWLLLLILTPGREQSGVAPKAVLLLNPPWSTAFKGEKVALICSSISHSLAQGDTYWYHDEKLLKIKHDKIQITEPGNYQCKTRGSSLSDAVHVEFSPDWLILQALHPVFEGDNVILRCQGKDNKNTHQKVYYKDGKQLPNSYNLEKITVNSVSRDNSKYHCTAYRKFYILDIEVTSKPLNIQVQELFLHPVLRASSSTPIEGSPMTLTCETQLSPQRPDVQLQFSLFRDSQTLGLGWSRSPRLQIPAMWTEDSGSYWCEVETVTHSIKKRSLRSQIRVQRVPVSNVNLEIRPTGGQLIEGENMVLICSVAQGSGTVTFSWHKEGRVRSLGRKTQRSLLAELHVLTVKESDAGRYYCAADNVHSPILSTWIRVTVRIPVSHPVLTFRAPRAHTVVGDLLELHCESLRGSPPILYRFYHEDVTLGNSSAPSGGGASFNLSLTAEHSGNYSCDADNGLGAQHSHGVSLRVTVPVSRPVLTLRAPGAQAVVGDLLELHCESLRGSFPILYWFYHEDDTLGNISAHSGGGASFNLSLTTEHSGNYSCEADNGLGAQHSKVVTLNVTGTSRNRTGLT

SEQ ID NO: 2363 - protein, 387 aa, synthetic construct
  REGION 1..387: note = FCRL4 (Q96PJ5) SP+PP+ECD
MLLWASLLAFAPVCGQSAAAHKPVISVHPPWTTFFKGERVTLTCNGFQFYATEKTTWYHRHYWGEKLTLTPGNTLEVRESGLYRCQARGSPRSNPVRLLFSSDSLILQAPYSVFEGDTLVLRCHRRRKEKLTAVKYTWNGNILSISNKSWDLLIPQASSNNNGNYRCIGYGDENDVFRSNFKIIKIQELFPHPELKATDSQPTEGNSVNLSCETQLPPERSDTPLHFNFFRDGEVILSDWSTYPELQLPTVWRENSGSYWCGAETVRGNIHKHSPSLQIHVQRIPVSGVLLETQPSGGQAVEGEMLVLVCSVAEGTGDTTFSWHREDMQESLGRKTQRSLRAELELPAIRQSHAGGYYCTADNSYGPVQSMVLNVTVRETPGNRDGL

SEQ ID NO: 2364 - protein, 851 aa, synthetic construct
  REGION 1..851: note = FCRL5 (Q96RD9) SP+PP+ECD
MLLWVILLVLAPVSGQFARTPRPIIFLQPPWTTVFQGERVTLTCKGFRFYSPQKTKWYHRYLGKEILRETPDNILEVQESGEYRCQAQGSPLSSPVHLDFSSASLILQAPLSVFEGDSVVLRCRAKAEVTLNNTIYKNDNVLAFLNKRTDFHIPHACLKDNGAYRCTGYKESCCPVSSNTVKIQVQEPFTRPVLRASSFQPISGNPVTLTCETQLSLERSDVPLRFRFFRDDQTLGLGWSLSPNFQITAMWSKDSGFYWCKAATMPYSVISDSPRSWIQVQIPASHPVLTLSPEKALNFEGTKVTLHCETQEDSLRTLYRFYHEGVPLRHKSVRCERGASISFSLTTENSGNYYCTADNGLGAKPSKAVSLSVTVPVSHPVLNLSSPEDLIFEGAKVTLHCEAQRGSLPILYQFHHEGAALERRSANSAGGVAISFSLTAEHSGNYYCTADNGFGPQRSKAVSLSVTVPVSHPVLTLSSAEALTFEGATVTLHCEVQRGSPQILYQFYHEDMPLWSSSTPSVGRVSFSFSLTEGHSGNYYCTADNGFGPQRSEVVSLFVTVPVSRPILTLRVPRAQAVVGDLLELHCEAPRGSPPILYWFYHEDVTLGSSSAPSGGEASFNLSLTAEHSGNYSCEANNGLVAQHSDTISLSVIVPVSRPILTFRAPRAQAVVGDLLELHCEALRGSSPILYWFYHEDVTLGKISAPSGGGASFNLSLTTEHSGIYSCEADNGLEAQRSEMVTLKVAVPVSRPVLTLRAPGTHAAVGDLLELHCEALRGSPLILYRFFHEDVTLGNRSSPSGGASLNLSLTAEHSGNYSCEADNGLGAQRSETVTLYITGLTANRSGPFATG

SEQ ID NO: 2365 - protein, 307 aa, synthetic construct
  REGION 1..307: note = FCRL6 (Q6DN72) SP+PP+ECD
MLLWTAVLLFVPCVGKTVWLYLQAWPNPVFEGDALTLRCQGWKNTPLSQVKFYRDGKFLHFSKENQTLSMGAATVQSRGQYSCSGQVMYIPQTFTQTSETAMVQVQELFPPPVLSAIPSPEPREGSLVTLRCQTKLHPLRSALRLLFSFHKDGHTLQDRGPHPELCIPGAKEGDSGLYWCEVAPEGGQVQKQSPQLEVRVQAPVSRPVLTLHHGPADPAVGDMVQLLCEAQRGSPPILYSFYLDEKIVGNHSAPCGGTTSLLFPVKSEQDAGNYSCEAENSVSRERSEPKKLSLKGSQVLFTPASNW

SEQ ID NO: 2366 - protein, 376 aa, synthetic construct
  REGION 1..376: note = FGFR1 (P11362) SP+PP+ECD
MWSWKCLLFWAVLVTATLCTARPSPTLPEQAQPWGAPVEVESFLVHPGDLLQLRCRLRDDVQSINWLRDGVQLAESNRTRITGEEVEVQDSVPADSGLYACVTSSPSGSDTTYFSVNVSDALPSSEDDDDDDDSSSEEKETDNTKPNRMPVAPYWTSPEKMEKKLHAVPAAKTVKFKCPSSGTPNPTLRWLKNGKEFKPDHRIGGYKVRYATWSIIMDSVVPSDKGNYTCIVENEYGSINHTYQLDVVERSPHRPILQAGLPANKTVALGSNVEFMCKVYSDPQPHIQWLKHIEVNGSKIGPDNLPYVQILKTAGVNTTDKEMEVLHLRNVSFEDAGEYTCLAGNSIGLSHHSAWLTVLEALEERPAVMTSPLYLE

SEQ ID NO: 2367 - protein, 377 aa, synthetic construct
  REGION 1..377: note = FGFR2 (P21802) SP+PP+ECD
MVSWGRFICLVVVTMATLSLARPSFSLVEDTTLEPEEPPTKYQISQPEVYVAAPGESLEVRCLLKDAAVISWTKDGVHLGPNNRTVLIGEYLQIKGATPRDSGLYACTASRTVDSETWYFMVNVTDAISSGDDEDDTDGAEDFVSENSNNKRAPYWTNTEKMEKRLHAVPAANTVKFRCPAGGNPMPTMRWLKNGKEFKQEHRIGGYKVRNQHWSLIMESVVPSDKGNYTCVVENEYGSINHTYHLDVVERSPHRPILQAGLPANASTVVGGDVEFVCKVYSDAQPHIQWIKHVEKNGSKYGPDGLPYLKVLKAAGVNTTDKEIEVLYIRNVTFEDAGEYTCLAGNSIGISFHSAWLTVLPAPGREKEITASPDYLE

SEQ ID NO: 2368 - protein, 375 aa, synthetic construct
  REGION 1..375: note = FGFR3 (P22607) SP+PP+ECD
MGAPACALALCVAVAIVAGASSESLGTEQRVVGRAAEVPGPEPGQQEQLVFGSGDAVELSCPPPGGGPMGPTVWVKDGTGLVPSERVLVGPQRLQVLNASHEDSGAYSCRQRLTQRVLCHFSVRVTDAPSSGDDEDGEDEAEDTGVDTGAPYWTRPERMDKKLLAVPAANTVRFRCPAAGNPTPSISWLKNGREFRGEHRIGGIKLRHQQWSLVMESVVPSDRGNYTCVVENKFGSIRQTYTLDVLERSPHRPILQAGLPANQTAVLGSDVEFHCKVYSDAQPHIQWLKHVEVNGSKVGPDGTPYVTVLKTAGANTTDKELEVLSLHNVTFEDAGEYTCLAGNSIGFSHHSAWLVVLPAEEELVEADEAGSVYAG

SEQ ID NO: 2369 - protein, 369 aa, synthetic construct
  REGION 1..369: note = FGFR4 (P22455) SP+PP+ECD
MRLLLALLGVLLSVPGPPVLSLEASEEVELEPCLAPSLEQQEQELTVALGQPVRLCCGRAERGGHWYKEGSRLAPAGRVRGWRGRLEIASFLPEDAGRYLCLARGSMIVLQNLTLITGDSLTSSNDDEDPKSHRDPSNRHSYPQQAPYWTHPQRMEKKLHAVPAGNTVKFRCPAAGNPTPTIRWLKDGQAFHGENRIGGIRLRHQHWSLVMESVVPSDRGTYTCLVENAVGSIRYNYLLDVLERSPHRPILQAGLPANTTAVVGSDVELLCKVYSDAQPHIQWLKHIVINGSSFGADGFPYVQVLKTADINSSEVEVLYLRNVSAEDAGEYTCLAGNSIGLSYQSAWLTVLPEEDPTWTAAAPEARYTD

SEQ ID NO: 2370 - protein, 378 aa, synthetic construct
  REGION 1..378: note = FGFRL1 (Q8N441) SP+PP+ECD
MTPSPLLLLLLPPLLLGAFPPAAAARGPPKMADKVVPRQVARLGRTVRLQCPVEGDPPPLTMWTKDGRTIHSGWSRFRVLPQGLKVKQVEREDAGVYVCKATNGFGSLSVNYTLVVLDDISPGKESLGPDSSSGGQEDPASQQWARPRFTQPSKMRRRVIARPVGSSVRLKCVASGHPRPDITWMKDDQALTRPEAAEPRKKKWTLSLKNLRPEDSGKYTCRVSNRAGAINATYKVDVIQRTRSKPVLTGTHPVNTTVDFGGTTSFQCKVRSDVKPVIQWLKRVEYGAEGRHNSTIDVGGQKFVVLPTGDVWSRPDGSYLNKLLITRARQDDAGMYICLGANTMGYSFRSAFLTVLPDPKPPGPPVASSSSATSLPWP

SEQ ID NO: 2371 - protein, 524 aa, synthetic construct
  REGION 1..524: note = FLRT1 (Q9NZU1) SP+PP+ECD
MDLRDWLFLCYGLIAFLTEVIDSTTCPSVCRCDNGFIYCNDRGLTSIPADIPDDATTLYLQNNQINNAGIPQDLKTKVNVQVIYLYENDLDEFPINLPRSLRELHLQDNNVRTIARDSLARIPLLEKLHLDDNSVSTVSIEEDAFADSKQLKLLFLSRNHLSSIPSGLPHTLEELRLDDNRISTIPLHAFKGLNSLRRLVLDGNLLANQRIADDTFSRLQNLTELSLVRNSLAAPPLNLPSAHLQKLYLQDNAISHIPYNTLAKMRELERLDLSNNNLTTLPRGLFDDLGNLAQLLLRNNPWFCGCNLMWLRDWVKARAAVVNVRGLMCQGPEKVRGMAIKDITSEMDECFETGPQGGVANAAAKTTASNHASATTPQGSLFTLKAKRPGLRLPDSNIDYPMATGDGAKTLAIHVKALTADSIRITWKATLPASSFRLSWLRLGHSPAVGSITETLVQGDKTEYLLTALEPKSTYIICMVTMETSNAYVADETPVCAKAETADSYGPTTTLNQEQNAGPMASLP

SEQ ID NO: 2372 - protein, 541 aa, synthetic construct
  REGION 1..541: note = FLRT2 (O43155) SP+PP+ECD
MGLQTTKWPSHGAFFLKSWLIISLGLYSQVSKLLACPSVCRCDRNFVYCNERSLTSVPLGIPEGVTVLYLHNNQINNAGFPAELHNVQSVHTVYLYGNQLDEFPMNLPKNVRVLHLQENNIQTISRAALAQLLKLEELHLDDNSISTVGVEDGAFREAISLKLLFLSKNHLSSVPVGLPVDLQELRVDENRIAVISDMAFQNLTSLERLIVDGNLLTNKGIAEGTFSHLTKLKEFSIVRNSLSHPPPDLPGTHLIRLYLQDNQINHIPLTAFSNLRKLERLDISNNQLRMLTQGVFDNLSNLKQLTARNNPWFCDCSIKWVTEWLKYIPSSLNVRGFMCQGPEQVRGMAVRELNMNLLSCPTTTPGLPLFTPAPSTASPTTQPPTLSIPNPSRSYTPPTPTTSKLPTIPDWDGRERVTPPISERIQLSIHFVNDTSIQVSWLSLFTVMAYKLTWVKMGHSLVGGIVQERIVSGEKQHLSLVNLEPRSTYRICLVPLDAFNYRAVEDTICSEATTHASYLNNGSNTASSHEQTTSHSMGSPF

SEQ ID NO: 2373 - protein, 528 aa, synthetic construct
  REGION 1..528: note = FLRT3 (Q9NZU0) SP+PP+ECD
MISAAWSIFLIGTKIGLFLQVAPLSVMAKSCPSVCRCDAGFIYCNDRFLTSIPTGIPEDATTLYLQNNQINNAGIPSDLKNLLKVERIYLYHNSLDEFPTNLPKYVKELHLQENNIRTITYDSLSKIPYLEELHLDDNSVSAVSIEEGAFRDSNYLRLLFLSRNHLSTIPWGLPRTIEELRLDDNRISTISSPSLQGLTSLKRLVLDGNLLNNHGLGDKVFFNLVNLTELSLVRNSLTAAPVNLPGTNLRKLYLQDNHINRVPPNAFSYLRQLYRLDMSNNNLSNLPQGIFDDLDNITQLILRNNPWYCGCKMKWVRDWLQSLPVKVNVRGLMCQAPEKVRGMAIKDLNAELFDCKDSGIVSTIQITTAIPNTVYPAQGQWPAPVTKQPDIKNPKLTKDHQTTGSPSRKTITITVKSVTSDTIHISWKLALPMTALRLSWLKLGHSPAFGSITETIVTGERSEYLVTALEPDSPYKVCMVPMETSNLYLFDETPVCIETETAPLRMYNPTTTLNREQEKEPYKNPNLP

SEQ ID NO: 2374 - protein, 758 aa, synthetic construct
  REGION 1..758: note = FLT1 (P17948) SP+PP+ECD
MVSYWDTGVLLCALLSCLLLTGSSSGSKLKDPELSLKGTQHIMQAGQTLHLQCRGEAAHKWSLPEMVSKESERLSITKSACGRNGKQFCSTLTLNTAQANHTGFYSCKYLAVPTSKKKETESAIYIFISDTGRPFVEMYSEIPEIIHMTEGRELVIPCRVTSPNITVTLKKFPLDTLIPDGKRIIWDSRKGFIISNATYKEIGLLTCEATVNGHLYKTNYLTHRQTNTIIDVQISTPRPVKLLRGHTLVLNCTATTPLNTRVQMTWSYPDEKNKRASVRRRIDQSNSHANIFYSVLTIDKMQNKDKGLYTCRVRSGPSFKSVNTSVHIYDKAFITVKHRKQQVLETVAGKRSYRLSMKVKAFPSPEVVWLKDGLPATEKSARYLTRGYSLIIKDVTEEDAGNYTILLSIKQSNVFKNLTATLIVNVKPQIYEKAVSSFPDPALYPLGSRQILTCTAYGIPQPTIKWFWHPCNHNHSEARCDFCSNNEESFILDADSNMGNRIESITQRMAIIEGKNKMASTLVVADSRISGIYICIASNKVGTVGRNISFYITDVPNGFHVNLEKMPTEGEDLKLSCTVNKFLYRDVTWILLRTVNNRTMHYSISKQKMAITKEHSITLNLTIMNVSLQDSGTYACRARNVYTGEEILQKKEITIRDQEAPYLLRNLSDHTVAISSSTTLDCHANGVPEPQITWFKNNHKIQQEPGIILGPGSSTLFIERVTEEDEGVYHCKATNQKGSVESSAYLTVQGTSDKSNLE

SEQ ID NO: 2375 - protein, 543 aa, synthetic construct
  REGION 1..543: note = FLT3 (P36888) SP+PP+ECD
MPALARDGGQLPLLVVFSAMIFGTITNQDLPVIKCVLINHKNNDSSVGKSSSYPMVSESPEDLGCALRPQSSGTVYEAAAVEVDVSASITLQVLVDAPGNISCLWVFKHSSLNCQPHFDLQNRGVVSMVILKMTETQAGEYLLFIQSEATNYTILFTVSIRNTLLYTLRRPYFRKMENQDALVCISESVPEPIVEWVLCDSQGESCKEESPAVVKKEEKVLHELFGTDIRCCARNELGRECTRLFTIDLNQTPQTTLPQLFLKVGEPLWIRCKAVHVNHGFGLTWELENKALEEGNYFEMSTYSTNRTMIRILFAFVSSVARNDTGYYTCSSSKHPSQSALVTIVEKGFINATNSSEDYEIDQYEEFCFSVRFKAYPQIRCTWTFSRKSFPCEQKGLDNGYSISKFCNHKHQPGEYIFHAENDDAQFTKMFTLNIRRKPQVLAEASASQASCFSDGYPLPSWTWKKCSDKSPNCTEEITEGVWNRKANRKVFGQWVSSSTLNMSEAIKGFLVKCCAYNSLGTSCETILLNSPGPFPFIQDNIS

SEQ ID NO: 2376 - protein, 184 aa, synthetic construct
  REGION 1..184: note = FLT3LG (P49771) SP+PP+ECD
MTVLAPAWSPTTYLLLLLLLSSGLSGTQDCSFQHSPISSDFAVKIRELSDYLLQDYPVTVASNLQDEELCGGLWRLVLAQRWMERLKTVAGSKMQGLLERVNTEIHFVTKCAFQPPPSCLRFVQTNISRLLQETSEQLVALKPWITRQNFSRCLELQCQPDSSTLPPPWSPRPLEATAPTAPQP

SEQ ID NO: 2377 - protein, 775 aa, synthetic construct
  REGION 1..775: note = FLT4 (P35916) SP+PP+ECD
MQRGAALCLRLWLCLGLLDGLVSGYSMTPPTLNITEESHVIDTGDSLSISCRGQHPLEWAWPGAQEAPATGDKDSEDTGVVRDCEGTDARPYCKVLLLHEVHANDTGSYVCYYKYIKARIEGTTAASSYVFVRDFEQPFINKPDTLLVNRKDAMWVPCLVSIPGLNVTLRSQSSVLWPDGQEVVWDDRRGMLVSTPLLHDALYLQCETTWGDQDFLSNPFLVHITGNELYDIQLLPRKSLELLVGEKLVLNCTVWAEFNSGVTFDWDYPGKQAERGKWVPERRSQQTHTELSSILTIHNVSQHDLGSYVCKANNGIQRFRESTEVIVHENPFISVEWLKGPILEATAGDELVKLPVKLAAYPPPEFQWYKDGKALSGRHSPHALVLKEVTEASTGTYTLALWNSAAGLRRNISLELVVNVPPQIHEKEASSPSIYSRHSRQALTCTAYGVPLPLSIQWHWRPWTPCKMFAQRSLRRRQQQDLMPQCRDWRAVTTQDAVNPIESLDTWTEFVEGKNKTVSKLVIQNANVSAMYKCVVSNKVGQDERLIYFYVTTIPDGFTIESKPSEELLEGQPVLLSCQADSYKYEHLRWYRLNLSTLHDAHGNPLLLDCKNVHLFATPLAASLEEVAPGARHATLSLSIPRVAPEHEGHYVCEVQDRRSHDKHCHKKYLSVQALEAPRLTQNLTDLLVNVSDSLEMQCLVAGAHAPSIVWYKDERLLEEKSGVDLADSNQKLSIQRVREEDAGRYLCSVCNAKGCVNSSASVAVEGSEDKGSME

SEQ ID NO: 2378 - protein, 167 aa, synthetic construct
  REGION 1..167: note = FNDC4 (Q9H6D8) SP+PP+ECD
MPSGCHSSPPSGLRGDMASLVPLSPYLSPTVLLLVSCDLGFVRADRPPSPVNVTVTHLRANSATVSWDVPEGNIVIGYSISQQRQNGPGQRVIREVNTTTRACALWGLAEDSDYTVQVRSIGLRGESPPGPRVHFRTLKGSDRLPSNSSSPGDITVEGLDGERPLQT

SEQ ID NO: 2379 - protein, 152 aa, synthetic construct
  REGION 1..152: note = FNDC5 (Q8NAU1) SP+PP+ECD
MHPGSPSAWPPRARAALRLWLGCVCFALVQADSPSAPVNVTVRHLKANSAVVSWDVLEDEVVIGFAISQQKKDVRMLRFIQEVNTTTRSCALWDLEEDTEYIVHVQAISIQGQSPASEPVLFKTPREAEKMASKNKDEVTMKEMGRNQQLRT

SEQ ID NO: 2380 - protein, 3901 aa, synthetic construct
  REGION 1..3901: note = FRAS1 (Q86XX4) SP+PP+ECD
MGVLKVWLGLALALAEFAVLPHHSEGACVYQDSLLADATIWKPDSCQSCRCHGDIVICKPAVCRNPQCAFEKGEVLQIAANQCCPECVLRTPGSCHHEKKIHEHGTEWASSPCSVCSCNHGEVRCTPQPCPPLSCGHQELAFIPEGSCCPVCVGLGKPCSYEGHVFQDGEDWRLSRCAKCLCRNGVAQCFTAQCQPLFCNQDETVVRVPGKCCPQCSARSCSAAGQVYEHGEQWSENACTTCICDRGEVRCHKQACLPLRCGKGQSRARRHGQCCEECVSPAGSCSYDGVVRYQDEMWKGSACEFCMCDHGQVTCQTGECAKVECARDEELIHLDGKCCPECISRNGYCVYEETGEFMSSNASEVKRIPEGEKWEDGPCKVCECRGAQVTCYEPSCPPCPVGTLALEVKGQCCPDCTSVHCHPDCLTCSQSPDHCDLCQDPTKLLQNGWCVHSCGLGFYQAGSLCLACQPQCSTCTSGLECSSCQPPLLMRHGQCVPTCGDGFYQDRHSCAVCHESCAGCWGPTEKHCLACRDPLHVLRDGGCESSCGKGFYNRQGTCSACDQSCDSCGPSSPRCLTCTEKTVLHDGKCMSECPGGYYADATGRCKVCHNSCASCSGPTPSHCTACSPPKALRQGHCLPRCGEGFYSDHGVCKACHSSCLACMGPAPSHCTGCKKPEEGLQVEQLSDVGIPSGECLAQCRAHFYLESTGICEACHQSCFRCAGKSPHNCTDCGPSHVLLDGQCLSQCPDGYFHQEGSCTECHPTCRQCHGPLESDCISCYPHISLTNGNCRTSCREEQFLNLVGYCADCHHLCQHCAADLHNTGSICLRCQNAHYLLLGDHCVPDCPSGYYAERGACKKCHSSCRTCQGRGPFSCSSCDTNLVLSHTGTCSTTCFPGHYLDDNHVCQPCNTHCGSCDSQASCTSCRDPNKVLLFGECQYESCAPQYYLDFSTNTCKECDWSCSACSGPLKTDCLQCMDGYVLQDGACVEQCLSSFYQDSGLCKNCDSYCLQCQGPHECTRCKGPFLLLEAQCVQECGKGYFADHAKHKCTACPQGCLQCSHRDRCHLCDHGFFLKSGLCVYNCVPGFSVHTSNETCSGKIHTPSLHVNGSLILPIGSIKPLDFSLLNVQDQEGRVEDLLFHVVSTPTNGQLVLSRNGKEVQLDKAGRFSWKDVNEKKVRFVHSKEKLRKGYLFLKISDQQFFSEPQLINIQAFSTQAPYVLRNEVLHISRGERATITTQMLDIRDDDNPQDVVIEIIDPPLHGQLLQTLQSPATPIYQFQLDELSRGLLHYAHDGSDSTSDVAVLQANDGHSFHNILFQVKTVPQNDRGLQLVANSMVWVPEGGMLQITNRILQAEAPGASAEEIIYKITQDYPQFGEVVLLVNMPADSPADEGQHLPDGRTATPTSTFTQQDINEGIVWYRHSGAPAQSDSFRFEVSSASNAQTRLESHMFNIAILPQTPEAPKVSLEASLHMTAREDGLTVIQPHSLSFINSEKPSGKIVYNITLPLHPNQGIIEHRDHPHSPIRYFTQEDINQGKVMYRPPPAAPHLQELMAFSFAGLPESVKFHFTVSDGEHTSPEMVLTIHLLPSDQQLPVFQVTAPRLAVSPGGSTSVGLQVVVRDAETAPKELFFELRRPPQHGVLLKHTAEFRRPMATGDTFTYEDVEKNALQYIHDGSSTREDSMEISVTDGLTVTMLEVRVEVSLSEDRGPRLAAGSSLSITVASKSTAIITRSHLAYVDDSSPDPEIWIQLNYLPSYGTLLRISGSEVEELSEVSNFTMEDINNKKIRYSAVFETDGHLVTDSFYFSVSDMDHNHLDNQIFTIMITPAENPPPVIAFADLITVDEGGRAPLSFHHFFATDDDDNLQRDAIIKLSALPKYGCIENTGTGDRFGPETASDLEASFPIQDVLENYIYYFQSVHESIEPTHDIFSFYVSDGTSRSEIHSINITIERKNDEPPRMTLQPLRVQLSSGVVISNSSLSLQDLDTPDNELIFVLTKKPDHGHVLWRQTASEPLENGRVLVQGSTFTYQDILAGLVGYVPSVPGMVVDEFQFSLTDGLHVDTGRMKIYTELPASDTPHLAINQGLQLSAGSVARITEQHLKVTDIDSDDHQVMYIMKEDPGAGRLQMMKHGNLEQISIKGPIRSFTQADISQGQPEYSHGTGEPGGSFAFKFDVVDGEGNRLIDKSFSISISEDKSPPVITTNKGLVLDENSVKKITTLQLSATDQDSGPTELIYRITRQPQLGHLEHAASPGIQISSFTQADLTSRNVQYVHSSEAEKHSDAFSFTLSDGVSEVTQTFHITLHPVDDSLPVVQNLGMRVQEGMRKTITEFELKAVDADTEAESVTFTIVQPPRHGTIERTSNGQHFHLTSTFTMKDIYQNRVSYSHDGSNSLKDRFTFTVSDGTNPFFIIEEGGKEIMTAAPQPFRVDILPVDDGTPRIVTNLGLQWLEYMDGKATNLITKKELLTMDPDTEDAQLVYEITTGPKHGFVENKLQPGRAAATFTQEDVNLGLIRYVLHKEKIREMMDSFQFLVKDSKPNVVSDNVFHIQWSLISFKYTSYNVSEKAGSVSVTVQRTGNLNQYAIVLCRTEQGTASSSSQPGQQDYVEYAGQVQFDEREDTKSCTIVINDDDVFENVESFTVELSMPAYALLGEFTQAKVIINDTEDEPTLEFDKKIYWVNESAGFLFAPIERKGDASSIVSAICYTVPKSAMGSLFYALESGSDFKSRGMSAASRVIFGPGVTMSTCDVMLIDDSEYEEEEEFEIALADASDNARIGRVATAKVLISGPNDASTVSLGNTAFTVSEDAGTVKIPVIRHGTDLSTFASVWCATRPSDPASATPGVDYVPSSRKVEFGPGVIEQYCTLTILDDTQYPVIEGLETFVVFLSSAQGAELTKPFQAVIAINDTFQDVPSMQFAKDLLLVKEKEGVLHVPITRSGDLSYESSVRCYTQSHSAQVMEDFEERQNADSSRITFLKGDKVKNCTVYIHDDSMFEPEEQFRVYLGLPLGNHWSGARIGKNNMATITISNDEDAPTIEFEEAAYQVREPAGPDAIAILNIKVIRRGDQNRTSKVRCSTRDGSAQSGVDYYPKSRVLKFSPGVDHIFFKVEILSNEDREWHESFSLVLGPDDPVEAVLGDVTTATVTILDQEAAGSLILPAPPIVVTLADYDHVEEVTKEGVKKSPSPGYPLVCVTPCDPHFPRYAVMKERCSEAGINQTSVQFSWEVAAPTDGNGARSPFETITDNTPFTSVNHMVLDSIYFSRRFHVRCVAKAVDKVGHVGTPLRSNIVTIGTDSAICHTPVVAGTSRGFQAQSFIATLKYLDVKHKEHPNRIHISVQIPHQDGMLPLISTMPLHNLHFLLSESIYRHQHVCSNLVTTYDLRGLAEAGFLDDVVYDSTALGPGYDRPFQFDPSVREPKTIQLYKHLNLKSCVWTFDAYYDMTELIDVCGGSVTADFQVRDSAQSFLTVHVPLYVSYIYVTAPRGWASLEHHTEMEFSFFYDTVLWRTGIQTDSVLSARLQIIRIYIREDGRLVIEFKTHAKFRGQFVMEHHTLPEVKSFVLTPDHLGGIEFDLQLLWSAQTFDSPHQLWRATSSYNRKDYSGEYTIYLIPCTVQPTQPWVDPGEKPLACTAHAPERFLIPIAFQQTNRPVPVVYSLNTEFQLCNNEKVFLMDPNTSDMSLAEMDYKGAFSKGQILYGRVLWNPEQNLNSAYKLQLEKVYLCTGKDGYVPFFDPTGTIYNEGPQYGCIQPNKHLKHRFLLLDRNQPEVTDKYFHDVPFEAHFASELPDFHVVSNMPGVDGFTLKVDALYKVEAGHQWYLQVIYIIGPDTISGPRVQRSLTAPLRRNRRDLVEPDGQLILDDSLIYDNEGDQVKNGTNMKSLNLEMQELAVAASLSQTGAS

SEQ ID NO: 2381 - protein, 3113 aa, synthetic construct
  REGION 1..3113: note = FREM2 (Q5SZK8) SP+PP+ECD
MHSAGTPGLSSRRTGNSTSFQPGPPPPPRLLLLLLLLLSLVSRVPAQPAAFGRALLSPGLAGAAGVPAEEAIVLANRGLRVPFGREVWLDPLHDLVLQVQPGDRCAVSVLDNDALAQRPGRLSPKRFPCDFGPGEVRYSHLGARSPSRDRVRLQLRYDAPGGAVVLPLVLEVEVVFTQLEVVTRNLPLVVEELLGTSNALDARSLEFAFQPETEECRVGILSGLGALPRYGELLHYPQVPGGAREGGAPETLLMDCKAFQELGVRYRHTAASRSPNRDWIPMVVELRSRGAPVGSPALKREHFQVLVRIRGGAENTAPKPSFVAMMMMEVDQFVLTALTPDMLAAEDAESPSDLLIFNLTSPFQPGQGYLVSTDDRSLPLSSFTQRDLRLLKIAYQPPSEDSDQERLFELELEVVDLEGAASDPFAFMVVVKPMNTMAPVVTRNTGLILYEGQSRPLTGPAGSGPQNLVISDEDDLEAVRLEVVAGLRHGHLVILGASSGSSAPKSFTVAELAAGQVVYQHDDRDGSLSDNLVLRMVDGGGRHQVQFLFPITLVPVDDQPPVLNANTGLTLAEGETVPILPLSLSATDMDSDDSLLLFVLESPFLTTGHLLLRQTHPPHEKQELLRGLWRKEGAFYERTVTEWQQQDITEGRLFYRHSGPHSPGPVTDQFTFRVQDNHDPPNQSGLQRFVIRIHPVDRLPPELGSGCPLRMVVQESQLTPLRKKWLRYTDLDTDDRELRYTVTQSPTDTDENHLPAPLGTLVLTDNPSVVVTHFTQAQINHHKIAYRPPGQELGVATRVAQFQFQVEDRAGNVAPGTFTLYLHPVDNQPPEILNTGFTIQEKGHHILSETELHVNDVDTDVAHISFTLTQAPKHGHMRVSGQILHVGGLFHLEDIKQGRVSYAHNGDKSLTDSCSLEVSDRHHVVPITLRVNVRPVDDEVPILSHPTGTLESYLDVLENGATEITANVIKGTNEETDDLMLTFLLEDPPLYGEILVNGIPAEQFTQRDILEGSVVYTHTSGEIGLLPKADSFNLSLSDMSQEWRIGGNTIQGVTIWVTILPVDSQAPEIFVGEQLIVMEGDKSVITSVHISAEDVDSLNDDILCTIVIQPTSGYVENISPAPGSEKSRAGIAISAFNLKDLRQGHINYVQSVHKGVEPVEDRFVFRCSDGINFSERQFFPIVIIPTNDEQPEMFMREFMVMEGMSLVIDTPILNAADADVPLDDLTFTITQFPTHGHIMNQLINGTVLVESFTLDQIIESSSIIYEHDDSETQEDSFVIKLTDGKHSVEKTVLIIVIPVDDETPRMTINNGLEIEIGDTKIINNKILMATDLDSEDKSLVYIIRYGPGHGLLQRRKPTGAFENITLGMNFTQDEVDRNLIQYVHLGQEGIRDLIKFDVTDGINPLIDRYFYVSIGSIDIVFPDVISKGVSLKEGGKVTLTTDLLSTSDLNSPDENLVFTITRAPMRGHLECTDQPGVSITSFTQLQLAGNKIYYIHTADDEVKMDSFEFQVTDGRNPVFRTFRISISDVDNKKPVVTIHKLVVSESENKLITPFELTVEDRDTPDKLLKFTITQVPIHGHLLFNNTRPVMVFTKQDLNENLISYKHDGTESSEDSFSFTVTDGTHTDFYVFPDTVFETRRPQVMKIQVLAVDNSVPQIAVNKGASTLRTLATGHLGFMITSKILKVEDRDSLHISLRFIVTEAPQHGYLLNLDKGNHSITQFTQADIDDMKICYVLREGANATSDMFYFAVEDGGGNKLTYQNFRLNWAWISFEKEYYLVNEDSKFLDVVLKRRGYLGETSFISIGTRDRTAEKDKDFKGKAQKQVQFNPGQTRATWRVRILSDGEHEQSETFQVVLSEPVLAALEFPTVATVEIVDPGDEPTVFIPQSKYSVEEDVGELFIPIRRSGDVSQELMVVCYTQQGTATGTVPTSVLSYSDYISRPEDHTSVVRFDKDEREKLCRIVIIDDSLYEEEETFHVLLSMPMGGRIGSEFPGAQVTIVPDKDDEPIFYFGDVEYSVDESAGYVEVQVWRTGTDLSKSSSVTVRSRKTDPPSADAGTDYVGISRNLDFAPGVNMQPVRVVILDDLGQPALEGIEKFELVLRMPMNAALGEPSKATVSINDSVSDLPKMQFKERIYTGSESDGQIVTMIHRTGDVQYRSSVRCYTRQGSAQVMMDFEERPNTDTSIITFLPGETEKPCILELMDDVLYEEVEELRLVLGTPQSNSPFGAAVGEQNETLIRIRDDADKTVIKFGETKFSVTEPKEPGESVVIRIPVIRQGDTSKVSIVRVHTKDGSATSGEDYHPVSEEIEFKEGETQHVVEIEVTFDGVREMREAFTVHLKPDENMIAEMQLTKAIVYIEEMSSMADVTFPSVPQIVSLLMYDDTSKAKESAEPMSGYPVICITACNPKYSDYDKTGSICASENINDTLTRYRWLISAPAGPDGVTSPMREVDFDTFFTSSKMVTLDSIYFQPGSRVQCAARAVNTNGDEGLELMSPIVTISREEGLCQPRVPGVVGAEPFSAKLRYTGPEDADYTNLIKLTVTMPHIDGMLPVISTRELSNFELTLSPDGTRVGNHKCSNLLDYTEVKTHYGFLTDATKNPEIIGETYPYQYSLSIRGSTTLRFYRNLNLEACLWEFVSYYDMSELLADCGGTIGTDGQVLNLVQSYVTLRVPLYVSYVFHSPVGVGGWQHFDLKSELRLTFVYDTAILWNDGIGSPPEAELQGSLYPTSMRIGDEGRLAVHFKTEAQFHGLFVLSHPASFTSSVIMSADHPGLTFSLRLIRSEPTYNQPVQQWSFVSDFAVRDYSGTYTVKLVPCTAPSHQEYRLPVTCNPREPVTFDLDIRFQQVSDPVAAEFSLNTQMYLLSKKSLWLSDGSMGFGQESDVAFAEGDIIYGRVMVDPVQNLGDSFYCSIEKVFLCTGADGYVPKYSPMNAEYGCLADSPSLLYRFKIVDKAQPETQATSFGNVLFNAKLAVDDPEAILLVNQPGSDGFKVDSTPLFQVALGREWYIHTIYTVRSKDNANRGIGKRSVEYHSLVSQGKPQSTTKSRKKREIRSTPSLAWEIGAENSRGTNIQHIALDRTKRQIPHGRAPPDGILPWELNSPSSAVSLVT

SEQ ID NO: 2382 - protein, 715 aa, synthetic construct
  REGION 1..715: note = FURIN (P09958) SP+PP+ECD
MELRPWLLWVVAATGTLVLLAADAQGQKVFTNTWAVRIPGGPAVANSVARKHGFLNLGQIFGDYYHFWHRGVTKRSLSPHRPRHSRLQREPQVQWLEQQVAKRRTKRDVYQEPTDPKFPQQWYLSGVTQRDLNVKAAWAQGYTGHGIVVSILDDGIEKNHPDLAGNYDPGASFDVNDQDPDPQPRYTQMNDNRHGTRCAGEVAAVANNGVCGVGVAYNARIGGVRMLDGEVTDAVEARSLGLNPNHIHIYSASWGPEDDGKTVDGPARLAEEAFFRGVSQGRGGLGSIFVWASGNGGREHDSCNCDGYTNSIYTLSISSATQFGNVPWYSEACSSTLATTYSSGNQNEKQIVTTDLRQKCTESHTGTSASAPLAAGIIALTLEANKNLTWRDMQHLVVQTSKPAHLNANDWATNGVGRKVSHSYGYGLLDAGAMVALAQNWTTVAPQRKCIIDILTEPKDIGKRLEVRKTVTACLGEPNHITRLEHAQARLTLSYNRRGDLAIHLVSPMGTRSTLLAARPHDYSADGFNDWAFMTTHSWDEDPSGEWVLEIENTSEANNYGTLTKFTLVLYGTAPEGLPVPPESSGCKTLTSSQACVVCEEGFSLHQKSCVQHCPPGFAPQVLDTHYSTENDVETIRASVCAPCHASCATCQGPALTDCLSCPSHASLDPVEQTCSRQSQSSRESPPQQQPPRLPPEVEAGQRLRAGLLPSHLPE

SEQ ID NO: 2383 - protein, 142 aa, synthetic construct
  REGION 1..142: note = G6B (O95866) SP+PP+ECD
MAVFLQLLPLLLSRAQGNPGASLDGRPGDRVNLSCGGVSHPIRWVWAPSFPACKGLSKGRRPILWASSSGTPTVPPLQPFVGRLRSLDSGIRRLELLLSAGDSGTFFCKGRHEDESRTVLHVLGDRTYCKAPGPTHGSVYPQ

SEQ ID NO: 2384 - protein, 351 aa, synthetic construct
  REGION 1..351: note = GFRAL (Q6UXV0) SP+PP+ECD
MIVFIFLAMGLSLENEYTSQTNNCTYLREQCLRDANGCKHAWRVMEDACNDSDPGDPCKMRNSSYCNLSIQYLVESNFQFKECLCTDDFYCTVNKLLGKKCINKSDNVKEDKFKWNLTTRSHHGFKGMWSCLEVAEACVGDVVCNAQLASYLKACSANGNPCDLKQCQAAIRFFYQNIPFNIAQMLAFCDCAQSDIPCQQSKEALHSKTCAVNMVPPPTCLSVIRSCQNDELCRRHYRTFQSKCWQRVTRKCHEDENCISTLSKQDLTCSGSDDCKAAYIDILGTVLQVQCTCRTITQSEESLCKIFQHMLHRKSCFNYPTLSNVKGMALYTRKHANKITLTGFHSPFNGE

SEQ ID NO: 2385 - protein, 409 aa, synthetic construct
  REGION 1..409: note = GFY (I3L273) SP+PP+ECD
MKSFSRILFLVFLLAGLRSKAAPSAPLPLGCGFPDMAHPSETSPLKGASENSKRDRLNPEFPGTPYPEPSKLPHTVSLETFPLDFTEPLNPDLRETPHPESPETPKADSLTTSISESLDMPKTNLSKMAHPESSETPTPGPTEMPHPGSPETPKPNFSKTSRPEFPETPNTDLMQTTPQESPEILQLNATEVSQAELPETSNTNPTKTPDPKSPEKHDLNSTETPNSEFLQALHPDPSKTPHPESHVTHNPSPTEISQTEFPTTYYQNATDVPRTSDPQISTSLYPETPVPFKDDATALNELSLNPKPGTPAAIQPDSPKLPTSDSPGMVELKAPQNSGPKESNVPPPSARIAGPPALPGRPSQLAPATLRAPQRHSRGEGVNTIIVVERVKETGVTLVGRPRGAAGGA

SEQ ID NO: 2386 - protein, 264 aa, synthetic construct
  REGION 1..264: note = GHR (P10912) SP+PP+ECD
MDLWQLLLTLALAGSSDAFSGSEATAAILSRAPWSLQSVNPGLKTNSSKEPKFTKCRSPERETFSCHWTDEVHHGTKNLGPIQLFYTRRNTQEWTQEWKECPDYVSAGENSCYFNSSFTSIWIPYCIKLTSNGGTVDEKCFSVDEIVQPDPPIALNWTLLNVSLTGIHADIQVRWEAPRNADIQKGWMVLEYELQYKEVNETKWKMMDPILTTSVPVYSLKVDKEYEVRVRSKQRNSGNYGEFSEVLYVTLPQMSQFTCEEDFY

SEQ ID NO: 2387 - protein, 268 aa, synthetic construct
  REGION 1..268: note = GINM1 (Q9NU53) SP+PP+ECD
MEGAPPGSLALRLLLFVALPASGWLTTGAPEPPPLSGAPQDGIRINVTTLKDDGDISKQQVVLNITYESGQVYVNDLPVNSGVTRISCQTLIVKNENLENLEEKEYFGIVSVRILVHEWPMTSGSSLQLIVIQEEVVEIDGKQVQQKDVTEIDILVKNRGVLRHSNYTLPLEESMLYSISRDSDILFTLPNLSKKESVSSLQTTSQYLIRNVETTVDEDVLPGKLPETPLRAEPPSSYKVMCQWMEKFRKDLCRFWSNVFPVFFQFLN

SEQ ID NO: 2388 - protein, 232 aa, synthetic construct
  REGION 1..232: note = GLIPR1 (P48060) SP+PP+ECD
MRVTLATIAWMVSFVSNYSHTANILPDIENEDFIKDCVRIHNKFRSEVKPTASDMLYMTWDPALAQIAKAWASNCQFSHNTRLKPPHKLHPNFTSLGENIWTGSVPIFSVSSAITNWYDEIQDYDFKTRICKKVCGHYTQVVWADSYKVGCAVQFCPKVSGFDALSNGAHFICNYGPGGNYPTWPYKRGATCSACPNNDKCLDNLCVNRQRDQVKRYYSVVYPGWPIYPRNR

SEQ ID NO: 2389 - protein, 531 aa, synthetic construct
  REGION 1..531: note = GP1BA (P07359) SP+PP+ECD
MPLLLLLLLLPSPLHPHPICEVSKVASHLEVNCDKRNLTALPPDLPKDTTILHLSENLLYTFSLATLMPYTRLTQLNLDRCELTKLQVDGTLPVLGTLDLSHNQLQSLPLLGQTLPALTVLDVSFNRLTSLPLGALRGLGELQELYLKGNELKTLPPGLLTPTPKLEKLSLANNNLTELPAGLLNGLENLDTLLLQENSLYTIPKGFFGSHLLPFAFLHGNPWLCNCEILYFRRWLQDNAENVYVWKQGVDVKAMTSNVASVQCDNSDKFPVYKYPGKGCPTLGDEGDTDLYDYYPEEDTEGDKVRATRTVVKFPTKAHTTPWGLFYSWSTASLDSQMPSSLHPTQESTKEQTTFPPRWTPNFTLHMESITFSKTPKSTTEPTPSPTTSEPVPEPAPNMTTLEPTPSPTTPEPTSEPAPSPTTPEPTSEPAPSPTTPEPTSEPAPSPTTPEPTPIPTIATSPTILVSATSLITPKSTFLTTTKPVSLLESTKKTIPELDQPPKLRGVLQGHLESSRNDPFLHPDFCCLLPL

SEQ ID NO: 2390 - protein, 147 aa, synthetic construct
  REGION 1..147: note = GP1BB (P13224) SP+PP+ECD
MGSGPRGALSLLLLLLAPPSRPAAGCPAPCSCAGTLVDCGRRGLTWASLPTAFPVDTTELVLTGNNLTALPPGLLDALPALRTAHLGANPWRCDCRLVPLRAWLAGRPERAPYRDLRCVAPPALRGRLLPYLAEDELRAACAPGPLC

SEQ ID NO: 2391 - protein, 523 aa, synthetic construct
  REGION 1..523: note = GP5 (P40197) SP+PP+ECD
MLRGTLLCAVLGLLRAQPFPCPPACKCVFRDAAQCSGGDVARISALGLPTNLTHILLFGMGRGVLQSQSFSGMTVLQRLMISDSHISAVAPGTFSDLIKLKTLRLSRNKITHLPGALLDKMVLLEQLFLDHNALRGIDQNMFQKLVNLQELALNQNQLDFLPASLFTNLENLKLLDLSGNNLTHLPKGLLGAQAKLERLLLHSNRLVSLDSGLLNSLGALTELQFHRNHIRSIAPGAFDRLPNLSSLTLSRNHLAFLPSALFLHSHNLTLLTLFENPLAELPGVLFGEMGGLQELWLNRTQLRTLPAAAFRNLSRLRYLGVTLSPRLSALPQGAFQGLGELQVLALHSNGLTALPDGLLRGLGKLRQVSLRRNRLRALPRALFRNLSSLESVQLDHNQLETLPGDVFGALPRLTEVLLGHNSWRCDCGLGPFLGWLRQHLGLVGGEEPPRCAGPGAHAGLPLWALPGGDAECPGPRGPPPRPAADSSSEAPVHPALAPNSSEPWVWAQPVTTGKGQDHSPFWG

SEQ ID NO: 2392 - protein, 267 aa, synthetic construct
  REGION 1..267: note = GP6 (Q9HCN6) SP+PP+ECD
MSPSPTALFCLGLCLGRVPAQSGPLPKPSLQALPSSLVPLEKPVTLRCQGPPGVDLYRLEKLSSSRYQDQAVLFIPAMKRSLAGRYRCSYQNGSLWSLPSDQLELVATGVFAKPSLSAQPGPAVSSGGDVTLQCQTRYGFDQFALYKEGDPAPYKNPERWYRASFPIITVTAAHSGTYRCYSFSSRDPYLWSAPSDPLELVVTGTSVTPSRLPTEPPSPVAEFSEATAELTVSFTNEVFTTETSRSITASPKESDSPAGPARQYYTK

SEQ ID NO: 2393 - protein, 235 aa, synthetic construct
  REGION 1..235: note = GPA33 (Q99795) SP+PP+ECD
MVGKMWPVLWTLCAVRVTVDAISVETPQDVLRASQGKSVTLPCTYHTSTSSREGLIQWDKLLLTHTERVVIWPFSNKNYIHGELYKNRVSISNNAEQSDASITIDQLTMADNGTYECSVSLMSDLEGNTKSRVRLLVLVPPSKPECGIEGETIIGNNIQLTCQSKEGSPTPQYSWKRYNILNQEQPLAQPASGQPVSLKNISTDTSGYYICTSSNEEGTQFCNITVAVRSPSMNV

SEQ ID NO: 2394 - protein, 498 aa, synthetic construct
  REGION 1..498: note = GPNMB (Q14956) SP+PP+ECD
MECLYYFLGFLLLAARLPLDAAKRFHDVLGNERPSAYMREHNQLNGWSSDENDWNEKLYPVWKRGDMRWKNSWKGGRVQAVLTSDSPALVGSNITFAVNLIFPRCQKEDANGNIVYEKNCRNEAGLSADPYVYNWTAWSEDSDGENGTGQSHHNVFPDGKPFPHHPGWRRWNFIYVFHTLGQYFQKLGRCSVRVSVNTANVTLGPQLMEVTVYRRHGRAYVPIAQVKDVYVVTDQIPVFVTMFQKNDRNSSDETFLKDLPIMFDVLIHDPSHFLNYSTINYKWSFGDNTGLFVSTNHTVNHTYVLNGTFSLNLTVKAAAPGPCPPPPPPPRPSKPTPSLATTLKSYDSNTPGPAGDNPLELSRIPDENCQINRYGHFQATITIVEGILEVNIIQMTDVLMPVPWPESSLIDFVVTCQGSIPTEVCTIISDPTCEITQNTVCSPVDVDEMCLLTVRRTFNGSGTYCVNLTLGDDTSLALTSTLISVPDRDPASPLRMAN

SEQ ID NO: 2395 - protein, 430 aa, synthetic construct
  REGION 1..430: note = GUCY2C (P25092) SP+PP+ECD
MKTLLLDLALWSLLFQPGWLSFSSQVSQNCHNGSYEISVLMMGNSAFAEPLKNLEDAVNEGLEIVRGRLQNAGLNVTVNATFMYSDGLIHNSGDCRSSTCEGLDLLRKISNAQRMGCVLIGPSCTYSTFQMYLDTELSYPMISAGSFGLSCDYKETLTRLMSPARKLMYFLVNFWKTNDLPFKTYSWSTSYVYKNGTETEDCFWYLNALEASVSYFSHELGFKVVLRQDKEFQDILMDHNRKSNVIIMCGGPEFLYKLKGDRAVAEDIVIILVDLFNDQYFEDNVTAPDYMKNVLVLTLSPGNSLLNSSFSRNLSPTKRDFALAYLNGILLFGHMLKIFLENGENITTPKFAHAFRNLTFEGYDGPVTLDDWGDVDSTMVLLYTSVDTKKYKVLLTYDTHVNKTYPVDMSPTFTWKNSKLPNDITGRGPQ

SEQ ID NO: 2396 - protein, 91 aa, synthetic construct
  REGION 1..91: note = GYPA (P02724) SP+PP+ECD
MYGKIIFVLLLSEIVSISASSTTGVAMHTSTSSSVTKSYISSQTNDTHKRDTYAATPRAHEVSEISVRTVYPPEEETGERVQLAHHFSEPE

SEQ ID NO: 2397 - protein, 295 aa, synthetic construct
  REGION 1..295: note = HAVCR1 (Q96D42) SP+PP+ECD
MHPQVVILSLILHLADSVAGSVKVGGEAGPSVTLPCHYSGAVTSMCWNRGSCSLFTCQNGIVWTNGTHVTYRKDTRYKLLGDLSRRDVSLTIENTAVSDSGVYCCRVEHRGWFNDMKITVSLEIVPPKVTTTPIVTTVPTVTTVRTSTTVPTTTTVPMTTVPTTTVPTTMSIPTTTTVLTTMTVSTTTSVPTTTSIPTTTSVPVTTTVSTFVPPMPLPRQNHEPVATSPSSPQPAETHPTTLQGAIRREPTSSPLYSYTTDGNDTVTESSDGLWNNNQTQLFLEHSLLTANTTKG

SEQ ID NO: 2398 - protein, 202 aa, synthetic construct
  REGION 1..202: note = HAVCR2 (Q8TDQ0) SP+PP+ECD
MFSHLPFDCVLLLLLLLLTRSSEVEYRAEVGQNAYLPCFYTPAAPGNLVPVCWGKGACPVFECGNVVLRTDERDVNYWTSRYWLNGDFRKGDVSLTIENVTLADSGIYCCRIQIPGIMNDEKFNLKLVIKPAKVTPAPTRQRDFTAAFPRMLTTRGHGPAETQTLGSLPDINLTQISTLANELRDSRLANDLRDSGATIRIG

SEQ ID NO: 2399 - protein, 160 aa, synthetic construct
  REGION 1..160: note = HBEGF (Q99075) SP+PP+ECD
MKLLPSVVLKLFLAAVLSALVTGESLERLRRGLAAGTSNPDPPTVSTDQLLPLGGGRDRKVRDLQEADLDLLRVTLSSKPQALATPNKEEHGKRKKKGKGLGKKRDPCLRKYKDFCIHGECKYVKELRAPSCICHPGYHGERCHGLSLPVENRLYTYDHT

SEQ ID NO: 2400 - protein, 1248 aa, synthetic construct
  REGION 1..1248: note = HEG1 (Q9ULI3) SP+PP+ECD
MASPRASRWPPPLLLLLLPLLLLPPAAPGTRDPPPSPARRALSLAPLAGAGLELQLERRPEREPPPTPPRERRGPATPGPSYRAPEPGAATQRGPSGRAPRGGSADAAWKHWPESNTEAHVENITFYQNQEDFSTVSSKEGVMVQTSGKSHAASDAPENLTLLAETADARGRSGSSSRTNFTILPVGYSLEIATALTSQSGNLASESLHLPSSSSEFDERIAAFQTKSGTASEMGTERAMGLSEEWTVHSQEATTSAWSPSFLPALEMGELTTPSRKRNSSGPDLSWLHFYRTAASSPLLDLSSSSESTEKLNNSTGLQSSSVSQTKTMHVATVFTDGGPRTLRSLTVSLGPVSKTEGFPKDSRIATTSSSVLLSPSAVESRRNSRVTGNPGDEEFIEPSTENEFGLTSLRWQNDSPTFGEHQLASSSEVQNGSPMSQTETVSRSVAPMRGGEITAHWLLTNSTTSADVTGSSASYPEGVNASVLTQFSDSTVQSGGSHTALGDRSYSESSSTSSSESLNSSAPRGERSIAGISYGQVRGTAIEQRTSSDHTDHTYLSSTFTKGERALLSITDNSSSSDIVESSTSYIKISNSSHSEYSSFFHAQTERSNISSYDGEYAQPSTESPVLHTSNLPSYTPTINMPNTSVVLDTDAEFVSDSSSSSSSSSSSSSSGPPLPLPSVSQSHHLFSSILPSTRASVHLLKSTSDASTPWSSSPSPLPVSLTTSTSAPLSVSQTTLPQSSSTPVLPRARETPVTSFQTSTMTSFMTMLHSSQTADLKSQSTPHQEKVITESKSPSLVSLPTESTKAVTTNSPLPPSLTESSTEQTLPATSTNLAQMSPTFTTTILKTSQPLMTTPGTLSSTASLVTGPIAVQTTAGKQLSLTHPEILVPQISTEGGISTERNRVIVDATTGLIPLTSVPTSAKEMTTKLGVTAEYSPASRSLGTSPSPQTTVVSTAEDLAPKSATFAVQSSTQSPTTVSSSASVNSCAVNPCLHNGECVADNTSRGYHCRCPPSWQGDDCSVDVNECLSNPCPSTAMCNNTQGSFICKCPVGYQLEKGICNLVRTFVTEFKLKRTFLNTTVEKHSDLQEVENEITKTLNMCFSALPSYIRSTVHASRESNAVVISLQTTFSLASNVTLFDLADRMQKCVNSCKSSAEVCQLLGSQRRIFRAGSLCKRKSPECDKDTSICTDLDGVALCQCKSGYFQFNKMDHSCRACEDGYRLENETCMSCPFGLGGLNCGNPYQL

SEQ ID NO: 2401 - protein, 240 aa, synthetic construct
  REGION 1..240: note = HEPACAM (Q14CZ8) SP+PP+ECD
MKRERGALSRASRALRLAPFVYLLLIQTDPLEGVNITSPVRLIHGTVGKSALLSVQYSSTSSDRPVVKWQLKRDKPVTVVQSIGTEVIGTLRPDYRDRIRLFENGSLLLSDLQLADEGTYEVEISITDDTFTGEKTINLTVDVPISRPQVLVASTTVLELSEAFTLNCSHENGTKPSYTWLKDGKPLLNDSRMLLSPDQKVLTITRVLMEDDDLYSCMVENPISQGRSLPVKITVYRRSS

SEQ ID NO: 2402 - protein, 351 aa, synthetic construct
  REGION 1..351: note = HEPACAM2 (A8MVW5) SP+PP+ECD
MGQDAFMEPFGDTLGVFQCKIYLLLFGACSGLKVTVPSHTVHGVRGQALYLPVHYGFHTPASDIQIIWLFERPHTMPKYLLGSVNKSVVPDLEYQHKFTMMPPNASLLINPLQFPDEGNYIVKVNIQGNGTLSASQKIQVTVDDPVTKPVVQIHPPSGAVEYVGNMTLTCHVEGGTRLAYQWLKNGRPVHTSSTYSFSPQNNTLHIAPVTKEDIGNYSCLVRNPVSEMESDIIMPIIYYGPYGLQVNSDKGLKVGEVFTVDLGEAILFDCSADSHPPNTYSWIRRTDNTTYIIKHGPRLEVASEKVAQKTMDYVCCAYNNITGRQDETHFTVIITSVGLEKLAQKGKSLSP

SEQ ID NO: 2403 - protein, 1110 aa, synthetic construct
  REGION 1..1110: note = HEPH (Q9BQS7) SP+PP+ECD
MESGHLLWALLFMQSLWPQLTDGATRVYYLGIRDVQWNYAPKGRNVITNQPLDSDIVASSFLKSDKNRIGGTYKKTIYKEYKDDSYTDEVAQPAWLGFLGPVLQAEVGDVILIHLKNFATRPYTIHPHGVFYEKDSEGSLYPDGSSGPLKADDSVPPGGSHIYNWTIPEGHAPTDADPACLTWIYHSHVDAPRDIATGLIGPLITCKRGALDGNSPPQRQDVDHDFFLLFSVVDENLSWHLNENIATYCSDPASVDKEDETFQESNRMHAINGFVFGNLPELNMCAQKRVAWHLFGMGNEIDVHTAFFHGQMLTTRGHHTDVANIFPATFVTAEMVPWEPGTWLISCQVNSHFRDGMQALYKVKSCSMAPPVDLLTGKVRQYFIEAHEIQWDYGPMGHDGSTGKNLREPGSISDKFFQKSSSRIGGTYWKVRYEAFQDETFQEKMHLEEDRHLGILGPVIRAEVGDTIQVVFYNRASQPFSMQPHGVFYEKDYEGTVYNDGSSYPGLVAKPFEKVTYRWTVPPHAGPTAQDPACLTWMYFSAADPIRDTNSGLVGPLLVCRAGALGADGKQKGVDKEFFLLFTVLDENKSWYSNANQAAAMLDFRLLSEDIEGFQDSNRMHAINGFLFSNLPRLDMCKGDTVAWHLLGLGTETDVHGVMFQGNTVQLQGMRKGAAMLFPHTFVMAIMQPDNLGTFEIYCQAGSHREAGMRAIYNVSQCPGHQATPRQRYQAARIYYIMAEEVEWDYCPDRSWEREWHNQSEKDSYGYIFLSNKDGLLGSRYKKAVFREYTDGTFRIPRPRTGPEEHLGILGPLIKGEVGDILTVVFKNNASRPYSVHAHGVLESTTVWPLAAEPGEVVTYQWNIPERSGPGPNDSACVSWIYYSAVDPIKDMYSGLVGPLAICQKGILEPHGGRSDMDREFALLFLIFDENKSWYLEENVATHGSQDPGSINLQDETFLESNKMHAINGKLYANLRGLTMYQGERVAWYMLAMGQDVDLHTIHFHAESFLYRNGENYRADVVDLFPGTFEVVEMVASNPGTWLMHCHVTDHVHAGMETLFTVFSRTEHLSPLTVITKETEKAVPPRDIEEGNVKMLGMQIPIKNVEMLAS

SEQ ID NO: 2404 - protein, 1114 aa, synthetic construct
  REGION 1..1114: note = HEPHL1 (Q6MZM0) SP+PP+ECD
MPRKQPAGCIFLLTFLGLSGLVGTVTRTYYIGIVEEYWNYVPQGKNVITGKSFTEDKLATLFLERGPNRIGSIYKKAVYRRFTDGTYSIEIPKPPWLGFLGPILRAEVGDVIVIHLKNFASRPYSLHPHGVFYNKDSEGALYPDGTSGRNKNDDMVPPGKNYTYVWPVREEYAPTPADANCLTWVYHSHIDAPKDICSGLIGPLLVCKEGILNRYSGTRNDVDREFVIMFTLVDENQSWYLNENIKHFCTNPDSVDKKDAVFQRSNKMHALNGYLFGNFPEPDMCVGESVSWHLFGMGNEIDIHSIYFYGNTFISRGHRTDVVNLFPATFLTTEMIAENPGKWMITCQVSDHLQAGMLGQYNVDNCKSDIFYPKMKGQQRRYFIAAEKILWDYAPQGYNKFSGLPLNASGSDSDLYFTQGDNRIGGKYWKVRYTEFVDATFTKRKRLSAEEAHLGILGPVIKAEVGDTLLVTFANKADKVYSILPHGVIYDKASDAAPNLDGFVKPGAHVKPGETFTYKWTVPESVSPTAGDPPCLTYLYFSAVDPIKDTSSGLVGPLLVCKKGVLNADGTQKGIDKEFYLLFTVFDENLSRYFDENIQKFIWHPFSIDKEDKEFVKSNRMHAVNGYMYGNQPGLNMCKRDRVSWHLIGLGTDTDMHGIVFQGNTIHLRGTHRDSLALFPHMATTAFMQPDHAGIFRVFCATMPHLSRGMGQIYEVSSCDNRDPSEQRYGMIRTFYIAAEEVEWDYAPNKNWEFEKQHVDARGERHGDIFMNRTENWIGSQYKKVVYREYTDGEFVEIKARPPREEHLELLGPMIHAEVGNTVLIIFKNKASRPYSISAQGVEEMDSGKQFQVPMTKPGEVKTYRWNIPKRSGPGPSDPNCIPWVYYSTVNFVKDTYSGLMGPLITCRKGVLNEKGRRSDVDYEFALLFLVFNENESWYLDDNIKKYLNKDPRDFKRTDDFEESNRMHAINGKIFGNLHGLIMNEDTMTNWYLLGIGSEVDIHTIHYHAESFLFKIDKSYREDVYDLFPGTFQTIELFADHPGTWLLHCHVSDHIHAGMETTYTVLRNIDNRIPYSTTSPGVASHPATVPSNERPGKEQLYFFGKNLGPTGAKA

SEQ ID NO: 2405 - protein, 515 aa, synthetic construct
  REGION 1..515: note = HERVH59 (Q9N2J8) SP+PP+ECD
MILAGRAPSNTSTLMKFYSLLLYSLLFSFPFLYHPLPLPSYLHHTINLTHSLPAASNPSLANNCWLCISLSSSAYIAVPTLQTDRATSPVSLHLRTSFNSPHLYPPEELIYFLDRSSKTSPDISHQPAAALLHIYLKNLSPYINSTPPIFGPLTTQTTIPVAAPLCISRQRPTGIPLGNISPSRCSFTLHLQSPTTHVTETIGVFQLHIIDKPSINTDKLKNVSSNYCLGRHLPYISLHPWLPSPCSSDSPPRPSSCLLTPSPQNNSERLLVDTQRFLIHHENRTSSSMQLAHQSPLQPLTAAALAGSLGVWVQDTPFSTPSHPFSLHLQFCLTQGLFFLCGSSTYMCLPANWTGTCTLVFLTPKIQFANGTKELPVPLMTLTPQKRVIPLIPLMVGLGLSASTIALSTGIAGISTSVTTFRSPSNDFSASITDISQTLSVLQAQVDSLAAVVLQNRRGLGLSILLNEECCFYLNQSGLVYENIKKLKDRAQKLANQASNYAESPWALSNWMSWV

SEQ ID NO: 2406 - protein, 523 aa, synthetic construct
  REGION 1..523: note = HERVH62 (Q9N2K0) SP+PP+ECD
MIFAGKAPSNTSTLMKFYSLLLYSLLFSFPFLCHPLPLPSYLHHTINLTHSLLAASNPSLVNNCWLCISLSSSAYTAVPAVQTDWATSPISLHLRTSFNSPHLYPPEELIYFLDRSSKTSPDISHQQAAALLRTYLKNLSPYINSTPPIFGPLTTQTTIPVAAPLCISWQRPTGIPLGNLSPSRCSFTLHLRSPTTNINETIGAFQLHITDKPSINTDKLKNISSNYCLGRHLPCISLHPWLSSPCSSDSPPRPSSCLLIPSPENNSERLLVDTRRFLIHHENRTFPSTQLPHQSPLQPLTAAALAGSLGVWVQDTPFSTPSHLFTLHLQFCLAQGLFFLCGSSTYMCLPANWTGTCTLVFLTPKIQFANGTEELPVPLMTPTQQKRVIPLIPLMVGLGLSASTVALGTGIAGISTSVMTFRSLSNDFSASITDISQTLSVLQAQVDSLAAVVLQNRRGLDLLTAEKGGLCIFLNEECCFYLNQSGLVYDNIKKLKDRAQKLANQASNYAEPPWALSNWMSWV

SEQ ID NO: 2407 - protein, 632 aa, synthetic construct
  REGION 1..632: note = HERVK_113 (Q902F9) SP+PP+ECD
MNPSEMQRKAPPRRRRHRNRAPLTHKMNKMVTSEEQMKLPSTKKAEPPTWAQLKKLTQLATKYLENTKVTQTPESMLLAALMIVSMVVSLPMPAGAAAANYTYWAYVPFPPLIRAVTWMDNPIEIYVNDSVWVPGPTDDCCPAKPEEEGMMINISIGYRYPPICLGRAPGCLMPAVQNWLVEVPTVSPISRFTYHMVSGMSLRPRVNYLQDFSYQRSLKFRPKGKPCPKEIPKESKNTEVLVWEECVANSAVILQNNEFGTLIDWAPRGQFYHNCSGQTQSCPSAQVSPAVDSDLTESLDKHKHKKLQSFYPWEWGEKGISTARPKIISPVSGPEHPELWRLTVASHHIRIWSGNQTLETRDRKPFYTIDLNSSLTVPLQSCVKPPYMLVVGNIVIKPDSQTITCENCRLLTCIDSTFNWQHRILLVRAREGVWIPVSMDRPWEASPSVHILTEVLKGVLNRSKRFIFTLIAVIMGLIAVTATAAVAGVALHSSVQSVNFVNDWQNNSTRLWNSQSSIDQKLANQINDLRQTVIWMGDRLMSLEHRFQLQCDWNTSDFCITPQIYNESEHHWDMVRCHLQGREDNLTLDISKLKEQIFEASKAHLNLVPGTEAIAGVADGLANLNTVTWVKT

SEQ ID NO: 2408 - protein, 306 aa, synthetic construct
  REGION 1..306: note = HFE (Q30201) SP+PP+ECD
MGPRARPALLLLMLLQTAVLQGRLLRSHSLHYLFMGASEQDLGLSLFEALGYVDDQLFVFYDHESRRVEPRTPWVSSRISSQMWLQLSQSLKGWDHMFTVDFWTIMENHNHSKESHTLQVILGCEMQEDNSTEGYWKYGYDGQDHLEFCPDTLDWRAAEPRAWPTKLEWERHKIRARQNRAYLERDCPAQLQQLLELGRGVLDQQVPPLVKVTHHVTSSVTTLRCRALNYYPQNITMKWLKDKQPMDAKEFEPKDVLPNGDGTYQGWITLAVPPGEEQRYTCQVEHPGLDQPLIVIWEPSPSGTLV

SEQ ID NO: 2409 - protein, 344 aa, synthetic construct
  REGION 1..344: note = HHLA2 (Q9UM44) SP+PP+ECD
MKAQTALSFFLILITSLSGSQGIFPLAFFIYVPMNEQIVIGRLDEDIILPSSFERGSEVVIHWKYQDSYKVHSYYKGSDHLESQDPRYANRTSLFYNEIQNGNASLFFRRVSLLDEGIYTCYVGTAIQVITNKVVLKVGVFLTPVMKYEKRNTNSFLICSVLSVYPRPIITWKMDNTPISENNMEETGSLDSFSINSPLNITGSNSSYECTIENSLLKQTWTGRWTMKDGLHKMQSEHVSLSCQPVNDYFSPNQDFKVTWSRMKSGTFSVLAYYLSSSQNTIINESRFSWNKELINQSDFSMNLMDLNLSDSGEYLCNISSDEYTLLTIHTVHVEPSQETASHN

SEQ ID NO: 2410 - protein, 117 aa, synthetic construct
  REGION 1..117: note = HIDE1 (A8MVS5) SP+PP+ECD
MPWTILLFAAGSLAIPAPSIRLVPPYPSSQEDPIHIACMAPGNFPGANFTLYRGGQVVQLLQAPTDQRGVTFNLSGGSSKAPGGPFHCQYGVLGELNQSQLSDLSEPVNVSFPVPTW

SEQ ID NO: 2411 - protein, 308 aa, synthetic construct
  REGION 1..308: note = HLA-A (P01891) SP+PP+ECD
MAVMAPRTLLLLLSGALALTQTWAGSHSMRYFFTSVSRPGRGEPRFIAVGYVDDTQFVRFDSDAASQRMEPRAPWIEQEGPEYWDQETRNVKAQSQTDRVDLGTLRGYYNQSEAGSHTIQIMYGCDVGSDGRFLRGYRQDAYDGKDYIALNEDLRSWTAADMAAQITKRKWEAAHEAEQLRAYLDGTCVEWLRRYLENGKETLQRTDPPKTHMTHHPISDHEATLRCWALGFYPAEITLTWQRDGEDQTQDTELVETRPAGDGTFQKWAAVVVPSGEEQRYTCHVQHEGLPKPLTLRWELSSQPTIPI

SEQ ID NO: 2412 - protein, 308 aa, synthetic construct; identical to SEQ ID NO: 2411
  REGION 1..308: note = HLA-A (P01892) SP+PP+ECD

SEQ ID NO: 2413 - protein, 308 aa, synthetic construct; identical to SEQ ID NO: 2411
  REGION 1..308: note = HLA-A (P04439) SP+PP+ECD

SEQ ID NO: 2414 - protein, 308 aa, synthetic construct; identical to SEQ ID NO: 2411
  REGION 1..308: note = HLA-A (P05534) SP+PP+ECD

SEQ ID NO: 2415 - protein, 308 aa, synthetic construct; identical to SEQ ID NO: 2411
  REGION 1..308: note = HLA-A (P10314) SP+PP+ECD

SEQ ID NO: 2416 - protein, 308 aa, synthetic construct; identical to SEQ ID NO: 2411
  REGION 1..308: note = HLA-A (P10316) SP+PP+ECD

SEQ ID NO: 2417 - protein, 308 aa, synthetic construct; identical to SEQ ID NO: 2411
  REGION 1..308: note = HLA-A (P13746) SP+PP+ECD

SEQ ID NO: 2418 - protein, 308 aa, synthetic construct; identical to SEQ ID NO: 2411
  REGION 1..308: note = HLA-A (P16188) SP+PP+ECD

SEQ ID NO: 2419 - protein, 308 aa, synthetic construct; identical to SEQ ID NO: 2411
  REGION 1..308: note = HLA-A (P16189) SP+PP+ECD

SEQ ID NO: 2420 - protein, 308 aa, synthetic construct; identical to SEQ ID NO: 2411
  REGION 1..308: note = HLA-A (P16190) SP+PP+ECD

SEQ ID NO: 2421 - protein, 308 aa, synthetic construct; identical to SEQ ID NO: 2411
  REGION 1..308: note = HLA-A (P18462) SP+PP+ECD

SEQ ID NO: 2422 - protein, 308 aa, synthetic construct; identical to SEQ ID NO: 2411
  REGION 1..308: note = HLA-A (P30443) SP+PP+ECD

SEQ ID NO: 2423 - protein, 308 aa, synthetic construct; identical to SEQ ID NO: 2411
  REGION 1..308: note = HLA-A (P30447) SP+PP+ECD

SEQ ID NO: 2424 - protein, 308 aa, synthetic construct; identical to SEQ ID NO: 2411
  REGION 1..308: note = HLA-A (P30450) SP+PP+ECD

SEQ ID NO: 2425 - protein, 308 aa, synthetic construct; identical to SEQ ID NO: 2411
  REGION 1..308: note = HLA-A (P30453) SP+PP+ECD

SEQ ID NO: 2426 - protein, 308 aa, synthetic construct; identical to SEQ ID NO: 2411
  REGION 1..308: note = HLA-A (P30455) SP+PP+ECD

SEQ ID NO: 2427 - protein, 308 aa, synthetic construct; identical to SEQ ID NO: 2411
  REGION 1..308: note = HLA-A (P30456) SP+PP+ECD

SEQ ID NO: 2428 - protein, 308 aa, synthetic construct; identical to SEQ ID NO: 2411
  REGION 1..308: note = HLA-A (P30457) SP+PP+ECD

SEQ ID NO: 2429 - protein, 308 aa, synthetic construct; identical to SEQ ID NO: 2411
  REGION 1..308: note = HLA-A (P30459) SP+PP+ECD

SEQ ID NO: 2430 - protein, 308 aa, synthetic construct; identical to SEQ ID NO: 2411
  REGION 1..308: note = HLA-A (P30512) SP+PP+ECD

SEQ ID NO: 2431 - protein, 308 aa, synthetic construct; identical to SEQ ID NO: 2411
  REGION 1..308: note = HLA-A (Q09160) SP+PP+ECD

SEQ ID NO: 2432 - protein, 309 aa, synthetic construct
  REGION 1..309: note = HLA-B (P01889) SP+PP+ECD
MLVMAPRTVLLLLSAALALTETWAGSHSMRYFYTSVSRPGRGEPRFISVGYVDDTQFVRFDSDAASPREEPRAPWIEQEGPEYWDRNTQIYKAQAQTDRESLRNLRGYYNQSEAGSHTLQSMYGCDVGPDGRLLRGHDQYAYDGKDYIALNEDLRSWTAADTAAQITQRKWEAAREAEQRRAYLEGECVEWLRRYLENGKDKLERADPPKTHVTHHPISDHEATLRCWALGFYPAEITLTWQRDGEDQTQDTELVETRPAGDRTFQKWAAVVVPSGEEQRYTCHVQHEGLPKPLTLRWEPSSQSTVPIV

SEQ ID NO: 2433 - protein, 309 aa, synthetic construct; identical to SEQ ID NO: 2432
  REGION 1..309: note = HLA-B (P03989) SP+PP+ECD

SEQ ID NO: 2434 - protein, 309 aa, synthetic construct; identical to SEQ ID NO: 2432
  REGION 1..309: note = HLA-B (P10319) SP+PP+ECD

SEQ ID NO: 2435 - protein, 309 aa, synthetic construct; identical to SEQ ID NO: 2432
  REGION 1..309: note = HLA-B (P18463) SP+PP+ECD

SEQ ID NO: 2436 - protein, 309 aa, synthetic construct; identical to SEQ ID NO: 2432
  REGION 1..309: note = HLA-B (P18464) SP+PP+ECD

SEQ ID NO: 2437 - protein, 309 aa, synthetic construct; identical to SEQ ID NO: 2432
  REGION 1..309: note = HLA-B (P18465) SP+PP+ECD

SEQ ID NO: 2438 - protein, 309 aa, synthetic construct; identical to SEQ ID NO: 2432
  REGION 1..309: note = HLA-B (P30460) SP+PP+ECD

SEQ ID NO: 2439 - protein, 309 aa, synthetic construct; identical to SEQ ID NO: 2432
  REGION 1..309: note = HLA-B (P30461) SP+PP+ECD

SEQ ID NO: 2440 - protein, 309 aa, synthetic construct; identical to SEQ ID NO: 2432
  REGION 1..309: note = HLA-B (P30462) SP+PP+ECD

SEQ ID NO: 2441 - protein, 309 aa, synthetic construct; identical to SEQ ID NO: 2432
  REGION 1..309: note = HLA-B (P30464) SP+PP+ECD

SEQ ID NO: 2442 - protein, 309 aa, synthetic construct; identical to SEQ ID NO: 2432
  REGION 1..309: note = HLA-B (P30466) SP+PP+ECD

SEQ ID NO: 2443 - protein, 309 aa, synthetic construct; identical to SEQ ID NO: 2432
  REGION 1..309: note = HLA-B (P30475) SP+PP+ECD

SEQ ID NO: 2444 - protein, 309 aa, synthetic construct; identical to SEQ ID NO: 2432
  REGION 1..309: note = HLA-B (P30479) SP+PP+ECD

SEQ ID NO: 2445 - protein, 309 aa, synthetic construct; identical to SEQ ID NO: 2432
  REGION 1..309: note = HLA-B (P30480) SP+PP+ECD

SEQ ID NO: 2446 - protein, 309 aa, synthetic construct; identical to SEQ ID NO: 2432
  REGION 1..309: note = HLA-B (P30481) SP+PP+ECD

SEQ ID NO: 2447 - protein, 309 aa, synthetic construct; identical to SEQ ID NO: 2432
  REGION 1..309: note = HLA-B (P30483) SP+PP+ECD

SEQ ID NO: 2448 - protein, 309 aa, synthetic construct; identical to SEQ ID NO: 2432
  REGION 1..309: note = HLA-B (P30484) SP+PP+ECD

SEQ ID NO: 2449 - protein, 309 aa, synthetic construct; identical to SEQ ID NO: 2432
  REGION 1..309: note = HLA-B (P30485) SP+PP+ECD

SEQ ID NO: 2450 - protein, 309 aa, synthetic construct; identical to SEQ ID NO: 2432
  REGION 1..309: note = HLA-B (P30486) SP+PP+ECD

SEQ ID NO: 2451 - protein, 309 aa, synthetic construct; identical to SEQ ID NO: 2432
  REGION 1..309: note = HLA-B (P30487) SP+PP+ECD

SEQ ID NO: 2452 - protein, 309 aa, synthetic construct; identical to SEQ ID NO: 2432
  REGION 1..309: note = HLA-B (P30488) SP+PP+ECD

SEQ ID NO: 2453 - protein, 309 aa, synthetic construct; identical to SEQ ID NO: 2432
  REGION 1..309: note = HLA-B (P30490) SP+PP+ECD

SEQ ID NO: 2454 - protein, 309 aa, synthetic construct; identical to SEQ ID NO: 2432
  REGION 1..309: note = HLA-B (P30491) SP+PP+ECD

SEQ ID NO: 2455 - protein, 309 aa, synthetic construct; identical to SEQ ID NO: 2432
  REGION 1..309: note = HLA-B (P30492) SP+PP+ECD

SEQ ID NO: 2456 - protein, 309 aa, synthetic construct; identical to SEQ ID NO: 2432
  REGION 1..309: note = HLA-B (P30493) SP+PP+ECD

SEQ ID NO: 2457 - protein, 309 aa, synthetic construct; identical to SEQ ID NO: 2432
  REGION 1..309: note = HLA-B (P30495) SP+PP+ECD

SEQ ID NO: 2458 - protein, 309 aa, synthetic construct; identical to SEQ ID NO: 2432
  REGION 1..309: note = HLA-B (P30498) SP+PP+ECD

SEQ ID NO: 2459 - protein, 309 aa, synthetic construct; identical to SEQ ID NO: 2432
  REGION 1..309: note = HLA-B (P30685) SP+PP+ECD

SEQ ID NO: 2460 - protein, 309 aa, synthetic construct; identical to SEQ ID NO: 2432
  REGION 1..309: note = HLA-B (Q04826) SP+PP+ECD

SEQ ID NO: 2461 - protein, 309 aa, synthetic construct; identical to SEQ ID NO: 2432
  REGION 1..309: note = HLA-B (Q29718) SP+PP+ECD

SEQ ID NO: 2462 - protein, 309 aa, synthetic construct; identical to SEQ ID NO: 2432
  REGION 1..309: note = HLA-B (Q29836) SP+PP+ECD

SEQ ID NO: 2463 - protein, 309 aa, synthetic construct; identical to SEQ ID NO: 2432
  REGION 1..309: note = HLA-B (Q29940) SP+PP+ECD

SEQ ID NO: 2464 - protein, 309 aa, synthetic construct; identical to SEQ ID NO: 2432
  REGION 1..309: note = HLA-B (Q31610) SP+PP+ECD

SEQ ID NO: 2465 - protein, 309 aa, synthetic construct; identical to SEQ ID NO: 2432
  REGION 1..309: note = HLA-B (Q31612) SP+PP+ECD

SEQ ID NO: 2466 - protein, 309 aa, synthetic construct; identical to SEQ ID NO: 2432
  REGION 1..309: note = HLA-B (Q95365) SP+PP+ECD

SEQ ID NO: 2467 - protein, 308 aa, synthetic construct
  REGION 1..308: note = HLA-C (P04222) SP+PP+ECD
MRVMAPRALLLLLSGGLALTETWACSHSMRYFDTAVSRPGRGEPRFISVGYVDDTQFVRFDSDAASPRGEPRAPWVEQEGPEYWDRETQKYKRQAQADRVSLRNLRGYYNQSEDGSHTLQRMSGCDLGPDGRLLRGYDQSAYDGKDYIALNEDLRSWTAADTAAQITQRKLEAARAAEQLRAYLEGTCVEWLRRYLENGKETLQRAEPPKTHVTHHPLSDHEATLRCWALGFYPAEITLTWQRDGEDQTQDTELVETRPAGDGTFQKWAAVVVPSGQEQRYTCHMQHEGLQEPLTLSWEPSSQPTIPI

SEQ ID NO: 2468 - protein, 308 aa, synthetic construct; identical to SEQ ID NO: 2467
  REGION 1..308: note = HLA-C (P10321) SP+PP+ECD

SEQ ID NO: 2469 - protein, 308 aa, synthetic construct; identical to SEQ ID NO: 2467
  REGION 1..308: note = HLA-C (P30499) SP+PP+ECD

SEQ ID NO: 2470 - protein, 308 aa, synthetic construct; identical to SEQ ID NO: 2467
  REGION 1..308: note = HLA-C (P30501) SP+PP+ECD

SEQ ID NO: 2471 - protein, 308 aa, synthetic construct; identical to SEQ ID NO: 2467
  REGION 1..308: note = HLA-C (P30504) SP+PP+ECD

SEQ ID NO: 2472 - protein, 308 aa, synthetic construct; identical to SEQ ID NO: 2467
  REGION 1..308: note = HLA-C (P30505) SP+PP+ECD

SEQ ID NO: 2473 - protein, 308 aa, synthetic construct; identical to SEQ ID NO: 2467
  REGION 1..308: note = HLA-C (P30508) SP+PP+ECD

SEQ ID NO: 2474 - protein, 308 aa, synthetic construct; identical to SEQ ID NO: 2467
  REGION 1..308: note = HLA-C (P30510) SP+PP+ECD

SEQ ID NO: 2475 - protein, 308 aa, synthetic construct; identical to SEQ ID NO: 2467
  REGION 1..308: note = HLA-C (Q07000) SP+PP+ECD

SEQ ID NO: 2476 - protein, 308 aa, synthetic construct; identical to SEQ ID NO: 2467
  REGION 1..308: note = HLA-C (Q29865) SP+PP+ECD

SEQ ID NO: 2477 - protein, 308 aa, synthetic construct; identical to SEQ ID NO: 2467
  REGION 1..308: note = HLA-C (Q29960) SP+PP+ECD

SEQ ID NO: 2478 - protein, 308 aa, synthetic construct; identical to SEQ ID NO: 2467
  REGION 1..308: note = HLA-C (Q29963) SP+PP+ECD

SEQ ID NO: 2479 - protein, 308 aa, synthetic construct; identical to SEQ ID NO: 2467
  REGION 1..308: note = HLA-C (Q95604) SP+PP+ECD

SEQ ID NO: 2480 - protein, 308 aa, synthetic construct; identical to SEQ ID NO: 2467
  REGION 1..308: note = HLA-C (Q9TNN7) SP+PP+ECD

SEQ ID NO: 2481 - protein, 233 aa, synthetic construct
  REGION 1..233: note = HLA-DMA (P28067) SP+PP+ECD
MGHEQNQGAALLQMLPLLWLLPHSWAVPEAPTPMWPDDLQNHTFLHTVYCQDGSPSVGLSEAYDEDQLFFFDFSQNTRVPRLPEFADWAQEQGDAPAILFDKEFCEWMIQQIGPKLDGKIPVSRGFPIAEVFTLKPLEFGKPNTLVCFVSNLFPPMLTVNWHDHSVPVEGFGPTFVSAVDGLSFQAFSYLNFTPEPSDIFSCIVTHEIDRYTAIAYWVPRNALPSDLLENVLC

SEQ ID NO: 2482 - protein, 218 aa, synthetic construct
  REGION 1..218: note = HLA-DMB (P28068) SP+PP+ECD
MITFLPLLLGLSLGCTGAGGFVAHVESTCLLDDAGTPKDFTYCISFNKDLLTCWDPEENKMAPCEFGVLNSLANVLSQHLNQKDTLMQRLRNGLQNCATHTQPFWGSLTNRTRPPSVQVAKTTPFNTREPVMLACYVWGFYPAEVTITWRKNGKLVMPHSSAHKTAQPNGDWTYQTLSHLALTPSYGDTYTCVVEHIGAPEPILRDWTPGLSPMQTLK

SEQ ID NO: 2483 - protein, 217 aa, synthetic construct
  REGION 1..217: note = HLA-DOA (P06340) SP+PP+ECD
MALRAGLVLGFHTLMTLLSPQEAGATKADHMGSYGPAFYQSYGASGQFTHEFDEEQLFSVDLKKSEAVWRLPEFGDFARFDPQGGLAGIAAIKAHLDILVERSNRSRAINVPPRVTVLPKSRVELGQPNILICIVDNIFPPVINITWLRNGQTVTEGVAQTSFYSQPDHLFRKFHYLPFVPSAEDVYDCQVEHWGLDAPLLRHWELQVPIPPPDAME

SEQ ID NO: 2484 - protein, 224 aa, synthetic construct
  REGION 1..224: note = HLA-DOB (P13765) SP+PP+ECD
MGSGWVPWVVALLVNLTRLDSSMTQGTDSPEDFVIQAKADCYFTNGTEKVQFVVRFIFNLEEYVRFDSDVGMFVALTKLGQPDAEQWNSRLDLLERSRQAVDGVCRHNYRLGAPFTVGRKVQPEVTVYPERTPLLHQHNLLHCSVTGFYPGDIKIKWFLNGQEERAGVMSTGPIRNGDWTFQTVVMLEMTPELGHVYTCLVDHSSLLSPVSVEWRAQSEYSWRK

SEQ ID NO: 2485 - protein, 222 aa, synthetic construct
  REGION 1..222: note = HLA-DPA1 (P20036) SP+PP+ECD
MRPEDRMFHIRAVILRALSLAFLLSLRGAGAIKADHVSTYAAFVQTHRPTGEFMFEFDEDEMFYVDLDKKETVWHLEEFGQAFSFEAQGGLANIAILNNNLNTLIQRSNHTQATNDPPEVTVFPKEPVELGQPNTLICHIDKFFPPVLNVTWLCNGELVTEGVAESLFLPRTDYSFHKFHYLTFVPSAEDFYDCRVEHWGLDQPLLKHWEAQEPIQMPETTE

SEQ ID NO: 2486 - protein, 225 aa, synthetic construct
  REGION 1..225: note = HLA-DPB1 (P04440) SP+PP+ECD
MMVLQVSAAPRTVALTALLMVLLTSVVQGRATPENYLFQGRQECYAFNGTQRFLERYIYNREEFARFDSDVGEFRAVTELGRPAAEYWNSQKDILEEKRAVPDRMCRHNYELGGPMTLQRRVQPRVNVSPSKKGPLQHHNLLVCHVTDFYPGSIQVRWFLNGQEETAGVVSTNLIRNGDWTFQILVMLEMTPQQGDVYTCQVEHTSLDSPVTVEWKAQSDSARSK

SEQ ID NO: 2487 - protein, 216 aa, synthetic construct
  REGION 1..216: note = HLA-DQA1 (P01909) SP+PP+ECD
MILNKALMLGALALTTVMSPCGGEDIVADHVASYGVNLYQSYGPSGQYTHEFDGDEQFYVDLGRKETVWCLPVLRQFRFDPQFALTNIAVLKHNLNSLIKRSNSTAATNEVPEVTVFSKSPVTLGQPNILICLVDNIFPPVVNITWLSNGHSVTEGVSETSFLSKSDHSFFKISYLTLLPSAEESYDCKVEHWGLDKPLLKHWEPEIPAPMSELTE

SEQ ID NO: 2488 - protein, 217 aa, synthetic construct
  REGION 1..217: note = HLA-DQA2 (P01906) SP+PP+ECD
MILNKALLLGALALTAVMSPCGGEDIVADHVASYGVNFYQSHGPSGQYTHEFDGDEEFYVDLETKETVWQLPMFSKFISFDPQSALRNMAVGKHTLEFMMRQSNSTAATNEVPEVTVFSKFPVTLGQPNTLICLVDNIFPPVVNITWLSNGHSVTEGVSETSFLSKSDHSFFKISYLTFLPSADEIYDCKVEHWGLDEPLLKHWEPEIPAPMSELTE

SEQ ID NO: 2489 - protein, 230 aa, synthetic construct
  REGION 1..230: note = HLA-DQB1 (P01920) SP+PP+ECD
MSWKKALRIPGGLRAATVTLMLAMLSTPVAEGRDSPEDFVYQFKAMCYFTNGTERVRYVTRYIYNREEYARFDSDVEVYRAVTPLGPPDAEYWNSQKEVLERTRAELDTVCRHNYQLELRTTLQRRVEPTVTISPSRTEALNHHNLLVCSVTDFYPAQIKVRWFRNDQEETTGVVSTPLIRNGDWTFQILVMLEMTPQHGDVYTCHVEHPSLQNPITVEWRAQSESAQSK

SEQ ID NO: 2490 - protein, 229 aa, synthetic construct
  REGION 1..229: note = HLA-DQB2 (P05538) SP+PP+ECD
MSWKMALQIPGGFWAAAVTVMLVMLSTPVAEARDFPKDFLVQFKGMCYFTNGTERVRGVARYIYNREEYGRFDSDVGEFQAVTELGRSIEDWNNYKDFLEQERAAVDKVCRHNYEAELRTTLQRQVEPTVTISPSRTEALNHHNLLVCSVTDFYPAQIKVRWFRNDQEETAGVVSTSLIRNGDWTFQILVMLEITPQRGDIYTCQVEHPSLQSPITVEWRAQSESAQSK

SEQ ID NO: 2491 - protein, 216 aa, synthetic construct
  REGION 1..216: note = HLA-DRA (P01903) SP+PP+ECD
MAISGVPVLGFFIIAVLMSAQESWAIKEEHVIIQAEFYLNPDQSGEFMFDFDGDEIFHVDMAKKETVWRLEEFGRFASFEAQGALANIAVDKANLEIMTKRSNYTPITNVPPEVTVLTNSPVELREPNVLICFIDKFTPPVVNVTWLRNGKPVTTGVSETVFLPREDHLFRKFHYLPFLPSTEDVYDCRVEHWGLDEPLLKHWEFDAPSPLPETTE

SEQ ID NO: 2492 - protein, 227 aa, synthetic construct
  REGION 1..227: note = HLA-DRB1 (P01911) SP+PP+ECD
MVCLKLPGGSCMTALTVTLMVLSSPLALSGDTRPRFLWQPKRECHFFNGTERVRFLDRYFYNQEESVRFDSDVGEFRAVTELGRPDAEYWNSQKDILEQARAAVDTYCRHNYGVVESFTVQRRVQPKVTVYPSKTQPLQHHNLLVCSVSGFYPGSIEVRWFLNGQEEKAGMVSTGLIQNGDWTFQTLVMLETVPRSGEVYTCQVEHPSVTSPLTVEWRARSESAQSK

SEQ ID NO: 2493 - protein, 227 aa, synthetic construct
  REGION 1..227: note = HLA-DRB3 (P79483) SP+PP+ECD
MVCLKLPGGSSLAALTVTLMVLSSRLAFAGDTRPRFLELRKSECHFFNGTERVRYLDRYFHNQEEFLRFDSDVGEYRAVTELGRPVAESWNSQKDLLEQKRGRVDNYCRHNYGVGESFTVQRRVHPQVTVYPAKTQPLQHHNLLVCSVSGFYPGSIEVRWFRNGQEEKAGVVSTGLIQNGDWTFQTLVMLETVPRSGEVYTCQVEHPSVTSALTVEWRARSESAQSK

SEQ ID NO: 2494 - protein, 227 aa, synthetic construct
  REGION 1..227: note = HLA-DRB4 (P13762) SP+PP+ECD
MVCLKLPGGSCMAALTVTLTVLSSPLALAGDTQPRFLEQAKCECHFLNGTERVWNLIRYIYNQEEYARYNSDLGEYQAVTELGRPDAEYWNSQKDLLERRRAEVDTYCRYNYGVVESFTVQRRVQPKVTVYPSKTQPLQHHNLLVCSVNGFYPGSIEVRWFRNGQEEKAGVVSTGLIQNGDWTFQTLVMLETVPRSGEVYTCQVEHPSMMSPLTVQWSARSESAQSK

SEQ ID NO: 2495 - protein, 227 aa, synthetic construct
  REGION 1..227: note = HLA-DRB5 (Q30154) SP+PP+ECD
MVCLKLPGGSYMAKLTVTLMVLSSPLALAGDTRPRFLQQDKYECHFFNGTERVRFLHRDIYNQEEDLRFDSDVGEYRAVTELGRPDAEYWNSQKDFLEDRRAAVDTYCRHNYGVGESFTVQRRVEPKVTVYPARTQTLQHHNLLVCSVNGFYPGSIEVRWFRNSQEEKAGVVSTGLIQNGDWTFQTLVMLETVPRSGEVYTCQVEHPSVTSPLTVEWRAQSESAQSK

SEQ ID NO: 2496 - protein, 305 aa, synthetic construct
  REGION 1..305: note = HLA-E (P13747) SP+PP+ECD
MVDGTLLLLLSEALALTQTWAGSHSLKYFHTSVSRPGRGEPRFISVGYVDDTQFVRFDNDAASPRMVPRAPWMEQEGSEYWDRETRSARDTAQIFRVNLRTLRGYYNQSEAGSHTLQWMHGCELGPDGRFLRGYEQFAYDGKDYLTLNEDLRSWTAVDTAAQISEQKSNDASEAEHQRAYLEDTCVEWLHKYLEKGKETLLHLEPPKTHVTHHPISDHEATLRCWALGFYPAEITLTWQQDGEGHTQDTELVETRPAGDGTFQKWAAVVVPSGEEQRYTCHVQHEGLPEPVTLRWKPASQPTIPI

SEQ ID NO: 2497 - protein, 305 aa, synthetic construct
  REGION 1..305: note = HLA-F (P30511) SP+PP+ECD
MAPRSLLLLLSGALALTDTWAGSHSLRYFSTAVSRPGRGEPRYIAVEYVDDTQFLRFDSDAAIPRMEPREPWVEQEGPQYWEWTTGYAKANAQTDRVALRNLLRRYNQSEAGSHTLQGMNGCDMGPDGRLLRGYHQHAYDGKDYISLNEDLRSWTAADTVAQITQRFYEAEEYAEEFRTYLEGECLELLRRYLENGKETLQRADPPKAHVAHHPISDHEATLRCWALGFYPAEITLTWQRDGEEQTQDTELVETRPAGDGTFQKWAAVVVPPGEEQRYTCHVQHEGLPQPLILRWEQSPQPTIPI

SEQ ID NO: 2498 - protein, 308 aa, synthetic construct
  REGION 1..308: note = HLA-G (P17693) SP+PP+ECD
MVVMAPRTLFLLLSGALTLTETWAGSHSMRYFSAAVSRPGRGEPRFIAMGYVDDTQFVRFDSDSACPRMEPRAPWVEQEGPEYWEEETRNTKAHAQTDRMNLQTLRGYYNQSEASSHTLQWMIGCDLGSDGRLLRGYEQYAYDGKDYLALNEDLRSWTAADTAAQISKRKCEAANVAEQRRAYLEGTCVEWLHRYLENGKEMLQRADPPKTHVTHHPVFDYEATLRCWALGFYPAEIILTWQRDGEDQTQDVELVETRPAGDGTFQKWAAVVVPSGEEQRYTCHVQHEGLPEPLMLRWKQSSLPTIPI

SEQ ID NO: 2499 - protein, 308 aa, synthetic construct
  REGION 1..308: note = HLA-H (P01893) SP+PP+ECD
MVLMAPRTLLLLLSGALALTQTWARSHSMRYFYTTMSRPGAGEPRFISVGYVDDTQFVRFDSDDASPREEPRAPWMEREGPKYWDRNTQICKAQAQTERENLRIALRYYNQSEGGSHTMQVMYGCDVGPDGPFLRGYEQHAYDGKDYIALNEDLRSWTAADMAAQITKRKWEAARRAEQRRVYLEGEFVEWLRRYLENGKETLQRADPPKTHMTHHPISDHEATLRCWALGFYPAEITLTWQRDGEDQTQDTELVETRPAGDGTFQKWAAVVVPSGEEQRYTCHVQHEGLPEPLTLRWEPSSQPTVPI

SEQ ID NO: 2500 - protein, 480 aa, synthetic construct
  REGION 1..480: note = ICAM1 (P05362) SP+PP+ECD
MAPSSPRPALPALLVLLGALFPGPGNAQTSVSPSKVILPRGGSVLVTCSTSCDQPKLLGIETPLPKKELLLPGNNRKVYELSNVQEDSQPMCYSNCPDGQSTAKTFLTVYWTPERVELAPLPSWQPVGKNLTLRCQVEGGAPRANLTVVLLRGEKELKREPAVGEPAEVTTTVLVRRDHHGANFSCRTELDLRPQGLELFENTSAPYQLQTFVLPATPPQLVSPRVLEVDTQGTVVCSLDGLFPVSEAQVHLALGDQRLNPTVTYGNDSFSAKASVSVTAEDEGTQRLTCAVILGNQSQETLQTVTIYSFPAPNVILTKPEVSEGTEVTVKCEAHPRAKVTLNGVPAQPLGPRAQLLLKATPEDNGRSFSCSATLEVAGQLIHKNQTRELRVLYGPRLDERDCPGNWTWPENSQQTPMCQAWGNPLPELKCLKDGTFPLPIGESVTVTRDLEGTYLCRARSTQGEVTRKVTVNVLSPRYE

SEQ ID NO: 2501 - protein, 223 aa, synthetic construct
  REGION 1..223: note = ICAM2 (P13598) SP+PP+ECD
MSSFGYRTLTVALFTLICCPGSDEKVFEVHVRPKKLAVEPKGSLEVNCSTTCNQPEVGGLETSLDKILLDEQAQWKHYLVSNISHDTVLQCHFTCSGKQESMNSNVSVYQPPRQVILTLQPTLVAVGKSFTIECRVPTVEPLDSLTLFLFRGNETLHYETFGKAAPAPQEATATFNSTADREDGHRNFSCLAVLDLMSRGGNIFHKHSAPKMLEIYEPVSDSQ

SEQ ID NO: 2502 - protein, 485 aa, synthetic construct
  REGION 1..485: note = ICAM3 (P32942) SP+PP+ECD
MATMVPSVLWPRACWTLLVCCLLTPGVQGQEFLLRVEPQNPVLSAGGSLFVNCSTDCPSSEKIALETSLSKELVASGMGWAAFNLSNVTGNSRILCSVYCNGSQITGSSNITVYRLPERVELAPLPPWQPVGQNFTLRCQVEDGSPRTSLTVVLLRWEEELSRQPAVEEPAEVTATVLASRDDHGAPFSCRTELDMQPQGLGLFVNTSAPRQLRTFVLPVTPPRLVAPRFLEVETSWPVDCTLDGLFPASEAQVYLALGDQMLNATVMNHGDTLTATATATARADQEGAREIVCNVTLGGERREARENLTVFSFLGPIVNLSEPTAHEGSTVTVSCMAGARVQVTLDGVPAAAPGQPAQLQLNATESDDGRSFFCSATLEVDGEFLHRNSSVQLRVLYGPKIDRATCPQHLKWKDKTRHVLQCQARGNPYPELRCLKEGSSREVPVGIPFFVNVTHNGTYQCQASSSRGKYTLVVVMDIEAGSSH

SEQ ID NO: 2503 - protein, 240 aa, synthetic construct
  REGION 1..240: note = ICAM4 (Q14773) SP+PP+ECD
MGSLFPLSLLFFLAAAYPGVGSALGRRTKRAQSPKGSPLAPSGTSVPFWVRMSPEFVAVQPGKSVQLNCSNSCPQPQNSSLRTPLRQGKTLRGPGWVSYQLLDVRAWSSLAHCLVTCAGKTRWATSRITAYKPPHSVILEPPVLKGRKYTLRCHVTQVFPVGYLVVTLRHGSRVIYSESLERFTGLDLANVTLTYEFAAGPRDFWQPVICHARLNLDGLVVRNSSAPITLMLAWSPAPTA

SEQ ID NO: 2504 - protein, 835 aa, synthetic construct
  REGION 1..835: note = ICAM5 (Q9UMF0) SP+PP+ECD
MPGPSPGLRRALLGLWAALGLGLFGLSAVSQEPFWADLQPRVAFVERGGSLWLNCSTNCPRPERGGLETSLRRNGTQRGLRWLARQLVDIREPETQPVCFFRCARRTLQARGLIRTFQRPDRVELMPLPPWQPVGENFTLSCRVPGAGPRASLTLTLLRGAQELIRRSFAGEPPRARGAVLTATVLARREDHGANFSCRAELDLRPHGLGLFENSSAPRELRTFSLSPDAPRLAAPRLLEVGSERPVSCTLDGLFPASEARVYLALGDQNLSPDVTLEGDAFVATATATASAEQEGARQLVCNVTLGGENRETRENVTIYSFPAPLLTLSEPSVSEGQMVTVTCAAGAQALVTLEGVPAAVPGQPAQLQLNATENDDRRSFFCDATLDVDGETLIKNRSAELRVLYAPRLDDSDCPRSWTWPEGPEQTLRCEARGNPEPSVHCARSDGGAVLALGLLGPVTRALSGTYRCKAANDQGEAVKDVTLTVEYAPALDSVGCPERITWLEGTEASLSCVAHGVPPPDVICVRSGELGAVIEGLLRVAREHAGTYRCEATNPRGSAAKNVAVTVEYGPRFEEPSCPSNWTWVEGSGRLFSCEVDGKPQPSVKCVGSGGATEGVLLPLAPPDPSPRAPRIPRVLAPGIYVCNATNRHGSVAKTVVVSAESPPEMDESTCPSHQTWLEGAEASALACAARGRPSPGVRCSREGIPWPEQQRVSREDAGTYHCVATNAHGTDSRTVTVGVEYRPVVAELAASPPGGVRPGGNFTLTCRAEAWPPAQISWRAPPGALNIGLSSNNSTLSVAGAMGSHGGEYECAATNAHGRHARRITVRVAGPW

SEQ ID NO: 2505 - protein, 140 aa, synthetic construct
  REGION 1..140: note = ICOS (Q9Y6W8) SP+PP+ECD
MKSGLWYFFLFCLRIKVLTGEINGSANYEMFIFHNGGVQILCKYPDIVQQFKMQLLKGGQILCDLTKTKGSGNTVSIKSLKFCHSQLSNNSVSFFLYNLDHSHANYYFCNLSIFDPPPFKVTLTGGYLHIYESQLCCQLK

SEQ ID NO: 2506 - protein, 256 aa, synthetic construct
  REGION 1..256: note = ICOSLG (O75144) SP+PP+ECD
MRLGSPGLLFLLFSSLRADTQEKEVRAMVGSDVELSCACPEGSRFDLNDVYVYWQTSESKTVVTYHIPQNSSLENVDSRYRNRALMSPAGMLRGDFSLRLFNVTPQDEQKFHCLVLSQSLGFQEVLSVEVTLHVAANFSVPVVSAPHSPSQDELTFTCTSINGYPRPNVYWINKTDNSLLDQALQNDTVFLNMRGLYDVVSVLRIARTPSVNIGCCIENVLLQQNLTVGSQTGNDIGERDKITENPVSTGEKNAAT

SEQ ID NO: 2507 - protein, 436 aa, synthetic construct
  REGION 1..436: note = IFNAR1 (P17181) SP+PP+ECD
MMVVLLGATTLVLVAVAPWVLSAAAGGKNLKSPQKVEVDIIDDNFILRWNRSDESVGNVTFSFDYQKTGMDNWIKLSGCQNITSTKCNFSSLKLNVYEEIKLRIRAEKENTSSWYEVDSFTPFRKAQIGPPEVHLEAEDKAIVIHISPGTKDSVMWALDGLSFTYSLVIWKNSSGVEERIENIYSRHKIYKLSPETTYCLKVKAALLTSWKIGVYSPVHCIKTTVENELPPPENIEVSVQNQNYVLKWDYTYANMTFQVQWLHAFLKRNPGNHLYKWKQIPDCENVKTTQCVFPQNVFQKGIYLLRVQASDGNNTSFWSEEIKFDTEIQAFLLPPVFNIRSLSDSFHIYIGAPKQSGNTPVIQDYPLIYEIIFWENTSNAERKIIEKKTDVTVPNLKPLTVYCVKARAHTMDEKLNKSSVFSDAVCEKTKPGNTSK

SEQ ID NO: 2508 - protein, 243 aa, synthetic construct
  REGION 1..243: note = IFNAR2 (P48551) SP+PP+ECD
MLLSQNAFIFRSLNLVLMVYISLVFGISYDSPDYTDESCTFKISLRNFRSILSWELKNHSIVPTHYTLLYTIMSKPEDLKVVKNCANTTRSFCDLTDEWRSTHEAYVTVLEGFSGNTTLFSCSHNFWLAIDMSFEPPEFEIVGFTNHINVMVKFPSIVEEELQFDLSLVIEEQSEGIVKKHKPEIKGNMSGNFTYIIDKLIPNTNYCVSVYLEHSDEQAVIKSPLKCTLLPPGQESESAESAK

SEQ ID NO: 2509 - protein, 245 aa, synthetic construct
  REGION 1..245: note = IFNGR1 (P15260) SP+PP+ECD
MALLFLLPLVMQGVSRAEMGTADLGPSSVPTPTNVTIESYNMNPIVYWEYQIMPQVPVFTVEVKNYGVKNSEWIDACINISHHYCNISDHVGDPSNSLWVRVKARVGQKESAYAKSEEFAVCRDGKIGPPKLDIRKEEKQIMIDIFHPSVFVNGDEQEVDYDPETTCYIRVYNVYVRMNGSEIQYKILTQKEDDCDEIQCQLAIPVSSLNSQYCVSAEGVLHVWGVTTEKSKEVCITIFNSSIKG

SEQ ID NO: 2510 - protein, 241 aa, synthetic construct
  REGION 1..241: note = IFNGR2 (P38484) SP+PP+ECD
MRPTLLWSLLLLLGVFAAAAASQLPAPQHPKIRLYNAEQVLSWEPVALSNSTRPVVYQVQFKYTDSKWFTADIMSIGVNCTQITATECDFTAASPSAGFPMDFNVTLRLRAELGALHSAWVTMPWFQHYRNVTVGPPENIEVTPGEGSLIIRFSSPFDIADTSTAFFCYYVHYWEKGGIQQVKGPFRSNSISLDNLKPSRVYCLQVQAQLLWNKSNIFRVGHLSNISCYETMADASTELQQ

SEQ ID NO: 2511 - protein, 228 aa, synthetic construct
  REGION 1..228: note = IFNLR1 (Q8IU57) SP+PP+ECD
MAGPERWGPLLLCLLQAAPGRPRLAPPQNVTLLSQNFSVYLTWLPGLGNPQDVTYFVAYQSSPTRRRWREVEECAGTKELLCSMMCLKKQDLYNKFKGRVRTVSPSSKSPWVESEYLDYLFEVEPAPPVLVLTQTEEILSANATYQLPPCMPPLDLKYEVAFWKEGAGNKTLFPVTPHGQPVQITLQPAASEHHCLSARTIYTFSVPKYSKFSKPTCFLLEVPEANWA

SEQ ID NO: 2512 - protein, 640 aa, synthetic construct
  REGION 1..640: note = IGDCC3 (Q8IVU1) SP+PP+ECD
MAVQRAASPRRPPAPLWPRLLLPLLLLLLPAPSEGLGHSAELAFAVEPSDDVAVPGQPIVLDCRVEGTPPVRITWRKNGVELPESTHSTLLANGSLMIRHFRLEPGGSPSDEGDYECVAQNRFGLVVSRKARIQAATMSDFHVHPQATVGEEGGVARFQCQIHGLPKPLITWEKNRVPIDTDNERYTLLPKGVLQITGLRAEDGGIFHCVASNIASIRISHGARLTVSGSGSGAYKEPAILVGPENLTLTVHQTAVLECVATGNPRPIVSWSRLDGRPIGVEGIQVLGTGNLIISDVTVQHSGVYVCAANRPGTRVRRTAQGRLVVQAPAEFVQHPQSISRPAGTTAMFTCQAQGEPPPHVTWLKNGQVLGPGGHVRLKNNNSTLTISGIGPEDEAIYQCVAENSAGSSQASARLTVLWAEGLPGPPRNVRAVSVSSTEVRVSWSEPLANTKEIIGYVLHIRKAADPPELEYQEAVSKSTFQHLVSDLEPSTAYSFYIKAYTPRGASSASVPTLASTLGEAPAPPPLSVRVLGSSSLQLLWEPWPRLAQHEGGFKLFYRPASKTSFTGPILLPGTVSSYNLSQLDPTAVYEVKLLAYNQHGDGNATVRFVSLRGASERTALSPPCDCRKEEAANQTSTTG

SEQ ID NO: 2513 - protein, 957 aa, synthetic construct
  REGION 1..957: note = IGDCC4 (Q8TDY8) SP+PP+ECD
MARGDAGRGRGLLALTFCLLAARGELLLPQETTVELSCGVGPLQVILGPEQAAVLNCSLGAAAAGPPTRVTWSKDGDTLLEHDHLHLLPNGSLWLSQPLAPNGSDESVPEAVGVIEGNYSCLAHGPLGVLASQTAVVKLATLADFSLHPESQTVEENGTARFECHIEGLPAPIITWEKDQVTLPEEPRLIVLPNGVLQILDVQESDAGPYRCVATNSARQHFSQEALLSVAHRGSLASTRGQDVVIVAAPENTTVVSGQSVVMECVASADPTPFVSWVRQDGKPISTDVIVLGRTNLLIANAQPWHSGVYVCRANKPRTRDFATAAAELRVLAAPAITQAPEALSRTRASTARFVCRASGEPRPALRWLHNGAPLRPNGRVKVQGGGGSLVITQIGLQDAGYYQCVAENSAGMACAAASLAVVVREGLPSAPTRVTATPLSSSAVLVAWERPEMHSEQIIGFSLHYQKARGMDNVEYQFAVNNDTTELQVRDLEPNTDYEFYVVAYSQLGASRTSTPALVHTLDDVPSAAPQLSLSSPNPSDIRVAWLPLPPSLSNGQVVKYKIEYGLGKEDQIFSTEVRGNETQLMLNSLQPNKVYRVRISAGTAAGFGAPSQWMHHRTPSMHNQSHVPFAPAELKVQAKMESLVVSWQPPPHPTQISGYKLYWREVGAEEEANGDRLPGGRGDQAWDVGPVRLKKKVKQYELTQLVPGRLYEVKLVAFNKHEDGYAAVWKGKTEKAPAPDMPIQRGPPLPPAHVHAESNSSTSIWLRWKKPDFTTVKIVNYTVRFSPWGLRNASLVTYYTSSGEDILIGGLKPFTKYEFAVQSHGVDMDGPFGSVVERSTLPDRPSTPPSDLRLSPLTPSTVRLHWCPPTEPNGEIVEYLILYSSNHTQPEHQWTLLTTQGNIFSAEVHGLESDTRYFFKMGARTEVGPGPFSRLQDVITLQEKLSDSLDMHSVT

SEQ ID NO: 2514 - protein, 935 aa, synthetic construct
  REGION 1..935: note = IGF1R (P08069) SP+PP+ECD
MKSGSGGGSPTSLWGLLFLSAALSLWPTSGEICGPGIDIRNDYQQLKRLENCTVIEGYLHILLISKAEDYRSYRFPKLTVITEYLLLFRVAGLESLGDLFPNLTVIRGWKLFYNYALVIFEMTNLKDIGLYNLRNITRGAIRIEKNADLCYLSTVDWSLILDAVSNNYIVGNKPPKECGDLCPGTMEEKPMCEKTTINNEYNYRCWTTNRCQKMCPSTCGKRACTENNECCHPECLGSCSAPDNDTACVACRHYYYAGVCVPACPPNTYRFEGWRCVDRDFCANILSAESSDSEGFVIHDGECMQECPSGFIRNGSQSMYCIPCEGPCPKVCEEEKKTKTIDSVTSAQMLQGCTIFKGNLLINIRRGNNIASELENFMGLIEVVTGYVKIRHSHALVSLSFLKNLRLILGEEQLEGNYSFYVLDNQNLQQLWDWDHRNLTIKAGKMYFAFNPKLCVSEIYRMEEVTGTKGRQSKGDINTRNNGERASCESDVLHFTSTTTSKNRIIITWHRYRPPDYRDLISFTVYYKEAPFKNVTEYDGQDACGSNSWNMVDVDLPPNKDVEPGILLHGLKPWTQYAVYVKAVTLTMVENDHIRGAKSEILYIRTNASVPSIPLDVLSASNSSSQLIVKWNPPSLPNGNLSYYIVRWQRQPQDGYLYRHNYCSKDKIPIRKYADGTIDIEEVTENPKTEVCGGEKGPCCACPKTEAEKQAEKEEAEYRKVFENFLHNSIFVPRPERKRRDVMQVANTTMSSRSRNTTAADTYNITDPEELETEYPFFESRVDNKERTVISNLRPFTLYRIDIHSCNHEAEKLGCSASNFVFARTMPAEGADDIPGPVTWEPRPENSIFLKWPEPENPNGLILMYEIKYGSQVEDQRECVSRQEYRKYGGAKLNRLNPGNYTARIQATSLSGNGSWTDPVFFYVQAKTGYENFIH

SEQ ID NO: 2515 - protein, 2304 aa, synthetic construct
  REGION 1..2304: note = IGF2R (P11717) SP+PP+ECD
MGAAAGRSPHLGPAPARRPQRSLLLLQLLLLVAAPGSTQAQAAPFPELCSYTWEAVDTKNNVLYKINICGSVDIVQCGPSSAVCMHDLKTRTYHSVGDSVLRSATRSLLEFNTTVSCDQQGTNHRVQSSIAFLCGKTLGTPEFVTATECVHYFEWRTTAACKKDIFKANKEVPCYVFDEELRKHDLNPLIKLSGAYLVDDSDPDTSLFINVCRDIDTLRDPGSQLRACPPGTAACLVRGHQAFDVGQPRDGLKLVRKDRLVLSYVREEAGKLDFCDGHSPAVTITFVCPSERREGTIPKLTAKSNCRYEIEWITEYACHRDYLESKTCSLSGEQQDVSIDLTPLAQSGGSSYISDGKEYLFYLNVCGETEIQFCNKKQAAVCQVKKSDTSQVKAAGRYHNQTLRYSDGDLTLIYFGGDECSSGFQRMSVINFECNKTAGNDGKGTPVFTGEVDCTYFFTWDTEYACVKEKEDLLCGATDGKKRYDLSALVRHAEPEQNWEAVDGSQTETEKKHFFINICHRVLQEGKARGCPEDAAVCAVDKNGSKNLGKFISSPMKEKGNIQLSYSDGDDCGHGKKIKTNITLVCKPGDLESAPVLRTSGEGGCFYEFEWHTAAACVLSKTEGENCTVFDSQAGFSFDLSPLTKKNGAYKVETKKYDFYINVCGPVSVSPCQPDSGACQVAKSDEKTWNLGLSNAKLSYYDGMIQLNYRGGTPYNNERHTPRATLITFLCDRDAGVGFPEYQEEDNSTYNFRWYTSYACPEEPLECVVTDPSTLEQYDLSSLAKSEGGLGGNWYAMDNSGEHVTWRKYYINVCRPLNPVPGCNRYASACQMKYEKDQGSFTEVVSISNLGMAKTGPVVEDSGSLLLEYVNGSACTTSDGRQTTYTTRIHLVCSRGRLNSHPIFSLNWECVVSFLWNTEAACPIQTTTDTDQACSIRDPNSGFVFNLNPLNSSQGYNVSGIGKIFMFNVCGTMPVCGTILGKPASGCEAETQTEELKNWKPARPVGIEKSLQLSTEGFITLTYKGPLSAKGTADAFIVRFVCNDDVYSGPLKFLHQDIDSGQGIRNTYFEFETALACVPSPVDCQVTDLAGNEYDLTGLSTVRKPWTAVDTSVDGRKRTFYLSVCNPLPYIPGCQGSAVGSCLVSEGNSWNLGVVQMSPQAAANGSLSIMYVNGDKCGNQRFSTRITFECAQISGSPAFQLQDGCEYVFIWRTVEACPVVRVEGDNCEVKDPRHGNLYDLKPLGLNDTIVSAGEYTYYFRVCGKLSSDVCPTSDKSKVVSSCQEKREPQGFHKVAGLLTQKLTYENGLLKMNFTGGDTCHKVYQRSTAIFFYCDRGTQRPVFLKETSDCSYLFEWRTQYACPPFDLTECSFKDGAGNSFDLSSLSRYSDNWEAITGTGDPEHYLINVCKSLAPQAGTEPCPPEAAACLLGGSKPVNLGRVRDGPQWRDGIIVLKYVDGDLCPDGIRKKSTTIRFTCSESQVNSRPMFISAVEDCEYTFAWPTATACPMKSNEHDDCQVTNPSTGHLFDLSSLSGRAGFTAAYSEKGLVYMSICGENENCPPGVGACFGQTRISVGKANKRLRYVDQVLQLVYKDGSPCPSKSGLSYKSVISFVCRPEARPTNRPMLISLDKQTCTLFFSWHTPLACEQATECSVRNGSSIVDLSPLIHRTGGYEAYDESEDDASDTNPDFYINICQPLNPMHGVPCPAGAAVCKVPIDGPPIDIGRVAGPPILNPIANEIYLNFESSTPCLADKHFNYTSLIAFHCKRGVSMGTPKLLRTSECDFVFEWETPVVCPDEVRMDGCTLTDEQLLYSFNLSSLSTSTFKVTRDSRTYSVGVCTFAVGPEQGGCKDGGVCLLSGTKGASFGRLQSMKLDYRHQDEAVVLSYVNGDRCPPETDDGVPCVFPFIFNGKSYEECIIESRAKLWCSTTADYDRDHEWGFCRHSNSYRTSSIIFKCDEDEDIGRPQVFSEVRGCDVTFEWKTKVVCPPKKLECKFVQKHKTYDLRLLSSLTGSWSLVHNGVSYYINLCQKIYKGPLGCSERASICRRTTTGDVQVLGLVHTQKLGVIGDKVVVTYSKGYPCGGNKTASSVIELTCTKTVGRPAFKRFDIDSCTYYFSWDSRAACAVKPQEVQMVNGTITNPINGKSFSLGDIYFKLFRASGDMRTNGDNYLYEIQLSSITSSRNPACSGANICQVKPNDQHFSRKVGTSDKTKYYLQDGDLDVVFASSSKCGKDKTKSVSSTIFFHCDPLVEDGIPEFSHETADCQYLFSWYTSAVCPLGVGFDSENPGDDGQMHKGLSERSQ

SEQ ID NO: 2516 - protein, 163 aa, synthetic construct
  REGION 1..163: note = IGFLR1 (Q9H665) SP+PP+ECD
MGPGRCLLTALLLLALAPPPEASQYCGRLEYWNPDNKCCSSCLQRFGPPPCPDYEFRENCGLNDHGDFVTPPFRKCSSGQCNPDGAELCSPCGGGAVTPTPAAGGGRTPWRCRERPVPAKGHCPLTPGNPGAPSSQERSSPASSIAWRTPEPVPQQAWPNFLP

SEQ ID NO: 2517 - protein, 241 aa, synthetic construct
  REGION 1..241: note = IGSF11 (Q5DX21) SP+PP+ECD
MTSQRSPLAPLLLLSLHGVAASLEVSESPGSIQVARGQPAVLPCTFTTSAALINLNVIWMVTPLSNANQPEQVILYQGGQMFDGAPRFHGRVGFTGTMPATNVSIFINNTQLSDTGTYQCLVNNLPDIGGRNIGVTGLTVLVPPSAPHCQIQGSQDIGSDVILLCSSEEGIPRPTYLWEKLDNTLKLPPTATQDQVQGTVTIRNISALSSGLYQCVASNAIGTSTCLLDLQVISPQPRNIG

SEQ ID NO: 2518 - protein, 1124 aa, synthetic construct
  REGION 1..1124: note = IGSF3 (O75054) SP+PP+ECD
MKCFFPVLSCLAVLGVVSAQRQVTVQEGPLYRTEGSHITIWCNVSGYQGPSEQNFQWSIYLPSSPEREVQIVSTMDSSFPYAIYTQRVRGGKIFIERVQGNSTLLHITDLQARDAGEYECHTPSTDKQYFGSYSAKMNLVVIPDSLQTTAMPQTLHRVEQDPLELTCEVASETIQHSHLSVAWLRQKVGEKPVEVISLSRDFMLHSSSEYAQRQSLGEVRLDKLGRTTFRLTIFHLQPSDQGEFYCEAAEWIQDPDGSWYAMTRKRSEGAVVNVQPTDKEFTVRLETEKRLHTVGEPVEFRCILEAQNVPDRYFAVSWAFNSSLIATMGPNAVPVLNSEFAHREARGQLKVAKESDSVFVLKIYHLRQEDSGKYNCRVTEREKTVTGEFIDKESKRPKNIPIIVLPLKSSISVEVASNASVILEGEDLRFSCSVRTAGRPQGRFSVIWQLVDRQNRRSNIMWLDRDGTVQPGSSYWERSSFGGVQMEQVQPNSFSLGIFNSRKEDEGQYECHVTEWVRAVDGEWQIVGERRASTPISITALEMGFAVTAISRTPGVTYSDSFDLQCIIKPHYPAWVPVSVTWRFQPVGTVEFHDLVTFTRDGGVQWGDRSSSFRTRTAIEKAESSNNVRLSISRASDTEAGKYQCVAELWRKNYNNTWTRLAERTSNLLEIRVLQPVTKLQVSKSKRTLTLVENKPIQLNCSVKSQTSQNSHFAVLWYVHKPSDADGKLILKTTHNSAFEYGTYAEEEGLRARLQFERHVSGGLFSLTVQRAEVSDSGSYYCHVEEWLLSPNYAWYKLAEEVSGRTEVTVKQPDSRLRLSQAQGNLSVLETRQVQLECVVLNRTSITSQLMVEWFVWKPNHPERETVARLSRDATFHYGEQAAKNNLKGRLHLESPSPGVYRLFIQNVAVQDSGTYSCHVEEWLPSPSGMWYKRAEDTAGQTALTVMRPDASLQVDTVVPNATVSEKAAFQLDCSIVSRSSQDSRFAVAWYSLRTKAGGKRSSPGLEEQEEEREEEEEEDDDDDDDPTERTALLSVGPDAVFGPEGSPWEGRLRFQRLSPVLYRLTVLQASPQDTGNYSCHVEEWLPSPQKEWYRLTEEESAPIGIRVLDTSPTLQSIICSNDA

SEQ ID NO: 2519 - protein, 153 aa, synthetic construct
  REGION 1..153: note = IGSF6 (O95976) SP+PP+ECD
MGTASRSNIARHLQTNLILFCVGAVGACTLSVTQPWYLEVDYTHEAVTIKCTFSATGCPSEQPTCLWFRYGAHQPENLCLDGCKSEADKFTVREALKENQVSLTVNRVTSNDSAIYICGIAFPSVPEARAKQTGGGTTLVVREIKLLSKELRS

SEQ ID NO: 2520 - protein, 579 aa, synthetic construct
  REGION 1..579: note = IGSF8 (Q969P0) SP+PP+ECD
MGALRPTLLPPSLPLLLLLMLGMGCWAREVLVPEGPLYRVAGTAVSISCNVTGYEGPAQQNFEWFLYRPEAPDTALGIVSTKDTQFSYAVFKSRVVAGEVQVQRLQGDAVVLKIARLQAQDAGIYECHTPSTDTRYLGSYSGKVELRVLPDVLQVSAAPPGPRGRQAPTSPPRMTVHEGQELALGCLARTSTQKHTHLAVSFGRSVPEAPVGRSTLQEVVGIRSDLAVEAGAPYAERLAAGELRLGKEGTDRYRMVVGGAQAGDAGTYHCTAAEWIQDPDGSWAQIAEKRAVLAHVDVQTLSSQLAVTVGPGERRIGPGEPLELLCNVSGALPPAGRHAAYSVGWEMAPAGAPGPGRLVAQLDTEGVGSLGPGYEGRHIAMEKVASRTYRLRLEAARPGDAGTYRCLAKAYVRGSGTRLREAASARSRPLPVHVREEGVVLEAVAWLAGGTVYRGETASLLCNISVRGGPPGLRLAASWWVERPEDGELSSVPAQLVGGVGQDGVAELGVRPGGGPVSVELVGPRSHRLRLHSLGPEDEGVYHCAPSAWVQHADYSWYQAGSARSGPVTVYPYMHALDT

SEQ ID NO: 2521 - protein, 734 aa, synthetic construct
  REGION 1..734: note = IGSF9 (Q9P2J2) SP+PP+ECD
MVWCLGLAVLSLVISQGADGRGKPEVVSVVGRAGESVVLGCDLLPPAGRPPLHVIEWLRFGFLLPIFIQFGLYSPRIDPDYVGRVRLQKGASLQIEGLRVEDQGWYECRVFFLDQHIPEDDFANGSWVHLTVNSPPQFQETPPAVLEVQELEPVTLRCVARGSPLPHVTWKLRGKDLGQGQGQVQVQNGTLRIRRVERGSSGVYTCQASSTEGSATHATQLLVLGPPVIVVPPKNSTVNASQDVSLACHAEAYPANLTYSWFQDNINVFHISRLQPRVRILVDGSLRLLATQPDDAGCYTCVPSNGLLHPPSASAYLTVLYPAQVTAMPPETPLPIGMPGVIRCPVRANPPLLFVSWTKDGKALQLDKFPGWSQGTEGSLIIALGNEDALGEYSCTPYNSLGTAGPSPVTRVLLKAPPAFIERPKEEYFQEVGRELLIPCSAQGDPPPVVSWTKVGRGLQGQAQVDSNSSLILRPLTKEAHGHWECSASNAVARVATSTNVYVLGTSPHVVTNVSVVALPKGANVSWEPGFDGGYLQRFSVWYTPLAKRPDRMHHDWVSLAVPVGAAHLLVPGLQPHTQYQFSVLAQNKLGSGPFSEIVLSAPEGLPTTPAAPGLPPTEIPPPLSPPRGLVAVRTPRGVLLHWDPPELVPKRLDGYVLEGRQGSQGWEVLDPAVAGTETELLVPGLIKDVLYEFRLVAFAGSFVSDPSNTANVSTSGLEVYPSRTQLPGLLPQP

SEQ ID NO: 2522 - protein, 722 aa, synthetic construct
  REGION 1..722: note = IGSF9B (Q9UPX0) SP+PP+ECD
MIWYVATFIASVIGTRGLAAEGAHGLREEPEFVTARAGESVVLRCDVIHPVTGQPPPYVVEWFKFGVPIPIFIKFGYYPPHVDPEYAGRASLHDKASLRLEQVRSEDQGWYECKVLMLDQQYDTFHNGSWVHLTINAPPTFTETPPQYIEAKEGGSITMTCTAFGNPKPIVTWLKEGTLLGASGKYQVSDGSLTVTSVSREDRGAYTCRAYSIQGEAVHTTHLLVQGPPFIVSPPENITVNISQDALLTCRAEAYPGNLTYTWYWQDENVYFQNDLKLRVRILIDGTLIIFRVKPEDSGKYTCVPSNSLGRSPSASAYLTVQYPARVLNMPPVIYVPVGIHGYIRCPVDAEPPATVVKWNKDGRPLQVEKNLGWTLMEDGSIRIEEATEEALGTYTCVPYNTLGTMGQSAPARLVLKDPPYFTVLPGWEYRQEAGRELLIPCAAAGDPFPVITWRKVGKPSRSKHSALPSGSLQFRALSKEDHGEWECVATNVVTSITASTHLTVIGTSPHAPGSVRVQVSMTTANVSWEPGYDGGYEQTFSVWMKRAQFGPHDWLSLPVPPGPSWLLVDTLEPETAYQFSVLAQNKLGTSAFSEVVTVNTLAFPITTPEPLVLVTPPRCLIANRTQQGVLLSWLPPANHSFPIDRYIMEFRVAERWELLDDGIPGTEGEFFAKDLSQDTWYEFRVLAVMQDLISEPSNIAGVSSTDIFPQPDLTEDGLARP

SEQ ID NO: 2523 - protein, 235 aa, synthetic construct
  REGION 1..235: note = IL10RA (Q13651) SP+PP+ECD
MLPCLVVLLAALLSLRLGSDAHGTELPSPPSVWFEAEFFHHILHWTPIPNQSESTCYEVALLRYGIESWNSISNCSQTLSYDLTAVTLDLYHSNGYRARVRAVDGSRHSNWTVTNTRFSVDEVTLTVGSVNLEIHNGFILGKIQLPRPKMAPANDTYESIFSHFREYEIAIRKVPGNFTFTHKKVKHENFSLLTSGEVGEFCVQVKPSVASRSNKGMWSKEECISLTRQYFTVTN

SEQ ID NO: 2524 - protein, 220 aa, synthetic construct
  REGION 1..220: note = IL10RB (Q08334) SP+PP+ECD
MAWSLGSWLGGCLLVSALGMVPPPENVRMNSVNFKNILQWESPAFAKGNLTFTAQYLSYRIFQDKCMNTTLTECDFSSLSKYGDHTLRVRAEFADEHSDWVNITFCPVDDTIIGPPGMQVEVLADSLHMRFLAPKIENEYETWTMKNVYNSWTYNVQYWKNGTDEKFQITPQYDFEVLRNLEPWTTYCVQVRGFLPDRNKAGEWSEPVCEQTTHDETVPS

SEQ ID NO: 2525 - protein, 369 aa, synthetic construct
  REGION 1..369: note = IL11RA (Q14626) SP+PP+ECD
MSSSCSGLSRVLVAVATALVSASPCPQAWGPPGVQYGQPGRSVKLCCPGVTAGDPVSWFRDGEPKLLQGPDSGLGHELVLAQADSTDEGTYICQTLDGALGGTVTLQLGYPPARPVVSCQAADYENFSCTWSPSQISGLPTRYLTSYRKKTVLGADSQRRSPSTGPWPCPQDPLGAARCVVHGAEFWSQYRINVTEVNPLGASTRLLDVSLQSILRPDPPQGLRVESVPGYPRRLRASWTYPASWPCQPHFLLKFRLQYRPAQHPAWSTVEPAGLEEVITDAVAGLPHAVRVSARDFLDAGTWSTWSPEAWGTPSTGTIPKEIPAWGQLHTQPEVEPQVDSPAPPRPSLQPHPRLLDHRDSVEQVAVLA

SEQ ID NO: 2526 - protein, 545 aa, synthetic construct
  REGION 1..545: note = IL12RB1 (P42701) SP+PP+ECD
MEPLVTWVVPLLFLFLLSRQGAACRTSECCFQDPPYPDADSGSASGPRDLRCYRISSDRYECSWQYEGPTAGVSHFLRCCLSSGRCCYFAAGSATRLQFSDQAGVSVLYTVTLWVESWARNQTEKSPEVTLQLYNSVKYEPPLGDIKVSKLAGQLRMEWETPDNQVGAEVQFRHRTPSSPWKLGDCGPQDDDTESCLCPLEMNVAQEFQLRRRQLGSQGSSWSKWSSPVCVPPENPPQPQVRFSVEQLGQDGRRRLTLKEQPTQLELPEGCQGLAPGTEVTYRLQLHMLSCPCKAKATRTLHLGKMPYLSGAAYNVAVISSNQFGPGLNQTWHIPADTHTEPVALNISVGTNGTTMYWPARAQSMTYCIEWQPVGQDGGLATCSLTAPQDPDPAGMATYSWSRESGAMGQEKCYYITIFASAHPEKLTLWSTVLSTYHFGGNASAAGTPHHVSVKNHSLDSVSVDWAPSLLSTCPGVLKEYVVRCRDEDSKQVSEHPVQPTETQVTLSGLRAGVAYTVQVRADTAWLRGVWSQPQRFSIEVQVSD

SEQ ID NO: 2527 - protein, 622 aa, synthetic construct
  REGION 1..622: note = IL12RB2 (Q99665) SP+PP+ECD
MAHTFRGCSLAFMFIITWLLIKAKIDACKRGDVTVKPSHVILLGSTVNITCSLKPRQGCFHYSRRNKLILYKFDRRINFHHGHSLNSQVTGLPLGTTLFVCKLACINSDEIQICGAEIFVGVAPEQPQNLSCIQKGEQGTVACTWERGRDTHLYTEYTLQLSGPKNLTWQKQCKDIYCDYLDFGINLTPESPESNFTAKVTAVNSLGSSSSLPSTFTFLDIVRPLPPWDIRIKFQKASVSRCTLYWRDEGLVLLNRLRYRPSNSRLWNMVNVTKAKGRHDLLDLKPFTEYEFQISSKLHLYKGSWSDWSESLRAQTPEEEPTGMLDVWYMKRHIDYSRQQISLFWKNLSVSEARGKILHYQVTLQELTGGKAMTQNITGHTSWTTVIPRTGNWAVAVSAANSKGSSLPTRINIMNLCEAGLLAPRQVSANSEGMDNILVTWQPPRKDPSAVQEYVVEWRELHPGGDTQVPLNWLRSRPYNVSALISENIKSYICYEIRVYALSGDQGGCSSILGNSKHKAPLSGPHINAITEEKGSILISWNSIPVQEQMGCLLHYRIYWKERDSNSQPQLCEIPYRVSQNSHPINSLQPRVTYVLWMTALTAAGESSHGNEREFCLQGKAN

SEQ ID NO: 2528 - protein, 343 aa, synthetic construct
  REGION 1..343: note = IL13RA1 (P78552) SP+PP+ECD
MEWPARLCGLWALLLCAGGGGGGGGAAPTETQPPVTNLSVSVENLCTVIWTWNPPEGASSNCSLWYFSHFGDKQDKKIAPETRRSIEVPLNERICLQVGSQCSTNESEKPSILVEKCISPPEGDPESAVTELQCIWHNLSYMKCSWLPGRNTSPDTNYTLYYWHRSLEKIHQCENIFREGQYFGCSFDLTKVKDSSFEQHSVQIMVKDNAGKIKPSFNIVPLTSRVKPDPPHIKNLSFHNDDLYVQWENPQNFISRCLFYEVEVNNSQTETHNVFYVQEAKCENPEFERNVENTSCFMVPGVLPDTLNTVRIRVKTNKLCYEDDKLWSNWSQEMSIGKKRNST

SEQ ID NO: 2529 - protein, 343 aa, synthetic construct
  REGION 1..343: note = IL13RA2 (Q14627) SP+PP+ECD
MAFVCLAIGCLYTFLISTTFGCTSSSDTEIKVNPPQDFEIVDPGYLGYLYLQWQPPLSLDHFKECTVEYELKYRNIGSETWKTIITKNLHYKDGFDLNKGIEAKIHTLLPWQCTNGSEVQSSWAETTYWISPQGIPETKVQDMDCVYYNWQYLLCSWKPGIGVLLDTNYNLFYWYEGLDHALQCVDYIKADGQNIGCRFPYLEASDYKDFYICVNGSSENKPIRSSYFTFQLQNIVKPLPPVYLTFTRESSCEIKLKWSIPLGPIPARCFDYEIEIREDDTTLVTATVENETYTLKTTNETRQLCFVVRSKVNIYCSDDGIWSEWSDKQCWEGEDLSKKTLLR

SEQ ID NO: 2530 - protein, 205 aa, synthetic construct
  REGION 1..205: note = IL15RA (Q13261) SP+PP+ECD
MAPRRARGCRTLGLPALLLLLLLRPPATRGITCPPPMSVEHADIWVKSYSLYSRERYICNSGFKRKAGTSSLTECVLNKATNVAHWTTPSLKCIRDPALVHQRPAPPSTVTTAGVTPQPESLSPSGKEPAASSPSSNNTAATTAAIVPGSQLMPSKSPSTGTTEISSHESSHGTPSQTTAKNWELTASASHQPPGVYPQGHSDTT

SEQ ID NO: 2531 - protein, 320 aa, synthetic construct
  REGION 1..320: note = IL17RA (Q96F46) SP+PP+ECD
MGAARSPPSAVPGPLLGLLLLLLGVLAPGGASLRLLDHRALVCSQPGLNCTVKNSTCLDDSWIHPRNLTPSSPKDLQIQLHFAHTQQGDLFPVAHIEWTLQTDASILYLEGAELSVLQLNTNERLCVRFEFLSKLRHHHRRWRFTFSHFVVDPDQEYEVTVHHLPKPIPDGDPNHQSKNFLVPDCEHARMKVTTPCMSSGSLWDPNITVETLEAHQLRVSFTLWNESTHYQILLTSFPHMENHSCFEHMHHIPAPRPEEFHQRSNVTLTLRNLKGCCRHQVQIQPFFSSCLNDCLRHSATVSCPEMPDTPEPIPDYMPLW

SEQ ID NO: 2532 - protein, 292 aa, synthetic construct
  REGION 1..292: note = IL17RB (Q9NRM6) SP+PP+ECD
MSLVLLSLAALCRSAVPREPTVQCGSETGPSPEWMLQHDLIPGDLRDLRVEPVTTSVATGDYSILMNVSWVLRADASIRLLKATKICVTGKSNFQSYSCVRCNYTEAFQTQTRPSGGKWTFSYIGFPVELNTVYFIGAHNIPNANMNEDGPSMSVNFTSPGCLDHIMKYKKKCVKAGSLWDPNITACKKNEETVEVNFTTTPLGNRYMALIQHSTIIGFSQVFEPHQKKQTRASVVIPVTGDSEGATVQLTPYFPTCGSDCIRHKGTVVLCPQTGVPFPLDNNKSKPGGWLP

SEQ ID NO: 2533 - protein, 538 aa, synthetic construct
  REGION 1..538: note = IL17RC (Q8NAC3) SP+PP+ECD
MPVPWFLLSLALGRSPVVLSLERLVGPQDATHCSPVSLEPWGDEERLRVQFLAQQSLSLAPVTAATARTALSGLSGADGRREERGRGKSWVCLSLGGSGNTEPQKKGLSCRLWDSDILCLPGDIVPAPGPVLAPTHLQTELVLRCQKETDCDLCLRVAVHLAVHGHWEEPEDEEKFGGAADSGVEEPRNASLQAQVVLSFQAYPTARCVLLEVQVPAALVQFGQSVGSVVYDCFEAALGSEVRIWSYTQPRYEKELNHTQQLPDCRGLEVWNSIPSCWALPWLNVSADGDNVHLVLNVSEEQHFGLSLYWNQVQGPPKPRWHKNLTGPQIITLNHTDLVPCLCIQVWPLEPDSVRTNICPFREDPRAHQNLWQAARLQLLTLQSWLLDAPCSLPAEAALCWRAPGGDPCQPLVPPLSWENVTVDKVLEFPLLKGHPNLCVQVNSSEKLQLQECLWADSLGPLKDDVLLLETRGPQDNRSLCALEPSGCTSLPSKASTRAARLGEYLLQDLQSGQCLQLWDDDLGALWACPMDKYIHKR

SEQ ID NO: 2534 - protein, 299 aa, synthetic construct
  REGION 1..299: note = IL17RD (Q8NFM7) SP+PP+ECD
MAPWLQLCSVFFTVNACLNGSQLAVAAGGSGRARGADTCGWRGVGPASRNSGLYNITFKYDNCTTYLNPVGKHVIADAQNITISQYACHDQVAVTILWSPGALGIEFLKGFRVILEELKSEGRQCQQLILKDPKQLNSSFKRTGMESQPFLNMKFETDYFVKVVPFPSIKNESNYHPFFFRTRACDLLLQPDNLACKPFWKPRNLNISQHGSDMQVSFDHAPHNFGFRFFYLHYKLKHEGPFKRKTCKQEQTTETTSCLLQNVSPGDYIIELVDDTNTTRKVMHYALKPVHSPWAGPIR

SEQ ID NO: 2535 - protein, 454 aa, synthetic construct
  REGION 1..454: note = IL17RE (Q8NFR9) SP+PP+ECD
MGSSRLAALLLPLLLIVIDLSDSAGIGFRHLPHWNTRCPLASHTDDSFTGSSAYIPCRTWWALFSTKPWCVRVWHCSRCLCQHLLSGGSGLQRGLFHLLVQKSKKSSTFKFYRRHKMPAPAQRKLLPRRHLSEKSHHISIPSPDISHKGLRSKRTQPSDPETWESLPRLDSQRHGGPEFSFDLLPEARAIRVTISSGPEVSVRLCHQWALECEELSSPYDVQKIVSGGHTVELPYEFLLPCLCIEASYLQEDTVRRKKCPFQSWPEAYGSDFWKSVHFTDYSQHTQMVMALTLRCPLKLEAALCQRHDWHTLCKDLPNATARESDGWYVLEKVDLHPQLCFKFSFGNSSHVECPHQTGSLTSWNVSMDTQAQQLILHFSSRMHATFSAAWSLPGLGQDTLVPPVYTVSQARGSSPVSLDLIIPFLRPGCCVLVWRSDVQFAWKHLLCPDVSYRH

SEQ ID NO: 2536 - protein, 329 aa, synthetic construct
  REGION 1..329: note = IL18R1 (Q13478) SP+PP+ECD
MNCRELPLTLWVLISVSTAESCTSRPHITVVEGEPFYLKHCSCSLAHEIETTTKSWYKSSGSQEHVELNPRSSSRIALHDCVLEFWPVELNDTGSYFFQMKNYTQKWKLNVIRRNKHSCFTERQVTSKIVEVKKFFQITCENSYYQTLVNSTSLYKNCKKLLLENNKNPTIKKNAEFEDQGYYSCVHFLHHNGKLFNITKTFNITIVEDRSNIVPVLLGPKLNHVAVELGKNVRLNCSALLNEEDVIYWMFGEENGSDPNIHEEKEMRIMTPEGKWHASKVLRIENIGESNLNVLYNCTVASTGGTDTKSFILVRKADMADIPGHVFTR

SEQ ID NO: 2537 - protein, 356 aa, synthetic construct
  REGION 1..356: note = IL18RAP (O95256) SP+PP+ECD
MLCLGWIFLWLVAGERIKGFNISGCSTKKLLWTYSTRSEEEFVLFCDLPEPQKSHFCHRNRLSPKQVPEHLPFMGSNDLSDVQWYQQPSNGDPLEDIRKSYPHIIQDKCTLHFLTPGVNNSGSYICRPKMIKSPYDVACCVKMILEVKPQTNASCEYSASHKQDLLLGSTGSISCPSLSCQSDAQSPAVTWYKNGKLLSVERSNRIVVDEVYDYHQGTYVCDYTQSDTVSSWTVRAVVQVRTIVGDTKLKPDILDPVEDTLEVELGKPLTISCKARFGFERVFNPVIKWYIKDSDLEWEVSVPEAKSIKSTLKDEIIERNIILEKVTQRDLRRKFVCFVQNSIGNTTQSVQLKEKR

SEQ ID NO: 2538 - protein, 336 aa, synthetic construct
  REGION 1..336: note = IL1R1 (P14778) SP+PP+ECD
MKVLLRLICFIALLISSLEADKCKEREEKIILVSSANEIDVRPCPLNPNEHKGTITWYKDDSKTPVSTEQASRIHQHKEKLWFVPAKVEDSGHYYCVVRNSSYCLRIKISAKFVENEPNLCYNAQAIFKQKLPVAGDGGLVCPYMEFFKNENNELPKLQWYKDCKPLLLDNIHFSGVKDRLIVMNVAEKHRGNYTCHASYTYLGKQYPITRVIEFITLEENKPTRPVIVSPANETMEVDLGSQIQLICNVTGQLSDIAYWKWNGSVIDEDDPVLGEDYYSVENPANKRRSTLITVLNISEIESRFYKHPFTCFAKNTHGIDAAYIQLIYPVTNFQK

SEQ ID NO: 2539 - protein, 343 aa, synthetic construct
  REGION 1..343: note = IL1R2 (P27930) SP+PP+ECD
MLRLYVLVMGVSAFTLQPAAHTGAARSCRFRGRHYKREFRLEGEPVALRCPQVPYWLWASVSPRINLTWHKNDSARTVPGEEETRMWAQDGALWLLPALQEDSGTYVCTTRNASYCDKMSIELRVFENTDAFLPFISYPQILTLSTSGVLVCPDLSEFTRDKTDVKIQWYKDSLLLDKDNEKFLSVRGTTHLLVHDVALEDAGYYRCVLTFAHEGQQYNITRSIELRIKKKKEETIPVIISPLKTISASLGSRLTIPCKVFLGTGTPLTTMLWWTANDTHIESAYPGGRVTEGPRQEYSENNENYIEVPLIFDPVTREDLHMDFKCVVHNTLSFQTLRTTVKE

SEQ ID NO: 2540 - protein, 367 aa, synthetic construct
  REGION 1..367: note = IL1RAP (Q9NPH3) SP+PP+ECD
MTLLWCVVSLYFYGILQSDASERCDDWGLDTMRQIQVFEDEPARIKCPLFEHFLKFNYSTAHSAGLTLIWYWTRQDRDLEEPINFRLPENRISKEKDVLWFRPTLLNDTGNYTCMLRNTTYCSKVAFPLEVVQKDSCFNSPMKLPVHKLYIEYGIQRITCPNVDGYFPSSVKPTITWYMGCYKIQNFNNVIPEGMNLSFLIALISNNGNYTCVVTYPENGRTFHLTRTLTVKVVGSPKNAVPPVIHSPNDHVVYEKEPGEELLIPCTVYFSFLMDSRNEVWWTIDGKKPDDITIDVTINESISHSRTEDETRTQILSIKKVTSEDLKRSYVCHARSAKGEVAKAAKVKQKVPAPRYTVELACGFGAT

SEQ ID NO: 2541 - protein, 357 aa, synthetic construct
  REGION 1..357: note = IL1RAPL1 (Q9NZN1) SP+PP+ECD
MKAPIPHLILLYATFTQSLKVVTKRGSADGCTDWSIDIKKYQVLVGEPVRIKCALFYGYIRTNYSLAQSAGLSLMWYKSSGPGDFEEPIAFDGSRMSKEEDSIWFRPTLLQDSGLYACVIRNSTYCMKVSISLTVGENDTGLCYNSKMKYFEKAELSKSKEISCRDIEDFLLPTREPEILWYKECRTKTWRPSIVFKRDTLLIREVREDDIGNYTCELKYGGFVVRRTTELTVTAPLTDKPPKLLYPMESKLTIQETQLGDSANLTCRAFFGYSGDVSPLIYWMKGEKFIEDLDENRVWESDIRILKEHLGEQEVSISLIVDSVEEGDLGNYSCYVENGNGRRHASVLLHKRELMYT

SEQ ID NO: 2542 - protein, 354 aa, synthetic construct
  REGION 1..354: note = IL1RAPL2 (Q9NP60) SP+PP+ECD
MKPPFLLALVVCSVVSTNLKMVSKRNSVDGCIDWSVDLKTYMALAGEPVRVKCALFYSYIRTNYSTAQSTGLRLMWYKNKGDLEEPIIFSEVRMSKEEDSIWFHSAEAQDSGFYTCVLRNSTYCMKVSMSLTVAENESGLCYNSRIRYLEKSEVTKRKEISCPDMDDFKKSDQEPDVVWYKECKPKMWRSIIIQKGNALLIQEVQEEDGGNYTCELKYEGKLVRRTTELKVTALLTDKPPKPLFPMENQPSVIDVQLGKPLNIPCKAFFGFSGESGPMIYWMKGEKFIEELAGHIREGEIRLLKEHLGEKEVELALIFDSVVEADLANYTCHVENRNGRKHASVLLRKKDLIYK

SEQ ID NO: 2543 - protein, 328 aa, synthetic construct
  REGION 1..328: note = IL1RL1 (Q01638) SP+PP+ECD
MGFWILAILTILMYSTAAKFSKQSWGLENEALIVRCPRQGKPSYTVDWYYSQTNKSIPTQERNRVFASGQLLKFLPAAVADSGIYTCIVRSPTFNRTGYANVTIYKKQSDCNVPDYLMYSTVSGSEKNSKIYCPTIDLYNWTAPLEWFKNCQALQGSRYRAHKSFLVIDNVMTEDAGDYTCKFIHNENGANYSVTATRSFTVKDEQGFSLFPVIGAPAQNEIKEVEIGKNANLTCSACFGKGTQFLAAVLWQLNGTKITDFGEPRIQQEEGQNQSFSNGLACLDMVLRIADVKEEDLLLQYDCLALNLHGLRRHTVRLSRKNPIDHHS

SEQ ID NO: 2544 - protein, 335 aa, synthetic construct
  REGION 1..335: note = IL1RL2 (Q9HB29) SP+PP+ECD
MWSLLLCGLSIALPLSVTADGCKDIFMKNEILSASQPFAFNCTFPPITSGEVSVTWYKNSSKIPVSKIIQSRIHQDETWILFLPMEWGDSGVYQCVIKGRDSCHRIHVNLTVFEKHWCDTSIGGLPNLSDEYKQILHLGKDDSLTCHLHFPKSCVLGPIKWYKDCNEIKGERFTVLETRLLVSNVSAEDRGNYACQAILTHSGKQYEVLNGITVSITERAGYGGSVPKIIYPKNHSIEVQLGTTLIVDCNVTDTKDNTNLRCWRVNNTLVDDYYDESKRIREGVETHVSFREHNLYTVNITFLEVKMEDYGLPFMCHAGVSTAYIILQLPAPDFR

SEQ ID NO: 2545 - protein, 250 aa, synthetic construct
  REGION 1..250: note = IL20RA (Q9UHF4) SP+PP+ECD
MRAPGRPALRPLPLPPLLLLLLAAPWGRAVPCVSGGLPKPANITFLSINMKNVLQWTPPEGLQGVKVTYTVQYFIYGQKKWLNKSECRNINRTYCDLSAETSDYEHQYYAKVKAIWGTKCSKWAESGRFYPFLETQIGPPEVALTTDEKSISVVLTAPEKWKRNPEDLPVSMQQIYSNLKYNVSVLNTKSNRTWSQCVTNHTLVLTWLEPNTLYCVHVESFVPGPPRRAQPSEKQCARTLKDQSSEFKAK

SEQ ID NO: 2546 - protein, 233 aa, synthetic construct
  REGION 1..233: note = IL20RB (Q6UXL0) SP+PP+ECD
MQTFTMVLEEIWTSLFMWFFYALIPCLLTDEVAILPAPQNLSVLSTNMKHLLMWSPVIAPGETVYYSVEYQGEYESLYTSHIWIPSSWCSLTEGPECDVTDDITATVPYNLRVRATLGSQTSAWSILKHPFNRNSTILTRPGMEITKDGFHLVIELEDLGPQFEFLVAYWRREPGAEEHVKMVRSGGIPVHLETMEPGAAYCVKAQTFVKAIGRYSAFSQTECVEVQGEAIPL

SEQ ID NO: 2547 - protein, 232 aa, synthetic construct
  REGION 1..232: note = IL21R (Q9HBE5) SP+PP+ECD
MPRGWAAPLLLLLLQGGWGCPDLVCYTDYLQTVICILEMWNLHPSTLTLTWQDQYEELKDEATSCSLHRSAHNATHATYTCHMDVFHFMADDIFSVNITDQSGNYSQECGSFLLAESIKPAPPFNVTVTFSGQYNISWRSDYEDPAFYMLKGKLQYELQYRNRGDPWAVSPRRKLISVDSRSVSLLPLEFRKDSSYELQVRAGPMPGSSYQGTWSEWSDPVIFQTQSEELKE

SEQ ID NO: 2548 - protein, 228 aa, synthetic construct
  REGION 1..228: note = IL22RA1 (Q8N6P7) SP+PP+ECD
MRTLLTILTVGSLAAHAPEDPSDLLQHVKFQSSNFENILTWDSGPEGTPDTVYSIEYKTYGERDWVAKKGCQRITRKSCNLTVETGNLTELYYARVTAVSAGGRSATKMTDRFSSLQHTTLKPPDVTCISKVRSIQMIVHPTPTPIRAGDGHRLTLEDIFHDLFYHLELQVNRTYQMHLGGKQREYEFFGLTPDTEFLGTIMICVPTWAKESAPYMCRVKTLPDRTWT

SEQ ID NO: 2549 - protein, 355 aa, synthetic construct
  REGION 1..355: note = IL23R (Q5VWK5) SP+PP+ECD
MNQVTIQWDAVIALYILFSWCHGGITNINCSGHIWVEPATIFKMGMNISIYCQAAIKNCQPRKLHFYKNGIKERFQITRINKTTARLWYKNFLEPHASMYCTAECPKHFQETLICGKDISSGYPPDIPDEVTCVIYEYSGNMTCTWNAGKLTYIDTKYVVHVKSLETEEEQQYLTSSYINISTDSLQGGKKYLVWVQAANALGMEESKQLQIHLDDIVIPSAAVISRAETINATVPKTIIYWDSQTTIEKVSCEMRYKATTNQTWNVKEFDTNFTYVQQSEFYLEPNIKYVFQVRCQETGKRYWQPWSSLFFHKTPETVPQVTSKAFQHDTWNSGLTVASISTGHLTSDNRGDIG

SEQ ID NO: 2550 - protein, 516 aa, synthetic construct
  REGION 1..516: note = IL27RA (Q6UWB1) SP+PP+ECD
MRGGRGAPFWLWPLPKLALLPLLWVLFQRTRPQGSAGPLQCYGVGPLGDLNCSWEPLGDLGAPSELHLQSQKYRSNKTQTVAVAAGRSWVAIPREQLTMSDKLLVWGTKAGQPLWPPVFVNLETQMKPNAPRLGPDVDFSEDDPLEATVHWAPPTWPSHKVLICQFHYRRCQEAAWTLLEPELKTIPLTPVEIQDLELATGYKVYGRCRMEKEEDLWGEWSPILSFQTPPSAPKDVWVSGNLCGTPGGEEPLLLWKAPGPCVQVSYKVWFWVGGRELSPEGITCCCSLIPSGAEWARVSAVNATSWEPLTNLSLVCLDSASAPRSVAVSSIAGSTELLVTWQPGPGEPLEHVVDWARDGDPLEKLNWVRLPPGNLSALLPGNFTVGVPYRITVTAVSASGLASASSVWGFREELAPLVGPTLWRLQDAPPGTPAIAWGEVPRHQLRGHLTHYTLCAQSGTSPSVCMNVSGNTQSVTLPDLPWGPCELWVTASTIAGQGPPGPILRLHLPDNTLRWK

SEQ ID NO: 2551 - protein, 240 aa, synthetic construct
  REGION 1..240: note = IL2RA (P01589) SP+PP+ECD
MDSYLLMWGLLTFIMVPGCQAELCDDDPPEIPHATFKAMAYKEGTMLNCECKRGFRRIKSGSLYMLCTGNSSHSSWDNQCQCTSSATRNTTKQVTPQPEEQKERKTTEMQSPMQPVDQASLPGHCREPPPWENEATERIYHFVVGQMVYYQCVQGYRALHRGPAESVCKMTHGKTRWTQPQLICTGEMETSQFPGEEKPQASPEGRPESETSCLVTTTDFQIQTEMAATMETSIFTTEYQ

SEQ ID NO: 2552 - protein, 240 aa, synthetic construct
  REGION 1..240: note = IL2RB (P14784) SP+PP+ECD
MAAPALSWRLPLLILLLPLATSWASAAVNGTSQFTCFYNSRANISCVWSQDGALQDTSCQVHAWPDRRRWNQTCELLPVSQASWACNLILGAPDSQKLTTVDIVTLRVLCREGVRWRVMAIQDFKPFENLRLMAPISLQVVHVETHRCNISWEISQASHYFERHLEFEARTLSPGHTWEEAPLLTLKQKQEWICLETLTPDTQYEFQVRVKPLQGEFTTWSPWSQPLAFRTKPAALGKDT

SEQ ID NO: 2553 - protein, 262 aa, synthetic construct
  REGION 1..262: note = IL2RG (P31785) SP+PP+ECD
MLKPSLPFTSLLFLQLPLLGVGLNTTILTPNGNEDTTADFFLTTMPTDSLSVSTLPLPEVQCFVFNVEYMNCTWNSSSEPQPTNLTLHYWYKNSDNDKVQKCSHYLFSEEITSGCQLQKKEIHLYQTFVVQLQDPREPRRQATQMLKLQNLVIPWAPENLTLHKLSESQLELNWNNRFLNHCLEHLVQYRTDWDHSWTEQSVDYRHKFSLPSVDGQKRYTFRVRSRFNPLCGSAQHWSEWSHPIHWGSNTSKENPFLFALEA

SEQ ID NO: 2554 - protein, 519 aa, synthetic construct
  REGION 1..519: note = IL31RA (Q8NI17) SP+PP+ECD
MMWTWALWMLPSLCKFSLAALPAKPENISCVYYYRKNLTCTWSPGKETSYTQYTVKRTYAFGEKHDNCTTNSSTSENRASCSFFLPRITIPDNYTIEVEAENGDGVIKSHMTYWRLENIAKTEPPKIFRVKPVLGIKRMIQIEWIKPELAPVSSDLKYTLRFRTVNSTSWMEVNFAKNRKDKNQTYNLTGLQPFTEYVIALRCAVKESKFWSDWSQEKMGMTEEEAPCGLELWRVLKPAEADGRRPVRLLWKKARGAPVLEKTLGYNIWYYPESNTNLTETMNTTNQQLELHLGGESFWVSMISYNSLGKSPVATLRIPAIQEKSFQCIEVMQACVAEDQLVVKWQSSALDVNTWMIEWFPDVDSEPTTLSWESVSQATNWTIQQDKLKPFWCYNISVYPMLHDKVGEPYSIQAYAKEGVPSEGPETKVENIGVKTVTITWKEIPKSERKGIICNYTIFYQAEGGKGFSKTVNSSILQYGLESLKRKTSYIVQVMASTSAGGTNGTSINFKTLSFSVFE

SEQ ID NO: 2555 - protein, 305 aa, synthetic construct
  REGION 1..305: note = IL3RA (P26951) SP+PP+ECD
MVLLWLTLLLIALPCLLQTKEDPNPPITNLRMKAKAQQLTWDLNRNVTDIECVKDADYSMPAVNNSYCQFGAISLCEVTNYTVRVANPPFSTWILFPENSGKPWAGAENLTCWIHDVDFLSCSWAVGPGAPADVQYDLYLNVANRRQQYECLHYKTDAQGTRIGCRFDDISRLSSGSQSSHILVRGRSAAFGIPCTDKFVVFSQIEILTPPNMTAKCNKTHSFMHWKMRSHFNRKFRYELQIQKRMQPVITEQVRDRTSFQLLNPGTYTVQIRARERVYEFLSAWSTPQRFECDQEEGANTRAWR

SEQ ID NO: 2556 - protein, 232 aa, synthetic construct
  REGION 1..232: note = IL4R (P24394) SP+PP+ECD
MGWLCSGLLFPVSCLVLLQVASSGNMKVLQEPTCVSDYMSISTCEWKMNGPTNCSTELRLLYQLVFLLSEAHTCIPENNGGAGCVCHLLMDDVVSADNYTLDLWAGQQLLWKGSFKPSEHVKPRAPGNLTVHTNVSDTLLLTWSNPYPPDNYLYNHLTYAVNIWSENDPADFRIYNVTYLEPSLRIAASTLKSGISYRARVRAWAQCYNTTWSEWSPSTKWHNSYREPFEQH

SEQ ID NO: 2557 - protein, 342 aa, synthetic construct
  REGION 1..342: note = IL5RA (Q01344) SP+PP+ECD
MIIVAHVLLILLGATEILQADLLPDEKISLLPPVNFTIKVTGLAQVLLQWKPNPDQEQRNVNLEYQVKINAPKEDDYETRITESKCVTILHKGFSASVRTILQNDHSLLASSWASAELHAPPGSPGTSIVNLTCTTNTTEDNYSRLRSYQVSLHCTWLVGTDAPEDTQYFLYYRYGSWTEECQEYSKDTLGRNIACWFPRTFILSKGRDWLAVLVNGSSKHSAIRPFDQLFALHAIDQINPPLNVTAEIEGTRLSIQWEKPVSAFPIHCFDYEVKIHNTRNGYLQIEKLMTNAFISIIDDLSKYDVQVRAAVSSMCREAGLWSEWSQPIYVGNDEHKPLREW

SEQ ID NO: 2558 - protein, 365 aa, synthetic construct
  REGION 1..365: note = IL6R (P08887) SP+PP+ECD
MLAVGCALLAALLAAPGAALAPRRCPAQEVARGVLTSLPGDSVTLTCPGVEPEDNATVHWVLRKPAAGSHPSRWAGMGRRLLLRSVQLHDSGNYSCYRAGRPAGTVHLLVDVPPEEPQLSCFRKSPLSNVVCEWGPRSTPSLTTKAVLLVRKFQNSPAEDFQEPCQYSQESQKFSCQLAVPEGDSSFYIVSMCVASSVGSKFSKTQTFQGCGILQPDPPANITVTAVARNPRWLSVTWQDPHSWNSSFYRLRFELRYRAERSKTFTTWMVKDLQHHCVIHDAWSGLRHVVQLRAQEEFGQGEWSEWSPEAMGTPWTESRSPPAENEVSTPMQALTTNKDDDNILFRDSANATSLPVQDSSSVPLP

SEQ ID NO: 2559 - protein, 619 aa, synthetic construct
  REGION 1..619: note = IL6ST (P40189) SP+PP+ECD
MLTLQTWLVQALFIFLTTESTGELLDPCGYISPESPVVQLHSNFTAVCVLKEKCMDYFHVNANYIVWKTNHFTIPKEQYTIINRTASSVTFTDIASLNIQLTCNILTFGQLEQNVYGITIISGLPPEKPKNLSCIVNEGKKMRCEWDGGRETHLETNFTLKSEWATHKFADCKAKRDTPTSCTVDYSTVYFVNIEVWVEAENALGKVTSDHINFDPVYKVKPNPPHNLSVINSEELSSILKLTWTNPSIKSVIILKYNIQYRTKDASTWSQIPPEDTASTRSSFTVQDLKPFTEYVFRIRCMKEDGKGYWSDWSEEASGITYEDRPSKAPSFWYKIDPSHTQGYRTVQLVWKTLPPFEANGKILDYEVTLTRWKSHLQNYTVNATKLTVNLTNDRYLATLTVRNLVGKSDAAVLTIPACDFQATHPVMDLKAFPKDNMLWVEWTTPRESVKKYILEWCVLSDKAPCITDWQQEDGTVHRTYLRGNLAESKCYLITVTPVYADGPGSPESIKAYLKQAPPSKGPTVRTKKVGKNEAVLEWDQLPVDVQNGFIRNYTIFYRTIIGNETAVNVDSSHTEYTLSSLTSDTLYMVRMAAYTDEGGKDGPEFTFTTPKFAQGEIE

SEQ ID NO: 2560 - protein, 239 aa, synthetic construct
  REGION 1..239: note = IL7R (P16871) SP+PP+ECD
MTILGTTFGMVFSLLQVVSGESGYAQNGDLEDAELDDYSFSCYSQLEVNGSQHSLTCAFEDPDVNITNLEFEICGALVEVKCLNFRKLQEIYFIETKKFLLIGKSNICVKVGEKSLTCKKIDLTTIVKPEAPFDLSVVYREGANDFVVTFNTSHLQKKYVKVLMHDVAYRQEKDENKWTHVNLSSTKLTLLQRKLQPAAMYEIKVRSIPDHYFKGFWSEWSPSYYFRTPEINNSSGEMD

SEQ ID NO: 2561 - protein, 270 aa, synthetic construct; identical to SEQ ID NO: 900
  REGION 1..270: note = IL9R (Q01113) SP+PP+ECD

SEQ ID NO: 2562 - protein, 167 aa, synthetic construct
  REGION 1..167: note = ILDR1 (Q86SU0) SP+PP+ECD
MAWPKLPAPWLLLCTWLPAGCLSLLVTVQHTERYVTLFASIILKCDYTTSAQLQDVVVTWRFKSFCKDPIFDYYSASYQAALSLGQDPSNDCNDNQREVRIVAQRRGQNEPVLGVDYRQRKITIQNRADLVINEVMWWDHGVYYCTIEAPGDTSGDPDKEVKLIVLH

SEQ ID NO: 2563 - protein, 1099 aa, synthetic construct
  REGION 1..1099: note = IMPG2 (Q9BZV3) SP+PP+ECD
MIMFPLFGKISLGILIFVLIEGDFPSLTAQTYLSIEEIQEPKSAVSFLLPEESTDLSLATKKKQPLDRRETERQWLIRRRRSILFPNGVKICPDESVAEAVANHVKYFKVRVCQEAVWEAFRTFWDRLPGREEYHYWMNLCEDGVTSIFEMGTNFSESVEHRSLIMKKLTYAKETVSSSELSSPVPVGDTSTLGDTTLSVPHPEVDAYEGASESSLERPEESISNEIENVIEEATKPAGEQIAEFSIHLLGKQYREELQDSSSFHHQHLEEEFISEVENAFTGLPGYKEIRVLEFRSPKENDSGVDVYYAVTFNGEAISNTTWDLISLHSNKVENHGLVELDDKPTVVYTISNFRDYIAETLQQNFLLGNSSLNPDPDSLQLINVRGVLRHQTEDLVWNTQSSSLQATPSSILDNTFQAAWPSADESITSSIPPLDFSSGPPSATGRELWSESPLGDLVSTHKLAFPSKMGLSSSPEVLEVSSLTLHSVTPAVLQTGLPVASEERTSGSHLVEDGLANVEESEDFLSIDSLPSSSFTQPVPKETIPSMEDSDVSLTSSPYLTSSIPFGLDSLTSKVKDQLKVSPFLPDASMEKELIFDGGLGSGSGQKVDLITWPWSETSSEKSAEPLSKPWLEDDDSLLPAEIEDKKLVLVDKMDSTDQISKHSKYEHDDRSTHFPEEEPLSGPAVPIFADTAAESASLTLPKHISEVPGVDDYSVTKAPLILTSVAISASTDKSDQADAILREDMEQITESSNYEWFDSEVSMVKPDMQTLWTILPESERVWTRTSSLEKLSRDILASTPQSADRLWLSVTQSTKLPPTTISTLLEDEVIMGVQDISLELDRIGTDYYQPEQVQEQNGKVGSYVEMSTSVHSTEMVSVAWPTEGGDDLSYTQTSGALVVFFSLRVTNMMFSEDLFNKNSLEYKALEQRFLELLVPYLQSNLTGFQNLEILNFRNGSIVVNSRMKFANSVPPNVNNAVYMILEDFCTTAYNTMNLAIDKYSLDVESGDEANPCKFQACNEFSECLVNPWSGEAKCRCFPGYLSVEERPCQSLCDLQPDFCLNDGKCDIMPGHGAICRCRVGENWWYRGKHCEEFVSEP

SEQ ID NO: 2564 - protein, 956 aa, synthetic construct
  REGION 1..956: note = INSR (P06213) SP+PP+ECD
MATGGRRGAAAAPLLVAVAALLLGAAGHLYPGEVCPGMDIRNNLTRLHELENCSVIEGHLQILLMFKTRPEDFRDLSFPKLIMITDYLLLFRVYGLESLKDLFPNLTVIRGSRLFFNYALVIFEMVHLKELGLYNLMNITRGSVRIEKNNELCYLATIDWSRILDSVEDNYIVLNKDDNEECGDICPGTAKGKTNCPATVINGQFVERCWTHSHCQKVCPTICKSHGCTAEGLCCHSECLGNCSQPDDPTKCVACRNFYLDGRCVETCPPPYYHFQDWRCVNFSFCQDLHHKCKNSRRQGCHQYVIHNNKCIPECPSGYTMNSSNLLCTPCLGPCPKVCHLLEGEKTIDSVTSAQELRGCTVINGSLIINIRGGNNLAAELEANLGLIEEISGYLKIRRSYALVSLSFFRKLRLIRGETLEIGNYSFYALDNQNLRQLWDWSKHNLTITQGKLFFHYNPKLCLSEIHKMEEVSGTKGRQERNDIALKTNGDQASCENELLKFSYIRTSFDKILLRWEPYWPPDFRDLLGFMLFYKEAPYQNVTEFDGQDACGSNSWTVVDIDPPLRSNDPKSQNHPGWLMRGLKPWTQYAIFVKTLVTFSDERRTYGAKSDIIYVQTDATNPSVPLDPISVSNSSSQIILKWKPPSDPNGNITHYLVFWERQAEDSELFELDYCLKGLKLPSRTWSPPFESEDSQKHNQSEYEDSAGECCSCPKTDSQILKELEESSFRKTFEDYLHNVVFVPRKTSSGTGAEDPRPSRKRRSLGDVGNVTVAVPTVAAFPNTSSTSVPTSPEEHRPFEKVVNKESLVISGLRHFTGYRIELQACNQDTPEERCSVAAYVSARTMPEAKADDIVGPVTHEIFENNVVHLMWQEPKEPNGLIVLYEVSYRRYGDEELHLCVSRKHFALERGCRLRGLSPGNYSVRIRATSLAGNGSWTEPTYFYVTDYLDVPSNIAK

SEQ ID NO: 2565 - protein, 921 aa, synthetic construct
  REGION 1..921: note = INSRR (P14616) SP+PP+ECD
MAVPSLWPWGACLPVIFLSLGFGLDTVEVCPSLDIRSEVAELRQLENCSVVEGHLQILLMFTATGEDFRGLSFPRLTQVTDYLLLFRVYGLESLRDLFPNLAVIRGTRLFLGYALVIFEMPHLRDVALPALGAVLRGAVRVEKNQELCHLSTIDWGLLQPAPGANHIVGNKLGEECADVCPGVLGAAGEPCAKTTFSGHTDYRCWTSSHCQRVCPCPHGMACTARGECCHTECLGGCSQPEDPRACVACRHLYFQGACLWACPPGTYQYESWRCVTAERCASLHSVPGRASTFGIHQGSCLAQCPSGFTRNSSSIFCHKCEGLCPKECKVGTKTIDSIQAAQDLVGCTHVEGSLILNLRQGYNLEPQLQHSLGLVETITGFLKIKHSFALVSLGFFKNLKLIRGDAMVDGNYTLYVLDNQNLQQLGSWVAAGLTIPVGKIYFAFNPRLCLEHIYRLEEVTGTRGRQNKAEINPRTNGDRAACQTRTLRFVSNVTEADRILLRWERYEPLEARDLLSFIVYYKESPFQNATEHVGPDACGTQSWNLLDVELPLSRTQEPGVTLASLKPWTQYAVFVRAITLTTEEDSPHQGAQSPIVYLRTLPAAPTVPQDVISTSNSSSHLLVRWKPPTQRNGNLTYYLVLWQRLAEDGDLYLNDYCHRGLRLPTSNNDPRFDGEDGDPEAEMESDCCPCQHPPPGQVLPPLEAQEASFQKKFENFLHNAITIPISPWKVTSINKSPQRDSGRHRRAAGPLRLGGNSSDFEIQEDKVPRERAVLSGLRHFTEYRIDIHACNHAAHTVGCSAATFVFARTMPHREADGIPGKVAWEASSKNSVLLRWLEPPDPNGLILKYEIKYRRLGEEATVLCVSRLRYAKFGGVHLALLPPGNYSARVRATSLAGNGSWTDSVAFYILGPEEEDAGGLH

SEQ ID NO: 2566 - protein, 589 aa, synthetic construct
  REGION 1..589: note = ISLR2 (Q6UXK2) SP+PP+ECD
MFPLRALWLVWALLGVAGSCPEPCACVDKYAHQFADCAYKELREVPEGLPANVTTLSLSANKITVLRRGAFADVTQVTSLWLAHNEVRTVEPGALAVLSQLKNLDLSHNFISSFPWSDLRNLSALQLLKMNHNRLGSLPRDALGALPDLRSLRINNNRLRTLAPGTFDALSALSHLQLYHNPFHCGCGLVWLQAWAASTRVSLPEPDSIACASPPALQGVPVYRLPALPCAPPSVHLSAEPPLEAPGTPLRAGLAFVLHCIADGHPTPRLQWQLQIPGGTVVLEPPVLSGEDDGVGAEEGEGEGDGDLLTQTQAQTPTPAPAWPAPPATPRFLALANGSLLVPLLSAKEAGVYTCRAHNELGANSTSIRVAVAATGPPKHAPGAGGEPDGQAPTSERKSTAKGRGNSVLPSKPEGKIKGQGLAKVSILGETETEPEEDTSEGEEAEDQILADPAEEQRCGNGDPSRYVSNHAFNQSAELKPHVFELGVIALDVAEREARVQLTPLAARWGPGPGGAGGAPRPGRRPLRLLYLCPAGGGAAVQWSRVEEGVNAYWFRGLRPGTNYSVCLALAGEACHVQVVFSTKKELPS

SEQ ID NO: 2567 - protein, 566 aa, synthetic construct
  REGION 1..566: note = ITFG1 (Q8TB96) SP+PP+ECD
MAAAGRLPSSWALFSPLLAGLALLGVGPVPARALHNVTAELFGAEAWGTLAAFGDLNSDKQTDLFVLRERNDLIVFLADQNAPYFKPKVKVSFKNHSALITSVVPGDYDGDSQMDVLLTYLPKNYAKSELGAVIFWGQNQTLDPNNMTILNRTFQDEPLIMDFNGDLIPDIFGITNESNQPQILLGGNLSWHPALTTTSKMRIPHSHAFIDLTEDFTADLFLTTLNATTSTFQFEIWENLDGNFSVSTILEKPQNMMVVGQSAFADFDGDGHMDHLLPGCEDKNCQKSTIYLVRSGMKQWVPVLQDFSNKGTLWGFVPFVDEQQPTEIPIPITLHIGDYNMDGYPDALVILKNTSGSNQQAFLLENVPCNNASCEEARRMFKVYWELTDLNQIKDAMVATFFDIYEDGILDIVVLSKGYTKNDFAIHTLKNNFEADAYFVKVIVLSGLCSNDCPRKITPFGVNQPGPYIMYTTVDANGYLKNGSAGQLSQSAHLALQLPYNVLGLGRSANFLDHLYVGIPRPSGEKSIRKQEWTAIIPNSQLIVIPYPHNVPRSWSAKLYLTPSNI

SEQ ID NO: 2568 - protein, 1141 aa, synthetic construct
  REGION 1..1141: note = ITGA1 (P56199) SP+PP+ECD
MAPRPRARPGVAVACCWLLTVVLRCCVSFNVDVKNSMTFSGPVEDMFGYTVQQYENEEGKWVLIGSPLVGQPKNRTGDVYKCPVGRGESLPCVKLDLPVNTSIPNVTEVKENMTFGSTLVTNPNGGFLACGPLYAYRCGHLHYTTGICSDVSPTFQVVNSIAPVQECSTQLDIVIVLDGSNSIYPWDSVTAFLNDLLERMDIGPKQTQVGIVQYGENVTHEFNLNKYSSTEEVLVAAKKIVQRGGRQTMTALGIDTARKEAFTEARGARRGVKKVMVIVTDGESHDNHRLKKVIQDCEDENIQRFSIAILGSYNRGNLSTEKFVEEIKSIASEPTEKHFFNVSDELALVTIVKTLGERIFALEATADQSAASFEMEMSQTGFSAHYSQDWVMLGAVGAYDWNGTVVMQKASQIIIPRNTTFNVESTKKNEPLASYLGYTVNSATASSGDVLYIAGQPRYNHTGQVIIYRMEDGNIKILQTLSGEQIGSYFGSILTTTDIDKDSNTDILLVGAPMYMGTEKEEQGKVYVYALNQTRFEYQMSLEPIKQTCCSSRQHNSCTTENKNEPCGARFGTAIAAVKDLNLDGFNDIVIGAPLEDDHGGAVYIYHGSGKTIRKEYAQRIPSGGDGKTLKFFGQSIHGEMDLNGDGLTDVTIGGLGGAALFWSRDVAVVKVTMNFEPNKVNIQKKNCHMEGKETVCINATVCFDVKLKSKEDTIYEADLQYRVTLDSLRQISRSFFSGTQERKVQRNITVRKSECTKHSFYMLDKHDFQDSVRITLDFNLTDPENGPVLDDSLPNSVHEYIPFAKDCGNKEKCISDLSLHVATTEKDLLIVRSQNDKFNVSLTVKNTKDSAYNTRTIVHYSPNLVFSGIEAIQKDSCESNHNITCKVGYPFLRRGEMVTFKILFQFNTSYLMENVTIYLSATSDSEEPPETLSDNVVNISIPVKYEVGLQFYSSASEYHISIAANETVPEVINSTEDIGNEINIFYLIRKSGSFPMPELKLSISFPNMTSNGYPVLYPTGLSSSENANCRPHIFEDPFSINSGKKMTTSTDHLKRGTILDCNTCKFATITCNLTSSDISQVNVSLILWKPTFIKSYFSSLNLTIRGELRSENASLVLSSSNQKRELAIQISKDGLPGRVP

SEQ ID NO: 2569 - protein, 1122 aa, synthetic construct
  REGION 1..1122: note = ITGA10 (O75578) SP+PP+ECD
MELPFVTHLFLPLVFLTGLCSPFNLDEHHPRLFPGPPEAEFGYSVLQHVGGGQRWMLVGAPWDGPSGDRRGDVYRCPVGGAHNAPCAKGHLGDYQLGNSSHPAVNMHLGMSLLETDGDGGFMACAPLWSRACGSSVFSSGICARVDASFQPQGSLAPTAQRCPTYMDVVIVLDGSNSIYPWSEVQTFLRRLVGKLFIDPEQIQVGLVQYGESPVHEWSLGDFRTKEEVVRAAKNLSRREGRETKTAQAIMVACTEGFSQSHGGRPEAARLLVVVTDGESHDGEELPAALKACEAGRVTRYGIAVLGHYLRRQRDPSSFLREIRTIASDPDERFFFNVTDEAALTDIVDALGDRIFGLEGSHAENESSFGLEMSQIGFSTHRLKDGILFGMVGAYDWGGSVLWLEGGHRLFPPRMALEDEFPPALQNHAAYLGYSVSSMLLRGGRRLFLSGAPRFRHRGKVIAFQLKKDGAVRVAQSLQGEQIGSYFGSELCPLDTDRDGTTDVLLVAAPMFLGPQNKETGRVYVYLVGQQSLLTLQGTLQPEPPQDARFGFAMGALPDLNQDGFADVAVGAPLEDGHQGALYLYHGTQSGVRPHPAQRIAAASMPHALSYFGRSVDGRLDLDGDDLVDVAVGAQGAAILLSSRPIVHLTPSLEVTPQAISVVQRDCRRRGQEAVCLTAALCFQVTSRTPGRWDHQFYMRFTASLDEWTAGARAAFDGSGQRLSPRRLRLSVGNVTCEQLHFHVLDTSDYLRPVALTVTFALDNTTKPGPVLNEGSPTSIQKLVPFSKDCGPDNECVTDLVLQVNMDIRGSRKAPFVVRGGRRKVLVSTTLENRKENAYNTSLSLIFSRNLHLASLTPQRESPIKVECAAPSAHARLCSVGHPVFQTGAKVTFLLEFEFSCSSLLSQVFVKLTASSDSLERNGTLQDNTAQTSAYIQYEPHLLFSSESTLHRYEVHPYGTLPVGPGPEFKTTLRVQNLGCYVVSGLIISALLPAVAHGGNYFLSLSQVITNNASCIVQNLTEPPGPPVHPEELQHTNRLNGSNTQCQVVRCHLGQLAKGTEVSVGLLRLVHNEFFRRAKFKSLTVVSTFELGTEEGSVLQLTEASRWSESLLEVVQTRPILIS

SEQ ID NO: 2570 - protein, 1141 aa, synthetic construct
  REGION 1..1141: note = ITGA11 (Q9UKX5) SP+PP+ECD
MDLPRGLVVAWALSLWPGFTDTFNMDTRKPRVIPGSRTAFFGYTVQQHDISGNKWLVVGAPLETNGYQKTGDVYKCPVIHGNCTKLNLGRVTLSNVSERKDNMRLGLSLATNPKDNSFLACSPLWSHECGSSYYTTGMCSRVNSNFRFSKTVAPALQRCQTYMDIVIVLDGSNSIYPWVEVQHFLINILKKFYIGPGQIQVGVVQYGEDVVHEFHLNDYRSVKDVVEAASHIEQRGGTETRTAFGIEFARSEAFQKGGRKGAKKVMIVITDGESHDSPDLEKVIQQSERDNVTRYAVAVLGYYNRRGINPETFLNEIKYIASDPDDKHFFNVTDEAALKDIVDALGDRIFSLEGTNKNETSFGLEMSQTGFSSHVVEDGVLLGAVGAYDWNGAVLKETSAGKVIPLRESYLKEFPEELKNHGAYLGYTVTSVVSSRQGRVYVAGAPRFNHTGKVILFTMHNNRSLTIHQAMRGQQIGSYFGSEITSVDIDGDGVTDVLLVGAPMYFNEGRERGKVYVYELRQNLFVYNGTLKDSHSYQNARFGSSIASVRDLNQDSYNDVVVGAPLEDNHAGAIYIFHGFRGSILKTPKQRITASELATGLQYFGCSIHGQLDLNEDGLIDLAVGALGNAVILWSRPVVQINASLHFEPSKINIFHRDCKRSGRDATCLAAFLCFTPIFLAPHFQTTTVGIRYNATMDERRYTPRAHLDEGGDRFTNRAVLLSSGQELCERINFHVLDTADYVKPVTFSVEYSLEDPDHGPMLDDGWPTTLRVSVPFWNGCNEDEHCVPDLVLDARSDLPTAMEYCQRVLRKPAQDCSAYTLSFDTTVFIIESTRQRVAVEATLENRGENAYSTVLNISQSANLQFASLIQKEDSDGSIECVNEERRLQKQVCNVSYPFFRAKAKVAFRLDFEFSKSIFLHHLEIELAAGSDSNERDSTKEDNVAPLRFHLKYEADVLFTRSSSLSHYEVKPNSSLERYDGIGPPFSCIFRIQNLGLFPIHGMMMKITIPIATRSGNRLLKLRDFLTDEANTSCNIWGNSTEYRPTPVEEDLRRAPQLNHSNSDVVSINCNIRLVPNQEINFHLLGNLWLRSLKALKYKSMKIMVNAALQRQFHSPFIFREEDPSRQIVFEISKQEDWQVP

SEQ ID NO: 2571 - protein, 1132 aa, synthetic construct
  REGION 1..1132: note = ITGA2 (P17301) SP+PP+ECD
MGPERTGAAPLPLLLVLALSQGILNCCLAYNVGLPEAKIFSGPSSEQFGYAVQQFINPKGNWLLVGSPWSGFPENRMGDVYKCPVDLSTATCEKLNLQTSTSIPNVTEMKTNMSLGLILTRNMGTGGFLTCGPLWAQQCGNQYYTTGVCSDISPDFQLSASFSPATQPCPSLIDVVVVCDESNSIYPWDAVKNFLEKFVQGLDIGPTKTQVGLIQYANNPRVVFNLNTYKTKEEMIVATSQTSQYGGDLTNTFGAIQYARKYAYSAASGGRRSATKVMVVVTDGESHDGSMLKAVIDQCNHDNILRFGIAVLGYLNRNALDTKNLIKEIKAIASIPTERYFFNVSDEAALLEKAGTLGEQIFSIEGTVQGGDNFQMEMSQVGFSADYSSQNDILMLGAVGAFGWSGTIVQKTSHGHLIFPKQAFDQILQDRNHSSYLGYSVAAISTGESTHFVAGAPRANYTGQIVLYSVNENGNITVIQAHRGDQIGSYFGSVLCSVDVDKDTITDVLLVGAPMYMSDLKKEEGRVYLFTIKKGILGQHQFLEGPEGIENTRFGSAIAALSDINMDGFNDVIVGSPLENQNSGAVYIYNGHQGTIRTKYSQKILGSDGAFRSHLQYFGRSLDGYGDLNGDSITDVSIGAFGQVVQLWSQSIADVAIEASFTPEKITLVNKNAQIILKLCFSAKFRPTKQNNQVAIVYNITLDADGFSSRVTSRGLFKENNERCLQKNMVVNQAQSCPEHIIYIQEPSDVVNSLDLRVDISLENPGTSPALEAYSETAKVFSIPFHKDCGEDGLCISDLVLDVRQIPAAQEQPFIVSNQNKRLTFSVTLKNKRESAYNTGIVVDFSENLFFASFSLPVDGTEVTCQVAASQKSVACDVGYPALKREQQVTFTINFDFNLQNLQNQASLSFQALSESQEENKADNLVNLKIPLLYDAEIHLTRSTNINFYEISSDGNVPSIVHSFEDVGPKFIFSLKVTTGSVPVSMATVIIHIPQYTKEKNPLMYLTGVQTDKAGDISCNADINPLKIGQTSSSVSFKSENFRHTKELNCRTASCSNVTCWLKDVHMKGEYFVNVTTRIWNGTFASSTFQTVQLTAAAEINTYNPEIYVIEDNTVTIPLMIMKPDEKAEVPT

SEQ ID NO: 2572 - protein, 993 aa, synthetic construct
  REGION 1..993: note = ITGA2B (P08514) SP+PP+ECD
MARALCPLQALWLLEWVLLLLGPCAAPPAWALNLDPVQLTFYAGPNGSQFGFSLDFHKDSHGRVAIVVGAPRTLGPSQEETGGVFLCPWRAEGGQCPSLLFDLRDETRNVGSQTLQTFKARQGLGASVVSWSDVIVACAPWQHWNVLEKTEEAEKTPVGSCFLAQPESGRRAEYSPCRGNTLSRIYVENDFSWDKRYCEAGFSSVVTQAGELVLGAPGGYYFLGLLAQAPVADIFSSYRPGILLWHVSSQSLSFDSSNPEYFDGYWGYSVAVGEFDGDLNTTEYVVGAPTWSWTLGAVEILDSYYQRLHRLRGEQMASYFGHSVAVTDVNGDGRHDLLVGAPLYMESRADRKLAEVGRVYLFLQPRGPHALGAPSLLLTGTQLYGRFGSAIAPLGDLDRDGYNDIAVAAPYGGPSGRGQVLVFLGQSEGLRSRPSQVLDSPFPTGSAFGFSLRGAVDIDDNGYPDLIVGAYGANQVAVYRAQPVVKASVQLLVQDSLNPAVKSCVLPQTKTPVSCFNIQMCVGATGHNIPQKLSLNAELQLDRQKPRQGRRVLLLGSQQAGTTLNLDLGGKHSPICHTTMAFLRDEADFRDKLSPIVLSLNVSLPPTEAGMAPAVVLHGDTHVQEQTRIVLDCGEDDVCVPQLQLTASVTGSPLLVGADNVLELQMDAANEGEGAYEAELAVHLPQGAHYMRALSNVEGFERLICNQKKENETRVVLCELGNPMKKNAQIGIAMLVSVGNLEEAGESVSFQLQIRSKNSQNPNSKIVLLDVPVRAEAQVELRGNSFPASLVVAAEEGEREQNSLDSWGPKVEHTYELHNNGPGTVNGLHLSIHLPGQSQPSDLLYILDIQPQGGLQCFPQPPVNPLKVDWGLPIPSPSPIHPAHHKRDRRQIFLPEPEQPSRLQDPVLVSCDSAPCTVVQCDLQEMARGQRAMVTVLAFLWLPSLYQRPLDQFVLQSHAWFNVSSLPYAVPPLSLPRGEAQVWTQLLRALEER

SEQ ID NO: 2573 - protein, 991 aa, synthetic construct
  REGION 1..991: note = ITGA3 (P26006) SP+PP+ECD
MGPGPSRAPRAPRLMLCALALMVAAGGCVVSAFNLDTRFLVVKEAGNPGSLFGYSVALHRQTERQQRYLLLAGAPRELAVPDGYTNRTGAVYLCPLTAHKDDCERMNITVKNDPGHHIIEDMWLGVTVASQGPAGRVLVCAHRYTQVLWSGSEDQRRMVGKCYVRGNDLELDSSDDWQTYHNEMCNSNTDYLETGMCQLGTSGGFTQNTVYFGAPGAYNWKGNSYMIQRKEWDLSEYSYKDPEDQGNLYIGYTMQVGSFILHPKNITIVTGAPRHRHMGAVFLLSQEAGGDLRRRQVLEGSQVGAYFGSAIALADLNNDGWQDLLVGAPYYFERKEEVGGAIYVFMNQAGTSFPAHPSLLLHGPSGSAFGLSVASIGDINQDGFQDIAVGAPFEGLGKVYIYHSSSKGLLRQPQQVIHGEKLGLPGLATFGYSLSGQMDVDENFYPDLLVGSLSDHIVLLRARPVINIVHKTLVPRPAVLDPALCTATSCVQVELCFAYNQSAGNPNYRRNITLAYTLEADRDRRPPRLRFAGSESAVFHGFFSMPEMRCQKLELLLMDNLRDKLRPIIISMNYSLPLRMPDRPRLGLRSLDAYPILNQAQALENHTEVQFQKECGPDNKCESNLQMRAAFVSEQQQKLSRLQYSRDVRKLLLSINVTNTRTSERSGEDAHEALLTLVVPPALLLSSVRPPGACQANETIFCELGNPFKRNQRMELLIAFEVIGVTLHTRDLQVQLQLSTSSHQDNLWPMILTLLVDYTLQTSLSMVNHRLQSFFGGTVMGESGMKTVEDVGSPLKYEFQVGPMGEGLVGLGTLVLGLEWPYEVSNGKWLLYPTEITVHGNGSWPCRPPGDLINPLNLTLSDPGDRPSSPQRRRRQLDPGGGQGPPPVTLAAAKKAKSETVLTCATGRAHCVWLECPIPDAPVVTNVTVKARVWNSTFIEDYRDFDRVRVNGWATLFLRTSIPTINMENKTTWFSVDIDSELVEELPAEIE

SEQ ID NO: 2574 - protein, 976 aa, synthetic construct
  REGION 1..976: note = ITGA4 (P13612) SP+PP+ECD
MAWEARREPGPRRAAVRETVMLLLCLGVPTGRPNVDTESALLYQGPHNTLFGYSVVLHSHGANRWLLVGAPTANWLANASVINPGAIYRCRIGKNPGQTCEQLQLGSPNGEPCGKTCLEERDNQWLGVTLSRQPGENGSIVTCGHRWKNIFYIKNENKLPTGGCYGVPPDLRTELSKRIAPCYQDYVKKFGENFASCQAGISSFYTKDLIVMGAPGSSYWTGSLFVYNITTNKYKAFLDKQNQVKFGSYLGYSVGAGHFRSQHTTEVVGGAPQHEQIGKAYIFSIDEKELNILHEMKGKKLGSYFGASVCAVDLNADGFSDLLVGAPMQSTIREEGRVFVYINSGSGAVMNAMETNLVGSDKYAARFGESIVNLGDIDNDGFEDVAIGAPQEDDLQGAIYIYNGRADGISSTFSQRIEGLQISKSLSMFGQSISGQIDADNNGYVDVAVGAFRSDSAVLLRTRPVVIVDASLSHPESVNRTKFDCVENGWPSVCIDLTLCFSYKGKEVPGYIVLFYNMSLDVNRKAESPPRFYFSSNGTSDVITGSIQVSSREANCRTHQAFMRKDVRDILTPIQIEAAYHLGPHVISKRSTEEFPPLQPILQQKKEKDIMKKTINFARFCAHENCSADLQVSAKIGFLKPHENKTYLAVGSMKTLMLNVSLFNAGDDAYETTLHVKLPVGLYFIKILELEEKQINCEVTDNSGVVQLDCSIGYIYVDHLSRIDISFLLDVSSLSRAEEDLSITVHATCENEEEMDNLKHSRVTVAIPLKYEVKLTVHGFVNPTSFVYGSNDENEPETCMVEKMNLTFHVINTGNSMAPNVSVEIMVPNSFSPQTDKLFNILDVQTTTGECHFENYQRVCALEQQKSAMQTLKGIVRFLSKTDKRLLYCIKADPHCLNFLCNFGKMESGKEASVHIQLEGRPSILEMDETSALKFEIRATGFPEPNPRVIELNKDENVAHVLLEGLHHQRPKRYFT

SEQ ID NO: 2575 - protein, 995 aa, synthetic construct
  REGION 1..995: note = ITGA5 (P08648) SP+PP+ECD
MGSRTPESPLHAVQLRWGPRRRPPLLPLLLLLLPPPPRVGGFNLDAEAPAVLSGPPGSFFGFSVEFYRPGTDGVSVLVGAPKANTSQPGVLQGGAVYLCPWGASPTQCTPIEFDSKGSRLLESSLSSSEGEEPVEYKSLQWFGATVRAHGSSILACAPLYSWRTEKEPLSDPVGTCYLSTDNFTRILEYAPCRSDFSWAAGQGYCQGGFSAEFTKTGRVVLGGPGSYFWQGQILSATQEQIAESYYPEYLINLVQGQLQTRQASSIYDDSYLGYSVAVGEFSGDDTEDFVAGVPKGNLTYGYVTILNGSDIRSLYNFSGEQMASYFGYAVAATDVNGDGLDDLLVGAPLLMDRTPDGRPQEVGRVYVYLQHPAGIEPTPTLTLTGHDEFGRFGSSLTPLGDLDQDGYNDVAIGAPFGGETQQGVVFVFPGGPGGLGSKPSQVLQPLWAASHTPDFFGSALRGGRDLDGNGYPDLIVGSFGVDKAVVYRGRPIVSASASLTIFPAMFNPEERSCSLEGNPVACINLSFCLNASGKHVADSIGFTVELQLDWQKQKGGVRRALFLASRQATLTQTLLIQNGAREDCREMKIYLRNESEFRDKLSPIHIALNFSLDPQAPVDSHGLRPALHYQSKSRIEDKAQILLDCGEDNICVPDLQLEVFGEQNHVYLGDKNALNLTFHAQNVGEGGAYEAELRVTAPPEAEYSGLVRHPGNFSSLSCDYFAVNQSRLLVCDLGNPMKAGASLWGGLRFTVPHLRDTKKTIQFDFQILSKNLNNSQSDVVSFRLSVEAQAQVTLNGVSKPEAVLFPVSDWHPRDQPQKEEDLGPAVHHVYELINQGPSSISQGVLELSCPQALEGQQLLYVTRVTGLNCTTNHPINPKGLELDPEGSLHHQQKREAPSRSSASSGPQILKCPEAECFRLRCELGPLHQQESQSLQLHFRVWAKTFLQREHQPFSLQCEAVYKALKMPYRILPRQLPQKERQVATAVQWTKAEGSY

SEQ ID NO: 2576 - protein, 1050 aa, synthetic construct
  REGION 1..1050: note = ITGA6 (P23229) SP+PP+ECD
MAAAGQLCLLYLSAGLLSRLGAAFNLDTREDNVIRKYGDPGSLFGFSLAMHWQLQPEDKRLLLVGAPRAEALPLQRANRTGGLYSCDITARGPCTRIEFDNDADPTSESKEDQWMGVTVQSQGPGGKVVTCAHRYEKRQHVNTKQESRDIFGRCYVLSQNLRIEDDMDGGDWSFCDGRLRGHEKFGSCQQGVAATFTKDFHYIVFGAPGTYNWKGIVRVEQKNNTFFDMNIFEDGPYEVGGETEHDESLVPVPANSYLGLLFLTSVSYTDPDQFVYKTRPPREQPDTFPDVMMNSYLGFSLDSGKGIVSKDEITFVSGAPRANHSGAVVLLKRDMKSAHLLPEHIFDGEGLASSFGYDVAVVDLNKDGWQDIVIGAPQYFDRDGEVGGAVYVYMNQQGRWNNVKPIRLNGTKDSMFGIAVKNIGDINQDGYPDIAVGAPYDDLGKVFIYHGSANGINTKPTQVLKGISPYFGYSIAGNMDLDRNSYPDVAVGSLSDSVTIFRSRPVINIQKTITVTPNRIDLRQKTACGAPSGICLQVKSCFEYTANPAGYNPSISIVGTLEAEKERRKSGLSSRVQFRNQGSEPKYTQELTLKRQKQKVCMEETLWLQDNIRDKLRPIPITASVEIQEPSSRRRVNSLPEVLPILNSDEPKTAHIDVHFLKEGCGDDNVCNSNLKLEYKFCTREGNQDKFSYLPIQKGVPELVLKDQKDIALEITVTNSPSNPRNPTKDGDDAHEAKLIATFPDTLTYSAYRELRAFPEKQLSCVANQNGSQADCELGNPFKRNSNVTFYLVLSTTEVTFDTPDLDINLKLETTSNQDNLAPITAKAKVVIELLLSVSGVAKPSQVYFGGTVVGEQAMKSEDEVGSLIEYEFRVINLGKPLTNLGTATLNIQWPKEISNGKWLLYLVKVESKGLEKVTCEPQKEINSLNLTESHNSRKKREITEKQIDDNRKFSLFAERKYQTLNCSVNVNCVNIRCPLRGLDSKASLILRSRLWNSTFLEEYSKLNYLDILMRAFIDVTAAAENIRLPNAGTQVRVTVFPSKTVAQYS

SEQ ID NO: 2577 - protein, 1082 aa, synthetic construct
  REGION 1..1082: note = ITGA7 (Q13683) SP+PP+ECD
MAGARSRDPWGASGICYLFGSLLVELLFSRAVAFNLDVMGALRKEGEPGSLFGFSVALHRQLQPRPQSWLLVGAPQALALPGQQANRTGGLFACPLSLEETDCYRVDIDQGADMQKESKENQWLGVSVRSQGPGGKIVTCAHRYEARQRVDQILETRDMIGRCFVLSQDLAIRDELDGGEWKFCEGRPQGHEQFGFCQQGTAAAFSPDSHYLLFGAPGTYNWKGTARVELCAQGSADLAHLDDGPYEAGGEKEQDPRLIPVPANSYFGLLFVTNIDSSDPDQLVYKTLDPADRLPGPAGDLALNSYLGFSIDSGKGLVRAEELSFVAGAPRANHKGAVVILRKDSASRLVPEVMLSGERLTSGFGYSLAVADLNSDGWPDLIVGAPYFFERQEELGGAVYVYLNQGGHWAGISPLRLCGSPDSMFGISLAVLGDLNQDGFPDIAVGAPFDGDGKVFIYHGSSLGVVAKPSQVLEGEAVGIKSFGYSLSGSLDMDGNQYPDLLVGSLADTAVLFRARPILHVSHEVSIAPRSIDLEQPNCAGGHSVCVDLRVCFSYIAVPSSYSPTVALDYVLDADTDRRLRGQVPRVTFLSRNLEEPKHQASGTVWLKHQHDRVCGDAMFQLQENVKDKLRAIVVTLSYSLQTPRLRRQAPGQGLPPVAPILNAHQPSTQRAEIHFLKQGCGEDKICQSNLQLVRARFCTRVSDTEFQPLPMDVDGTTALFALSGQPVIGLELMVTNLPSDPAQPQADGDDAHEAQLLVMLPDSLHYSGVRALDPAEKPLCLSNENASHVECELGNPMKRGAQVTFYLILSTSGISIETTELEVELLLATISEQELHPVSARARVFIELPLSIAGMAIPQQLFFSGVVRGERAMQSERDVGSKVKYEVTVSNQGQSLRTLGSAFLNIMWPHEIANGKWLLYPMQVELEGGQGPGQKGLCSPRPNILHLDVDSRDRRRRELEPPEQQEPGERQEPSMSWWPVSSAEKKKNITLDCARGTANCVVFSCPLYSFDRAAVLHVWGRLWNSTFLEEYSAVKSLEVIVRANITVKSSIKNLMLRDASTVIPVMVYLDPMAVVAEGVPW

SEQ ID NO: 2578 - protein, 1012 aa, synthetic construct
  REGION 1..1012: note = ITGA8 (P53708) SP+PP+ECD
MSPGASRGPRGSQAPLIAPLCCAAAALGMLLWSPACQAFNLDVEKLTVYSGPKGSYFGYAVDFHIPDARTASVLVGAPKANTSQPDIVEGGAVYYCPWPAEGSAQCRQIPFDTTNNRKIRVNGTKEPIEFKSNQWFGATVKAHKGKVVACAPLYHWRTLKPTPEKDPVGTCYVAIQNFSAYAEFSPCRNSNADPEGQGYCQAGFSLDFYKNGDLIVGGPGSFYWQGQVITASVADIIANYSFKDILRKLAGEKQTEVAPASYDDSYLGYSVAAGEFTGDSQQELVAGIPRGAQNFGYVSIINSTDMTFIQNFTGEQMASYFGYTVVVSDVNSDGLDDVLVGAPLFMEREFESNPREVGQIYLYLQVSSLLFRDPQILTGTETFGRFGSAMAHLGDLNQDGYNDIAIGVPFAGKDQRGKVLIYNGNKDGLNTKPSQVLQGVWASHAVPSGFGFTLRGDSDIDKNDYPDLIVGAFGTGKVAVYRARPVVTVDAQLLLHPMIINLENKTCQVPDSMTSAACFSLRVCASVTGQSIANTIVLMAEVQLDSLKQKGAIKRTLFLDNHQAHRVFPLVIKRQKSHQCQDFIVYLRDETEFRDKLSPINISLNYSLDESTFKEGLEVKPILNYYRENIVSEQAHILVDCGEDNLCVPDLKLSARPDKHQVIIGDENHLMLIINARNEGEGAYEAELFVMIPEEADYVGIERNNKGFRPLSCEYKMENVTRMVVCDLGNPMVSGTNYSLGLRFAVPRLEKTNMSINFDLQIRSSNKDNPDSNFVSLQINITAVAQVEIRGVSHPPQIVLPIHNWEPEEEPHKEEEVGPLVEHIYELHNIGPSTISDTILEVGWPFSARDEFLLYIFHIQTLGPLQCQPNPNINPQDIKPAASPEDTPELSAFLRNSTIPHLVRKRDVHVVEFHRQSPAKILNCTNIECLQISCAVGRLEGGESAVLKVRSRLWAHTFLQRKNDPYALASLVSFEVKKMPYTDQPAKLPEGSIVIKTSVIWATPNVSFSIPL

SEQ ID NO: 2579 - protein, 981 aa, synthetic construct
  REGION 1..981: note = ITGA9 (Q13797) SP+PP+ECD
MGGPAAPRGAGRLRALLLALVVAGIPAGAYNLDPQRPVHFQGPADSFFGYAVLEHFHDNTRWVLVGAPKADSKYSPSVKSPGAVFKCRVHTNPDRRCTELDMARGKNRGTSCGKTCREDRDDEWMGVSLARQPKADGRVLACAHRWKNIYYEADHILPHGFCYIIPSNLQAKGRTLIPCYEEYKKKYGEEHGSCQAGIAGFFTEELVVMGAPGSFYWAGTIKVLNLTDNTYLKLNDEVIMNRRYTYLGYAVTAGHFSHPSTIDVVGGAPQDKGIGKVYIFRADRRSGTLIKIFQASGKKMGSYFGSSLCAVDLNGDGLSDLLVGAPMFSEIRDEGQVTVYINRGNGALEEQLALTGDGAYNAHFGESIASLDDLDNDGFPDVAIGAPKEDDFAGAVYIYHGDAGGIVPQYSMKLSGQKINPVLRMFGQSISGGIDMDGNGYPDVTVGAFMSDSVVLLRARPVITVDVSIFLPGSINITAPQCHDGQQPVNCLNVTTCFSFHGKHVPGEIGLNYVLMADVAKKEKGQMPRVYFVLLGETMGQVTEKLQLTYMEETCRHYVAHVKRRVQDVISPIVFEAAYSLSEHVTGEEERELPPLTPVLRWKKGQKIAQKNQTVFERNCRSEDCAADLQLQGKLLLSSMDEKTLYLALGAVKNISLNISISNLGDDAYDANVSFNVSRELFFINMWQKEEMGISCELLESDFLKCSVGFPFMRSKSKYEFSVIFDTSHLSGEEEVLSFIVTAQSGNTERSESLHDNTLVLMVPLMHEVDTSITGIMSPTSFVYGESVDAANFIQLDDLECHFQPINITLQVYNTGPSTLPGSSVSISFPNRLSSGGAEMFHVQEMVVGQEKGNCSFQKNPTPCIIPQEQENIFHTIFAFFTKSGRKVLDCEKPGISCLTAHCNFSALAKEESRTIDIYMLLNTEILKKDSSSVIQFMSRAKVKVDPALRVVEIAHGNPEEVTVVFEALHNLEPRGYVVGW

SEQ ID NO: 2580 - protein, 1099 aa, synthetic construct
  REGION 1..1099: note = ITGAD (Q13349) SP+PP+ECD
MTFGTVLLLSVLASYHGFNLDVEEPTIFQEDAGGFGQSVVQFGGSRLVVGAPLEVVAANQTGRLYDCAAATGMCQPIPLHIRPEAVNMSLGLTLAASTNGSRLLACGPTLHRVCGENSYSKGSCLLLGSRWEIIQTVPDATPECPHQEMDIVFLIDGSGSIDQNDFNQMKGFVQAVMGQFEGTDTLFALMQYSNLLKIHFTFTQFRTSPSQQSLVDPIVQLKGLTFTATGILTVVTQLFHHKNGARKSAKKILIVITDGQKYKDPLEYSDVIPQAEKAGIIRYAIGVGHAFQGPTARQELNTISSAPPQDHVFKVDNFAALGSIQKQLQEKIYAVEGTQSRASSSFQHEMSQEGFSTALTMDGLFLGAVGSFSWSGGAFLYPPNMSPTFINMSQENVDMRDSYLGYSTELALWKGVQNLVLGAPRYQHTGKAVIFTQVSRQWRKKAEVTGTQIGSYFGASLCSVDVDSDGSTDLILIGAPHYYEQTRGGQVSVCPLPRGRVQWQCDAVLRGEQGHPWGRFGAALTVLGDVNEDKLIDVAIGAPGEQENRGAVYLFHGASESGISPSHSQRIASSQLSPRLQYFGQALSGGQDLTQDGLMDLAVGARGQVLLLRSLPVLKVGVAMRFSPVEVAKAVYRCWEEKPSALEAGDATVCLTIQKSSLDQLGDIQSSVRFDLALDPGRLTSRAIFNETKNPTLTRRKTLGLGIHCETLKLLLPDCVEDVVSPIILHLNFSLVREPIPSPQNLRPVLAVGSQDLFTASLPFEKNCGQDGLCEGDLGVTLSFSGLQTLTVGSSLELNVIVTVWNAGEDSYGTVVSLYYPAGLSHRRVSGAQKQPHQSALRLACETVPTEDEGLRSSRCSVNHPIFHEGSNGTFIVTFDVSYKATLGDRMLMRASASSENNKASSSKATFQLELPVKYAVYTMISRQEESTKYFNFATSDEKKMKEAEHRYRVNNLSQRDLAISINFWVPVLLNGVAVWDVVMEAPSQSLPCVSERKPPQHSDFLTQISRSPMLDCSIADCLQFRCDVPSFSVQEELDFTLKGNLSFGWVRETLQKKVLVVSVAEITFDTSVYSQLPGQEAFMRAQMEMVLEEDEVYN

SEQ ID NO: 2581 - protein, 1124 aa, synthetic construct
  REGION 1..1124: note = ITGAE (P38570) SP+PP+ECD
MWLFHTLLCIASLALLAAFNVDVARPWLTPKGGAPFVLSSLLHQDPSTNQTWLLVTSPRTKRTPGPLHRCSLVQDEILCHPVEHVPIPKGRHRGVTVVRSHHGVLICIQVLVRRPHSLSSELTGTCSLLGPDLRPQAQANFFDLENLLDPDARVDTGDCYSNKEGGGEDDVNTARQRRALEKEEEEDKEEEEDEEEEEAGTEIAIILDGSGSIDPPDFQRAKDFISNMMRNFYEKCFECNFALVQYGGVIQTEFDLRDSQDVMASLARVQNITQVGSVTKTASAMQHVLDSIFTSSHGSRRKASKVMVVLTDGGIFEDPLNLTTVINSPKMQGVERFAIGVGEEFKSARTARELNLIASDPDETHAFKVTNYMALDGLLSKLRYNIISMEGTVGDALHYQLAQIGFSAQILDERQVLLGAVGAFDWSGGALLYDTRSRRGRFLNQTAAAAADAEAAQYSYLGYAVAVLHKTCSLSYIAGAPRYKHHGAVFELQKEGREASFLPVLEGEQMGSYFGSELCPVDIDMDGSTDFLLVAAPFYHVHGEEGRVYVYRLSEQDGSFSLARILSGHPGFTNARFGFAMAAMGDLSQDKLTDVAIGAPLEGFGADDGASFGSVYIYNGHWDGLSASPSQRIRASTVAPGLQYFGMSMAGGFDISGDGLADITVGTLGQAVVFRSRPVVRLKVSMAFTPSALPIGFNGVVNVRLCFEISSVTTASESGLREALLNFTLDVDVGKQRRRLQCSDVRSCLGCLREWSSGSQLCEDLLLMPTEGELCEEDCFSNASVKVSYQLQTPEGQTDHPQPILDRYTEPFAIFQLPYEKACKNKLFCVAELQLATTVSQQELVVGLTKELTLNINLTNSGEDSYMTSMALNYPRNLQLKRMQKPPSPNIQCDDPQPVASVLIMNCRIGHPVLKRSSAHVSVVWQLEENAFPNRTADITVTVTNSNERRSLANETHTLQFRHGFVAVLSKPSIMYVNTGQGLSHHKEFLFHVHGENLFGAEYQLQICVPTKLRGLQVVAVKKLTRTQASTVCTWSQERACAYSSVQHVEEWHSVSCVIASDKENVTVAAEISWDHSEELLKDVTELQILGEISFNKSLYEGLNAENHRTKITVVFLKDEKYHS

SEQ ID NO: 2582 - protein, 1090 aa, synthetic construct
  REGION 1..1090: note = ITGAL (P20701) SP+PP+ECD
MKDSCITVMAMALLSGFFFFAPASSYNLDVRGARSFSPPRAGRHFGYRVLQVGNGVIVGAPGEGNSTGSLYQCQSGTGHCLPVTLRGSNYTSKYLGMTLATDPTDGSILACDPGLSRTCDQNTYLSGLCYLFRQNLQGPMLQGRPGFQECIKGNVDLVFLFDGSMSLQPDEFQKILDFMKDVMKKLSNTSYQFAAVQFSTSYKTEFDFSDYVKRKDPDALLKHVKHMLLLTNTFGAINYVATEVFREELGARPDATKVLIIITDGEATDSGNIDAAKDIIRYIIGIGKHFQTKESQETLHKFASKPASEFVKILDTFEKLKDLFTELQKKIYVIEGTSKQDLTSFNMELSSSGISADLSRGHAVVGAVGAKDWAGGFLDLKADLQDDTFIGNEPLTPEVRAGYLGYTVTWLPSRQKTSLLASGAPRYQHMGRVLLFQEPQGGGHWSQVQTIHGTQIGSYFGGELCGVDVDQDGETELLLIGAPLFYGEQRGGRVFIYQRRQLGFEEVSELQGDPGYPLGRFGEAITALTDINGDGLVDVAVGAPLEEQGAVYIFNGRHGGLSPQPSQRIEGTQVLSGIQWFGRSIHGVKDLEGDGLADVAVGAESQMIVLSSRPVVDMVTLMSFSPAEIPVHEVECSYSTSNKMKEGVNITICFQIKSLIPQFQGRLVANLTYTLQLDGHRTRRRGLFPGGRHELRRNIAVTTSMSCTDFSFHFPVCVQDLISPINVSLNFSLWEEEGTPRDQRAQGKDIPPILRPSLHSETWEIPFEKNCGEDKKCEANLRVSFSPARSRALRLTAFASLSVELSLSNLEEDAYWVQLDLHFPPGLSFRKVEMLKPHSQIPVSCEELPEESRLLSRALSCNVSSPIFKAGHSVALQMMFNTLVNSSWGDSVELHANVTCNNEDSDLLEDNSATTIIPILYPINILIQDQEDSTLYVSFTPKGPKIHQVKHMYQVRIQPSIHDHNIPTLEAVVGVPQPPSEGPITHQWSVQMEPPVPCHYEDLERLPDAAEPCLPGALFRCPVVFRQEILVQVIGTLELVGEIEASSMFSLCSSLSISFNSSKHFHLYGSNASLAQVVMKVDVVYEKQML

SEQ ID NO: 2583 - protein, 1104 aa, synthetic construct
  REGION 1..1104: note = ITGAM (P11215) SP+PP+ECD
MALRVLLLTALTLCHGFNLDTENAMTFQENARGFGQSVVQLQGSRVVVGAPQEIVAANQRGSLYQCDYSTGSCEPIRLQVPVEAVNMSLGLSLAATTSPPQLLACGPTVHQTCSENTYVKGLCFLFGSNLRQQPQKFPEALRGCPQEDSDIAFLIDGSGSIIPHDFRRMKEFVSTVMEQLKKSKTLFSLMQYSEEFRIHFTFKEFQNNPNPRSLVKPITQLLGRTHTATGIRKVVRELFNITNGARKNAFKILVVITDGEKFGDPLGYEDVIPEADREGVIRYVIGVGDAFRSEKSRQELNTIASKPPRDHVFQVNNFEALKTIQNQLREKIFAIEGTQTGSSSSFEHEMSQEGFSAAITSNGPLLSTVGSYDWAGGVFLYTSKEKSTFINMTRVDSDMNDAYLGYAAAIILRNRVQSLVLGAPRYQHIGLVAMFRQNTGMWESNANVKGTQIGAYFGASLCSVDVDSNGSTDLVLIGAPHYYEQTRGGQVSVCPLPRGRARWQCDAVLYGEQGQPWGRFGAALTVLGDVNGDKLTDVAIGAPGEEDNRGAVYLFHGTSGSGISPSHSQRIAGSKLSPRLQYFGQSLSGGQDLTMDGLVDLTVGAQGHVLLLRSQPVLRVKAIMEFNPREVARNVFECNDQVVKGKEAGEVRVCLHVQKSTRDRLREGQIQSVVTYDLALDSGRPHSRAVFNETKNSTRRQTQVLGLTQTCETLKLQLPNCIEDPVSPIVLRLNFSLVGTPLSAFGNLRPVLAEDAQRLFTALFPFEKNCGNDNICQDDLSITFSFMSLDCLVVGGPREFNVTVTVRNDGEDSYRTQVTFFFPLDLSYRKVSTLQNQRSQRSWRLACESASSTEVSGALKSTSCSINHPIFPENSEVTFNITFDVDSKASLGNKLLLKANVTSENNMPRTNKTEFQLELPVKYAVYMVVTSHGVSTKYLNFTASENTSRVMQHQYQVSNLGQRSLPISLVFLVPVRLNQTVIWDRPQVTFSENLSSTCHTKERLPSHSDFLAELRKAPVVNCSIAVCQRIQCDIPFFGIQEEFNATLKGNLSFDWYIKTSHNHLLIVSTAEILFNDSVFTLLPGQGAFVRSQTETKVEPFEVPN

SEQ ID NO: 2584 - protein, 992 aa, synthetic construct
  REGION 1..992: note = ITGAV (P06756) SP+PP+ECD
MAFPPRRRLRLGPRGLPLLLSGLLLPLCRAFNLDVDSPAEYSGPEGSYFGFAVDFFVPSASSRMFLLVGAPKANTTQPGIVEGGQVLKCDWSSTRRCQPIEFDATGNRDYAKDDPLEFKSHQWFGASVRSKQDKILACAPLYHWRTEMKQEREPVGTCFLQDGTKTVEYAPCRSQDIDADGQGFCQGGFSIDFTKADRVLLGGPGSFYWQGQLISDQVAEIVSKYDPNVYSIKYNNQLATRTAQAIFDDSYLGYSVAVGDFNGDGIDDFVSGVPRAARTLGMVYIYDGKNMSSLYNFTGEQMAAYFGFSVAATDINGDDYADVFIGAPLFMDRGSDGKLQEVGQVSVSLQRASGDFQTTKLNGFEVFARFGSAIAPLGDLDQDGFNDIAIAAPYGGEDKKGIVYIFNGRSTGLNAVPSQILEGQWAARSMPPSFGYSMKGATDIDKNGYPDLIVGAFGVDRAILYRARPVITVNAGLEVYPSILNQDNKTCSLPGTALKVSCFNVRFCLKADGKGVLPRKLNFQVELLLDKLKQKGAIRRALFLYSRSPSHSKNMTISRGGLMQCEELIAYLRDESEFRDKLTPITIFMEYRLDYRTAADTTGLQPILNQFTPANISRQAHILLDCGEDNVCKPKLEVSVDSDQKKIYIGDDNPLTLIVKAQNQGEGAYEAELIVSIPLQADFIGVVRNNEALARLSCAFKTENQTRQVVCDLGNPMKAGTQLLAGLRFSVHQQSEMDTSVKFDLQIQSSNLFDKVSPVVSHKVDLAVLAAVEIRGVSSPDHVFLPIPNWEHKENPETEEDVGPVVQHIYELRNNGPSSFSKAMLHLQWPYKYNNNTLLYILHYDIDGPMNCTSDMEINPLRIKISSLQTTEKNDTVAGQGERDHLITKRDLALSEGDIHTLGCGVAQCLKIVCQVGRLDRGKSAILYVKSLLWTETFMNKENQNHSYSLKSSASFNVIEFPYKNLPIEDITNSTLVTTNVTWGIQPAPMPV

SEQ ID NO: 2585 - protein, 1107 aa, synthetic construct
  REGION 1..1107: note = ITGAX (P20702) SP+PP+ECD
MTRTRAALLLFTALATSLGFNLDTEELTAFRVDSAGFGDSVVQYANSWVVVGAPQKITAANQTGGLYQCGYSTGACEPIGLQVPPEAVNMSLGLSLASTTSPSQLLACGPTVHHECGRNMYLTGLCFLLGPTQLTQRLPVSRQECPRQEQDIVFLIDGSGSISSRNFATMMNFVRAVISQFQRPSTQFSLMQFSNKFQTHFTFEEFRRSSNPLSLLASVHQLQGFTYTATAIQNVVHRLFHASYGARRDAAKILIVITDGKKEGDSLDYKDVIPMADAAGIIRYAIGVGLAFQNRNSWKELNDIASKPSQEHIFKVEDFDALKDIQNQLKEKIFAIEGTETTSSSSFELEMAQEGFSAVFTPDGPVLGAVGSFTWSGGAFLYPPNMSPTFINMSQENVDMRDSYLGYSTELALWKGVQSLVLGAPRYQHTGKAVIFTQVSRQWRMKAEVTGTQIGSYFGASLCSVDVDSDGSTDLVLIGAPHYYEQTRGGQVSVCPLPRGWRRWWCDAVLYGEQGHPWGRFGAALTVLGDVNGDKLTDVVIGAPGEEENRGAVYLFHGVLGPSISPSHSQRIAGSQLSSRLQYFGQALSGGQDLTQDGLVDLAVGARGQVLLLRTRPVLWVGVSMQFIPAEIPRSAFECREQVVSEQTLVQSNICLYIDKRSKNLLGSRDLQSSVTLDLALDPGRLSPRATFQETKNRSLSRVRVLGLKAHCENFNLLLPSCVEDSVTPITLRLNFTLVGKPLLAFRNLRPMLAADAQRYFTASLPFEKNCGADHICQDNLGISFSFPGLKSLLVGSNLELNAEVMVWNDGEDSYGTTITFSHPAGLSYRYVAEGQKQGQLRSLHLTCDSAPVGSQGTWSTSCRINHLIFRGGAQITFLATFDVSPKAVLGDRLLLTANVSSENNTPRTSKTTFQLELPVKYAVYTVVSSHEQFTKYLNFSESEEKESHVAMHRYQVNNLGQRDLPVSINFWVPVELNQEAVWMDVEVSHPQNPSLRCSSEKIAPPASDFLAHIQKNPVLDCSIAGCLRFRCDVPSFSVQEELDFTLKGNLSFGWVRQILQKKVSVVSVAEITFDTSVYSQLPGQEAFMRAQTTTVLEKYKVHNPTP

SEQ ID NO: 2586 - protein, 728 aa, synthetic construct
  REGION 1..728: note = ITGB1 (P05556) SP+PP+ECD
MNLQPIFWIGLISSVCCVFAQTDENRCLKANAKSCGECIQAGPNCGWCTNSTFLQEGMPTSARCDDLEALKKKGCPPDDIENPRGSKDIKKNKNVTNRSKGTAEKLKPEDITQIQPQQLVLRLRSGEPQTFTLKFKRAEDYPIDLYYLMDLSYSMKDDLENVKSLGTDLMNEMRRITSDFRIGFGSFVEKTVMPYISTTPAKLRNPCTSEQNCTSPFSYKNVLSLTNKGEVFNELVGKQRISGNLDSPEGGFDAIMQVAVCGSLIGWRNVTRLLVFSTDAGFHFAGDGKLGGIVLPNDGQCHLENNMYTMSHYYDYPSIAHLVQKLSENNIQTIFAVTEEFQPVYKELKNLIPKSAVGTLSANSSNVIQLIIDAYNSLSSEVILENGKLSEGVTISYKSYCKNGVNGTGENGRKCSNISIGDEVQFEISITSNKCPKKDSDSFKIRPLGFTEEVEVILQYICECECQSEGIPESPKCHEGNGTFECGACRCNEGRVGRHCECSTDEVNSEDMDAYCRKENSSEICSNNGECVCGQCVCRKRDNTNEIYSGKFCECDNFNCDRSNGLICGGNGVCKCRVCECNPNYTGSACDCSLDTSTCEASNGQICNGRGICECGVCKCTDPKFQGQTCEMCQTCLGVCAEHKECVQCRAFNKGEKKDTCTQECSYFNITKVESRDKLPQPVQPDPVSHCKEKDVDDCWFYFTYSVNGNNEVMVHVVENPECPTGPD

SEQ ID NO: 2587 - protein, 700 aa, synthetic construct
  REGION 1..700: note = ITGB2 (P05107) SP+PP+ECD
MLGLRPPLLALVGLLSLGCVLSQECTKFKVSSCRECIESGPGCTWCQKLNFTGPGDPDSIRCDTRPQLLMRGCAADDIMDPTSLAETQEDHNGGQKQLSPQKVTLYLRPGQAAAFNVTFRRAKGYPIDLYYLMDLSYSMLDDLRNVKKLGGDLLRALNEITESGRIGFGSFVDKTVLPFVNTHPDKLRNPCPNKEKECQPPFAFRHVLKLTNNSNQFQTEVGKQLISGNLDAPEGGLDAMMQVAACPEEIGWRNVTRLLVFATDDGFHFAGDGKLGAILTPNDGRCHLEDNLYKRSNEFDYPSVGQLAHKLAENNIQPIFAVTSRMVKTYEKLTEIIPKSAVGELSEDSSNVVQLIKNAYNKLSSRVFLDHNALPDTLKVTYDSFCSNGVTHRNQPRGDCDGVQINVPITFQVKVTATECIQEQSFVIRALGFTDIVTVQVLPQCECRCRDQSRDRSLCHGKGFLECGICRCDTGYIGKNCECQTQGRSSQELEGSCRKDNNSIICSGLGDCVCGQCLCHTSDVPGKLIYGQYCECDTINCERYNGQVCGGPGRGLCFCGKCRCHPGFEGSACQCERTTEGCLNPRRVECSGRGRCRCNVCECHSGYQLPLCQECPGCPSPCGKYISCAECLKFEKGPFGKNCSAACPGLQLSNNPVKGRTCKERDSEGCWVAYTLEQQDGMDRYLIYVDESRECVAGPN

SEQ ID NO: 2588 - protein, 718 aa, synthetic construct
  REGION 1..718: note = ITGB3 (P05106) SP+PP+ECD
MRARPRPRPLWATVLALGALAGVGVGGPNICTTRGVSSCQQCLAVSPMCAWCSDEALPLGSPRCDLKENLLKDNCAPESIEFPVSEARVLEDRPLSDKGSGDSSQVTQVSPQRIALRLRPDDSKNFSIQVRQVEDYPVDIYYLMDLSYSMKDDLWSIQNLGTKLATQMRKLTSNLRIGFGAFVDKPVSPYMYISPPEALENPCYDMKTTCLPMFGYKHVLTLTDQVTRFNEEVKKQSVSRNRDAPEGGFDAIMQATVCDEKIGWRNDASHLLVFTTDAKTHIALDGRLAGIVQPNDGQCHVGSDNHYSASTTMDYPSLGLMTEKLSQKNINLIFAVTENVVNLYQNYSELIPGTTVGVLSMDSSNVLQLIVDAYGKIRSKVELEVRDLPEELSLSFNATCLNNEVIPGLKSCMGLKIGDTVSFSIEAKVRGCPQEKEKSFTIKPVGFKDSLIVQVTFDCDCACQAQAEPNSHRCNNGNGTFECGVCRCGPGWLGSQCECSEEDYRPSQQDECSPREGQPVCSQRGECLCGQCVCHSSDFGKITGKYCECDDFSCVRYKGEMCSGHGQCSCGDCLCDSDWTGYYCNCTTRTDTCMSSNGLLCSGRGKCECGSCVCIQPGSYGDTCEKCPTCPDACTFKKECVECKKFDRGALHDENTCNRYCRDEIESVKELKDTGKDAVNCTYKNEDDCVVRFQYYEDSSGKSILYVVEEPECPKGPD

SEQ ID NO: 2589 - protein, 710 aa, synthetic construct
  REGION 1..710: note = ITGB4 (P16144) SP+PP+ECD
MAGPRPSPWARLLLAALISVSLSGTLANRCKKAPVKSCTECVRVDKDCAYCTDEMFRDRRCNTQAELLAAGCQRESIVVMESSFQITEETQIDTTLRRSQMSPQGLRVRLRPGEERHFELEVFEPLESPVDLYILMDFSNSMSDDLDNLKKMGQNLARVLSQLTSDYTIGFGKFVDKVSVPQTDMRPEKLKEPWPNSDPPFSFKNVISLTEDVDEFRNKLQGERISGNLDAPEGGFDAILQTAVCTRDIGWRPDSTHLLVFSTESAFHYEADGANVLAGIMSRNDERCHLDTTGTYTQYRTQDYPSVPTLVRLLAKHNIIPIFAVTNYSYSYYEKLHTYFPVSSLGVLQEDSSNIVELLEEAFNRIRSNLDIRALDSPRGLRTEVTSKMFQKTRTGSFHIRRGEVGIYQVQLRALEHVDGTHVCQLPEDQKGNIHLKPSFSDGLKMDAGIICDVCTCELQKEVRSARCSFNGDFVCGQCVCSEGWSGQTCNCSTGSLSDIQPCLREGEDKPCSGRGECQCGHCVCYGEGRYEGQFCEYDNFQCPRTSGFLCNDRGRCSMGQCVCEPGWTGPSCDCPLSNATCIDSNGGICNGRGHCECGRCHCHQQSLYTDTICEINYSAIHPGLCEDLRSCVQCQAWGTGEKKGRTCEECNFKVKMVDELKRAEEVVVRCSFRDEDDDCTYSYTMEGDGAPGPNSTVLVHKKKDCPPGS

SEQ ID NO: 2590 - protein, 719 aa, synthetic construct
  REGION 1..719: note = ITGB5 (P18084) SP+PP+ECD
MPRAPAPLYACLLGLCALLPRLAGLNICTSGSATSCEECLLIHPKCAWCSKEDFGSPRSITSRCDLRANLVKNGCGGEIESPASSFHVLRSLPLSSKGSGSAGWDVIQMTPQEIAVNLRPGDKTTFQLQVRQVEDYPVDLYYLMDLSLSMKDDLDNIRSLGTKLAEEMRKLTSNFRLGFGSFVDKDISPFSYTAPRYQTNPCIGYKLFPNCVPSFGFRHLLPLTDRVDSFNEEVRKQRVSRNRDAPEGGFDAVLQAAVCKEKIGWRKDALHLLVFTTDDVPHIALDGKLGGLVQPHDGQCHLNEANEYTASNQMDYPSLALLGEKLAENNINLIFAVTKNHYMLYKNFTALIPGTTVEILDGDSKNIIQLIINAYNSIRSKVELSVWDQPEDLNLFFTATCQDGVSYPGQRKCEGLKIGDTASFEVSLEARSCPSRHTEHVFALRPVGFRDSLEVGVTYNCTCGCSVGLEPNSARCNGSGTYVCGLCECSPGYLGTRCECQDGENQSVYQNLCREAEGKPLCSGRGDCSCNQCSCFESEFGKIYGPFCECDNFSCARNKGVLCSGHGECHCGECKCHAGYIGDNCNCSTDISTCRGRDGQICSERGHCLCGQCQCTEPGAFGEMCEKCPTCPDACSTKRDCVECLLLHSGKPDNQTCHSLCRDEVITWVDTIVKDDQEAVLCFYKTAKDCVMMFTYVELPSGKSNLTVLREPECGNTPN

SEQ ID NO: 2591 - protein, 709 aa, synthetic construct
  REGION 1..709: note = ITGB6 (P18564) SP+PP+ECD
MGIELLCLFFLFLGRNDHVQGGCALGGAETCEDCLLIGPQCAWCAQENFTHPSGVGERCDTPANLLAKGCQLNFIENPVSQVEILKNKPLSVGRQKNSSDIVQIAPQSLILKLRPGGAQTLQVHVRQTEDYPVDLYYLMDLSASMDDDLNTIKELGSRLSKEMSKLTSNFRLGFGSFVEKPVSPFVKTTPEEIANPCSSIPYFCLPTFGFKHILPLTNDAERFNEIVKNQKISANIDTPEGGFDAIMQAAVCKEKIGWRNDSLHLLVFVSDADSHFGMDSKLAGIVIPNDGLCHLDSKNEYSMSTVLEYPTIGQLIDKLVQNNVLLIFAVTQEQVHLYENYAKLIPGATVGLLQKDSGNILQLIISAYEELRSEVELEVLGDTEGLNLSFTAICNNGTLFQHQKKCSHMKVGDTASFSVTVNIPHCERRSRHIIIKPVGLGDALELLVSPECNCDCQKEVEVNSSKCHHGNGSFQCGVCACHPGHMGPRCECGEDMLSTDSCKEAPDHPSCSGRGDCYCGQCICHLSPYGNIYGPYCQCDNFSCVRHKGLLCGGNGDCDCGECVCRSGWTGEYCNCTTSTDSCVSEDGVLCSGRGDCVCGKCVCTNPGASGPTCERCPTCGDPCNSKRSCIECHLSAAGQAREECVDKCKLAGATISEEEDFSKDGSVSCSLQGENECLITFLITTDNEGKTIIHSINEKDCPKPPNIP

SEQ ID NO: 2592 - protein, 723 aa, synthetic construct
  REGION 1..723: note = ITGB7 (P26010) SP+PP+ECD
MVALPMVLVLLLVLSRGESELDAKIPSTGDATEWRNPHLSMLGSCQPAPSCQKCILSHPSCAWCKQLNFTASGEAEARRCARREELLARGCPLEELEEPRGQQEVLQDQPLSQGARGEGATQLAPQRVRVTLRPGEPQQLQVRFLRAEGYPVDLYYLMDLSYSMKDDLERVRQLGHALLVRLQEVTHSVRIGFGSFVDKTVLPFVSTVPSKLRHPCPTRLERCQSPFSFHHVLSLTGDAQAFEREVGRQSVSGNLDSPEGGFDAILQAALCQEQIGWRNVSRLLVFTSDDTFHTAGDGKLGGIFMPSDGHCHLDSNGLYSRSTEFDYPSVGQVAQALSAANIQPIFAVTSAALPVYQELSKLIPKSAVGELSEDSSNVVQLIMDAYNSLSSTVTLEHSSLPPGVHISYESQCEGPEKREGKAEDRGQCNHVRINQTVTFWVSLQATHCLPEPHLLRLRALGFSEELIVELHTLCDCNCSDTQPQAPHCSDGQGHLQCGVCSCAPGRLGRLCECSVAELSSPDLESGCRAPNGTGPLCSGKGHCQCGRCSCSGQSSGHLCECDDASCERHEGILCGGFGRCQCGVCHCHANRTGRACECSGDMDSCISPEGGLCSGHGRCKCNRCQCLDGYYGALCDQCPGCKTPCERHRDCAECGAFRTGPLATNCSTACAHTNVTLALAPILDDGWCKERTLDNQLFFFLVEDDARGTVVLRVRPQEKGADH

SEQ ID NO: 2593 - protein, 684 aa, synthetic construct
  REGION 1..684: note = ITGB8 (P26012) SP+PP+ECD
MCGSALAFFTAAFVCLQNDRRGPASFLWAAWVFSLVLGLGQGEDNRCASSNAASCARCLALGPECGWCVQEDFISGGSRSERCDIVSNLISKGCSVDSIEYPSVHVIIPTENEINTQVTPGEVSIQLRPGAEANFMLKVHPLKKYPVDLYYLVDVSASMHNNIEKLNSVGNDLSRKMAFFSRDFRLGFGSYVDKTVSPYISIHPERIHNQCSDYNLDCMPPHGYIHVLSLTENITEFEKAVHRQKISGNIDTPEGGFDAMLQAAVCESHIGWRKEAKRLLLVMTDQTSHLALDSKLAGIVVPNDGNCHLKNNVYVKSTTMEHPSLGQLSEKLIDNNINVIFAVQGKQFHWYKDLLPLLPGTIAGEIESKAANLNNLVVEAYQKLISEVKVQVENQVQGIYFNITAICPDGSRKPGMEGCRNVTSNDEVLFNVTVTMKKCDVTGGKNYAIIKPIGFNETAKIHIHRNCSCQCEDNRGPKGKCVDETFLDSKCFQCDENKCHFDEDQFSSESCKSHKDQPVCSGRGVCVCGKCSCHKIKLGKVYGKYCEKDDFSCPYHHGNLCAGHGECEAGRCQCFSGWEGDRCQCPSAAAQHCVNSKGQVCSGRGTCVCGRCECTDPRSIGRFCEHCPTCYTACKENWNCMQCLHPHNLSQAILDQCKTSCALMEQQHYVDQTSECFSSPSYLR

SEQ ID NO: 2594 - protein, 292 aa, synthetic construct
  REGION 1..292: note = IZUMO1 (Q8IYV9) SP+PP+ECD
MGPHFTLLCAALAGCLLPAEGCVICDPSVVLALKSLEKDYLPGHLDAKHHKAMMERVENAVKDFQELSLNEDAYMGVVDEATLQKGSWSLLKDLKRITDSDVKGDLFVKELFWMLHLQKETFATYVARFQKEAYCPNKCGVMLQTLIWCKNCKKEVHACRKSYDCGERNVEVPQMEDMILDCELNWHQASEGLTDYSFYRVWGNNTETLVSKGKEATLTKPMVGPEDAGSYRCELGSVNSSPATIINFHVTVLPKMIKEEKPSPNIVTPGEATTESSISLQPLQPEKMLASR

SEQ ID NO: 2595 - protein, 174 aa, synthetic construct
  REGION 1..174: note = IZUMO3 (Q5VZ72) SP+PP+ECD
MGDLWLFLLLPLSAFHGVKGCLECDPKFIEDVGSLLGNLIPSEVPGRTQLLERQIKEMIHLSFKVSHSDKRLRVLAVQQVVKLRTWLKNEFYKLGNETWKGVFIYQGKLLDVCQNLESKLKELLKNFSEIACSEDCIVVEGPILDCWTCLRMTNRCFKGEYCGDEDPRKAENRE

SEQ ID NO: 2596 - protein, 1067 aa, synthetic construct
  REGION 1..1067: note = JAG1 (P78504) SP+PP+ECD
MRSPRTRGRSGRPLSLLLALLCALRAKVCGASGQFELEILSMQNVNGELQNGNCCGGARNPGDRKCTRDECDTYFKVCLKEYQSRVTAGGPCSFGSGSTPVIGGNTFNLKASRGNDRNRIVLPFSFAWPRSYTLLVEAWDSSNDTVQPDSIIEKASHSGMINPSRQWQTLKQNTGVAHFEYQIRVTCDDYYYGFGCNKFCRPRDDFFGHYACDQNGNKTCMEGWMGPECNRAICRQGCSPKHGSCKLPGDCRCQYGWQGLYCDKCIPHPGCVHGICNEPWQCLCETNWGGQLCDKDLNYCGTHQPCLNGGTCSNTGPDKYQCSCPEGYSGPNCEIAEHACLSDPCHNRGSCKETSLGFECECSPGWTGPTCSTNIDDCSPNNCSHGGTCQDLVNGFKCVCPPQWTGKTCQLDANECEAKPCVNAKSCKNLIASYYCDCLPGWMGQNCDININDCLGQCQNDASCRDLVNGYRCICPPGYAGDHCERDIDECASNPCLNGGHCQNEINRFQCLCPTGFSGNLCQLDIDYCEPNPCQNGAQCYNRASDYFCKCPEDYEGKNCSHLKDHCRTTPCEVIDSCTVAMASNDTPEGVRYISSNVCGPHGKCKSQSGGKFTCDCNKGFTGTYCHENINDCESNPCRNGGTCIDGVNSYKCICSDGWEGAYCETNINDCSQNPCHNGGTCRDLVNDFYCDCKNGWKGKTCHSRDSQCDEATCNNGGTCYDEGDAFKCMCPGGWEGTTCNIARNSSCLPNPCHNGGTCVVNGESFTCVCKEGWEGPICAQNTNDCSPHPCYNSGTCVDGDNWYRCECAPGFAGPDCRININECQSSPCAFGATCVDEINGYRCVCPPGHSGAKCQEVSGRPCITMGSVIPDGAKWDDDCNTCQCLNGRIACSKVWCGPRPCLLHKGHSECPSGQSCIPILDDQCFVHPCTGVGECRSSSLQPVKTKCTSDSYYQDNCANITFTFNKEMMSPGLTTEHICSELRNLNILKNVSAEYSIYIACEPSPSANNEIHVAISAEDIRDDGNPIKEITDKIIDLVSKRDGNSSLIAAVAEVRVQRRPLKNRTD

SEQ ID NO: 2597 - protein, 1080 aa, synthetic construct
  REGION 1..1080: note = JAG2 (Q9Y219) SP+PP+ECD
MRAQGRGRLPRRLLLLLALWVQAARPMGYFELQLSALRNVNGELLSGACCDGDGRTTRAGGCGHDECDTYVRVCLKEYQAKVTPTGPCSYGHGATPVLGGNSFYLPPAGAAGDRARARARAGGDQDPGLVVIPFQFAWPRSFTLIVEAWDWDNDTTPNEELLIERVSHAGMINPEDRWKSLHFSGHVAHLELQIRVRCDENYYSATCNKFCRPRNDFFGHYTCDQYGNKACMDGWMGKECKEAVCKQGCNLLHGGCTVPGECRCSYGWQGRFCDECVPYPGCVHGSCVEPWQCNCETNWGGLLCDKDLNYCGSHHPCTNGGTCINAEPDQYRCTCPDGYSGRNCEKAEHACTSNPCANGGSCHEVPSGFECHCPSGWSGPTCALDIDECASNPCAAGGTCVDQVDGFECICPEQWVGATCQLDANECEGKPCLNAFSCKNLIGGYYCDCIPGWKGINCHINVNDCRGQCQHGGTCKDLVNGYQCVCPRGFGGRHCELERDECASSPCHSGGLCEDLADGFHCHCPQGFSGPLCEVDVDLCEPSPCRNGARCYNLEGDYYCACPDDFGGKNCSVPREPCPGGACRVIDGCGSDAGPGMPGTAASGVCGPHGRCVSQPGGNFSCICDSGFTGTYCHENIDDCLGQPCRNGGTCIDEVDAFRCFCPSGWEGELCDTNPNDCLPDPCHSRGRCYDLVNDFYCACDDGWKGKTCHSREFQCDAYTCSNGGTCYDSGDTFRCACPPGWKGSTCAVAKNSSCLPNPCVNGGTCVGSGASFSCICRDGWEGRTCTHNTNDCNPLPCYNGGICVDGVNWFRCECAPGFAGPDCRINIDECQSSPCAYGATCVDEINGYRCSCPPGRAGPRCQEVIGFGRSCWSRGTPFPHGSSWVEDCNSCRCLDGRRDCSKVWCGWKPCLLAGQPEALSAQCPLGQRCLEKAPGQCLRPPCEAWGECGAEEPPSTPCLPRSGHLDNNCARLTLHFNRDHVPQGTTVGAICSGIRSLPATRAVARDRLLVLLCDRASSGASAVEVAVSFSPARDLPDSSLIQGAAHAIVAAITQRGNSSLLLAVTEVKVETVVTGGSST

SEQ ID NO: 2598 - protein, 238 aa, synthetic construct
  REGION 1..238: note = JAM2 (P57087) SP+PP+ECD
MARRSRHRLLLLLLRYLVVALGYHKAYGFSAPKDQQVVTAVEYQEAILACKTPKKTVSSRLEWKKLGRSVSFVYYQQTLQGDFKNRAEMIDFNIRIKNVTRSDAGKYRCEVSAPSEQGQNLEEDTVTLEVLVAPAVPSCEVPSSALSGTVVELRCQDKEGNPAPEYTWFKDGIRLLENPRLGSQSTNSSYTMNTKTGTLQFNTVSKLDTGEYSCEARNSVGYRRCPGKRMQVDDLNIS

SEQ ID NO: 2599 - protein, 241 aa, synthetic construct
  REGION 1..241: note = JAM3 (Q9BX67) SP+PP+ECD
MALRRPPRLRLCARLPDFFLLLLFRGCLIGAVNLKSSNRTPVVQEFESVELSCIITDSQTSDPRIEWKKIQDEQTTYVFFDNKIQGDLAGRAEILGKTSLKIWNVTRRDSALYRCEVVARNDRKEIDEIVIELTVQVKPVTPVCRVPKAVPVGKMATLHCQESEGHPRPHYSWYRNDVPLPTDSRANPRFRNSSFHLNSETGTLVFTAVHKDDSGQYYCIASNDAGSARCEEQEMEVYDLN

SEQ ID NO: 2600 - protein, 196 aa, synthetic construct
  REGION 1..196: note = KCT2 (Q8NC54) SP+PP+ECD
MAAAVPKRMRGPAQAKLLPGSAIQALVGLARPLVLALLLVSAALSSVVSRTDSPSPTVLNSHISTPNVNALTHENQTKPSISQISTTLPPTTSTKKSGGASVVPHPSPTPLSQEEADNNEDPSIEEEDLLMLNSSPSTAKDTLDNGDYGEPDYDWTTGPRDDDESDDTLEENRGYMEIEQSVKSFKMPSSNIEEED

SEQ ID NO: 2601 - protein, 764 aa, synthetic construct
  REGION 1..764: note = KDR (P35968) SP+PP+ECD
MQSKVLLAVALWLCVETRAASVGLPSVSLDLPRLSIQKDILTIKANTTLQITCRGQRDLDWLWPNNQSGSEQRVEVTECSDGLFCKTLTIPKVIGNDTGAYKCFYRETDLASVIYVYVQDYRSPFIASVSDQHGVVYITENKNKTVVIPCLGSISNLNVSLCARYPEKRFVPDGNRISWDSKKGFTIPSYMISYAGMVFCEAKINDESYQSIMYIVVVVGYRIYDVVLSPSHGIELSVGEKLVLNCTARTELNVGIDFNWEYPSSKHQHKKLVNRDLKTQSGSEMKKFLSTLTIDGVTRSDQGLYTCAASSGLMTKKNSTFVRVHEKPFVAFGSGMESLVEATVGERVRIPAKYLGYPPPEIKWYKNGIPLESNHTIKAGHVLTIMEVSERDTGNYTVILTNPISKEKQSHVVSLVVYVPPQIGEKSLISPVDSYQYGTTQTLTCTVYAIPPPHHIHWYWQLEEECANEPSQAVSVTNPYPCEEWRSVEDFQGGNKIEVNKNQFALIEGKNKTVSTLVIQAANVSALYKCEAVNKVGRGERVISFHVTRGPEITLQPDMQPTEQESVSLWCTADRSTFENLTWYKLGPQPLPIHVGELPTPVCKNLDTLWKLNATMFSNSTNDILIMELKNASLQDQGDYVCLAQDRKTKKRHCVVRQLTVLERVAPTITGNLENQTTSIGESIEVSCTASGNPPPQIMWFKDNETLVEDSGIVLKDGNRNLTIRRVRKEDEGLYTCQACSVLGCAKVEAFFIIEGAQEKTNLE

SEQ ID NO: 2602 - protein, 120 aa, synthetic construct
  REGION 1..120: note = KIAA0247 (Q92537) SP+PP+ECD
MCHGRIAPKSTSVFAVASVGHGVFLPLVILCTLLGDGLASVCPLPPEPENGGYICHPRPCRDPLTAGSVIEYLCAEGYMLKGDYKYLTCKNGEWKPAMEISCRLNEDKDTHTSLGVPTLS

SEQ ID NO: 2603 - protein, 955 aa, synthetic construct
  REGION 1..955: note = KIAA0319 (Q5VV43) SP+PP+ECD
MAPPTGVLSSLLLLVTIAGCARKQCSEGRTYSNAVISPNLETTRIMRVSHTFPVVDCTAACCDLSSCDLAWWFEGRCYLVSCPHKENCEPKKMGPIRSYLTFVLRPVQRPAQLLDYGDMMLNRGSPSGIWGDSPEDIRKDLTFLGKDWGLEEMSEYSDDYRELEKDLLQPSGKQEPRGSAEYTDWGLLPGSEGAFNSSVGDSPAVPAETQQDPELHYLNESASTPAPKLPERSVLLPLPTTPSSGEVLEKEKASQLQEQSSNSSGKEVLMPSHSLPPASLELSSVTVEKSPVLTVTPGSTEHSIPTPPTSAAPSESTPSELPISPTTAPRTVKELTVSAGDNLIITLPDNEVELKAFVAPAPPVETTYNYEWNLISHPTDYQGEIKQGHKQTLNLSQLSVGLYVFKVTVSSENAFGEGFVNVTVKPARRVNLPPVAVVSPQLQELTLPLTSALIDGSQSTDDTEIVSYHWEEINGPFIEEKTSVDSPVLRLSNLDPGNYSFRLTVTDSDGATNSTTAALIVNNAVDYPPVANAGPNHTITLPQNSITLNGNQSSDDHQIVLYEWSLGPGSEGKHVVMQGVQTPYLHLSAMQEGDYTFQLKVTDSSRQQSTAVVTVIVQPENNRPPVAVAGPDKELIFPVESATLDGSSSSDDHGIVFYHWEHVRGPSAVEMENIDKAIATVTGLQVGTYHFRLTVKDQQGLSSTSTLTVAVKKENNSPPRARAGGRHVLVLPNNSITLDGSRSTDDQRIVSYLWIRDGQSPAAGDVIDGSDHSVALQLTNLVEGVYTFHLRVTDSQGASDTDTATVEVQPDPRKSGLVELTLQVGVGQLTEQRKDTLVRQLAVLLNVLDSDIKVQKIRAHSDLSTVIVFYVQSRPPFKVLKAAEVARNLHMRLSKEKADFLLFKVLRVDTAGCLLKCSGHGHCDPLTKRCICSHLWMENLIQRYIWDGESNCEWS

SEQ ID NO: 2604 - protein, 869 aa, synthetic construct
  REGION 1..869: note = KIAA0922 (A2VDJ0) SP+PP+ECD
MAGLRRPQPGCYCRTAAAVNLLLGVFQVLLPCCRPGGAQGQAIEPLPNVVELWQAEEGELLLPTQGDSEEGLEEPSQEQSFSDKLFSGKGLHFQPSVLDFGIQFLGHPVAKILHAYNPSRDSEVVVNSVFAAAGHFHVPPVPCRVIPAMGKTSFRIIFLPTEEGSIESSLFINTSSYGVLSYHVSGIGTRRISTEGSAKQLPNAYFLLPKVQSIQLSQMQAETTNTSLLQVQLECSLHNKVCQQLKGCYLESDDVLRLQMSIMVTMENFSKEFEENTQHLLDHLSIVYVATDESETSDDSAVNMYILHSGNSLIWIQDIRHFSQRDALSLQFEPVLLPTSTTNFTKIASFTCKATSCDSGIIEDVKKTTHTPTLKACLFSSVAQGYFRMDSSATQFHIETHENTSGLWSIWYRNHFDRSVVLNDVFLSKETKHMLKILNFTGPLFLPPGCWNIFSLKLAVKDIAINLFTNVFLTTNIGAIFAIPLQIYSAPTKEGSLGFEVIAHCGMHYFMGKSKAGNPNWNGSLSLDQSTWNVDSELANKLYERWKKYKNGDVCKRNVLGTTRFAHLKKSKESESFVFFLPRLIAEPGLMLNFSATALRSRMIKYFVVQNPSSWPVSLQLLPLSLYPKPEALVHLLHRWFGTDMQMINFTTGEFQLTEACPYLGTHSEESRFGILHLHLQPLEMKRVGVVFTPADYGKVTSLILIRNNLTVIDMIGVEGFGARELLKVGGRLPGAGGSLRFKVPESTLMDCRRQLKDSKQILSITKNFKVENIGPLPITVSSLKINGYNCQGYGFEVLDCHQFSLDPNTSRDISIVFTPDFTSSWVIRDLSLVTAADLEFRFTLNVTLPHHLLPLCADVVPGPSWEES

SEQ ID NO: 2605 - protein, 910 aa, synthetic construct
  REGION 1..910: note = KIAA1324 (Q6UXG2) SP+PP+ECD
MAEPGHSHHLSARVRGRTERRIPRLWRLLLWAGTAFQVTQGTGPELHACKESEYHYEYTACDSTGSRWRVAVPHTPGLCTSLPDPIKGTECSFSCNAGEFLDMKDQSCKPCAEGRYSLGTGIRFDEWDELPHGFASLSANMELDDSAAESTGNCTSSKWVPRGDYIASNTDECTATLMYAVNLKQSGTVNFEYYYPDSSIIFEFFVQNDQCQPNADDSRWMKTTEKGWEFHSVELNRGNNVLYWRTTAFSVWTKVPKPVLVRNIAITGVAYTSECFPCKPGTYADKQGSSFCKLCPANSYSNKGETSCHQCDPDKYSEKGSSSCNVRPACTDKDYFYTHTACDANGETQLMYKWAKPKICSEDLEGAVKLPASGVKTHCPPCNPGFFKTNNSTCQPCPYGSYSNGSDCTRCPAGTEPAVGFEYKWWNTLPTNMETTVLSGINFEYKGMTGWEVAGDHIYTAAGASDNDFMILTLVVPGFRPPQSVMADTENKEVARITFVFETLCSVNCELYFMVGVNSRTNTPVETWKGSKGKQSYTYIIEENTTTSFTWAFQRTTFHEASRKYTNDVAKIYSINVTNVMNGVASYCRPCALEASDVGSSCTSCPAGYYIDRDSGTCHSCPTNTILKAHQPYGVQACVPCGPGTKNNKIHSLCYNDCTFSRNTPTRTFNYNFSALANTVTLAGGPSFTSKGLKYFHHFTLSLCGNQGRKMSVCTDNVTDLRIPEGESGFSKSITAYVCQAVIIPPEVTGYKAGVSSQPVSLADRLIGVTTDMTLDGITSPAELFHLESLGIPDVIFFYRSNDVTQSCSSGRSTTIRVRCSPQKTVPGSLLLPGTCSDGTCDGCNFHFLWESAAACPLCSVADYHAIVSSCVAGIQKTTYVWREPKLCSGGISLPEQRVTICKTIDFWLK

SEQ ID NO: 2606 - protein, 929 aa, synthetic construct
  REGION 1..929: note = KIAA1324L (A8MWY0) SP+PP+ECD
MLFRARGPVRGRGWGRPAEAPRRGRSPPWSPAWICCWALAGCQAAWAGDLPSSSSRPLPPCQEKDYHFEYTECDSSGSRWRVAIPNSAVDCSGLPDPVRGKECTFSCASGEYLEMKNQVCSKCGEGTYSLGSGIKFDEWDELPAGFSNIATFMDTVVGPSDSRPDGCNNSSWIPRGNYIESNRDDCTVSLIYAVHLKKSGYVFFEYQYVDNNIFFEFFIQNDQCQEMDTTTDKWVKLTDNGEWGSHSVMLKSGTNILYWRTTGILMGSKAVKPVLVKNITIEGVAYTSECFPCKPGTFSNKPGSFNCQVCPRNTYSEKGAKECIRCKDDSQFSEEGSSECTERPPCTTKDYFQIHTPCDEEGKTQIMYKWIEPKICREDLTDAIRLPPSGEKKDCPPCNPGFYNNGSSSCHPCPPGTFSDGTKECRPCPAGTEPALGFEYKWWNVLPGNMKTSCFNVGNSKCDGMNGWEVAGDHIQSGAGGSDNDYLILNLHIPGFKPPTSMTGATGSELGRITFVFETLCSADCVLYFMVDINRKSTNVVESWGGTKEKQAYTHIIFKNATFTFTWAFQRTNQGQDNRRFINDMVKIYSITATNAVDGVASSCRACALGSEQSGSSCVPCPPGHYIEKETNQCKECPPDTYLSIHQVYGKEACIPCGPGSKNNQDHSVCYSDCFFYHEKENQSLHYDFSNLSSVGSLMNGPSFTSKGTKYFHFFNISLCGHEGKKMALCTNNITDFTVKEIVAGSDDYTNLVGAFVCQSTIIPSESKGFRAALSSQSIILADTFIGVTVETTLKNINIKEDMFPVPTSQIPDVHFFYKSSTATTSCINGRSTAVKMRCNPTKSGAGVISVPSKCPAGTCDGCTFYFLWESAEACPLCTEHDFHEIEGACKRGFQETLYVWNEPKWCIKGISLPEKKLATCETVDFWLK

SEQ ID NO: 2607 - protein, 97 aa, synthetic construct
  REGION 1..97: note = KIAA1644 (Q3SXP7) SP+PP+ECD
MTSCGQQSLNVLAVLFSLLFSAVLSAHFRVCEPYTDHKGRYHFGFHCPRLSDNKTFILCCHHNNTVFKYCCNETEFQAVMQANLTASSEGYMHNNYT

SEQ ID NO: 2608 - protein, 245 aa, synthetic construct
  REGION 1..245: note = KIR2DL1 (P43626) SP+PP+ECD
MSLLVVSMACVGFFLLQGAWPHEGVHRKPSLLAHPGPLVKSEETVILQCWSDVMFEHFLLHREGMFNDTLRLIGEHHDGVSKANFSISRMTQDLAGTYRCYGSVTHSPYQVSAPSDPLDIVIIGLYEKPSLSAQPGPTVLAGENVTLSCSSRSSYDMYHLSREGEAHERRLPAGPKVNGTFQADFPLGPATHGGTYRCFGSFHDSPYEWSKSSDPLLVSVTGNPSNSWPSPTEPSSKTGNPRHLH

SEQ ID NO: 2609 - protein, 245 aa, synthetic construct
  REGION 1..245: note = KIR2DL2 (P43627) SP+PP+ECD
MSLMVVSMACVGFFLLQGAWPHEGVHRKPSLLAHPGRLVKSEETVILQCWSDVRFEHFLLHREGKFKDTLHLIGEHHDGVSKANFSIGPMMQDLAGTYRCYGSVTHSPYQLSAPSDPLDIVITGLYEKPSLSAQPGPTVLAGESVTLSCSSRSSYDMYHLSREGEAHECRFSAGPKVNGTFQADFPLGPATHGGTYRCFGSFRDSPYEWSNSSDPLLVSVIGNPSNSWPSPTEPSSKTGNPRHLH

SEQ ID NO: 2610 - protein, 245 aa, synthetic construct
  REGION 1..245: note = KIR2DL3 (P43628) SP+PP+ECD
MSLMVVSMVCVGFFLLQGAWPHEGVHRKPSLLAHPGPLVKSEETVILQCWSDVRFQHFLLHREGKFKDTLHLIGEHHDGVSKANFSIGPMMQDLAGTYRCYGSVTHSPYQLSAPSDPLDIVITGLYEKPSLSAQPGPTVLAGESVTLSCSSRSSYDMYHLSREGEAHERRFSAGPKVNGTFQADFPLGPATHGGTYRCFGSFRDSPYEWSNSSDPLLVSVTGNPSNSWPSPTEPSSETGNPRHLH

SEQ ID NO: 2611 - protein, 242 aa, synthetic construct
  REGION 1..242: note = KIR2DL4 (Q99706) SP+PP+ECD
MSMSPTVIILACLGFFLDQSVWAHVGGQDKPFCSAWPSAVVPQGGHVTLRCHYRRGFNIFTLYKKDGVPVPELYNRIFWNSFLISPVTPAHAGTYRCRGFHPHSPTEWSAPSNPLVIMVTGLYEKPSLTARPGPTVRAGENVTLSCSSQSSFDIYHLSREGEAHELRLPAVPSINGTFQADFPLGPATHGETYRCFGSFHGSPYEWSDPSDPLPVSVTGNPSSSWPSPTEPSFKTGIARHLH

SEQ ID NO: 2612 - protein, 238 aa, synthetic construct
  REGION 1..238: note = KIR2DL5A (Q8N109) SP+PP+ECD
MSLMVISMACVGFFLLQGAWTHEGGQDKPLLSAWPSAVVPRGGHVTLLCRSRLGFTIFSLYKEDGVPVPELYNKIFWKSILMGPVTPAHAGTYRCRGSHPRSPIEWSAPSNPLVIVVTGLFGKPSLSAQPGPTVRTGENVTLSCSSRSSFDMYHLSREGRAHEPRLPAVPSVNGTFQADFPLGPATHGGTYTCFGSLHDSPYEWSDPSDPLLVSVTGNSSSSSSSPTEPSSKTGIRRH

SEQ ID NO: 2613 - protein, 238 aa, synthetic construct
  REGION 1..238: note = KIR2DL5B (Q8NHK3) SP+PP+ECD
MSLMVVSMACVGFFLLQGAWTHEGGQDKPLLSAWPSAVVPRGGHVTLLCRSRLGFTIFSLYKEDGVPVPELYNKIFWKSILMGPVTPAHAGTYRCRGSHPRSPIEWSAPSNPLVIVVTGLFGKPSLSAQPGPTVRTGENVTLSCSSRSSFDMYHLSREGRAHEPRLPAVPSVDGTFQADFPLGPATHGGTYTCFSSLHDSPYEWSDPSDPLLVSVTGNSSSSSSSPTEPSSKTGIRRH

SEQ ID NO: 2614 - protein, 245 aa, synthetic construct
  REGION 1..245: note = KIR2DS1 (Q14954) SP+PP+ECD
MSLTVVSMACVGFFLLQGAWPHEGVHRKPSLLAHPGRLVKSEETVILQCWSDVMFEHFLLHREGMFNDTLRLIGEHHDGVSKANFSISRMKQDLAGTYRCYGSVTHSPYQLSAPSDPLDIVIIGLYEKPSLSAQPGPTVLAGENVTLSCSSRSSYDMYHLSREGEAHERRLPAGTKVNGTFQANFPLGPATHGGTYRCFGSFRDSPYEWSKSSDPLLVSVTGNPSNSWPSPTEPSSETGNPRHLH

SEQ ID NO: 2615 - protein, 245 aa, synthetic construct
  REGION 1..245: note = KIR2DS2 (P43631) SP+PP+ECD
MSLMVVSMACVGFFLLQGAWPHEGVHRKPSLLAHPGPLVKSEETVILQCWSDVRFEHFLLHREGKYKDTLHLIGEHHDGVSKANFSIGPMMQDLAGTYRCYGSVTHSPYQLSAPSDPLDIVITGLYEKPSLSAQPGPTVLAGESVTLSCSSRSSYDMYHLSREGEAHERRFSAGPKVNGTFQADFPLGPATHGGTYRCFGSFRDSPYEWSNSSDPLLVSVTGNPSNSWPSPTEPSSKTGNPRHLH

SEQ ID NO: 2616 - protein, 245 aa, synthetic construct
  REGION 1..245: note = KIR2DS3 (Q14952) SP+PP+ECD
MSLMVISMACVGFFWLQGAWPHEGFRRKPSLLAHPGRLVKSEETVILQCWSDVMFEHFLLHREGTFNDTLRLIGEHIDGVSKANFSIGRMRQDLAGTYRCYGSVPHSPYQFSAPSDPLDIVITGLYEKPSLSAQPGPTVLAGESVTLSCSSWSSYDMYHLSTEGEAHERRFSAGPKVNGTFQADFPLGPATQGGTYRCFGSFHDSPYEWSKSSDPLLVSVTGNPSNSWPSPTEPSSKTGNPRHLH

SEQ ID NO: 2617 - protein, 245 aa, synthetic construct
  REGION 1..245: note = KIR2DS4 (P43632) SP+PP+ECD
MSLMVIIMACVGFFLLQGAWPQEGVHRKPSFLALPGHLVKSEETVILQCWSDVMFEHFLLHREGKFNNTLHLIGEHHDGVSKANFSIGPMMPVLAGTYRCYGSVPHSPYQLSAPSDPLDMVIIGLYEKPSLSAQPGPTVQAGENVTLSCSSRSSYDMYHLSREGEAHERRLPAVRSINGTFQADFPLGPATHGGTYRCFGSFRDAPYEWSNSSDPLLVSVTGNPSNSWPSPTEPSSKTGNPRHLH

SEQ ID NO: 2618 - protein, 245 aa, synthetic construct
  REGION 1..245: note = KIR2DS5 (Q14953) SP+PP+ECD
MSLMVISMACVAFFLLQGAWPHEGFRRKPSLLAHPGPLVKSEETVILQCWSDVMFEHFLLHREGTFNHTLRLIGEHIDGVSKGNFSIGRMTQDLAGTYRCYGSVTHSPYQLSAPSDPLDIVITGLYEKPSLSAQPGPTVLAGESVTLSCSSRSSYDMYHLSREGEAHERRLPAGPKVNRTFQADFPLDPATHGGTYRCFGSFRDSPYEWSKSSDPLLVSVTGNSSNSWPSPTEPSSETGNPRHLH

SEQ ID NO: 2619 - protein, 340 aa, synthetic construct
  REGION 1..340: note = KIR3DL1 (P43629) SP+PP+ECD
MSLMVVSMACVGLFLVQRAGPHMGGQDKPFLSAWPSAVVPRGGHVTLRCHYRHRFNNFMLYKEDRIHIPIFHGRIFQESFNMSPVTTAHAGNYTCRGSHPHSPTGWSAPSNPVVIMVTGNHRKPSLLAHPGPLVKSGERVILQCWSDIMFEHFFLHKEGISKDPSRLVGQIHDGVSKANFSIGPMMLALAGTYRCYGSVTHTPYQLSAPSDPLDIVVTGPYEKPSLSAQPGPKVQAGESVTLSCSSRSSYDMYHLSREGGAHERRLPAVRKVNRTFQADFPLGPATHGGTYRCFGSFRHSPYEWSDPSDPLLVSVTGNPSSSWPSPTEPSSKSGNPRHLH

SEQ ID NO: 2620 - protein, 340 aa, synthetic construct
  REGION 1..340: note = KIR3DL2 (P43630) SP+PP+ECD
MSLTVVSMACVGFFLLQGAWPLMGGQDKPFLSARPSTVVPRGGHVALQCHYRRGFNNFMLYKEDRSHVPIFHGRIFQESFIMGPVTPAHAGTYRCRGSRPHSLTGWSAPSNPLVIMVTGNHRKPSLLAHPGPLLKSGETVILQCWSDVMFEHFFLHREGISEDPSRLVGQIHDGVSKANFSIGPLMPVLAGTYRCYGSVPHSPYQLSAPSDPLDIVITGLYEKPSLSAQPGPTVQAGENVTLSCSSWSSYDIYHLSREGEAHERRLRAVPKVNRTFQADFPLGPATHGGTYRCFGSFRALPCVWSNSSDPLLVSVTGNPSSSWPSPTEPSSKSGICRHLH

SEQ ID NO: 2621 - protein, 322 aa, synthetic construct
  REGION 1..322: note = KIR3DL3 (Q8N743) SP+PP+ECD
MSLMVVSMACVGFFLLEGPWPHVGGQDKPFLSAWPGTVVSEGQHVTLQCRSRLGFNEFSLSKEDGMPVPELYNRIFRNSFLMGPVTPAHAGTYRCCSSHPHSPTGWSAPSNPVVIMVTGVHRKPSLLAHPGPLVKSGETVILQCWSDVRFERFLLHREGITEDPLRLVGQLHDAGSQVNYSMGPMTPALAGTYRCFGSVTHLPYELSAPSDPLDIVVVGLYGKPSLSAQPGPTVQAGENVTLSCSSRSLFDIYHLSREAEAGELRLTAVLRVNGTFQANFPLGPVTHGGNYRCFGSFRALPHAWSDPSDPLPVSVTGNSRHL

SEQ ID NO: 2622 - protein, 340 aa, synthetic construct
  REGION 1..340: note = KIR3DS1 (Q14943) SP+PP+ECD
MLLMVVSMACVGLFLVQRAGPHMGGQDKPFLSAWPSAVVPRGGHVTLRCHYRHRFNNFMLYKEDRIHVPIFHGRIFQEGFNMSPVTTAHAGNYTCRGSHPHSPTGWSAPSNPMVIMVTGNHRKPSLLAHPGPLVKSGERVILQCWSDIMFEHFFLHREWISKDPSRLVGQIHDGVSKANFSIGSMMRALAGTYRCYGSVTHTPYQLSAPSDPLDIVVTGLYEKPSLSAQPGPKVQAGESVTLSCSSRSSYDMYHLSREGGAHERRLPAVRKVNRTFQADFPLGPATHGGTYRCFGSFRHSPYEWSDPSDPLLVSVTGNPSSSWPSPTEPSSKSGNLRHLH

SEQ ID NO: 2623 - protein, 499 aa, synthetic construct
  REGION 1..499: note = KIRREL (Q96J84) SP+PP+ECD
MLSLLVWILTLSDTFSQGTQTRFSQEPADQTVVAGQRAVLPCVLLNYSGIVQWTKDGLALGMGQGLKAWPRYRVVGSADAGQYNLEITDAELSDDASYECQATEAALRSRRAKLTVLIPPEDTRIDGGPVILLQAGTPHNLTCRAFNAKPAATIIWFRDGTQQEGAVASTELLKDGKRETTVSQLLINPTDLDIGRVFTCRSMNEAIPSGKETSIELDVHHPPTVTLSIEPQTVQEGERVVFTCQATANPEILGYRWAKGGFLIEDAHESRYETNVDYSFFTEPVSCEVHNKVGSTNVSTLVNVHFAPRIVVDPKPTTTDIGSDVTLTCVWVGNPPLTLTWTKKDSNMVLSNSNQLLLKSVTQADAGTYTCRAIVPRIGVAEREVPLYVNGPPIISSEAVQYAVRGDGGKVECFIGSTPPPDRIAWAWKENFLEVGTLERYTVERTNSGSGVLSTLTINNVMEADFQTHYNCTAWNSFGPGTAIIQLEEREVLPVGIIA

SEQ ID NO: 2624 - protein, 510 aa, synthetic construct
  REGION 1..510: note = KIRREL2 (Q6UWL6) SP+PP+ECD
MLRMRVPALLVLLFCFRGRAGPSPHFLQQPEDLVVLLGEEARLPCALGAYWGLVQWTKSGLALGGQRDLPGWSRYWISGNAANGQHDLHIRPVELEDEASYECQATQAGLRSRPAQLHVLVPPEAPQVLGGPSVSLVAGVPANLTCRSRGDARPTPELLWFRDGVLLDGATFHQTLLKEGTPGSVESTLTLTPFSHDDGATFVCRARSQALPTGRDTAITLSLQYPPEVTLSASPHTVQEGEKVIFLCQATAQPPVTGYRWAKGGSPVLGARGPRLEVVADASFLTEPVSCEVSNAVGSANRSTALDVLFGPILQAKPEPVSVDVGEDASFSCAWRGNPLPRVTWTRRGGAQVLGSGATLRLPSVGPEDAGDYVCRAEAGLSGLRGGAAEARLTVNAPPVVTALHSAPAFLRGPARLQCLVFASPAPDAVVWSWDEGFLEAGSQGRFLVETFPAPESRGGLGPGLISVLHISGTQESDFSRSFNCSARNRLGEGGAQASLGRRDLLPTVR

SEQ ID NO: 2625 - protein, 535 aa, synthetic construct
  REGION 1..535: note = KIRREL3 (Q8IZU9) SP+PP+ECD
MKPFQLDLLFVCFFLFSQELGLQKRGCCLVLGYMAKDKFRRMNEGQVYSFSQQPQDQVVVSGQPVTLLCAIPEYDGFVLWIKDGLALGVGRDLSSYPQYLVVGNHLSGEHHLKILRAELQDDAVYECQAIQAAIRSRPARLTVLVPPDDPVILGGPVISLRAGDPLNLTCHADNAKPAASIIWLRKGEVINGATYSKTLLRDGKRESIVSTLFISPGDVENGQSIVCRATNKAIPGGKETSVTIDIQHPPLVNLSVEPQPVLEDNVVTFHCSAKANPAVTQYRWAKRGQIIKEASGEVYRTTVDYTYFSEPVSCEVTNALGSTNLSRTVDVYFGPRMTTEPQSLLVDLGSDAIFSCAWTGNPSLTIVWMKRGSGVVLSNEKTLTLKSVRQEDAGKYVCRAVVPRVGAGEREVTLTVNGPPIISSTQTQHALHGEKGQIKCFIRSTPPPDRIAWSWKENVLESGTSGRYTVETISTEEGVISTLTISNIVRADFQTIYNCTAWNSFGSDTEIIRLKEQGSEMKSGAGLEAESVPMA

SEQ ID NO: 2626 - protein, 524 aa, synthetic construct
  REGION 1..524: note = KIT (P10721) SP+PP+ECD
MRGARGAWDFLCVLLLLLRVQTGSSQPSVSPGEPSPPSIHPGKSDLIVRVGDEIRLLCTDPGFVKWTFEILDETNENKQNEWITEKAEATNTGKYTCTNKHGLSNSIYVFVRDPAKLFLVDRSLYGKEDNDTLVRCPLTDPEVTNYSLKGCQGKPLPKDLRFIPDPKAGIMIKSVKRAYHRLCLHCSVDQEGKSVLSEKFILKVRPAFKAVPVVSVSKASYLLREGEEFTVTCTIKDVSSSVYSTWKRENSQTKLQEKYNSWHHGDFNYERQATLTISSARVNDSGVFMCYANNTFGSANVTTTLEVVDKGFINIFPMINTTVFVNDGENVDLIVEYEAFPKPEHQQWIYMNRTFTDKWEDYPKSENESNIRYVSELHLTRLKGTEGGTYTFLVSNSDVNAAIAFNVYVNTKPEILTYDRLVNGMLQCVAAGFPEPTIDWYFCPGTEQRCSASVLPVDVQTLNSSGPPFGKLVVQSSIDSSAFKHNGTVECKAYNDVGKTSAYFNFAFKGNNKEQIHPHTLFTP

SEQ ID NO: 2627 - protein, 214 aa, synthetic construct
  REGION 1..214: note = KITLG (P21583) SP+PP+ECD
MKKTQTWILTCIYLQLLLFNPLVKTEGICRNRVTNNVKDVTKLVANLPKDYMITLKYVPGMDVLPSHCWISEMVVQLSDSLTDLLDKFSNISEGLSNYSIIDKLVNIVDDLVECVKENSSKDLKKSFKSPEPRLFTPEEFFRIFNRSIDAFKDFVVASETSDCVVSSTLSPEKDSRVSVTKPFMLPPVAASSLRNDSSSSNRKAKNPPGDSSLH

SEQ ID NO: 2628 - protein, 981 aa, synthetic construct
  REGION 1..981: note = KL (Q9UEF7) SP+PP+ECD
MPASAPPRRPRPPPPSLSLLLVLLGLGGRRLRAEPGDGAQTWARFSRPPAPEAAGLFQGTFPDGFLWAVGSAAYQTEGGWQQHGKGASIWDTFTHHPLAPPGDSRNASLPLGAPSPLQPATGDVASDSYNNVFRDTEALRELGVTHYRFSISWARVLPNGSAGVPNREGLRYYRRLLERLRELGVQPVVTLYHWDLPQRLQDAYGGWANRALADHFRDYAELCFRHFGGQVKYWITIDNPYVVAWHGYATGRLAPGIRGSPRLGYLVAHNLLLAHAKVWHLYNTSFRPTQGGQVSIALSSHWINPRRMTDHSIKECQKSLDFVLGWFAKPVFIDGDYPESMKNNLSSILPDFTESEKKFIKGTADFFALCFGPTLSFQLLDPHMKFRQLESPNLRQLLSWIDLEFNHPQIFIVENGWFVSGTTKRDDAKYMYYLKKFIMETLKAIKLDGVDVIGYTAWSLMDGFEWHRGYSIRRGLFYVDFLSQDKMLLPKSSALFYQKLIEKNGFPPLPENQPLEGTFPCDFAWGVVDNYIQVDTTLSQFTDLNVYLWDVHHSKRLIKVDGVVTKKRKSYCVDFAAIQPQIALLQEMHVTHFRFSLDWALILPLGNQSQVNHTILQYYRCMASELVRVNITPVVALWQPMAPNQGLPRLLARQGAWENPYTALAFAEYARLCFQELGHHVKLWITMNEPYTRNMTYSAGHNLLKAHALAWHVYNEKFRHAQNGKISIALQADWIEPACPFSQKDKEVAERVLEFDIGWLAEPIFGSGDYPWVMRDWLNQRNNFLLPYFTEDEKKLIQGTFDFLALSHYTTILVDSEKEDPIKYNDYLEVQEMTDITWLNSPSQVAVVPWGLRKVLNWLKFKYGDLPMYIISNGIDDGLHAEDDQLRVYYMQNYINEALKAHILDGINLCGYFAYSFNDRTAPRFGLYRYAADQFEPKASMKHYRKIIDSNGFPGPETLERFCPEEFTVCTECSFFHTRKS

SEQ ID NO: 2629 - protein, 391 aa, synthetic construct
  REGION 1..391: note = KREMEN1 (Q96MU8) SP+PP+ECD
MAPPAARLALLSAAALTLARPAPSPGLGPECFTANGADYRGTQNWTALQGGKPCLFWNETFQHPYNTLKYPNGEGGLGEHNYCRNPDGDVSPWCYVAEHEDGVYWKYCEIPACQMPGNLGCYKDHGNPPPLTGTSKTSNKLTIQTCISFCRSQRFKFAGMESGYACFCGNNPDYWKYGEAASTECNSVCFGDHTQPCGGDGRIILFDTLVGACGGNYSAMSSVVYSPDFPDTYATGRVCYWTIRVPGASHIHFSFPLFDIRDSADMVELLDGYTHRVLARFHGRSRPPLSFNVSLDFVILYFFSDRINQAQGFAVLYQAVKEELPQERPAVNQTVAEVITEQANLSVSAARSSKVLYVITTSPSHPPQTVPGSNSWAPPMGAGSHRVEGWT

SEQ ID NO: 2630 - protein, 364 aa, synthetic construct
  REGION 1..364: note = KREMEN2 (Q8NCW0) SP+PP+ECD
MGTQALQGFLFLLFLPLLQPRGASAGSLHSPGLSECFQVNGADYRGHQNRTGPRGAGRPCLFWDQTQQHSYSSASDPHGRWGLGAHNFCRNPDGDVQPWCYVAETEEGIYWRYCDIPSCHMPGYLGCFVDSGAPPALSGPSGTSTKLTVQVCLRFCRMKGYQLAGVEAGYACFCGSESDLARGRLAPATDCDQICFGHPGQLCGGDGRLGVYEVSVGSCQGNWTAPQGVIYSPDFPDEYGPDRNCSWALGPPGAALELTFRLFELADPRDRLELRDAASGSLLRAFDGARPPPSGPLRLGTAALLLTFRSDARGHAQGFALTYRGLQDAAEDPEAPEGSAQTPAAPLDGANVSCSPRPGAPPAA

SEQ ID NO: 2631 - protein, 1120 aa, synthetic construct
  REGION 1..1120: note = L1CAM (P32004) SP+PP+ECD
MVVALRYVWPLLLCSPCLLIQIPEEYEGHHVMEPPVITEQSPRRLVVFPTDDISLKCEASGKPEVQFRWTRDGVHFKPKEELGVTVYQSPHSGSFTITGNNSNFAQRFQGIYRCFASNKLGTAMSHEIRLMAEGAPKWPKETVKPVEVEEGESVVLPCNPPPSAEPLRIYWMNSKILHIKQDERVTMGQNGNLYFANVLTSDNHSDYICHAHFPGTRTIIQKEPIDLRVKATNSMIDRKPRLLFPTNSSSHLVALQGQPLVLECIAEGFPTPTIKWLRPSGPMPADRVTYQNHNKTLQLLKVGEEDDGEYRCLAENSLGSARHAYYVTVEAAPYWLHKPQSHLYGPGETARLDCQVQGRPQPEVTWRINGIPVEELAKDQKYRIQRGALILSNVQPSDTMVTQCEARNRHGLLLANAYIYVVQLPAKILTADNQTYMAVQGSTAYLLCKAFGAPVPSVQWLDEDGTTVLQDERFFPYANGTLGIRDLQANDTGRYFCLAANDQNNVTIMANLKVKDATQITQGPRSTIEKKGSRVTFTCQASFDPSLQPSITWRGDGRDLQELGDSDKYFIEDGRLVIHSLDYSDQGNYSCVASTELDVVESRAQLLVVGSPGPVPRLVLSDLHLLTQSQVRVSWSPAEDHNAPIEKYDIEFEDKEMAPEKWYSLGKVPGNQTSTTLKLSPYVHYTFRVTAINKYGPGEPSPVSETVVTPEAAPEKNPVDVKGEGNETTNMVITWKPLRWMDWNAPQVQYRVQWRPQGTRGPWQEQIVSDPFLVVSNTSTFVPYEIKVQAVNSQGKGPEPQVTIGYSGEDYPQAIPELEGIEILNSSAVLVKWRPVDLAQVKGHLRGYNVTYWREGSQRKHSKRHIHKDHVVVPANTTSVILSGLRPYSSYHLEVQAFNGRGSGPASEFTFSTPEGVPGHPEALHLECQSNTSLLLRWQPPLSHNGVLTGYVLSYHPLDEGGKGQLSFNLRDPELRTHNLTDLSPHLRYRFQLQATTKEGPGEAIVREGGTMALSGISDFGNISATAGENYSVVSWVPKEGQCNFRFHILFKALGEEKGGASLSPQYVSYNQSSYTQWDLQPDTDYEIHLFKERMFRHQMAVKTNGTGRVRLPPAGFATE

SEQ ID NO: 2632 - protein, 450 aa, synthetic construct
  REGION 1..450: note = LAG3 (P18627) SP+PP+ECD
MWEAQFLGLLFLQPLWVAPVKPLQPGAEVPVVWAQEGAPAQLPCSPTIPLQDLSLLRRAGVTWQHQPDSGPPAAAPGHPLAPGPHPAAPSSWGPRPRRYTVLSVGPGGLRSGRLPLQPRVQLDERGRQRGDFSLWLRPARRADAGEYRAAVHLRDRALSCRLRLRLGQASMTASPPGSLRASDWVILNCSFSRPDRPASVHWFRNRGQGRVPVRESPHHHLAESFLFLPQVSPMDSGPWGCILTYRDGFNVSIMYNLTVLGLEPPTPLTVYAGAGSRVGLPCRLPAGVGTRSFLTAKWTPPGGGPDLLVTGDNGDFTLRLEDVSQAQAGTYTCHIHLQEQQLNATVTLAIITVTPKSFGSPGSLGKLLCEVTPVSGQERFVWSSLDTPSQRSFSGPWLEAQEAQLLSQPWQCQLYQGERLLGAAVYFTELSSPGAQRSGRAPGALPAGHL

SEQ ID NO: 2633 - protein, 165 aa, synthetic construct
  REGION 1..165: note = LAIR1 (Q6GTX8) SP+PP+ECD
MSPHPTALLGLVLCLAQTIHTQEEDLPRPSISAEPGTVIPLGSHVTFVCRGPVGVQTFRLERESRSTYNDTEDVSQASPSESEARFRIDSVSEGNAGPYRCIYYKPPKWSEQSDYLELLVKETSGGPDSPDTEPGSSAGPTQRPSDNSHNEHAPASQGLKAEHLY

SEQ ID NO: 2634 - protein, 382 aa, synthetic construct
  REGION 1..382: note = LAMP1 (P11279) SP+PP+ECD
MAAPGSARRPLLLLLLLLLLGLMHCASAAMFMVKNGNGTACIMANFSAAFSVNYDTKSGPKNMTFDLPSDATVVLNRSSCGKENTSDPSLVIAFGRGHTLTLNFTRNATRYSVQLMSFVYNLSDTHLFPNASSKEIKTVESITDIRADIDKKYRCVSGTQVHMNNVTVTLHDATIQAYLSNSSFSRGETRCEQDRPSPTTAPPAPPSPSPSPVPKSPSVDKYNVSGTNGTCLLASMGLQLNLTYERKDNTTVTRLLNINPNKTSASGSCGAHLVTLELHSEGTTVLLFQFGMNASSSRFFLQGIQLNTILPDARDPAFKAANGSLRALQATVGNSYKCNAEEHVRVTKAFSVNIFKVWVQAFKVEGGQFGSVEECLLDENSM

SEQ ID NO: 2635 - protein, 375 aa, synthetic construct
  REGION 1..375: note = LAMP2 (P13473) SP+PP+ECD
MVCFRLFPVPGSGLVLVCLVLGAVRSYALELNLTDSENATCLYAKWQMNFTVRYETTNKTYKTVTISDHGTVTYNGSICGDDQNGPKIAVQFGPGFSWIANFTKAASTYSIDSVSFSYNTGDNTTFPDAEDKGILTVDELLAIRIPLNDLFRCNSLSTLEKNDVVQHYWDVLVQAFVQNGTVSTNEFLCDKDKTSTVAPTIHTTVPSPTTTPTPKEKPEAGTYSVNNGNDTCLLATMGLQLNITQDKVASVININPNTTHSTGSCRSHTALLRLNSSTIKYLDFVFAVKNENRFYLKEVNISMYLVNGSVFSIANNNLSYWDAPLGSSYMCNKEQTVSVSGAFQINTFDLRVQPFNVTQGKYSTAQDCSADDDNF

SEQ ID NO: 2636 - protein, 381 aa, synthetic construct
  REGION 1..381: note = LAMP3 (Q9UQV4) SP+PP+ECD
MPRQLSAAAALFASLAVILHDGSQMRAKAFPETRDYSQPTAAATVQDIKKPVQQPAKQAPHQTLAARFMDGHITFQTAATVKIPTTTPATTKNTATTSPITYTLVTTQATPNNSHTAPPVTEVTVGPSLAPYSLPPTITPPAHTTGTSSSTVSHTTGNTTQPSNQTTLPATLSIALHKSTTGQKPVQPTHAPGTTAAAHNTTRTAAPASTVPGPTLAPQPSSVKTGIYQVLNGSRLCIKAEMGIQLIVQDKESVFSPRRYFNIDPNATQASGNCGTRKSNLLLNFQGGFVNLTFTKDEESYYISEVGAYLTVSDPETIYQGIKHAVVMFQTAVGHSFKCVSEQSLQLSAHLQVKTTDVQLQAFDFEDDHFGNVDECSSDYT

SEQ ID NO: 2637 - protein, 235 aa, synthetic construct
  REGION 1..235: note = LAMP5 (Q9UJQ1) SP+PP+ECD
MDLQGRGVPSIDRLRVLLMLFHTMAQIMAEQEVENLSGLSTNPEKDIFVVRENGTTCLMAEFAAKFIVPYDVWASNYVDLITEQADIALTRGAEVKGRCGHSQSELQVFWVDRAYALKMLFVKESHNMSKGPEATWRLSKVQFVYDSSEKTHFKDAVSAGKHTANSHHLSALVTPAGKSYECQAQQTISLASSDPQKTVTMILSAVHIQPFDIISDFVFSEEHKCPVDEREQLEE

SEQ ID NO: 2638 - protein, 235 aa, synthetic construct
  REGION 1..235: note = LAYN (Q6UX15) SP+PP+ECD
MRPGTALQAVLLAVLLVGLRAATGRLLSASDLDLRGGQPVCRGGTQRPCYKVIYFHDTSRRLNFEEAKEACRRDGGQLVSIESEDEQKLIEKFIENLLPSDGDFWIGLRRREEKQSNSTACQDLYAWTDGSISQFRNWYVDEPSCGSEVCVVMYHQPSAPAGIGGPYMFQWNDDRCNMKNNFICKYSDEKPAVPSREAEGEETELTTPVLPEETQEEDAKKTFKESREAALNLAY

SEQ ID NO: 2639 - protein, 2731 aa, synthetic construct
  REGION 1..2731: note = LCT (P09848) SP+PP+ECD
MELSWHVVFIALLSFSCWGSDWESDRNFISTAGPLTNDLLHNLSGLLGDQSSNFVAGDKDMYVCHQPLPTFLPEYFSSLHASQITHYKVFLSWAQLLPAGSTQNPDEKTVQCYRRLLKALKTARLQPMVILHHQTLPASTLRRTEAFADLFADYATFAFHSFGDLVGIWFTFSDLEEVIKELPHQESRASQLQTLSDAHRKAYEIYHESYAFQGGKLSVVLRAEDIPELLLEPPISALAQDTVDFLSLDLSYECQNEASLRQKLSKLQTIEPKVKVFIFNLKLPDCPSTMKNPASLLFSLFEAINKDQVLTIGFDINEFLSCSSSSKKSMSCSLTGSLALQPDQQQDHETTDSSPASAYQRIWEAFANQSRAERDAFLQDTFPEGFLWGASTGAFNVEGGWAEGGRGVSIWDPRRPLNTTEGQATLEVASDSYHKVASDVALLCGLRAQVYKFSISWSRIFPMGHGSSPSLPGVAYYNKLIDRLQDAGIEPMATLFHWDLPQALQDHGGWQNESVVDAFLDYAAFCFSTFGDRVKLWVTFHEPWVMSYAGYGTGQHPPGISDPGVASFKVAHLVLKAHARTWHHYNSHHRPQQQGHVGIVLNSDWAEPLSPERPEDLRASERFLHFMLGWFAHPVFVDGDYPATLRTQIQQMNRQCSHPVAQLPEFTEAEKQLLKGSADFLGLSHYTSRLISNAPQNTCIPSYDTIGGFSQHVNHVWPQTSSSWIRVVPWGIRRLLQFVSLEYTRGKVPIYLAGNGMPIGESENLFDDSLRVDYFNQYINEVLKAIKEDSVDVRSYIARSLIDGFEGPSGYSQRFGLHHVNFSDSSKSRTPRKSAYFFTSIIEKNGFLTKGAKRLLPPNTVNLPSKVRSDWESDRNFISTAGPLTNDLLHNLSGLLGDQSSNFVAGDKDMYVCHQPLPTFLPEYFSSLHASQITHYKVFLSWAQLLPAGSTQNPDEKTVQCYRRLLKALKTARLQPMVILHHQTLPASTLRRTEAFADLFADYATFAFHSFGDLVGIWFTFSDLEEVIKELPHQESRASQLQTLSDAHRKAYEIYHESYAFQGGKLSVVLRAEDIPELLLEPPISALAQDTVDFLSLDLSYECQNEASLRQKLSKLQTIEPKVKVFIFNLKLPDCPSTMKNPASLLFSLFEAINKDQVLTIGFDINEFLSCSSSSKKSMSCSLTGSLALQPDQQQDHETTDSSPASAYQRIWEAFANQSRAERDAFLQDTFPEGFLWGASTGAFNVEGGWAEGGRGVSIWDPRRPLNTTEGQATLEVASDSYHKVASDVALLCGLRAQVYKFSISWSRIFPMGHGSSPSLPGVAYYNKLIDRLQDAGIEPMATLFHWDLPQALQDHGGWQNESVVDAFLDYAAFCFSTFGDRVKLWVTFHEPWVMSYAGYGTGQHPPGISDPGVASFKVAHLVLKAHARTWHHYNSHHRPQQQGHVGIVLNSDWAEPLSPERPEDLRASERFLHFMLGWFAHPVFVDGDYPATLRTQIQQMNRQCSHPVAQLPEFTEAEKQLLKGSADFLGLSHYTSRLISNAPQNTCIPSYDTIGGFSQHVNHVWPQTSSSWIRVVPWGIRRLLQFVSLEYTRGKVPIYLAGNGMPIGESENLFDDSLRVDYFNQYINEVLKAIKEDSVDVRSYIARSLIDGFEGPSGYSQRFGLHHVNFSDSSKSRTPRKSAYFFTSIIEKNGFLTKGAKRLLPPNTVNLPSKVRAFTFPSEVPSKAKVVWEKFSSQPKFERDLFYHGTFRDDFLWGVSSSAYQIEGAWDADGKGPSIWDNFTHTPGSNVKDNATGDIACDSYHQLDADLNMLRALKVKAYRFSISWSRIFPTGRNSSINSHGVDYYNRLINGLVASNIFPMVTLFHWDLPQALQDIGGWENPALIDLFDSYADFCFQTFGDRVKFWMTFNEPMYLAWLGYGSGEFPPGVKDPGWAPYRIAHAVIKAHARVYHTYDEKYRQEQKGVISLSLSTHWAEPKSPGVPRDVEAADRMLQFSLGWFAHPIFRNGDYPDTMKWKVGNRSELQHLATSRLPSFTEEEKRFIRATADVFCLNTYYSRIVQHKTPRLNPPSYEDDQEMAEEEDPSWPSTAMNRAAPWGTRRLLNWIKEEYGDIPIYITENGVGLTNPNTEDTDRIFYHKTYINEALKAYRLDGIDLRGYVAWSLMDNFEWLNGYTVKFGLYHVDFNNTNRPRTARASARYYTEVITNNGMPLAREDEFLYGRFPEGFIWSAASAAYQIEGAWRADGKGLSIWDTFSHTPLRVENDAIGDVACDSYHKIAEDLVTLQNLGVSHYRFSISWSRILPDGTTRYINEAGLNYYVRLIDTLLAASIQPQVTIYHWDLPQTLQDVGGWENETIVQRFKEYADVLFQRLGDKVKFWITLNEPFVIAYQGYGYGTAAPGVSNRPGTAPYIVGHNLIKAHAEAWHLYNDVYRASQGGVISITISSDWAEPRDPSNQEDVEAARRYVQFMGGWFAHPIFKNGDYNEVMKTRIRDRSLAAGLNKSRLPEFTESEKRRINGTYDFFGFNHYTTVLAYNLNYATAISSFDADRGVASIADRSWPDSGSFWLKMTPFGFRRILNWLKEEYNDPPIYVTENGVSQREETDLNDTARIYYLRTYINEALKAVQDKVDLRGYTVWSAMDNFEWATGFSERFGLHFVNYSDPSLPRIPKASAKFYASVVRCNGFPDPATGPHACLHQPDAGPTISPVRQEEVQFLGLMLGTTEAQT

SEQ ID NO: 2640 - protein, 788 aa, synthetic construct
  REGION 1..788: note = LDLR (P01130) SP+PP+ECD
MGPWGWKLRWTVALLLAAAGTAVGDRCERNEFQCQDGKCISYKWVCDGSAECQDGSDESQETCLSVTCKSGDFSCGGRVNRCIPQFWRCDGQVDCDNGSDEQGCPPKTCSQDEFRCHDGKCISRQFVCDSDRDCLDGSDEASCPVLTCGPASFQCNSSTCIPQLWACDNDPDCEDGSDEWPQRCRGLYVFQGDSSPCSAFEFHCLSGECIHSSWRCDGGPDCKDKSDEENCAVATCRPDEFQCSDGNCIHGSRQCDREYDCKDMSDEVGCVNVTLCEGPNKFKCHSGECITLDKVCNMARDCRDWSDEPIKECGTNECLDNNGGCSHVCNDLKIGYECLCPDGFQLVAQRRCEDIDECQDPDTCSQLCVNLEGGYKCQCEEGFQLDPHTKACKAVGSIAYLFFTNRHEVRKMTLDRSEYTSLIPNLRNVVALDTEVASNRIYWSDLSQRMICSTQLDRAHGVSSYDTVISRDIQAPDGLAVDWIHSNIYWTDSVLGTVSVADTKGVKRKTLFRENGSKPRAIVVDPVHGFMYWTDWGTPAKIKKGGLNGVDIYSLVTENIQWPNGITLDLLSGRLYWVDSKLHSISSIDVNGGNRKTILEDEKRLAHPFSLAVFEDKVFWTDIINEAIFSANRLTGSDVNLLAENLLSPEDMVLFHNLTQPRGVNWCERTTLSNGGCQYLCLPAPQINPHSPKFTCACPDGMLLARDMRSCLTEAEAAVATQETSTVRLKVSSTAVRTQHTTTRPVPDTSRLPGATPGLTTVEIVTMSHQALGDVAGRGNEKKPSSVR

SEQ ID NO: 2641 - protein, 173 aa, synthetic construct
  REGION 1..173: note = LDLRAD3 (Q86YD5) SP+PP+ECD
MWLLGPLCLLLSSAAESQLLPGNNFTNECNIPGNFMCSNGRCIPGAWQCDGLPDCFDKSDEKECPKAKSKCGPTFFPCASGIHCIIGRFRCNGFEDCPDGSDEENCTANPLLCSTARYHCKNGLCIDKSFICDGQNNCQDNSDEESCESSQEPGSGQVFVTSENQLVYYPSIT

SEQ ID NO: 2642 - protein, 839 aa, synthetic construct
  REGION 1..839: note = LEPR (P48357) SP+PP+ECD
MICQKFCVVLLHWEFIYVITAFNLSYPITPWRFKLSCMPPNSTYDYFLLPAGLSKNTSNSNGHYETAVEPKFNSSGTHFSNLSKTTFHCCFRSEQDRNCSLCADNIEGKTFVSTVNSLVFQQIDANWNIQCWLKGDLKLFICYVESLFKNLFRNYNYKVHLLYVLPEVLEDSPLVPQKGSFQMVHCNCSVHECCECLVPVPTAKLNDTLLMCLKITSGGVIFQSPLMSVQPINMVKPDPPLGLHMEITDDGNLKISWSSPPLVPFPLQYQVKYSENSTTVIREADKIVSATSLLVDSILPGSSYEVQVRGKRLDGPGIWSDWSTPRVFTTQDVIYFPPKILTSVGSNVSFHCIYKKENKIVPSKEIVWWMNLAEKIPQSQYDVVSDHVSKVTFFNLNETKPRGKFTYDAVYCCNEHECHHRYAELYVIDVNINISCETDGYLTKMTCRWSTSTIQSLAESTLQLRYHRSSLYCSDIPSIHPISEPKDCYLQSDGFYECIFQPIFLLSGYTMWIRINHSLGSLDSPPTCVLPDSVVKPLPPSSVKAEITINIGLLKISWEKPVFPENNLQFQIRYGLSGKEVQWKMYEVYDAKSKSVSLPVPDLCAVYAVQVRCKRLDGLGYWSNWSNPAYTVVMDIKVPMRGPEFWRIINGDTMKKEKNVTLLWKPLMKNDSLCSVQRYVINHHTSCNGTWSEDVGNHTKFTFLWTEQAHTVTVLAINSIGASVANFNLTFSWPMSKVNIVQSLSAYPLNSSCVIVSWILSPSDYKLMYFIIEWKNLNEDGEIKWLRISSSVKKYYIHDHFIPIEKYQFSLYPIFMEGVGKPKIINSFTQDDIEKHQSD

SEQ ID NO: 2643 - protein, 833 aa, synthetic construct
  REGION 1..833: note = LIFR (P42702) SP+PP+ECD
MMDIYVCLKRPSWMVDNKRMRTASNFQWLLSTFILLYLMNQVNSQKKGAPHDLKCVTNNLQVWNCSWKAPSGTGRGTDYEVCIENRSRSCYQLEKTSIKIPALSHGDYEITINSLHDFGSSTSKFTLNEQNVSLIPDTPEILNLSADFSTSTLYLKWNDRGSVFPHRSNVIWEIKVLRKESMELVKLVTHNTTLNGKDTLHHWSWASDMPLECAIHFVEIRCYIDNLHFSGLEEWSDWSPVKNISWIPDSQTKVFPQDKVILVGSDITFCCVSQEKVLSALIGHTNCPLIHLDGENVAIKIRNISVSASSGTNVVFTTEDNIFGTVIFAGYPPDTPQQLNCETHDLKEIICSWNPGRVTALVGPRATSYTLVESFSGKYVRLKRAEAPTNESYQLLFQMLPNQEIYNFTLNAHNPLGRSQSTILVNITEKVYPHTPTSFKVKDINSTAVKLSWHLPGNFAKINFLCEIEIKKSNSVQEQRNVTIKGVENSSYLVALDKLNPYTLYTFRIRCSTETFWKWSKWSNKKQHLTTEASPSKGPDTWREWSSDGKNLIIYWKPLPINEANGKILSYNVSCSSDEETQSLSEIPDPQHKAEIRLDKNDYIISVVAKNSVGSSPPSKIASMEIPNDDLKIEQVVGMGKGILLTWHYDPNMTCDYVIKWCNSSRSEPCLMDWRKVPSNSTETVIESDEFRPGIRYNFFLYGCRNQGYQLLRSMIGYIEELAPIVAPNFTVEDTSADSILVKWEDIPVEELRGFLRGYLFYFGKGERDTSKMRVLESGRSDIKVKNITDISQKTLRIADLQGKTSYHLVLRAYTDGGVGPEKSMYVVTKENS

SEQ ID NO: 2644 - protein, 461 aa, synthetic construct
  REGION 1..461: note = LILRA1 (O75019) SP+PP+ECD
MTPIVTVLICLRLSLGPRTHVQAGTLPKPTLWAEPGSVITQGSPVTLWCQGILETQEYRLYREKKTAPWITRIPQEIVKKGQFPIPSITWEHTGRYRCFYGSHTAGWSEPSDPLELVVTGAYIKPTLSALPSPVVTSGGNVTLHCVSQVAFGSFILCKEGEDEHPQCLNSQPRTHGWSRAIFSVGPVSPSRRWSYRCYAYDSNSPHVWSLPSDLLELLVLGVSKKPSLSVQPGPIVAPGESLTLQCVSDVSYDRFVLYKEGERDFLQLPGPQPQAGLSQANFTLGPVSRSYGGQYRCSGAYNLSSEWSAPSDPLDILIAGQFRGRPFISVHPGPTVASGENVTLLCQSWGPFHTFLLTKAGAADAPLRLRSIHEYPKYQAEFPMSPVTSAHSGTYRCYGSLSSNPYLLSHPSDSLELMVSGAAETLSPPQNKSDSKAGAANTLSPSQNKTASHPQDYTVEN

SEQ ID NO: 2645 - protein, 449 aa, synthetic construct
  REGION 1..449: note = LILRA2 (Q8N149) SP+PP+ECD
MTPILTVLICLGLSLGPRTHVQAGHLPKPTLWAEPGSVIIQGSPVTLRCQGSLQAEEYHLYRENKSASWVRRIQEPGKNGQFPIPSITWEHAGRYHCQYYSHNHSSEYSDPLELVVTGAYSKPTLSALPSPVVTLGGNVTLQCVSQVAFDGFILCKEGEDEHPQRLNSHSHARGWSWAIFSVGPVSPSRRWSYRCYAYDSNSPYVWSLPSDLLELLVPGVSKKPSLSVQPGPMVAPGESLTLQCVSDVGYDRFVLYKEGERDFLQRPGWQPQAGLSQANFTLGPVSPSHGGQYRCYSAHNLSSEWSAPSDPLDILITGQFYDRPSLSVQPVPTVAPGKNVTLLCQSRGQFHTFLLTKEGAGHPPLHLRSEHQAQQNQAEFRMGPVTSAHVGTYRCYSSLSSNPYLLSLPSDPLELVVSEAAETLSPSQNKTDSTTTSLGQHPQDYTVEN

SEQ ID NO: 2646 - protein, 446 aa, synthetic construct
  REGION 1..446: note = LILRA4 (P59901) SP+PP+ECD
MTLILTSLLFFGLSLGPRTRVQAENLPKPILWAEPGPVITWHNPVTIWCQGTLEAQGYRLDKEGNSMSRHILKTLESENKVKLSIPSMMWEHAGRYHCYYQSPAGWSEPSDPLELVVTAYSRPTLSALPSPVVTSGVNVTLRCASRLGLGRFTLIEEGDHRLSWTLNSHQHNHGKFQALFPMGPLTFSNRGTFRCYGYENNTPYVWSEPSDPLQLLVSGVSRKPSLLTLQGPVVTPGENLTLQCGSDVGYIRYTLYKEGADGLPQRPGRQPQAGLSQANFTLSPVSRSYGGQYRCYGAHNVSSEWSAPSDPLDILIAGQISDRPSLSVQPGPTVTSGEKVTLLCQSWDPMFTFLLTKEGAAHPPLRLRSMYGAHKYQAEFPMSPVTSAHAGTYRCYGSRSSNPYLLSHPSEPLELVVSGATETLNPAQKKSDSKTAPHLQDYTVEN

(The sequence listing continues in the following parts.)
